(19) United States
(12) Patent Application Publication
(10) Pub. No.: US 2025/0319185 A1
(43) Pub. Date: Oct. 16, 2025

(54) BCMA-DIRECTED CELLULAR IMMUNOTHERAPY COMPOSITIONS AND METHODS

(71) Applicant: NKARTA, INC., South San Francisco, CA (US)

(72) Inventors: Kanya Lakshmi RAJANGAM, San Francisco, CA (US); James Barnaby TRAGER, Albany, CA (US); Luxuan GUO BUREN, San Francisco, CA (US); Chao GUO, San Francisco, CA (US); Alexandra Leida Liana LAZETIC, San Jose, CA (US); Nitinkumar Lakshmanbhai PATEL, Fremont, CA (US)

(21) Appl. No.: 18/578,164

(22) PCT Filed: Jul. 8, 2022
(86) PCT No.: PCT/US2022/073567

§ 371 Date: Jan. 10, 2024

Related U.S. Application Data
(60) Provisional application No. 63/220,842, filed on Jul. 12, 2021.

(51) Int. Cl. A61K 40/42; A61K 40/11; A61K 40/15; A61K 40/31; C07K 14/725; C07K 16/28

(52) U.S. Cl. CPC A61K 40/4215; A61K 40/11; A61K 40/15; A61K 40/31; C07K 14/7051; C07K 16/2878; C07K 2317/569

(57) ABSTRACT

Provided for herein in several embodiments are anti-BCMA binding moieties. These anti-BCMA binding moieties may be used in BCMA-directed chimeric antigen receptors (CARs). Also disclosed herein are immune cell-based compositions comprising the anti-BCMA binding moieties and BCMA-directed CARs. In several embodiments, the immune-cell based compositions also target an additional tumor marker and/or an additional epitope of BCMA. In several embodiments, the BCMA-directed CAR is expressed in a Natural Killer cell. In several embodiments, combinations of BCMA-CAR-expressing NK cells are administered in conjunction with, for example CAR-expressing NK cells and/or CAR-expressing T cells that are directed to an additional cancer marker and/or an additional epitope of BCMA. Also provided for herein are methods and uses of the chimeric antigen receptors in immunotherapy.

### CROSS REFERENCE TO RELATED APPLICATIONS

[0001] This application claims priority to U.S. Provisional Patent Application No. 63/220,842, filed Jul. 12, 2021, the entire contents of which is incorporated by reference herein.

### INCORPORATION BY REFERENCE OF MATERIAL IN ASCII TEXT FILE

[0002] A Sequence Listing contained in the following ASCII text file being submitted concurrently herewith: File Name: NKT074PR_ST26.xml; created Jul. 8, 2022, which is 13,071,224 bytes in size. This Sequence Listing in electronic format is hereby expressly incorporated by reference in its entirety.

### FIELD

[0003] Some embodiments of the methods and compositions provided herein relate to cellular therapy employing B-Cell Maturation Antigen (BCMA)-targeting chimeric antigen receptors (CARs). Some embodiments relate to one or more of such constructs expressed by NK and/or T cells. Also disclosed herein are antigen binding molecules that bind to BCMA.

### BACKGROUND

[0004] As further knowledge is gained about various cancers and characteristics of a cancerous cell that specifically distinguish that cell from a healthy cell, therapeutics are under development that leverage the distinct features of a cancerous cell. Immunotherapies that employ engineered immune cells are one approach to treating cancers.

### SUMMARY

[0005] Immunotherapy presents a new technological advancement in the treatment of disease, where immune cells are engineered to express certain targeting and/or effector molecules that specifically identify and react to diseased or damaged cells. This represents a promising advance due, at least in part, to the potential for specifically targeting diseased or damaged cells, as opposed to more traditional approaches, such as chemotherapy, where all cells are impacted, and the desired outcome is that sufficient healthy cells survive to mitigate side effects in the patient. One immunotherapy approach is the recombinant expression of chimeric antigen receptors (CARs) in immune cells to achieve the targeted recognition and destruction of aberrant cells of interest, such as cancer.

[0006] In certain cancers, patient responses to immunotherapy are initially robust and positive, but are short-lived. Such profiles are addressed by several embodiments of the cellular immunotherapy compositions provided for herein. For example, in several embodiments, natural killer (NK) cells are engineered to express one or more chimeric antigen receptors (CARs). Due to the enhanced cytotoxicity that the engineered NK cells exhibit, in conjunction with the inherent rapid immune response of NK cells, several embodiments allow for an enhanced initial anti-cancer effect that can substantially reduce, or even eliminate, tumor burden. In several embodiments, such engineered NK cells are particularly important, at least in part due to their reduced immunogenic potential as compared to T cells, because aggressive cancers may not allow enough time for an autologous T cell therapy to be generated.

[0007] An anti-BCMA binding moiety comprising a heavy chain variable region (VH) comprising a HCDR1, HCDR2, and HCDR3, wherein: the HCDR1 comprises a sequence having at least 85%, 90%, 91%, 92%, 93%, 94%, 95%, 96%, 97%, 98%, 99%, or 100% identity to any one of SEQ ID NOs: 114, 105, 107, 129, 104, 106, 108-113, or 115-128, the HCDR2 comprises a sequence having at least 85%, 90%, 91%, 92%, 93%, 94%, 95%, 96%, 97%, 98%, 99%, or 100% identity to any one of SEQ ID NOs: 140, 131, 133, 155, 130, 132, 134-139, or 141-154, and the HCDR3 comprises a sequence having at least 85%, 90%, 91%, 92%, 93%, 94%, 95%, 96%, 97%, 98%, 99%, or 100% identity to any one of SEQ ID NOs: 166, 157, 159, 181, 156, 158, 160-165, or 167-180. In several embodiments, the anti-BMCA binding moiety further comprises a light chain variable region (VL) comprising an LCDR1, LCDR2, and LCDR3, wherein the LCDR1 comprises a sequence having at least 85%, 90%, 91%, 92%, 93%, 94%, 95%, 96%, 97%, 98%, 99%, or 100% identity to any one of SEQ ID NOs: 395, 386, 388, 410, 385, 387, 389-392, or 396-409, the LCDR2 comprises a sequence having at least 85%, 90%, 91%, 92%, 93%, 94%, 95%, 96%, 97%, 98%, 99%, or 100% identity to any one of SEQ ID NOs: 421, 412 414, 436, 411, 413, 415-420, or 422-435, and the LCDR3 comprises a sequence having at least 85%, 90%, 91%, 92%, 93%, 94%, 95%, 96%, 97%, 98%, 99%, or 100% identity to any one of SEQ ID NOs: 447, 438, 440, 462, 437, 439, 441-446, or 448-446. In several embodiments, provided for herein is a BCMA-directed chimeric antigen receptor (CAR) comprising the anti-BCMA binding moiety. Also provided is a population of immune cells engineered to express the anti-BMCA binding moiety, optionally in the form of the BCMA-directed CAR. In several embodiments, provided for herein are methods of treating cancer, such as multiple myeloma, comprising administering to a subject a population of immune cells (e.g., natural killer (NK) cells and/or T cells) engineered to express the BMCA-directed. Uses of the BCMA-directed CAR in the manufacture of a medicament and/or for the treatment of cancer is also provided for herein, in several embodiments.

[0008] In several embodiments, the HCDR1 of the anti-BCMA binding moiety comprises a sequence having at least 85%, 90%, 91%, 92%, 93%, 94%, 95%, 96%, 97%, 98%, 99%, or 100% identity to SEQ ID NO: 114, the HCDR2 comprises a sequence having at least 85%, 90%, 91%, 92%, 93%, 94%, 95%, 96%, 97%, 98%, 99%, or 100% identity to SEQ ID NO: 140, and the HCDR3 comprises a sequence having at least 85%, 90%, 91%, 92%, 93%, 94%, 95%, 96%, 97%, 98%, 99%, or 100% identity to SEQ ID NO: 166.

[0009] In some embodiments, the HCDR1 of the anti-BCMA binding moiety comprises a sequence having at least 85%, 90%, 91%, 92%, 93%, 94%, 95%, 96%, 97%, 98%, 99%, or 100% identity to SEQ ID NO: 105, the HCDR2 comprises a sequence having at least 85%, 90%, 91%, 92%, 93%, 94%, 95%, 96%, 97%, 98%, 99%, or 100% identity to SEQ ID NO: 131, and the HCDR3 comprises a sequence having at least 85%, 90%, 91%, 92%, 93%, 94%, 95%, 96%, 97%, 98%, 99%, or 100% identity to SEQ ID NO: 157.

[0010] In some embodiments, the HCDR1 of the anti-BCMA binding moiety comprises a sequence having at least 85%, 90%, 91%, 92%, 93%, 94%, 95%, 96%, 97%, 98%, 99%, or 100% identity to SEQ ID NO: 107, the HCDR2 comprises a sequence having at least 85%, 90%, 91%, 92%, 93%, 94%, 95%, 96%, 97%, 98%, 99%, or 100% identity to SEQ ID NO: 133, and the HCDR3 comprises a sequence having at least 85%, 90%, 91%, 92%, 93%, 94%, 95%, 96%, 97%, 98%, 99%, or 100% identity to SEQ ID NO: 159.

[0011] In some embodiments, the HCDR1 of the anti-BCMA binding moiety comprises a sequence having at least 85%, 90%, 91%, 92%, 93%, 94%, 95%, 96%, 97%, 98%, 99%, or 100% identity to SEQ ID NO: 129, the HCDR2 comprises a sequence having at least 85%, 90%, 91%, 92%, 93%, 94%, 95%, 96%, 97%, 98%, 99%, or 100% identity to SEQ ID NO: 155, and the HCDR3 comprises a sequence having at least 85%, 90%, 91%, 92%, 93%, 94%, 95%, 96%, 97%, 98%, 99%, or 100% identity to SEQ ID NO: 181.

[0012] In several embodiments, the LCDR1 of the anti-BCMA binding moiety comprises a sequence having at least 85%, 90%, 91%, 92%, 93%, 94%, 95%, 96%, 97%, 98%, 99%, or 100% identity to SEQ ID NO: 395, the LCDR2 comprises a sequence having at least 85%, 90%, 91%, 92%, 93%, 94%, 95%, 96%, 97%, 98%, 99%, or 100% identity to SEQ ID NO: 421, and the LCDR3 comprises a sequence having at least 85%, 90%, 91%, 92%, 93%, 94%, 95%, 96%, 97%, 98%, 99%, or 100% identity to SEQ ID NO: 447.

[0013] In some embodiments, the LCDR1 of the anti-BCMA binding moiety comprises a sequence having at least 85%, 90%, 91%, 92%, 93%, 94%, 95%, 96%, 97%, 98%, 99%, or 100% identity to SEQ ID NO: 386, the LCDR2 comprises a sequence having at least 85%, 90%, 91%, 92%, 93%, 94%, 95%, 96%, 97%, 98%, 99%, or 100% identity to SEQ ID NO: 412, and the LCDR3 comprises a sequence having at least 85%, 90%, 91%, 92%, 93%, 94%, 95%, 96%, 97%, 98%, 99%, or 100% identity to SEQ ID NO: 438.

[0014] In some embodiments, the LCDR1 of the anti-BCMA binding moiety comprises a sequence having at least 85%, 90%, 91%, 92%, 93%, 94%, 95%, 96%, 97%, 98%, 99%, or 100% identity to SEQ ID NO: 388, the LCDR2 comprises a sequence having at least 85%, 90%, 91%, 92%, 93%, 94%, 95%, 96%, 97%, 98%, 99%, or 100% identity to SEQ ID NO: 414, and the LCDR3 comprises a sequence having at least 85%, 90%, 91%, 92%, 93%, 94%, 95%, 96%, 97%, 98%, 99%, or 100% identity to SEQ ID NO: 440.

[0015] In some embodiments, the LCDR1 of the anti-BCMA binding moiety comprises a sequence having at least 85%, 90%, 91%, 92%, 93%, 94%, 95%, 96%, 97%, 98%, 99%, or 100% identity to SEQ ID NO: 410, the LCDR2 comprises a sequence having at least 85%, 90%, 91%, 92%, 93%, 94%, 95%, 96%, 97%, 98%, 99%, or 100% identity to SEQ ID NO: 436, and the LCDR3 comprises a sequence having at least 85%, 90%, 91%, 92%, 93%, 94%, 95%, 96%, 97%, 98%, 99%, or 100% identity to SEQ ID NO: 462.

[0016] In several embodiments, the VH of the anti-BCMA binding moiety comprises a sequence having at least 85%, 90%, 91%, 92%, 93%, 94%, 95%, 96%, 97%, 98%, 99%, or 100% identity to any one of SEQ ID NOs: 270, 261, 263, 285, 260, 262, 263-269, or 271-284. In several embodiments, the VL of the anti-BCMA binding moiety comprises a sequence having at least 85%, 90%, 91%, 92%, 93%, 94%, 95%, 96%, 97%, 98%, 99%, or 100% identity to any one of SEQ ID NOs: 551, 542, 544, 566, 541, 543, 545-550, or 552-565.

[0017] In several embodiments, the HCDR1 of the anti-BCMA binding moiety is encoded by a nucleic acid comprising a sequence having at least 85%, 90%, 91%, 92%, 93%, 94%, 95%, 96%, 97%, 98%, 99%, or 100% identity to any one of SEQ ID NOs: 192, 183, 185, 207, 182, 184, 186-191, or 192-206, the HCDR2 of the anti-BCMA binding moiety is encoded by a nucleic acid comprising a sequence having at least 85%, 90%, 91%, 92%, 93%, 94%, 95%, 96%, 97%, 98%, 99%, or 100% identity to any one of SEQ ID NOs: 218, 209, 211, 233, 208, 210, 212-217, or 219-232; and the HCDR3 of the anti-BCMA binding moiety is encoded by a nucleic acid comprising a sequence having at least 85%, 90%, 91%, 92%, 93%, 94%, 95%, 96%, 97%, 98%, 99%, or 100% identity to any one of SEQ ID NOs: 244, 235, 237, 259, 234, 236, 238-243, or 245-258.

[0018] In several embodiments, the LCDR1 of the anti-BCMA binding moiety is encoded by a nucleic acid comprising a sequence having at least 85%, 90%, 91%, 92%, 93%, 94%, 95%, 96%, 97%, 98%, 99%, or 100% identity to any one of SEQ ID NOs: 473, 464, 466, 488, 463, 465, 467-472, or 474-487, the LCDR2 of the anti-BCMA binding moiety is encoded by a nucleic acid comprising a sequence having at least 85%, 90%, 91%, 92%, 93%, 94%, 95%, 96%, 97%, 98%, 99%, or 100% identity to any one of SEQ ID NOs: 499, 490, 492, 514, 489, 491, 493-498, or 500-513; and the LCDR3 of the anti-BCMA binding moiety is encoded by a nucleic acid comprising a sequence having at least 85%, 90%, 91%, 92%, 93%, 94%, 95%, 96%, 97%, 98%, 99%, or 100% identity to any one of SEQ ID NOs: 525, 516, 518, 540, 515, 517, 519-524, or 526-539.

[0019] In several embodiments, the VH of the anti-BCMA binding moiety is encoded by a nucleic acid comprising a sequence having at least 85%, 90%, 91%, 92%, 93%, 94%, 95%, 96%, 97%, 98%, 99%, or 100% identity to any one of SEQ ID NOs: 296, 287, 289, 311, 286, 288, 290-295, or 297-310. In several embodiments, the VL of the anti-BCMA binding moiety is encoded by a nucleic acid comprising a sequence having at least 85%, 90%, 91%, 92%, 93%, 94%, 95%, 96%, 97%, 98%, 99%, or 100% identity to any one of SEQ ID NOs: 577, 568, 570, 592, 567, 569, 571-576, or 578-591.

[0020] In several embodiments, the VH and VL (when present) are separated by a linker. In several embodiments, the linker of the anti-BCMA binding moiety comprises a sequence at least 85%, 90%, 91%, 92,%, 93%, 94%, 95%, 96%, 97%, 98%, 99%, or 100% identity to SEQ ID NO: 1388. In several embodiments, the VH is N-terminal of the VL. In several embodiments, the anti-BCMA binding moiety comprises a sequence having at least 85%, 90%, 91%, 92%, 93%, 94%, 95%, 96%, 97%, 98%, 99%, or 100% identity to any one of SEQ ID NOs: 603, 594, 596, 618, 593, 595, 597-602, or 604-617. In several embodiments, the anti-BCMA binding moiety is encoded by a nucleic acid comprising a sequence having at least 85%, 90%, 91%, 92%, 93%, 94%, 95%, 96%, 97%, 98%, 99%, or 100% identity to any one of SEQ ID NOs: 629, 620, 622, 644, 619, 621, 623-628, 630-643, or 645-670.

[0021] In several embodiments, the VL (when present) is N-terminal of the VH. In several embodiments, the anti-BCMA binding moiety comprises a sequence having at least 85%, 90%, 91%, 92%, 93%, 94%, 95%, 96%, 97%, 98%, 99%, or 100% identity to any one of SEQ ID NOs: 681, 672, 674, 696, 671, 673, 675,-680, or 682-695. In several embodiments, the anti-BCMA binding moiety is encoded by a nucleic acid comprising a sequence having at least 85%, 90%, 91%, 92%, 93%, 94%, 95%, 96%, 97%, 98%, 99%, or 100% identity to any one of SEQ ID NOs: 707, 698, 700, 722, 697, 699, 701-706, 708-721, or 723-748.

[0022] In several embodiments, the linker of the anti-BCMA binding moiety comprises a sequence having at least 85%, 90%, 91%, 92%, 93%, 94%, 95%, 96%, 97%, 98%, 99%, or 100% identity to of SEQ ID NO: 2260. In several embodiments, the anti-BCMA binding moiety comprises a sequence having at least 85%, 90%, 91%, 92%, 93%, 94%, 95%, 96%, 97%, 98%, 99%, or 100% identity to any one of SEQ ID NOs: 1483, 1474, 1476, 1498, 1473, 1475, 1477-1482, or 1484-1497. In several embodiments, the anti-BCMA binding moiety is encoded by a nucleic acid comprising a sequence having at least 85%, 90%, 91%, 92%, 93%, 94%, 95%, 96%, 97%, 98%, 99%, or 100% identity to any one of SEQ ID NOs: 1509, 1500, 1502, 1524, 1499, 1501, 1503-1508, or 1510-1523.

[0023] Also provided for herein is a BCMA-directed chimeric antigen receptor (CAR) comprising an anti-BCMA binding moiety described herein. Also provided for herein is an immune cell comprising an anti-BCMA binding moiety described herein. In several embodiments, the immune cell is a natural killer (NK) cell or T cell.

[0024] In several embodiments, the CAR further comprises a hinge domain; a transmembrane domain; and an intracellular signaling domain comprising a CD3ζ subdomain. In several embodiments, the intracellular signaling domain of the BCMA-directed CAR further comprises an OX40 subdomain. In several embodiments, the OX40 subdomain comprises a sequence having at least 85%, 90%, 91%, 92%, 93%, 94%, 95%, 96%, 97%, 98%, 99%, or 100% identity to SEQ ID NO: 1394. In several embodiments, the CD3ζ subdomain comprises a sequence having at least 85%, 90%, 91%, 92%, 93%, 94%, 95%, 96%, 97%, 98%, 99%, or 100% identity to SEQ ID NO: 1395. In several embodiments, the transmembrane domain is a CD8 transmembrane domain. In several embodiments, the CD8 transmembrane domain comprises a sequence having at least 85%, 90%, 91%, 92%, 93%, 94%, 95%, 96%, 97%, 98%, 99%, or 100% identity to SEQ ID NO: 1392. In several embodiments, the hinge domain is a CD8 hinge domain. In several embodiments, the CD8 hinge domain comprises a sequence having at least 85%, 90%, 91%, 92%, 93%, 94%, 95%, 96%, 97%, 98%, 99%, or 100% identity to SEQ ID NO: 1389. In several embodiments, CD28-derived hinge, transmembrane, and/or intracellular domains may be used in place of one or more of the CD8 domains.

[0025] In several embodiments, the BCMA-directed CAR comprises a sequence having at least 85%, 90%, 91%, 92%, 93%, 94%, 95%, 96%, 97%, 98%, 99%, or 100% identity to any one of SEQ ID NOs: 3897, 3888, 3890, 3912, 3887, 3889, 3891-3896, or 3898-3911. In several embodiments, the BCMA-directed CAR is encoded by a nucleic acid comprising a sequence having at least 85%, 90%, 91%, 92%, 93%, 94%, 95%, 96%, 97%, 98%, 99%, or 100% identity to any one of SEQ ID NOs: 3923, 3914, 3916, 3938, 3913, 3915, 3917-3922, 3924-3937, or 3939-3964. In several embodiments, the nucleic acid encoding the BCMA-directed CAR further encodes a membrane-bound interleukin 15 (mbIL15) and comprises a sequence having at least 85%, 90%, 91%, 92%, 93%, 94%, 95%, 96%, 97%, 98%, 99%, or 100% identity to any one of SEQ ID NOs: 4001, 3992, 3994, 4016, 3991, 3993, 3995-4000, 4002-4015, or 4017-4042.

[0026] In several embodiments, the BCMA-directed CAR comprises a sequence having at least 85%, 90%, 91%, 92%, 93%, 94%, 95%, 96%, 97%, 98%, 99%, or 100% identity to any one of SEQ ID NOs: 4053, 4044, 4046, 4068, 4043, 4045, 4047-4052, or 4054-4067. In several embodiments, the BCMA-directed CAR is encoded by a nucleic acid comprising a sequence having at least 85%, 90%, 91%, 92%, 93%, 94%, 95%, 96%, 97%, 98%, 99%, or 100% identity to any one of SEQ ID NOs: 4079, 4070, 4072, 4094, 4069, 4071, 4073-4078, 4080-4093, or 4095-4120. In several embodiments, the nucleic acid encoding the BCMA-directed CAR further encodes a membrane-bound interleukin 15 (mbIL15) and comprises a sequence having at least 85%, 90%, 91%, 92%, 93%, 94%, 95%, 96%, 97%, 98%, 99%, or 100% identity to any one of SEQ ID NOs: 4157, 4148, 4150, 4172, 4147, 4149, 4151-4156, 4158-4171, or 4173-4198.

[0027] In several embodiments, the BCMA-directed CAR comprises a sequence having at least 85%, 90%, 91%, 92%, 93%, 94%, 95%, 96%, 97%, 98%, 99%, or 100% identity to any one of SEQ ID NOs: 3869, 3867, 3868, or 3870. In several embodiments, the BCMA-directed CAR is encoded by a nucleic acid comprising a sequence having at least 85%, 90%, 91%, 92%, 93%, 94%, 95%, 96%, 97%, 98%, 99%, or 100% identity to any one of SEQ ID NOs: 3885, 3883, 3884, or 3886. In several embodiments, the nucleic acid encoding the BCMA-directed CAR further encodes a membrane-bound interleukin 15 (mbIL15) and comprises a sequence having at least 85%, 90%, 91%, 92%, 93%, 94%, 95%, 96%, 97%, 98%, 99%, or 100% identity to any one of SEQ ID NOs: 3837, 3835, 3836, or 3839.

[0028] Also provided for herein is a VHH-BCMA-directed chimeric antigen receptor (CAR), the CAR comprising an extracellular anti-BCMA binding moiety, wherein the anti-BCMA binding moiety comprise a heavy chain variable region (VH) comprising a HCDR1, HCDR2, and HCDR3, wherein: the HCDR1 comprises a sequence having at least 85%, 90%, 91%, 92%, 93%, 94%, 95%, 96%, 97%, 98%, 99%, or 100% identity to any one of SEQ ID NOs: 104-129, 1525-1543, or 3117-3139, the HCDR2 comprises a sequence having at least 85%, 90%, 91%, 92%, 93%, 94%, 95%, 96%, 97%, 98%, 99%, or 100% identity to any one of SEQ ID NOs: 130-155, 1544-1562, or 3140-3162; and the HCDR3 comprises a sequence having at least 85%, 90%, 91%, 92%, 93%, 94%, 95%, 96%, 97%, 98%, 99%, or 100% identity to any one of SEQ ID NOs: 156-181, 1563-1581, or 3163-3185; a hinge domain; a transmembrane domain; and an intracellular signaling domain.

[0029] In several embodiments, the anti-BCMA binding moiety further comprises an additional VH comprising an additional HCDR1, HCDR2, and HCDR3, wherein the additional HCDR1 comprises a sequence having at least 85%, 90%, 91%, 92%, 93%, 94%, 95%, 96%, 97%, 98%, 99%, or 100% identity to any one of SEQ ID NOs: 3117-3139, the additional HCDR2 comprises a sequence having at least 85%, 90%, 91%, 92%, 93%, 94%, 95%, 96%, 97%, 98%, 99%, or 100% identity to any one of SEQ ID NOs: 3140-3162; and the additional HCDR3 comprises a sequence having at least 85%, 90%, 91%, 92%, 93%, 94%, 95%, 96%, 97%, 98%, 99%, or 100% identity to any one of SEQ ID NOs: 3163-3185. In several embodiments, other sequences are used for the additional HCDR1, HCDR2, and/or HCDR3.

[0030] In several embodiments, the intracellular signaling domain comprises comprising a co-stimulatory subdomain and a CD3ζ subdomain.

[0031] Also provided for herein is a population of engineered immune cells engineered to express a BCMA-directed chimeric antigen receptor (CAR), the CAR comprising an extracellular anti-BCMA binding moiety comprising a heavy chain variable region (VH) comprising a HCDR1, HCDR2, and HCDR3, wherein the HCDR1 comprises a sequence having at least 85%, 90%, 91%, 92%, 93%, 94%, 95%, 96%, 97%, 98%, 99%, or 100% identity to any one of SEQ ID NOs: 104-129, 1525-1543, or 3117-3139, the HCDR2 comprises a sequence having at least 85%, 90%, 91%, 92%, 93%, 94%, 95%, 96%, 97%, 98%, 99%, or 100% identity to any one of SEQ ID NOs: 130-155, 1544-1562, or 3140-3162; the HCDR3 comprises a sequence having at least 85%, 90%, 91%, 92%, 93%, 94%, 95%, 96%, 97%, 98%, 99%, or 100% identity to any one of SEQ ID NOs: 156-181, 1563-1581, or 3163-3185, and a hinge domain, a transmembrane domain; and an intracellular signaling domain. In several embodiments, the CAR expressed by the immune cells further comprises an additional VH comprising an additional HCDR1, HCDR2, and HCDR3, wherein the additional HCDR1 comprises a sequence having at least 85%, 90%, 91%, 92%, 93%, 94%, 95%, 96%, 97%, 98%, 99%, or 100% identity to any one of SEQ ID NOs: 3117-3139, the additional HCDR2 comprises a sequence having at least 85%, 90%, 91%, 92%, 93%, 94%, 95%, 96%, 97%, 98%, 99%, or 100% identity to any one of SEQ ID NOs: 3140-3162, and the additional HCDR3 comprises a sequence having at least 85%, 90%, 91%, 92%, 93%, 94%, 95%, 96%, 97%, 98%, 99%, or 100% identity to any one of SEQ ID NOs: 3163-3185. Other sequences may be used for the additional HCDR1, HCDR2, and/or HCDR3, depending on the embodiment. In several embodiments, the HCDR1 is encoded by a nucleic sequence having at least 85%, 90%, 91%, 92%, 93%, 94%, 95%, 96%, 97%, 98%, 99%, or 100% identity to any one of SEQ ID NOs: 182-207 or 3186-3208, the HCDR2 is encoded by a nucleic sequence having at least 85%, 90%, 91%, 92%, 93%, 94%, 95%, 96%, 97%, 98%, 99%, or 100% identity to any one of SEQ ID NOs: 208-233 or 3209-3231, and the HCDR3 is encoded by a nucleic sequence having at least 85%, 90%, 91%, 92%, 93%, 94%, 95%, 96%, 97%, 98%, 99%, or 100% identity to any one of SEQ ID NOs: 234-259 or 3232-3254.

[0032] In several embodiments, the CAR further comprises an a light chain variable region (VL) comprising an LCDR1, LCDR2, and LCDR3, wherein the LCDR1 comprises a sequence having at least 85%, 90%, 91%, 92%, 93%, 94%, 95%, 96%, 97%, 98%, 99%, or 100% identity to any one of SEQ ID NOs: 3117-3139, the LCDR2 comprises a sequence having at least 85%, 90%, 91%, 92%, 93%, 94%, 95%, 96%, 97%, 98%, 99%, or 100% identity to any one of SEQ ID NOs: 3140-3162, and the LCDR3 comprises a sequence having at least 85%, 90%, 91%, 92%, 93%, 94%, 95%, 96%, 97%, 98%, 99%, or 100% identity to any one of SEQ ID NOs: 3163-3185.

[0033] Also provided for herein is a population of immune cells engineered to express a BCMA-directed chimeric antigen receptor (CAR), the CAR comprising an anti-BCMA binding moiety comprising a heavy chain variable region (VH) comprising a HCDR1, HCDR2, and HCDR3, and a light chain variable region (VL) comprising an LCDR1, LCDR2, and LCDR3, wherein: the HCDR1 comprises a sequence having at least 85%, 90%, 91%, 92%, 93%, 94%, 95%, 96%, 97%, 98%, 99%, or 100% identity to any one of SEQ ID NOs: 114, 105, 107, 129, 104, 106, 108-113, or 115-128, the HCDR2 comprises a sequence having at least 85%, 90%, 91%, 92%, 93%, 94%, 95%, 96%, 97%, 98%, 99%, or 100% identity to any one of SEQ ID NOs: 140, 131, 133, 155, 130, 132, 134-139, or 141-154, the HCDR3 comprises a sequence having at least 85%, 90%, 91%, 92%, 93%, 94%, 95%, 96%, 97%, 98%, 99%, or 100% identity to any one of SEQ ID NOs: 166, 157, 159, 181, 156, 158, 160-165, or 167-180; the LCDR1 comprises a sequence having at least 85%, 90%, 91%, 92%, 93%, 94%, 95%, 96%, 97%, 98%, 99%, or 100% identity to any one of SEQ ID NOs: 395, 386, 388, 410, 385, 387, 389-392, or 396-409, the LCDR2 comprises a sequence having at least 85%, 90%, 91%, 92%, 93%, 94%, 95%, 96%, 97%, 98%, 99%, or 100% identity to any one of SEQ ID NOs: 421, 412 414, 436, 411, 413, 415-420, or 422-435, the LCDR3 comprises a sequence having at least 85%, 90%, 91%, 92%, 93%, 94%, 95%, 96%, 97%, 98%, 99%, or 100% identity to any one of SEQ ID NOs: 447, 438, 440, 462, 437, 439, 441-446, or 448-446.

[0034] In several embodiments, there is provided a method of treating a cancer, the method comprising administering to a subject in need thereof a population of immune cells comprising a BCMA-directed chimeric antigen receptor (CAR), the CAR comprising a heavy chain variable region (VH) comprising a HCDR1, HCDR2, and HCDR3, and a light chain variable region (VL) comprising an LCDR1, LCDR2, and LCDR3, wherein the HCDR1 comprises a sequence having at least 85%, 90%, 91%, 92%, 93%, 94%, 95%, 96%, 97%, 98%, 99%, or 100% identity to any one of SEQ ID NOs: 114, 105, 107, 129, 104, 106, 108-113, or 115-128, the HCDR2 comprises a sequence having at least 85%, 90%, 91%, 92%, 93%, 94%, 95%, 96%, 97%, 98%, 99%, or 100% identity to any one of SEQ ID NOs: 140, 131, 133, 155, 130, 132, 134-139, or 141-154, the HCDR3 comprises a sequence having at least 85%, 90%, 91%, 92%, 93%, 94%, 95%, 96%, 97%, 98%, 99%, or 100% identity to any one of SEQ ID NOs: 166, 157, 159, 181, 156, 158, 160-165, or 167-180, the LCDR1 comprises a sequence having at least 85%, 90%, 91%, 92%, 93%, 94%, 95%, 96%, 97%, 98%, 99%, or 100% identity to any one of SEQ ID NOs: 395, 386, 388, 410, 385, 387, 389-392, or 396-409, the LCDR2 comprises a sequence having at least 85%, 90%, 91%, 92%, 93%, 94%, 95%, 96%, 97%, 98%, 99%, or 100% identity to any one of SEQ ID NOs: 421, 412 414, 436, 411, 413, 415-420, or 422-435, the LCDR3 comprises a sequence having at least 85%, 90%, 91%, 92%, 93%, 94%, 95%, 96%, 97%, 98%, 99%, or 100% identity to any one of SEQ ID NOs: 447, 438, 440, 462, 437, 439, 441-446, or 448-446 and a hinge domain, a transmembrane domain, and an intracellular signaling domain comprising a CD3ζ subdomain. In several embodiments, the VH comprises a sequence having at least 85%, 90%, 91%, 92%, 93%, 94%, 95%, 96%, 97%, 98%, 99%, or 100% identity to any one of SEQ ID NOs: 270, 261, 263, 285, 260, 262, 263-269, or 271-284 and the VL comprises a sequence having at least 85%, 90%, 91%, 92%, 93%, 94%, 95%, 96%, 97%, 98%, 99%, or 100% identity to any one of SEQ ID NOs: 551, 542, 544, 566, 541, 543, 545-550, or 552-565. In several embodiments, the BCMA-directed CAR comprises a sequence having at least 85%, 90%, 91%, 92%, 93%, 94%, 95%, 96%, 97%, 98%, 99%, or 100% identity to any one of SEQ ID NOs: 3897, 3888, 3890, 3912, 3887, 3889, 3891-3896, or 3898-3911. In several embodiments, the BCMA-directed CAR comprises a sequence having at least 85%, 90%, 91%, 92%, 93%, 94%, 95%, 96%, 97%, 98%, 99%, or 100% identity to any one of SEQ ID NOs: 4053, 4044, 4046, 4068, 4043, 4045, 4047-4052, or 4054-4067. In several embodiments, the BCMA-directed CAR comprises a sequence having at least 85%, 90%, 91%, 92%, 93%, 94%, 95%, 96%, 97%, 98%, 99%, or 100% identity to any one of SEQ ID NOs: 3869, 3867, 3868, or 3870. In several embodiments, the methods (and uses of the population of immune cells is for the treatment of a cancer, such as multiple myeloma.

[0035] Disclosed herein are anti-BCMA binding moieties comprising a heavy chain variable region (VH) comprising a HCDR1, HCDR2, and HCDR3, and a light chain variable region (VL) comprising an LCDR1, LCDR2, and LCDR3. In some embodiments of the anti-BCMA binding moieties, the HCDR1 comprises a sequence having at least 85%, 90%, 91%, 92%, 93%, 94%, 95%, 96%, 97%, 98%, 99%, or 100% identity to any one of SEQ ID NOs: 104-129, the HCDR2 comprises a sequence having at least 85%, 90%, 91%, 92%, 93%, 94%, 95%, 96%, 97%, 98%, 99%, or 100% identity to any one of SEQ ID NOs: 130-155, and the HCDR3 comprises a sequence having at least 85%, 90%, 91%, 92%, 93%, 94%, 95%, 96%, 97%, 98%, 99%, or 100% identity to any one of SEQ ID NOs: 156-181. In some embodiments of the anti-BCMA binding moieties, the LCDR1 comprises a sequence having at least 85%, 90%, 91%, 92%, 93%, 94%, 95%, 96%, 97%, 98%, 99%, or 100% identity to any one of SEQ ID NOs: 385-410, the LCDR2 comprises a sequence having at least 85%, 90%, 91%, 92%, 93%, 94%, 95%, 96%, 97%, 98%, 99%, or 100% identity to any one of SEQ ID NOs: 411-436, and the LCDR3 comprises a sequence having at least 85%, 90%, 91%, 92%, 93%, 94%, 95%, 96%, 97%, 98%, 99%, or 100% identity to any one of SEQ ID NOs: 437-462. In some embodiments, the VH comprises a sequence having at least 85%, 90%, 91%, 92%, 93%, 94%, 95%, 96%, 97%, 98%, 99%, or 100% identity to any one of SEQ ID NOs: 260-285. In some embodiments, the VL comprises a sequence having at least 85%, 90%, 91%, 92%, 93%, 94%, 95%, 96%, 97%, 98%, 99%, or 100% identity to any one of SEQ ID NOs: 541-566.

[0036] Also disclosed herein are BCMA-directed chimeric antigen receptors comprising an extracellular anti-BCMA binding moiety, a hinge domain, a transmembrane domain, and an intracellular signaling domain comprising an OX40 subdomain and a CD3ζ subdomain. In some embodiments, the anti-BCMA binding moiety is any one of the anti-BCMA binding moieties disclosed herein. In some embodiments, the OX40 subdomain comprises a sequence having at least 85%, 90%, 91%, 92%, 93%, 94%, 95%, 96%, 97%, 98%, 99%, or 100% identity to SEQ ID NO: 1394. In some embodiments, the CD3ζ subdomain comprises a sequence having at least 85%, 90%, 91%, 92%, 93%, 94%, 95%, 96%, 97%, 98%, 99%, or 100% identity to SEQ ID NO: 1395. In some embodiments, the transmembrane domain is a CD8 transmembrane domain. In some embodiments, the hinge domain is a CD8 hinge domain, an IgG4 hinge domain, or an RQRCD8 hinge domain.

[0037] Also disclosed herein are BCMA-directed CAR constructs comprising a BCMA-directed CAR and a membrane-bound IL15 (mbIL15). In some embodiments, the BCMA-directed CAR is any one of the BCMA-directed CARs disclosed herein. In some embodiments, the mbIL15 comprises a sequence having at least 85%, 90%, 91%, 92%, 93%, 94%, 95%, 96%, 97%, 98%, 99%, or 100% identity to SEQ ID NO: 1398.

[0038] Also disclosed herein are immune cells or populations of immune cells comprising any one of the anti-BCMA binding moieties, BCMA-directed CARs, or BCMA-directed CAR constructs disclosed herein. In some embodiments, the immune cells are NK cells and/or T cells.

[0039] Also disclosed herein are methods of treating cancer in a subject in need thereof. In some embodiments, the methods comprise administering to the subject any one of the anti-BCMA binding moieties, BCMA-directed CARs, BCMA-directed CAR constructs, or engineered immune cells disclosed herein. Also disclosed herein are any one of the anti-BCMA binding moieties, BCMA-directed CARs, BCMA-directed CAR constructs, or engineered immune cells disclosed herein for use in treating cancer. Also disclosed herein are any one of the anti-BCMA binding moieties, BCMA-directed CARs, BCMA-directed CAR constructs, or engineered immune cells disclosed herein for use in the manufacture of a medicament.

### BRIEF DESCRIPTION OF THE DRAWINGS

[0040] FIGS. 1A-1D depict a collection of non-limiting embodiments of CAR constructs used, for example, to target BCMA. The constructs depicted include the membrane-bound IL15 construct separated from the CAR per se by a self-cleaving peptide (e.g. T2A). However, CARs excluding the IL15 construct (and separating self-cleaving peptide) are also provided for herein. “CD8 SP”: CD8 signal peptide; “GS linker”: linker comprising glycine and serine; “VH”: heavy chain variable region; “VL”: light chain variable region”; “CD8 TM”: CD8 transmembrane domain; “CD8 IC”: CD8 intracellular domain; “OX40”: OX40 intracellular domain; “CD3ζ”: CD3ζ domain. FIG. 1A shows VH-VL format. FIG. 1B shows a VL-VH format. FIG. 1C shows a VH-VL format with a shorter hinge (IgG4). FIG. 1D shows a VH-VL format with a longer hinge (RQRCD8). It shall be appreciated that these represent the nucleotide sequence and the encoded CAR construct would not include the T2A and the mbIL15, if encoded, would be expressed separately on the cell.

[0041] FIG. 2 depicts non-limiting combinations of heavy chain variable region (VH) complementarity-determining regions (CDRs) 1, 2 and 3 (HCDR1, HCDR2, and HCDR3) sequences. Embodiments of the anti-BCMA binding moieties, BCMA-directed CARs, and cells expressing thereof may use any of the non-limiting combinations depicted herein.

[0042] FIG. 3 depicts non-limiting combinations of light chain variable region (VL) CDRs 1, 2, and 3 (LCDR1, LCDR2, and LCDR3) sequences. Embodiments of the anti-BCMA binding moieties, BCMA-directed CARs, and cells expressing thereof may use any of the non-limiting combinations depicted herein.

[0043] FIG. 4 depicts non-limiting combinations of VH and VL sequences. Embodiments of the anti-BCMA binding moieties, BCMA-directed CARs, and cells expressing thereof may use any of the non-limiting combinations depicted herein.

[0044] FIGS. 5A-5D show schematics of various non-limiting embodiments of CAR constructs provided for herein, for example, to target BCMA. FIG. 5A shows a non-limiting schematic of a VH-GS linker-VL scFv, with CD8a hinge, CD8α transmembrane domain, CD8α intracellular domain, an OX-40 co-stimulatory domain, and a CD3ζ signaling domain. Also included in the schematic, though not used in all embodiments provided for herein, is a T2A self-cleaving peptide followed by additional nucleotides encoding mbIL15. FIG. 5B shows the encoded amino acid. FIGS. 5C and 5D show schematics of corresponding constructs, without a FLAG tag-linker complex.

[0045] FIGS. 6A-6D show schematics of various non-limiting embodiments of CAR constructs provided for herein, for example, to target BCMA. FIG. 6A shows a non-limiting schematic of a VH-Whitlow linker-VL scFv, AAA spacer, with a CD8α hinge, CD8α transmembrane domain, CD8α intracellular domain, an OX-40 co-stimulatory domain, and a CD3ζ signaling domain. Also included in the schematic, though not used in all embodiments provided for herein, is a T2A self-cleaving peptide followed by additional nucleotides encoding mbIL15. FIG. 6B shows the encoded amino acid. FIGS. 6C and 6D show schematics of corresponding constructs, without a FLAG tag-linker complex.

[0046] FIGS. 7A-7D show schematics of various non-limiting embodiments of CAR constructs provided for herein, for example, to target BCMA. FIG. 7A shows a non-limiting schematic of a VL-Whitlow linker-VH scFv, AAA spacer, with a CD8α hinge, CD8α transmembrane domain, CD8α intracellular domain, an OX-40 co-stimulatory domain, and a CD3ζ signaling domain. Also included in the schematic, though not used in all embodiments provided for herein, is a T2A self-cleaving peptide followed by additional nucleotides encoding mbIL15. FIG. 7B shows the encoded amino acid. FIGS. 7C and 7D show schematics of corresponding constructs, without a FLAG tag-linker complex.

[0047] FIGS. 8A-8D show schematics of various non-limiting embodiments of CAR constructs provided for herein, for example, to target BCMA. FIG. 8A shows a non-limiting schematic of a camelid VHH domain, with a CD8α hinge, CD8α transmembrane domain, CD8α intracellular domain, an OX-40 co-stimulatory domain, and a CD3ζ signaling domain. Also included in the schematic, though not used in all embodiments provided for herein, is a T2A self-cleaving peptide followed by additional nucleotides encoding mbIL15. FIG. 8B shows the encoded amino acid. FIGS. 8C and 8D show schematics of corresponding constructs, without a FLAG tag-linker complex.

[0048] FIGS. 9A-9D show schematics of various non-limiting embodiments of CAR constructs provided for herein, for example, to target BCMA. FIG. 9A shows a non-limiting schematic of a camelid VHH domain-GS linker-VHH domain, with a CD8α hinge, CD8α transmembrane domain, CD8α intracellular domain, an OX-40 co-stimulatory domain, and a CD3ζ signaling domain. The VHH domains may be the same, or different domains. Also included in the schematic, though not used in all embodiments provided for herein, is a T2A self-cleaving peptide followed by additional nucleotides encoding mbIL15. FIG. 9B shows the encoded amino acid. FIGS. 9C and 9D show schematics of corresponding constructs, without a FLAG tag-linker complex.

[0049] FIGS. 10A-10D show schematics of various non-limiting embodiments of CAR constructs provided for herein, for example, to target BCMA. FIG. 10A shows a non-limiting schematic of a VL-Whitlow linker-VH scFv, AAA spacer, with a CD8α hinge, CD8α transmembrane domain, CD8α intracellular domain, an OX-40 co-stimulatory domain, and a CD3ζ signaling domain. Also included in the schematic, though not used in all embodiments provided for herein, is a T2A self-cleaving peptide followed by additional nucleotides encoding mbIL15. FIG. 10B shows the encoded amino acid. FIGS. 10C and 10D show schematics of corresponding constructs, without a FLAG tag-linker complex.

[0050] FIGS. 11A-11D show schematics of various non-limiting embodiments of CAR constructs provided for herein, for example, to target BCMA. FIG. 11A shows a non-limiting schematic of a VL-Whitlow-VH, AAA spacer, with a CD28 hinge, CD28 transmembrane domain, CD28 intracellular domain, and a CD3ζ signaling domain. Also included in the schematic, though not used in all embodiments provided for herein, is a T2A self-cleaving peptide followed by additional nucleotides encoding mbIL15. FIG. 11B shows the encoded amino acid. FIGS. 11C and 11D show schematics of corresponding constructs, without a FLAG tag-linker complex.

[0051] FIGS. 12A-12D show schematics of various non-limiting embodiments of CAR constructs provided for herein, for example, to target BCMA. FIG. 12A shows a non-limiting schematic of a VH-GS linker-VL scFv, AAA spacer, with a CD28 hinge, CD28 transmembrane domain, CD28 intracellular domain, and a CD3ζ signaling domain. Also included in the schematic, though not used in all embodiments provided for herein, is a T2A self-cleaving peptide followed by additional nucleotides encoding mbIL15. FIG. 12B shows the encoded amino acid. FIGS. 12C and 12D show schematics of corresponding constructs, without a FLAG tag-linker complex.

[0052] FIGS. 13A-13D show schematics of various non-limiting embodiments of CAR constructs provided for herein, for example, to target BCMA. FIG. 13A shows a non-limiting schematic of a VH-GS linker-VL scFv, AAA spacer, with a CD8α hinge, CD8α transmembrane domain, CD8α intracellular domain, a 4-1BB co-stimulatory domain, and a CD3ζ signaling domain. Also included in the schematic, though not used in all embodiments provided for herein, is a T2A self-cleaving peptide followed by additional nucleotides encoding mbIL15. FIG. 13B shows the encoded amino acid. FIGS. 13C and 13D show schematics of corresponding constructs, without a FLAG tag-linker complex.

[0053] FIGS. 14A-14D show schematics of various non-limiting embodiments of CAR constructs provided for herein, for example, to target BCMA. FIG. 14A shows a non-limiting schematic of a VL-Whitlow-VH scFv, AAA spacer, with a CD28 hinge, CD28 transmembrane domain, CD28 intracellular domain, and a CD3ζ signaling domain. Also included in the schematic, though not used in all embodiments provided for herein, is a T2A self-cleaving peptide followed by additional nucleotides encoding mbIL15. FIG. 14B shows the encoded amino acid. FIGS. 14C and 14D show schematics of corresponding constructs, without a FLAG tag-linker complex.

[0054] FIGS. 15A-15D show schematics of various non-limiting embodiments of CAR constructs provided for herein, for example, to target BCMA. FIG. 15A shows a non-limiting schematic of a VL-Whitlow-VH scFv, AAA spacer, with a CD8α hinge, CD8α transmembrane domain, CD8α intracellular domain, a 4-1BB co-stimulatory domain, and a CD3ζ signaling domain. Also included in the schematic, though not used in all embodiments provided for herein, is a T2A self-cleaving peptide followed by additional nucleotides encoding mbIL15. FIG. 15B shows the encoded amino acid. FIGS. 15C and 15D show schematics of corresponding constructs, without a FLAG tag-linker complex.

[0055] FIGS. 16A-16D show schematics of various non-limiting embodiments of CAR constructs provided for herein, for example, to target BCMA. FIG. 16A shows a non-limiting schematic of a VH-GS linker-VL scFv, AAA spacer, with a CD8α hinge, CD8α transmembrane domain, CD8α intracellular domain, a 4-1BB co-stimulatory domain, and a CD3ζ signaling domain. Also included in the schematic, though not used in all embodiments provided for herein, is a T2A self-cleaving peptide followed by additional nucleotides encoding mbIL15. FIG. 16B shows the encoded amino acid. FIGS. 16C and 16D show schematics of corresponding constructs, without a FLAG tag-linker complex.

[0056] FIGS. 17A-17D show schematics of various non-limiting embodiments of CAR constructs provided for herein, for example, to target BCMA. FIG. 17A shows a non-limiting schematic of a VL-Whitlow linker-VH scFv, (AAA)₂ spacer, with a CD8α hinge, CD8α transmembrane domain, CD8α intracellular domain, a 4-1BB co-stimulatory domain, and a CD3ζ signaling domain. Also included in the schematic, though not used in all embodiments provided for herein, is a T2A self-cleaving peptide followed by additional nucleotides encoding mbIL15. FIG. 17B shows the encoded amino acid. FIGS. 17C and 17D show schematics of corresponding constructs, without a FLAG tag-linker complex.

[0057] FIGS. 18A-18D show schematics of various non-limiting embodiments of CAR constructs provided for herein, for example, to target BCMA. FIG. 18A shows a non-limiting schematic of a multi-domain camelid BCMA binder with a VHH-GS linker-VHH structure, AAA spacer, with a CD8α hinge, CD8α transmembrane domain, CD8α intracellular domain, a 4-1BB co-stimulatory domain, and a CD3ζ signaling domain. Also included in the schematic, though not used in all embodiments provided for herein, is a T2A self-cleaving peptide followed by additional nucleotides encoding mbIL15. FIG. 18B shows the encoded amino acid. FIGS. 18C and 18D show schematics of corresponding constructs, without a FLAG tag-linker complex.

[0058] FIG. 19 shows a dot plot depicting expression of various non-limiting examples of CAR formats in Jurkat cells.

[0059] FIG. 20 depicts data related to the function of a non-limiting embodiment of a BMCA-directed CAR. This figure shows data related to the assessment of the tonic activation (Y axis) versus BCMA-binding induced activation (X-axis) when target MM.1S cells were co-cultured with Jurkat cells engineered to express a BCMA-directed CAR as provided for herein. The effector to target (E:T) cell ratio used was 1:1 (Jurkat:MM.1S).

[0060] FIG. 21 shows data related to the ratio of BCMA-induced activation to tonic activation of various non-limiting embodiments of CARs as provided for herein.

[0061] FIG. 22 shows additional data related to the expression (left panel) of various clones of a CAR, each individual clone varying in sequence, but sharing a common CAR structure. The right panel of FIG. 22 shows BCMA binding for each clone.

[0062] FIGS. 23A-23B show scatterplots of activity versus CAR expression. FIG. 23A shows a scatterplot of the BCMA-binding induced CAR activation versus CAR expression. FIG. 23B shows a scatterplot of tonic signaling versus CAR expression.

[0063] FIG. 24 shows a scatterplot of BCMA binding versus CAR expression.

[0064] FIG. 25 shows a scatterplot of the activation/tonic signaling ratio of various CAR constructs provided for herein versus

[0065] FIGS. 26A-26F show data related to the function of CARs provided for herein based on one aspect of their structure, the linker. FIG. 26A shows data related to the activation/tonic signaling ratio for CARs using a Whitlow linker versus a GS linker. FIG. 26B shows expression data for CARs using a Whitlow linker versus a GS linker. FIG. 26C shows data related to the activation/tonic signaling ratio for CARs provided for herein using scFvs employing a VH-VL format versus a VL-VH format. FIG. 26D shows data related to the expression of CARs provided for herein using scFvs employing a VH-VL format versus a VL-VH format. FIG. 26E shows data related to the activation/tonic signaling ratio for CARs provided for herein using CD28 domains (hinge, transmembrane, and intracellular) versus CARs using CD8 domains with an OX-40 co-stimulatory domain.

[0066] FIG. 27 shows summary data related to the expression and BCMA binding function of monovalent or bivalent CARs using one or more camelid VHH domains.

[0067] FIGS. 28A-28B show data for expression and BCMA-binding function of monovalent and bivalent CARs using one or more camelid VHH domains. FIG. 28A shows expression data for bivalent (Y axis) versus monovalent CARs using one or more camelid VHH domains. FIG. 28B shows BCMA binding data for bivalent (Y axis) versus monovalent VHH-CARs.

[0068] FIGS. 29A-29D show assessment of various characteristics of cells expressing CARs employing one or more VHH domains. FIG. 29A shows a scatterplot of tonic signaling activity for bivalent (Y axis) versus monovalent (X axis) CARs comprising one or more VHH domains. FIG. 29B shows a scatterplot of the activation/tonic signaling ratio for bivalent (Y axis) versus monovalent (X axis) VHH-CARs. FIG. 29C is a histogram showing the activation/tonic signaling ratio for selected bivalent (closed bars) and monovalent (open bars) VHH-CARs. FIG. 29D shows data related to the tonic signaling detected from selected bivalent (closed bars) and monovalent (open bars) VHH-CARs.

[0069] FIGS. 30A-30B show data comparing different CAR constructs. FIG. 30A shows a scatterplot of tonic signaling versus expression for CARs using scFv (circle) versus VHH-CARs (triangle) and corresponding controls (scFv is square, VHH is an X).

### DETAILED DESCRIPTION

[0070] Some embodiments of the methods and compositions provided herein relate to anti-BCMA binding moieties. Also disclosed herein are BCMA-directed chimeric antigen receptors (CARs) comprising any of the anti-BCMA binding moieties disclosed herein. In some embodiments, the CARs are expressed on a cell as described herein. Some embodiments include methods of use of the compositions or cells in immunotherapy. Some embodiments relate to use of anti-BCMA CARs expressed on Natural Killer (NK) cells.

[0071] The term “anticancer effect” refers to a biological effect which can be manifested by various means, including but not limited to, a decrease in tumor volume, a decrease in the number of cancer cells, a decrease in the number of metastases, an increase in life expectancy, decrease in cancer cell proliferation, decrease in cancer cell survival, or amelioration of various physiological symptoms associated with the cancerous condition. An “anticancer effect” can also be manifested by the ability of the CARs in prevention of the occurrence of cancer in the first place.

### Cell Types

[0072] Some embodiments of the methods and compositions provided herein relate to a cell such as an immune cell. For example, an immune cell may be engineered to include a chimeric antigen receptor such as a BCMA-directed CAR, or engineered to include a nucleic acid encoding said CAR as described herein.

[0073] Traditional anti-cancer therapies relied on a surgical approach, radiation therapy, chemotherapy, or combinations of these methods. As research led to a greater understanding of some of the mechanisms of certain cancers, this knowledge was leveraged to develop targeted cancer therapies. Targeted therapy is a cancer treatment that employs certain drugs that target specific genes or proteins found in cancer cells or cells supporting cancer growth, (like blood vessel cells) to reduce or arrest cancer cell growth. More recently, genetic engineering has enabled approaches to be developed that harness certain aspects of the immune system to fight cancers. In some cases, a patient's own immune cells are modified to specifically eradicate that patient's type of cancer. Various types of immune cells can be used, such as T cells and/or Natural Killer (NK cells), as described in more detail herein.

[0074] To facilitate cancer immunotherapies, there are provided for herein polynucleotides, polypeptides, and vectors that encode chimeric antigen receptors (CAR) that comprise a target binding moiety (e.g., an extracellular binder of a ligand expressed by a cancer cell, such as a BCMA-directed chimeric antigen receptor) and a cytotoxic signaling complex. Some embodiments include a polynucleotide, polypeptide, or vector that encodes a BCMA-directed chimeric antigen receptor to facilitate targeting of an immune cell to a cancer and exerting cytotoxic effects on the cancer cell. Also provided are engineered immune cells (e.g., T cells and/or NK cells) expressing such CARs. There are also provided herein, in several embodiments, polynucleotides, polypeptides, and vectors that encode a construct comprising an extracellular domain comprising two or more subdomains and a cytotoxic signaling complex. Also provided are engineered immune cells (e.g., T cells and/or NK cells) expressing such bi-specific constructs. Methods of treating cancer and other uses of such cells for cancer immunotherapy are also provided for herein.

### Engineered Cells for Immunotherapy

[0075] In several embodiments, cells of the immune system are engineered to have enhanced cytotoxic effects against target cells, such as tumor cells. For example, a cell of the immune system may be engineered to include a BCMA-directed chimeric antigen receptor as described herein. In several embodiments, white blood cells or leukocytes, are used, since their native function is to defend the body against growth of abnormal cells and infectious disease. There are a variety of types of white bloods cells that serve specific roles in the human immune system, and are therefore a preferred starting point for the engineering of cells disclosed herein. White blood cells include granulocytes and agranulocytes (presence or absence of granules in the cytoplasm, respectively). Granulocytes include basophils, eosinophils, neutrophils, and mast cells. Agranulocytes include lymphocytes and monocytes. Cells such as those that follow or are otherwise described herein may be engineered to include a chimeric antigen receptor such as a BCMA-directed chimeric antigen receptor, or a nucleic acid encoding such chimeric antigen receptor and/or engineered to co-express a membrane-bound interleukin 15 (mbIL15) co-stimulatory domain.

### Monocytes for Immunotherapy

[0076] Monocytes are a subtype of leukocyte. Monocytes can differentiate into macrophages and myeloid lineage dendritic cells. Monocytes are associated with the adaptive immune system and serve the main functions of phagocytosis, antigen presentation, and cytokine production. Phagocytosis is the process of uptake cellular material, or entire cells, followed by digestion and destruction of the engulfed cellular material. In several embodiments, monocytes are used in connection with one or more additional engineered cells as disclosed herein. Some embodiments of the methods and compositions described herein relate to a monocyte that includes a BCMA-directed chimeric antigen receptor, or a nucleic acid encoding the BCMA-directed chimeric antigen receptor. Several embodiments of the methods and compositions disclosed herein relate to monocytes engineered to express a BCMA-directed chimeric antigen receptor and a membrane-bound interleukin 15 (mbIL15) co-stimulatory domain.

### Lymphocytes for Immunotherapy

[0077] Lymphocytes, the other primary sub-type of leukocyte include T cells (cell-mediated, cytotoxic adaptive immunity), natural killer cells (cell-mediated, cytotoxic innate immunity), and B cells (humoral, antibody-driven adaptive immunity). While B cells are engineered according to several embodiments, disclosed herein, several embodiments also relate to engineered T cells or engineered NK cells (mixtures of T cells and NK cells are used in some embodiments). Some embodiments of the methods and compositions described herein relate to a lymphocyte that includes a BCMA-directed chimeric antigen receptor, or a nucleic acid encoding the BCMA-directed chimeric antigen receptor. Several embodiments of the methods and compositions disclosed herein relate to lymphocytes engineered to express a BCMA-directed chimeric antigen receptor and a membrane-bound interleukin 15 (mbIL15) co-stimulatory domain.

### T Cells for Immunotherapy

[0078] T cells are distinguishable from other lymphocytes sub-types (e.g., B cells or NK cells) based on the presence of a T cell receptor on the cell surface. T cells can be divided into various different subtypes, including effector T cells, helper T cells, cytotoxic T cells, memory T cells, regulatory T cells, natural killer T cell, mucosal associated invariant T cells and gamma delta T cells. In some embodiments, a specific subtype of T cell is engineered. In some embodiments, a mixed pool of T cell subtypes is engineered. In some embodiments, there is no specific selection of a type of T cells to be engineered to express the cytotoxic receptor complexes disclosed herein. In several embodiments, specific techniques, such as use of cytokine stimulation are used to enhance expansion/collection of T cells with a specific marker profile. For example, in several embodiments, activation of certain human T cells, e.g. CD4+ T cells, CD8+ T cells is achieved through use of CD3 and/or CD28 as stimulatory molecules. In several embodiments, there is provided a method of treating or preventing cancer or an infectious disease, comprising administering a therapeutically effective amount of T cells expressing the cytotoxic receptor complex and/or a homing moiety as described herein. In several embodiments, the engineered T cells are autologous cells, while in some embodiments, the T cells are allogeneic cells. Some embodiments of the methods and compositions described herein relate to a T cell that includes a BCMA-directed chimeric antigen receptor, or a nucleic acid encoding the BCMA-directed chimeric antigen receptor. Several embodiments of the methods and compositions disclosed herein relate to T cells engineered to express a BCMA-directed chimeric antigen receptor and a membrane-bound interleukin 15 (mbIL15) co-stimulatory domain.

### NK Cells for Immunotherapy

[0079] In several embodiments, there is provided a method of treating or preventing cancer or an infectious disease, comprising administering a therapeutically effective amount of natural killer (NK) cells expressing the cytotoxic receptor complex and/or a homing moiety as described herein. In several embodiments, the engineered NK cells are autologous cells, while in some embodiments, the NK cells are allogeneic cells. In several embodiments, NK cells are preferred because the natural cytotoxic potential of NK cells is relatively high. In several embodiments, it is unexpectedly beneficial that the engineered cells disclosed herein can further upregulate the cytotoxic activity of NK cells, leading to an even more effective activity against target cells (e.g., tumor or other diseased cells). In several embodiments, the high degree of acute cytotoxicity of NK cells (which is further enhanced by the engineering methods disclosed herein) is leveraged to provide particularly efficacious cellular therapy compositions. Some embodiments of the methods and compositions described herein relate to an NK that includes a BCMA-directed chimeric antigen receptor, or a nucleic acid encoding the BCMA-directed chimeric antigen receptor. Several embodiments of the methods and compositions disclosed herein relate to NK cells engineered to express a BCMA-directed chimeric antigen receptor and a membrane-bound interleukin 15 (mbIL15) co-stimulatory domain. In some embodiments, the NK cells are derived from cell line NK-92. NK-92 cells are derived from NK cells, but lack major inhibitory receptors displayed by normal NK cells, while retaining the majority of activating receptors. Some embodiments of NK-92 cells described herein related to NK-92 cell engineered to silence certain additional inhibitory receptors, for example, SMAD3, allowing for upregulation of interferon-γ (IFNγ), granzyme B, and/or perforin production. Additional information relating to the NK-92 cell line is disclosed in WO 1998/49268 and U.S. Patent Application Publication No. 2002-0068044 and incorporated in their entireties herein by reference. NK-92 cells are used, in several embodiments, in combination with one or more of the other cell types disclosed herein. For example, in one embodiment, NK-92 cells are used in combination with NK cells as disclosed herein. In an additional embodiment, NK-92 cells are used in combination with T cells as disclosed herein.

### Hematopoietic Stem Cells for Cancer Immunotherapy

[0080] In some embodiments, hematopoietic stem cells (HSCs) are used in the methods of immunotherapy disclosed herein. In several embodiments, the cells are engineered to express a homing moiety and/or a cytotoxic receptor complex. HSCs are used, in several embodiments, to leverage their ability to engraft for long-term blood cell production, which could result in a sustained source of targeted anti-cancer effector cells, for example to combat cancer remissions. In several embodiments, this ongoing production helps to offset anergy or exhaustion of other cell types, for example due to the tumor microenvironment. In several embodiments, allogeneic HSCs are used, while in some embodiments, autologous HSCs are used. In several embodiments, HSCs are used in combination with one or more additional engineered cell type disclosed herein. Some embodiments of the methods and compositions described herein relate to a stem cell, such as a hematopoietic stem cell, that includes a BCMA-directed chimeric antigen receptor, or a nucleic acid encoding the BCMA-directed chimeric antigen receptor. Several embodiments of the methods and compositions disclosed herein relate to stem cells, such as hematopoietic stem cells that are engineered to express a BCMA-directed chimeric antigen receptor and a membrane-bound interleukin 15 (mbIL15) co-stimulatory domain.

### Induced Pluripotent Stem Cells for Cancer Immunotherapy

[0081] In some embodiments, induced pluripotent stem cells (iPSCs) are used in the method of immunotherapy disclosed herein. iPSCs are used, in several embodiments, to leverage their ability to differentiate and derive into non-pluripotent cells, including, but not limited to, CD34 cells, hemogenic endothelium cells, HSCs (hematopoietic stem and progenitor cells), hematopoietic multipotent progenitor cells, T cell progenitors, NK cell progenitors, T cells, NKT cells, NK cells, and B cells comprising one or several genetic modifications at selected sites through differentiating iPSCs or less differentiated cells comprising the same genetic modifications at the same selected sites. In several embodiments, the iPSCs are used to generate iPSC-derived NK or T cells. In several embodiments, the cells are engineered to express a homing moiety and/or a cytotoxic receptor complex. In several embodiments, iPSCs are used in combination with one or more additional engineered cell type disclosed herein. Some embodiments of the methods and compositions described herein relate to a stem cell, such as a induced pluripotent stem cell engineered to express a CAR that targets a tumor marker, for example, CD19, CD123, CD70, Her2, mesothelin, Claudin 6, BCMA, EGFR, among any of the others disclosed herein, and optionally a membrane-bound interleukin 15 (mbIL15) co-stimulatory domain. Several embodiments of the methods and compositions disclosed herein relate to induced pluripotent stem cells engineered to express an activating chimeric receptor that targets a ligand on a tumor cell, for example, MICA, MICB, ULBP1, ULBP2, ULBP3, ULBP4, ULBP5, and ULBP6 (among others) and optionally a membrane-bound interleukin 15 (mbIL15) co-stimulatory domain.

### Genetic Engineering of Immune Cells

[0082] As discussed above, a variety of cell types can be utilized in cellular immunotherapy. Further, as elaborated on in more detail below, and shown in the Examples, genetic modifications can be made to these cells in order to enhance one or more aspects of their efficacy (e.g., cytotoxicity) and/or persistence (e.g., active life span). As discussed herein, in several embodiments NK cells are used for immunotherapy. In several embodiments provided for herein, gene editing of the NK cell can advantageously impart to the edited NK cell the ability to resist and/or overcome various inhibitory signals that are generated in the tumor microenvironment. It is known that tumors generate a variety of signaling molecules that are intended to reduce the anti-tumor effects of immune cells. As discussed in more detail below, in several embodiments, gene editing of the NK cell limits this tumor microenvironment suppressive effect on the NK cells, T cells, combinations of NK and T cells, or any edited/engineered immune cell provided for herein. As discussed below, in several embodiments, gene editing is employed to reduce or knockout expression of target proteins, for example by disrupting the underlying gene encoding the protein. In several embodiments, gene editing can reduce expression of a target protein by about 30%, about 40%, about 50%, about 60%, about 70%, about 75%, about 80%, about 85%, about 90%, about 95%, about 97%, about 98%, about 99%, or more (including any amount between those listed). In several embodiments, the gene is completely knocked out, such that expression of the target protein is undetectable. In several embodiments, gene editing is used to “knock in” or otherwise enhance expression of a target protein. In several embodiments, expression of a target protein can be enhanced by about 30%, about 40%, about 50%, about 60%, about 70%, about 75%, about 80%, about 85%, about 90%, about 95%, about 97%, about 98%, about 99%, or more (including any amount between those listed).

[0083] By way of non-limiting example, TGF-beta is one such cytokine released by tumor cells that results in immune suppression within the tumor microenvironment. That immune suppression reduces the ability of immune cells, even engineered CAR-immune cells is some cases, to destroy the tumor cells, thus allowing for tumor progression. In several embodiments, as discussed in detail below, immune checkpoint inhibitors are disrupted through gene editing. In several embodiments, blockers of immune suppressing cytokines in the tumor microenvironment are used, including blockers of their release or competitive inhibitors that reduce the ability of the signaling molecule to bind and inhibit an immune cell. Such signaling molecules include, but are not limited to TGF-beta, IL10, arginase, inducible NOS, reactive-NOS, Arg1, Indoleamine 2,3-dioxygenase (IDO), and PGE2. However, in additional embodiments, there are provided immune cells, such as NK cells, wherein the ability of the NK cell (or other cell) to respond to a given immunosuppressive signaling molecule is disrupted and/or eliminated. For example, in several embodiments, in several embodiments, NK cells or T cells are genetically edited to become have reduced sensitivity to TGF-beta. TGF-beta is an inhibitor of NK cell function on at least the levels of proliferation and cytotoxicity. Thus, according to some embodiments, the expression of the TGF-beta receptor is knocked down or knocked out through gene editing, such that the edited NK is resistant to the immunosuppressive effects of TGF-beta in the tumor microenvironment. In several embodiments, the TGFB2 receptor is knocked down or knocked out through gene editing, for example, by use of CRISPR-Cas editing. Small interfering RNA, antisense RNA, TALENs or zinc fingers are used in other embodiments. Other isoforms of the TGF-beta receptor (e.g., TGF-beta 1 and/or TGF-beta 3) are edited in some embodiments. In some embodiments TGF-beta receptors in T cells are knocked down through gene editing.

[0084] In accordance with additional embodiments, other modulators of one or more aspects of NK cell (or T cell) function are modulated through gene editing. A variety of cytokines impart either negative (as with TGF-beta above) or positive signals to immune cells. By way of non-limiting example, IL15 is a positive regulator of NK cells, which as disclosed herein, can enhance one or more of NK cell homing, NK cell migration, NK cell expansion/proliferation, NK cell cytotoxicity, and/or NK cell persistence. To keep NK cells in check under normal physiological circumstances, a cytokine-inducible SH2-containing protein (CIS, encoded by the CISH gene) acts as a critical negative regulator of IL-15 signaling in NK cells. As discussed herein, because IL15 biology impacts multiple aspects of NK cell functionality, including, but not limited to, proliferation/expansion, activation, cytotoxicity, persistence, homing, migration, among others. Thus, according to several embodiments, editing CISH enhances the functionality of NK cells across multiple functionalities, leading to a more effective and long-lasting NK cell therapeutic. In several embodiments, inhibitors of CIS are used in conjunction with engineered NK cell administration. In several embodiments, the CIS expression is knocked down or knocked out through gene editing of the CISH gene, for example, by use of CRISPR-Cas editing. Small interfering RNA, antisense RNA, TALENs or zinc fingers are used in other embodiments. In some embodiments CIS expression in T cells is knocked down through gene editing.

[0085] In several embodiments, CISH gene editing endows an NK cell with enhanced ability to home to a target site. In several embodiments, CISH gene editing endows an NK cell with enhanced ability to migrate, e.g., within a tissue in response to, for example chemoattractants or away from repellants. In several embodiments, CISH gene editing endows an NK cell with enhanced ability to be activated, and thus exert, for example, anti-tumor effects. In several embodiments, CISH gene editing endows an NK cell with enhanced proliferative ability, which in several embodiments, allows for generation of robust NK cell numbers from a donor blood sample. In addition, in such embodiments, NK cells edited for CISH and engineered to express a CAR are more readily, robustly, and consistently expanded in culture. In several embodiments, CISH gene editing endows an NK cell with enhanced cytotoxicity. In several embodiments, the editing of CISH synergistically enhances the cytotoxic effects of engineered NK cells and/or engineered T cells that express a CAR.

[0086] In several embodiments, CISH gene editing activates or inhibits a wide variety of pathways. The CIS protein is a negative regulator of IL15 signaling by way of, for example, inhibiting JAK-STAT signaling pathways. These pathways would typically lead to transcription of IL15-responsive genes (including CISH). In several embodiments, knockdown of CISH disinhibits JAK-STAT (e.g., JAK1-STAT5) signaling and there is enhanced transcription of IL15-responsive genes. In several embodiments, knockout of CISH yields enhanced signaling through mammalian target of rapamycin (mTOR), with corresponding increases in expression of genes related to cell metabolism and respiration. In several embodiments, knockout of CISH yields IL15 induced increased expression of IL-2Rα (CD25), but not IL-15Rα or IL-2/15Rβ, enhanced NK cell membrane binding of IL15 and/or IL2, increased phosphorylation of STAT-3 and/or STAT-5, and elevated expression of the antiapoptotic proteins, such as Bcl-2. In several embodiments, CISH knockout results in IL15-induced upregulation of selected genes related to mitochondrial functions (e.g., electron transport chain and cellular respiration) and cell cycle. Thus, in several embodiments, knockout of CISH by gene editing enhances the NK cell cytotoxicity and/or persistence, at least in part via metabolic reprogramming. In several embodiments, negative regulators of cellular metabolism, such as TXNIP, are downregulated in response to CISH knockout. In several embodiments, promotors for cell survival and proliferation including BIRC5 (Survivin), TOP2A, CKS2, and RACGAP1 are upregulated after CISH knockout, whereas antiproliferative or proapoptotic proteins such as TGFB1, ATM, and PTCH1 are downregulated. In several embodiments, CISH knockout alters the state (e.g., activates or inactivates) signaling via or through one or more of CXCL-10, IL2, TNF, IFNg, IL13, IL4, Jnk, PRF1, STAT5, PRKCQ, IL2 receptor Beta, SOCS2, MYD88, STAT3, STAT1, TBX21, LCK, JAK3, IL& receptor, ABL1, IL9, STAT5A, STAT5B, Tcf7, PRDM1, and/or EOMES.

[0087] In several embodiments, gene editing of the immune cells can also provide unexpected enhancement in the expansion, persistence and/or cytotoxicity of the edited immune cell. As disclosed herein, engineered cells (e.g., those expressing a CAR) may also be edited, the combination of which provides for a robust cell for immunotherapy. In several embodiments, the edits allow for unexpectedly improved NK cell expansion, persistence and/or cytotoxicity. In several embodiments, knockout of CISH expression in NK cells removes a potent negative regulator of IL15-mediated signaling in NK cells, disinhibits the NK cells and allows for one or more of enhanced NK cell homing, NK cell migration, activation of NK cells, expansion, cytotoxicity and/or persistence. Additionally, in several embodiments, the editing can enhance NK and/or T cell function in the otherwise suppressive tumor microenvironment. In several embodiments, CISH gene editing results in enhanced NK cell expansion, persistence and/or cytotoxicity without requiring Notch ligand being provided exogenously. Additional

[0088] In several embodiments, gene editing is accomplished by one or more of a variety of engineered nucleases. In several embodiments, restriction enzymes are used, particularly when double strand breaks are desired at multiple regions. In several embodiments, a bioengineered nuclease is used. Depending on the embodiment, one or more of a Zinc Finger Nuclease (ZFN), transcription-activator like effector nuclease (TALEN), meganuclease and/or clustered regularly interspaced short palindromic repeats (CRISPR/Cas9) system are used to specifically edit the genes encoding one or more of the TCR subunits.

[0089] Meganucleases are characterized by their capacity to recognize and cut large DNA sequences (from 14 to 40 base pairs). In several embodiments, a meganuclease from the LAGLIDADG family is used, and is subjected to mutagenesis and screening to generate a meganuclease variant that recognizes a unique sequence(s), such as a specific site in the TCR, or CISH, or any other target gene disclosed herein. Target sites in the TCR can readily be identified. Further information of target sites within a region of the TCR can be found in US Patent Publication No. 2018/0325955, and US Patent Publication No. 2015/0017136, each of which is incorporated by reference herein in its entirety. In several embodiments, two or more meganucleases, or functions fragments thereof, are fused to create a hybrid enzymes that recognize a desired target sequence within the target gene (e.g., CISH).

[0090] In contrast to meganucleases, ZFNs and TALEN function based on a non-specific DNA cutting catalytic domain which is linked to specific DNA sequence recognizing peptides such as zinc fingers or transcription activator-like effectors (TALEs). Advantageously, the ZFNs and TALENs thus allow sequence-independent cleavage of DNA, with a high degree of sequence-specificity in target recognition. Zinc finger motifs naturally function in transcription factors to recognize specific DNA sequences for transcription. The C-terminal part of each finger is responsible for the specific recognition of the DNA sequence. While the sequences recognized by ZFNs are relatively short, (e.g., ˜3 base pairs), in several embodiments, combinations of 2, 3, 4, 5, 6, 7, 8, 9, 10 or more zinc fingers whose recognition sites have been characterized are used, thereby allowing targeting of specific sequences, such as a portion of the TCR (or an immune checkpoint inhibitor). The combined ZFNs are then fused with the catalytic domain(s) of an endonuclease, such as FokI (optionally a FokI heterodimer), in order to induce a targeted DNA break. Additional information on uses of ZFNs to edit the TCR and/or immune checkpoint inhibitors can be found in U.S. Pat. No. 9,597,357, which is incorporated by reference herein.

[0091] Transcription activator-like effector nucleases (TALENs) are specific DNA-binding proteins that feature an array of 33 or 34-amino acid repeats. Like ZFNs, TALENs are a fusion of a DNA cutting domain of a nuclease to TALE domains, which allow for sequence-independent introduction of double stranded DNA breaks with highly precise target site recognition. TALENs can create double strand breaks at the target site that can be repaired by error-prone non-homologous end-joining (NHEJ), resulting in gene disruptions through the introduction of small insertions or deletions. Advantageously, TALENs are used in several embodiments, at least in part due to their higher specificity in DNA binding, reduced off-target effects, and ease in construction of the DNA-binding domain.

[0092] CRISPRs (Clustered Regularly Interspaced Short Palindromic Repeats) are genetic elements that bacteria use as protection against viruses. The repeats are short sequences that originate from viral genomes and have been incorporated into the bacterial genome. Cas (CRISPR associated proteins) process these sequences and cut matching viral DNA sequences. By introducing plasmids containing Cas genes and specifically constructed CRISPRs into eukaryotic cells, the eukaryotic genome can be cut at any desired position. Additional information on CRISPR can be found in US Patent Publication No. 2014/0068797, which is incorporated by reference herein. In several embodiments, CRISPR is used to manipulate the gene(s) encoding a target gene to be knocked out or knocked in, for example CISH, TGFBR2, TCR, B2M, CIITA, CD47, HLA-E, etc. In several embodiments, CRISPR is used to edit one or more of the TCRs of a T cell and/or the genes encoding one or more immune checkpoint inhibitors. In several embodiments, the immune checkpoint inhibitor is selected from one or more of CTLA4 and PD1. In several embodiments, CRISPR is used to truncate one or more of TCRα, TCRβ, TCRγ, and TCRS. In several embodiments, a TCR is truncated without impacting the function of the CD3z signaling domain of the TCR. Depending on the embodiment and which target gene is to be edited, a Class 1 or Class 2 Cas is used. In several embodiments, a Class 1 Cas is used and the Cas type is selected from the following types: I, IA, IB, IC, ID, IE, IF, IU, III, IIIA, IIIB, IIIC, IIID, IV IVA, IVB, and combinations thereof. In several embodiments, the Cas is selected from the group consisting of Cas3, Cas8a, Cas5, Cas8b, Cas8c, Cas10d, Cse1, Cse2, Csy1, Csy2, Csy3, GSU0054, Cas10, Csm2, Cmr5, Cas10, Csx11, Csx10, Csf1, and combinations thereof. In several embodiments, a Class 2 Cas is used and the Cas type is selected from the following types: II, IIA, IIB, IIC, V, VI, and combinations thereof. In several embodiments, the Cas is selected from the group consisting of Cas9, Csn2, Cas4, Cpf1, C2c1, C2c3, Cas13a (previously known as C2c2), Cas13b, Cas13c, CasX, CasY and combinations thereof. In some embodiments, class 2 CasX is used, wherein CasX is capable of forming a complex with a guide nucleic acid and wherein the complex can bind to a target DNA, and wherein the target DNA comprises a non-target strand and a target strand. In some embodiments, class 2 CasY is used, wherein CasY is capable of binding and modifying a target nucleic acid and/or a polypeptide associated with target nucleic acid.

### Extracellular Domains (Binding Moieties)

[0093] Some embodiments of the compositions and methods described herein relate to a chimeric antigen receptor, such as a BCMA-directed chimeric antigen receptor, comprising an extracellular domain. In some embodiments, the extracellular domain comprises a binding moiety (also referred to as an antigen-binding protein or antigen-binding domain) that may be targeted to a tumor antigen, as described herein. in some embodiments, the binding moiety is derived from or comprises wild-type or non-wild-type sequence of an antibody, an antibody fragment, an scFv, a Fv, a Fab, a (Fab′)2, a single domain antibody (sdAb), a VH or VL domain, a camelid VHH domain, or a non-immunoglobulin scaffold such as a DARPIN, an affibody, an affilin, an adnectin, an affitin, a repebody, a fynomer, an alphabody, an avimer, an atrimer, a centyrin, a pronectin, an anticalin, a kunitz domain, an Armadillo repeat protein, an autoantigen, a receptor or a ligand. In some embodiments, the binding moiety contains more than one antigen binding domain. In embodiments, the binding moiety is operably linked directly or via an optional linker to the NH2-terminal end of a TCR domain (e.g. constant chains of TCR-alpha, TCR-beta1, TCR-beta2, preTCR-alpha, pre-TCR-alpha-Del48, TCR-gamma, or TCR-delta).

[0094] There are provided, in several embodiments, binding moieties (also referred to as antigen-binding proteins). As used herein, the term “binding moiety” shall be given its ordinary meaning, and shall also refer to a protein comprising an antigen-binding fragment that binds to an antigen and, optionally, a scaffold or framework portion that allows the antigen-binding fragment to adopt a conformation that promotes binding of the binding moiety to the antigen. In some embodiments, the antigen is a cancer antigen (e.g., BCMA) or a fragment thereof. In some embodiments, the antigen-binding fragment comprises at least one CDR from an antibody that binds to the antigen. In some embodiments, the antigen-binding fragment comprises all three CDRs from the heavy chain of an antibody that binds to the antigen or from the light chain of an antibody that binds to the antigen. In still some embodiments, the antigen-binding fragment comprises all six CDRs from an antibody that binds to the antigen (three from the heavy chain and three from the light chain). In several embodiments, the antigen-binding fragment comprises one, two, three, four, five, or six CDRs from an antibody that binds to the antigen, and in several embodiments, the CDRs can be any combination of heavy and/or light chain CDRs. The antigen-binding fragment in some embodiments is an antibody fragment.

[0095] Nonlimiting examples of binding moieties include antibodies, antibody fragments (e.g., an antigen-binding fragment of an antibody), antibody derivatives, and antibody analogs. Further specific examples include, but are not limited to, a single-chain variable fragment (scFv), a nanobody (e.g. VH domain of camelid heavy chain antibodies; VHH fragment), an Fab fragment, an Fab′ fragment, an F(ab′)2 fragment, an Fv fragment, an Fd fragment, and a complementarity determining region (CDR) fragment. These molecules can be derived from any mammalian source, such as human, mouse, rat, rabbit, or pig, dog, or camelid. Antibody fragments may compete for binding of a target antigen with an intact (e.g., native) antibody and the fragments may be produced by the modification of intact antibodies (e.g. enzymatic or chemical cleavage) or synthesized de novo using recombinant DNA technologies or peptide synthesis. The binding moiety can comprise, for example, an alternative protein scaffold or artificial scaffold with grafted CDRs or CDR derivatives. Such scaffolds include, but are not limited to, antibody-derived scaffolds comprising mutations introduced to, for example, stabilize the three-dimensional structure of the binding moiety as well as wholly synthetic scaffolds comprising, for example, a biocompatible polymer. In addition, peptide antibody mimetics (“PAMs”) can be used, as well as scaffolds based on antibody mimetics utilizing fibronectin components as a scaffold.

[0096] In some embodiments, the binding moiety comprises one or more antibody fragments incorporated into a single polypeptide chain or into multiple polypeptide chains. For instance, binding moieties can include, but are not limited to, a diabody; an intrabody; a domain antibody (single VL or VH domain or two or more VH domains joined by a peptide linker); a maxibody (2 scFvs fused to Fc region); a triabody; a tetrabody; a minibody (scFv fused to CH3 domain); a peptibody (one or more peptides attached to an Fc region); a linear antibody (a pair of tandem Fd segments (VH-CH1-VH-CH1) which, together with complementary light chain polypeptides, form a pair of antigen binding regions); a small modular immunopharmaceutical; and immunoglobulin fusion proteins (e.g. IgG-scFv, IgG-Fab, 2scFv-IgG, 4scFv-IgG, VH-IgG, IgG-VH, and Fab-scFv-Fc).

[0097] In some embodiments, the binding moiety has the structure of an immunoglobulin. As used herein, the term “immunoglobulin” shall be given its ordinary meaning, and shall also refer to a tetrameric molecule, with each tetramer comprising two identical pairs of polypeptide chains, each pair having one “light” (about 25 kDa) and one “heavy” chain (about 50-70 kDa). The amino-terminal portion of each chain includes a variable region of about 100 to 110 or more amino acids primarily responsible for antigen recognition. The carboxy-terminal portion of each chain defines a constant region primarily responsible for effector function.

[0098] Within light and heavy chains, the variable (V) and constant regions (C) are joined by a “J” region of about 12 or more amino acids, with the heavy chain also including a “D” region of about 10 more amino acids. The variable regions of each light/heavy chain pair form the antibody binding site such that an intact immunoglobulin has two binding sites.

[0099] Immunoglobulin chains exhibit the same general structure of relatively conserved framework regions (FR) joined by three hypervariable regions, also called complementarity determining regions or CDRs. From N-terminus to C-terminus, both light and heavy chains comprise the domains FR1, CDR1, FR2, CDR2, FR3, CDR3 and FR4.

[0100] Human light chains are classified as kappa and lambda light chains. An antibody “light chain”, refers to the smaller of the two types of polypeptide chains present in antibody molecules in their naturally occurring conformations. Kappa (K) and lambda (k) light chains refer to the two major antibody light chain isotypes. A light chain may include a polypeptide comprising, from amino terminus to carboxyl terminus, a single immunoglobulin light chain variable region (VL) and a single immunoglobulin light chain constant domain (CL).

[0101] Heavy chains are classified as mu (μ), delta (Δ), gamma (γ), alpha (α), and epsilon (ε), and define the antibody's isotype as IgM, IgD, IgG, IgA, and IgE, respectively. An antibody “heavy chain” refers to the larger of the two types of polypeptide chains present in antibody molecules in their naturally occurring conformations, and which normally determines the class to which the antibody belongs. A heavy chain may include a polypeptide comprising, from amino terminus to carboxyl terminus, a single immunoglobulin heavy chain variable region (VH), an immunoglobulin heavy chain constant domain 1 (CH1), an immunoglobulin hinge region, an immunoglobulin heavy chain constant domain 2 (CH2), an immunoglobulin heavy chain constant domain 3 (CH3), and optionally an immunoglobulin heavy chain constant domain 4 (CH4).

[0102] The IgG-class is further divided into subclasses, namely, IgG1, IgG2, IgG3, and IgG4. The IgA-class is further divided into subclasses, namely IgA1 and IgA2. The IgM has subclasses including, but not limited to, IgM1 and IgM2. The heavy chains in IgG, IgA, and IgD antibodies have three domains (CH1, CH2, and CH3), whereas the heavy chains in IgM and IgE antibodies have four domains (CH1, CH2, CH3, and CH4). The immunoglobulin heavy chain constant domains can be from any immunoglobulin isotype, including subtypes. The antibody chains are linked together via inter-polypeptide disulfide bonds between the CL domain and the CH1 domain (e.g., between the light and heavy chain) and between the hinge regions of the antibody heavy chains.

[0103] In some embodiments, the binding moiety is an antibody. The term “antibody”, as used herein, refers to a protein, or polypeptide sequence derived from an immunoglobulin molecule which specifically binds with an antigen. Antibodies can be monoclonal, or polyclonal, multiple or single chain, or intact immunoglobulins, and may be derived from natural sources or from recombinant sources. Antibodies can be tetramers of immunoglobulin molecules. The antibody may be “humanized”, “chimeric” or non-human. An antibody may include an intact immunoglobulin of any isotype, and includes, for instance, chimeric, humanized, human, and bispecific antibodies. An intact antibody will generally comprise at least two full-length heavy chains and two full-length light chains. Antibody sequences can be derived solely from a single species, or can be “chimeric,” that is, different portions of the antibody can be derived from two different species as described further below. Unless otherwise indicated, the term “antibody” also includes antibodies comprising two substantially full-length heavy chains and two substantially full-length light chains provided the antibodies retain the same or similar binding and/or function as the antibody comprised of two full length light and heavy chains. For example, antibodies having 1, 2, 3, 4, or 5 amino acid residue substitutions, insertions or deletions at the N-terminus and/or C-terminus of the heavy and/or light chains are included in the definition provided that the antibodies retain the same or similar binding and/or function as the antibodies comprising two full length heavy chains and two full length light chains. Examples of antibodies include monoclonal antibodies, polyclonal antibodies, chimeric antibodies, humanized antibodies, human antibodies, bispecific antibodies, and synthetic antibodies. There is provided, in some embodiments, monoclonal and polyclonal antibodies. As used herein, the term “polyclonal antibody” shall be given its ordinary meaning, and shall also refer to a population of antibodies that are typically widely varied in composition and binding specificity. As used herein, the term “monoclonal antibody” (“mAb”) shall be given its ordinary meaning, and shall also refer to one or more of a population of antibodies having identical sequences. Monoclonal antibodies bind to the antigen at a particular epitope on the antigen.

[0104] In some embodiments, the binding moiety is a fragment or antigen-binding fragment of an antibody. The term “antibody fragment” refers to at least one portion of an antibody, that retains the ability to specifically interact with (e.g., by binding, steric hindrance, stabilizing/destabilizing, spatial distribution) an epitope of an antigen. Examples of antibody fragments include, but are not limited to, Fab, Fab′, F(ab′)2, Fv fragments, scFv antibody fragments, disulfide-linked Fvs (sdFv), a Fd fragment consisting of the VH and CHI domains, linear antibodies, single domain antibodies such as sdAb (either VL or VH), camelid VHH domains, multi-specific antibodies formed from antibody fragments such as a bivalent fragment comprising two Fab fragments linked by a disulfide bridge at the hinge region, and an isolated CDR or other epitope binding fragments of an antibody. An antigen binding fragment can also be incorporated into single domain antibodies, maxibodies, minibodies, nanobodies, intrabodies, diabodies, triabodies, tetrabodies, v-NAR and bis-scFv (see, e.g., Hollinger and Hudson, Nature Biotechnology 23: 1126-1136, 2005). Antigen binding fragments can also be grafted into scaffolds based on polypeptides such as a fibronectin type III (Fn3) (see U.S. Pat. No. 6,703,199, which describes fibronectin polypeptide mini bodies). An antibody fragment may include a Fab, Fab′, F(ab′)2, and/or Fv fragment that contains at least one CDR of an immunoglobulin that is sufficient to confer specific antigen binding to a cancer antigen. Antibody fragments may be produced by recombinant DNA techniques or by enzymatic or chemical cleavage of intact antibodies.

[0105] In some embodiments, Fab fragments are provided. A Fab fragment is a monovalent fragment having the VL, VH, CL and CH1 domains; a F(ab′)2 fragment is a bivalent fragment having two Fab fragments linked by a disulfide bridge at the hinge region; a Fd fragment has the VH and CH1 domains; an Fv fragment has the VL and VH domains of a single arm of an antibody; and a dAb fragment has a VH domain, a VL domain, or an antigen-binding fragment of a VH or VL domain. In some embodiments, these antibody fragments can be incorporated into single domain antibodies, single-chain antibodies, maxibodies, minibodies, intrabodies, diabodies, triabodies, tetrabodies, v-NAR and bis-scFv. In some embodiments, the antibodies comprise at least one CDR as described herein.

[0106] There is also provided for herein, in several embodiments, single-chain variable fragments. As used herein, the term “single-chain variable fragment” (“scFv”) shall be given its ordinary meaning, and shall also refer to a fusion protein in which a VL and a VH region are joined via a linker (e.g., a synthetic sequence of amino acid residues) to form a continuous protein chain wherein the linker is long enough to allow the protein chain to fold back on itself and form a monovalent antigen binding site). For the sake of clarity, unless otherwise indicated as such, a “single-chain variable fragment” is not an antibody as defined herein. Diabodies are bivalent antibodies comprising two polypeptide chains, wherein each polypeptide chain comprises VH and VL domains joined by a linker that is configured to reduce or not allow for pairing between two domains on the same chain, thus allowing each domain to pair with a complementary domain on another polypeptide chain. According to several embodiments, if the two polypeptide chains of a diabody are identical, then a diabody resulting from their pairing will have two identical antigen binding sites. Polypeptide chains having different sequences can be used to make a diabody with two different antigen binding sites. Similarly, tribodies and tetrabodies are antibodies comprising three and four polypeptide chains, respectively, and forming three and four antigen binding sites, respectively, which can be the same or different.

[0107] In several embodiments, the binding moiety comprises one or more CDRs. As used herein, the term “CDR” shall be given its ordinary meaning, and shall also refer to the complementarity determining region (also termed “minimal recognition units” or “hypervariable region”) within antibody variable sequences. The CDRs permit the binding moiety to specifically bind to a particular antigen of interest. There are three heavy chain variable region CDRs (HCDR1, HCDR2 and HCDR3) and three light chain variable region CDRs (LCDR1, LCDR2 and LCDR3). The CDRs in each of the two chains typically are aligned by the framework regions to form a structure that binds specifically to a specific epitope or domain on the target protein. From N-terminus to C-terminus, naturally-occurring light and heavy chain variable regions both typically conform to the following order of these elements: FR1, CDR1, FR2, CDR2, FR3, CDR3 and FR4. A numbering system has been devised for assigning numbers to amino acids that occupy positions in each of these domains. This numbering system is defined in Kabat Sequences of Proteins of Immunological Interest (1987 and 1991, NIH, Bethesda, MD), or Chothia & Lesk, 1987, J. Mol. Biol. 196:901-917; Chothia et al., 1989, Nature 342:878-883. Complementarity determining regions (CDRs) and framework regions (FR) of a given antibody may be identified using this system. Other numbering systems for the amino acids in immunoglobulin chains include IMGT® (the international ImMunoGeneTics information system; Lefranc et al, Dev. Comp. Immunol. 29:185-203; 2005) and AHo (Honegger and Pluckthun, J. Mol. Biol. 309(3):657-670; 2001). One or more CDRs may be incorporated into a molecule either covalently or noncovalently to make it an binding moiety.

### Anti-BCMA Binding Moieties

[0108] Disclosed herein are anti-BCMA binding moieties comprising a heavy chain variable region (VH) comprising heavy chain complementarity determining regions (CDRs) 1, 2, and 3 (HCDR1, HCDR2, and HCDR3), and a light chain variable region (VL) comprising light chain CDRs 1, 2, and 3 (LCDR1, LCDR2, and LCDR3).

[0109] In some embodiments, the HCDR1 comprises a sequence having at least 85%, 90%, 91%, 92%, 93%, 94%, 95%, 96%, 97%, 98%, 99%, or 100% identity to any one of SEQ ID NOs: 104-129. In some embodiments, the HCDR2 comprises a sequence having at least 85%, 90%, 91%, 92%, 93%, 94%, 95%, 96%, 97%, 98%, 99%, or 100% identity to any one of SEQ ID NOs: 130-155. In some embodiments, the HCDR3 comprises a sequence having at least 85%, 90%, 91%, 92%, 93%, 94%, 95%, 96%, 97%, 98%, 99%, or 100% identity to any one of SEQ ID NOs: 156-181. In some embodiments, the HCDR1 comprises a sequence having at least 85%, 90%, 91%, 92%, 93%, 94%, 95%, 96%, 97%, 98%, 99%, or 100% identity to any one of SEQ ID NOs: 104-129, the HCDR2 comprises a sequence having at least 85%, 90%, 91%, 92%, 93%, 94%, 95%, 96%, 97%, 98%, 99%, or 100% identity to any one of SEQ ID NOs: 130-155, and the HCDR3 comprises a sequence having at least 85%, 90%, 91%, 92%, 93%, 94%, 95%, 96%, 97%, 98%, 99%, or 100% identity to any one of SEQ ID NOs: 156-181. In some embodiments, the VH comprises a combination of HCDR1, HCDR2, and HCDR3 as depicted in FIG. 2.

[0110] In some embodiments, the LCDR1 comprises a sequence having at least 85%, 90%, 91%, 92%, 93%, 94%, 95%, 96%, 97%, 98%, 99%, or 100% identity to any one of SEQ ID NOs: 385-410. In some embodiments, the LCDR2 comprises a sequence having at least 85%, 90%, 91%, 92%, 93%, 94%, 95%, 96%, 97%, 98%, 99%, or 100% identity to any one of SEQ ID NOs: 411-436. In some embodiments, the LCDR3 comprises a sequence having at least 85%, 90%, 91%, 92%, 93%, 94%, 95%, 96%, 97%, 98%, 99%, or 100% identity to any one of SEQ ID NOs: 437-462. In some embodiments, the LCDR1 comprises a sequence having at least 85%, 90%, 91%, 92%, 93%, 94%, 95%, 96%, 97%, 98%, 99%, or 100% identity to any one of SEQ ID NOs: 385-410, the LCDR2 comprises a sequence having at least 85%, 90%, 91%, 92%, 93%, 94%, 95%, 96%, 97%, 98%, 99%, or 100% identity to any one of SEQ ID NOs: 411-436, and the LCDR3 comprises a sequence having at least 85%, 90%, 91%, 92%, 93%, 94%, 95%, 96%, 97%, 98%, 99%, or 100% identity to any one of SEQ ID NOs: 437-462. In some embodiments, the VL comprises a combination of LCDR1, LCDR2, and LCDR3 as depicted in FIG. 3.

[0111] In some embodiments, 1) the HCDR1 comprises a sequence having at least 85%, 90%, 91%, 92%, 93%, 94%, 95%, 96%, 97%, 98%, 99%, or 100% identity to SEQ ID NO: 104, the HCDR2 comprises a sequence having at least 85%, 90%, 91%, 92%, 93%, 94%, 95%, 96%, 97%, 98%, 99%, or 100% identity to SEQ ID NO: 130, and the HCDR3 comprises a sequence having at least 85%, 90%, 91%, 92%, 93%, 94%, 95%, 96%, 97%, 98%, 99%, or 100% identity to SEQ ID NO: 156;
[0112] 2) the HCDR1 comprises a sequence having at least 85%, 90%, 91%, 92%, 93%, 94%, 95%, 96%, 97%, 98%, 99%, or 100% identity to SEQ ID NO: 105, the HCDR2 comprises a sequence having at least 85%, 90%, 91%, 92%, 93%, 94%, 95%, 96%, 97%, 98%, 99%, or 100% identity to SEQ ID NO: 131, and the HCDR3 comprises a sequence having at least 85%, 90%, 91%, 92%, 93%, 94%, 95%, 96%, 97%, 98%, 99%, or 100% identity to SEQ ID NO: 157;
[0113] 3) the HCDR1 comprises a sequence having at least 85%, 90%, 91%, 92%, 93%, 94%, 95%, 96%, 97%, 98%, 99%, or 100% identity to SEQ ID NO: 106, the HCDR2 comprises a sequence having at least 85%, 90%, 91%, 92%, 93%, 94%, 95%, 96%, 97%, 98%, 99%, or 100% identity to SEQ ID NO: 132, and the HCDR3 comprises a sequence having at least 85%, 90%, 91%, 92%, 93%, 94%, 95%, 96%, 97%, 98%, 99%, or 100% identity to SEQ ID NO: 158;
[0114] 4) the HCDR1 comprises a sequence having at least 85%, 90%, 91%, 92%, 93%, 94%, 95%, 96%, 97%, 98%, 99%, or 100% identity to SEQ ID NO: 107, the HCDR2 comprises a sequence having at least 85%, 90%, 91%, 92%, 93%, 94%, 95%, 96%, 97%, 98%, 99%, or 100% identity to SEQ ID NO: 133, and the HCDR3 comprises a sequence having at least 85%, 90%, 91%, 92%, 93%, 94%, 95%, 96%, 97%, 98%, 99%, or 100% identity to SEQ ID NO: 159;
[0115] 5) the HCDR1 comprises a sequence having at least 85%, 90%, 91%, 92%, 93%, 94%, 95%, 96%, 97%, 98%, 99%, or 100% identity to SEQ ID NO: 108, the HCDR2 comprises a sequence having at least 85%, 90%, 91%, 92%, 93%, 94%, 95%, 96%, 97%, 98%, 99%, or 100% identity to SEQ ID NO: 134, and the HCDR3 comprises a sequence having at least 85%, 90%, 91%, 92%, 93%, 94%, 95%, 96%, 97%, 98%, 99%, or 100% identity to SEQ ID NO: 160;
[0116] 6) the HCDR1 comprises a sequence having at least 85%, 90%, 91%, 92%, 93%, 94%, 95%, 96%, 97%, 98%, 99%, or 100% identity to SEQ ID NO: 109, the HCDR2 comprises a sequence having at least 85%, 90%, 91%, 92%, 93%, 94%, 95%, 96%, 97%, 98%, 99%, or 100% identity to SEQ ID NO: 135, and the HCDR3 comprises a sequence having at least 85%, 90%, 91%, 92%, 93%, 94%, 95%, 96%, 97%, 98%, 99%, or 100% identity to SEQ ID NO: 161;
[0117] 7) the HCDR1 comprises a sequence having at least 85%, 90%, 91%, 92%, 93%, 94%, 95%, 96%, 97%, 98%, 99%, or 100% identity to SEQ ID NO: 110, the HCDR2 comprises a sequence having at least 85%, 90%, 91%, 92%, 93%, 94%, 95%, 96%, 97%, 98%, 99%, or 100% identity to SEQ ID NO: 136, and the HCDR3 comprises a sequence having at least 85%, 90%, 91%, 92%, 93%, 94%, 95%, 96%, 97%, 98%, 99%, or 100% identity to SEQ ID NO: 162;
[0118] 8) the HCDR1 comprises a sequence having at least 85%, 90%, 91%, 92%, 93%, 94%, 95%, 96%, 97%, 98%, 99%, or 100% identity to SEQ ID NO: 111, the HCDR2 comprises a sequence having at least 85%, 90%, 91%, 92%, 93%, 94%, 95%, 96%, 97%, 98%, 99%, or 100% identity to SEQ ID NO: 137, and the HCDR3 comprises a sequence having at least 85%, 90%, 91%, 92%, 93%, 94%, 95%, 96%, 97%, 98%, 99%, or 100% identity to SEQ ID NO: 163;
[0119] 9) the HCDR1 comprises a sequence having at least 85%, 90%, 91%, 92%, 93%, 94%, 95%, 96%, 97%, 98%, 99%, or 100% identity to SEQ ID NO: 112, the HCDR2 comprises a sequence having at least 85%, 90%, 91%, 92%, 93%, 94%, 95%, 96%, 97%, 98%, 99%, or 100% identity to SEQ ID NO: 138, and the HCDR3 comprises a sequence having at least 85%, 90%, 91%, 92%, 93%, 94%, 95%, 96%, 97%, 98%, 99%, or 100% identity to SEQ ID NO: 164;
[0120] 10) the HCDR1 comprises a sequence having at least 85%, 90%, 91%, 92%, 93%, 94%, 95%, 96%, 97%, 98%, 99%, or 100% identity to SEQ ID NO: 113, the HCDR2 comprises a sequence having at least 85%, 90%, 91%, 92%, 93%, 94%, 95%, 96%, 97%, 98%, 99%, or 100% identity to SEQ ID NO: 139, and the HCDR3 comprises a sequence having at least 85%, 90%, 91%, 92%, 93%, 94%, 95%, 96%, 97%, 98%, 99%, or 100% identity to SEQ ID NO: 165;
[0121] 11) the HCDR1 comprises a sequence having at least 85%, 90%, 91%, 92%, 93%, 94%, 95%, 96%, 97%, 98%, 99%, or 100% identity to SEQ ID NO: 114, the HCDR2 comprises a sequence having at least 85%, 90%, 91%, 92%, 93%, 94%, 95%, 96%, 97%, 98%, 99%, or 100% identity to SEQ ID NO: 140, and the HCDR3 comprises a sequence having at least 85%, 90%, 91%, 92%, 93%, 94%, 95%, 96%, 97%, 98%, 99%, or 100% identity to SEQ ID NO: 166;
[0122] 12) the HCDR1 comprises a sequence having at least 85%, 90%, 91%, 92%, 93%, 94%, 95%, 96%, 97%, 98%, 99%, or 100% identity to SEQ ID NO: 115, the HCDR2 comprises a sequence having at least 85%, 90%, 91%, 92%, 93%, 94%, 95%, 96%, 97%, 98%, 99%, or 100% identity to SEQ ID NO: 141, and the HCDR3 comprises a sequence having at least 85%, 90%, 91%, 92%, 93%, 94%, 95%, 96%, 97%, 98%, 99%, or 100% identity to SEQ ID NO: 167;
[0123] 13) the HCDR1 comprises a sequence having at least 85%, 90%, 91%, 92%, 93%, 94%, 95%, 96%, 97%, 98%, 99%, or 100% identity to SEQ ID NO: 116, the HCDR2 comprises a sequence having at least 85%, 90%, 91%, 92%, 93%, 94%, 95%, 96%, 97%, 98%, 99%, or 100% identity to SEQ ID NO: 142, and the HCDR3 comprises a sequence having at least 85%, 90%, 91%, 92%, 93%, 94%, 95%, 96%, 97%, 98%, 99%, or 100% identity to SEQ ID NO: 168;
[0124] 14) the HCDR1 comprises a sequence having at least 85%, 90%, 91%, 92%, 93%, 94%, 95%, 96%, 97%, 98%, 99%, or 100% identity to SEQ ID NO: 117, the HCDR2 comprises a sequence having at least 85%, 90%, 91%, 92%, 93%, 94%, 95%, 96%, 97%, 98%, 99%, or 100% identity to SEQ ID NO: 143, and the HCDR3 comprises a sequence having at least 85%, 90%, 91%, 92%, 93%, 94%, 95%, 96%, 97%, 98%, 99%, or 100% identity to SEQ ID NO: 169;
[0125] 15) the HCDR1 comprises a sequence having at least 85%, 90%, 91%, 92%, 93%, 94%, 95%, 96%, 97%, 98%, 99%, or 100% identity to SEQ ID NO: 118, the HCDR2 comprises a sequence having at least 85%, 90%, 91%, 92%, 93%, 94%, 95%, 96%, 97%, 98%, 99%, or 100% identity to SEQ ID NO: 144, and the HCDR3 comprises a sequence having at least 85%, 90%, 91%, 92%, 93%, 94%, 95%, 96%, 97%, 98%, 99%, or 100% identity to SEQ ID NO: 170;
[0126] 16) the HCDR1 comprises a sequence having at least 85%, 90%, 91%, 92%, 93%, 94%, 95%, 96%, 97%, 98%, 99%, or 100% identity to SEQ ID NO: 119, the HCDR2 comprises a sequence having at least 85%, 90%, 91%, 92%, 93%, 94%, 95%, 96%, 97%, 98%, 99%, or 100% identity to SEQ ID NO: 145, and the HCDR3 comprises a sequence having at least 85%, 90%, 91%, 92%, 93%, 94%, 95%, 96%, 97%, 98%, 99%, or 100% identity to SEQ ID NO: 171;
[0127] 17) the HCDR1 comprises a sequence having at least 85%, 90%, 91%, 92%, 93%, 94%, 95%, 96%, 97%, 98%, 99%, or 100% identity to SEQ ID NO: 120, the HCDR2 comprises a sequence having at least 85%, 90%, 91%, 92%, 93%, 94%, 95%, 96%, 97%, 98%, 99%, or 100% identity to SEQ ID NO: 146, and the HCDR3 comprises a sequence having at least 85%, 90%, 91%, 92%, 93%, 94%, 95%, 96%, 97%, 98%, 99%, or 100% identity to SEQ ID NO: 172;
[0128] 18) the HCDR1 comprises a sequence having at least 85%, 90%, 91%, 92%, 93%, 94%, 95%, 96%, 97%, 98%, 99%, or 100% identity to SEQ ID NO: 121, the HCDR2 comprises a sequence having at least 85%, 90%, 91%, 92%, 93%, 94%, 95%, 96%, 97%, 98%, 99%, or 100% identity to SEQ ID NO: 147, and the HCDR3 comprises a sequence having at least 85%, 90%, 91%, 92%, 93%, 94%, 95%, 96%, 97%, 98%, 99%, or 100% identity to SEQ ID NO: 173;
[0129] 19) the HCDR1 comprises a sequence having at least 85%, 90%, 91%, 92%, 93%, 94%, 95%, 96%, 97%, 98%, 99%, or 100% identity to SEQ ID NO: 122, the HCDR2 comprises a sequence having at least 85%, 90%, 91%, 92%, 93%, 94%, 95%, 96%, 97%, 98%, 99%, or 100% identity to SEQ ID NO: 148, and the HCDR3 comprises a sequence having at least 85%, 90%, 91%, 92%, 93%, 94%, 95%, 96%, 97%, 98%, 99%, or 100% identity to SEQ ID NO: 174;
[0130] 20) the HCDR1 comprises a sequence having at least 85%, 90%, 91%, 92%, 93%, 94%, 95%, 96%, 97%, 98%, 99%, or 100% identity to SEQ ID NO: 123, the HCDR2 comprises a sequence having at least 85%, 90%, 91%, 92%, 93%, 94%, 95%, 96%, 97%, 98%, 99%, or 100% identity to SEQ ID NO: 149, and the HCDR3 comprises a sequence having at least 85%, 90%, 91%, 92%, 93%, 94%, 95%, 96%, 97%, 98%, 99%, or 100% identity to SEQ ID NO: 175;
[0131] 21) the HCDR1 comprises a sequence having at least 85%, 90%, 91%, 92%, 93%, 94%, 95%, 96%, 97%, 98%, 99%, or 100% identity to SEQ ID NO: 124, the HCDR2 comprises a sequence having at least 85%, 90%, 91%, 92%, 93%, 94%, 95%, 96%, 97%, 98%, 99%, or 100% identity to SEQ ID NO: 150, and the HCDR3 comprises a sequence having at least 85%, 90%, 91%, 92%, 93%, 94%, 95%, 96%, 97%, 98%, 99%, or 100% identity to SEQ ID NO: 176;
[0132] 22) the HCDR1 comprises a sequence having at least 85%, 90%, 91%, 92%, 93%, 94%, 95%, 96%, 97%, 98%, 99%, or 100% identity to SEQ ID NO: 125, the HCDR2 comprises a sequence having at least 85%, 90%, 91%, 92%, 93%, 94%, 95%, 96%, 97%, 98%, 99%, or 100% identity to SEQ ID NO: 151, and the HCDR3 comprises a sequence having at least 85%, 90%, 91%, 92%, 93%, 94%, 95%, 96%, 97%, 98%, 99%, or 100% identity to SEQ ID NO: 177;
[0133] 23) the HCDR1 comprises a sequence having at least 85%, 90%, 91%, 92%, 93%, 94%, 95%, 96%, 97%, 98%, 99%, or 100% identity to SEQ ID NO: 126, the HCDR2 comprises a sequence having at least 85%, 90%, 91%, 92%, 93%, 94%, 95%, 96%, 97%, 98%, 99%, or 100% identity to SEQ ID NO: 152, and the HCDR3 comprises a sequence having at least 85%, 90%, 91%, 92%, 93%, 94%, 95%, 96%, 97%, 98%, 99%, or 100% identity to SEQ ID NO: 178;
[0134] 24) the HCDR1 comprises a sequence having at least 85%, 90%, 91%, 92%, 93%, 94%, 95%, 96%, 97%, 98%, 99%, or 100% identity to SEQ ID NO: 127, the HCDR2 comprises a sequence having at least 85%, 90%, 91%, 92%, 93%, 94%, 95%, 96%, 97%, 98%, 99%, or 100% identity to SEQ ID NO: 153, and the HCDR3 comprises a sequence having at least 85%, 90%, 91%, 92%, 93%, 94%, 95%, 96%, 97%, 98%, 99%, or 100% identity to SEQ ID NO: 179;
[0135] 25) the HCDR1 comprises a sequence having at least 85%, 90%, 91%, 92%, 93%, 94%, 95%, 96%, 97%, 98%, 99%, or 100% identity to SEQ ID NO: 128, the HCDR2 comprises a sequence having at least 85%, 90%, 91%, 92%, 93%, 94%, 95%, 96%, 97%, 98%, 99%, or 100% identity to SEQ ID NO: 154, and the HCDR3 comprises a sequence having at least 85%, 90%, 91%, 92%, 93%, 94%, 95%, 96%, 97%, 98%, 99%, or 100% identity to SEQ ID NO: 180; or
[0136] 26) the HCDR1 comprises a sequence having at least 85%, 90%, 91%, 92%, 93%, 94%, 95%, 96%, 97%, 98%, 99%, or 100% identity to SEQ ID NO: 129, the HCDR2 comprises a sequence having at least 85%, 90%, 91%, 92%, 93%, 94%, 95%, 96%, 97%, 98%, 99%, or 100% identity to SEQ ID NO: 155, and the HCDR3 comprises a sequence having at least 85%, 90%, 91%, 92%, 93%, 94%, 95%, 96%, 97%, 98%, 99%, or 100% identity to SEQ ID NO: 181.

[0137] In some embodiments, 1) the LCDR1 comprises a sequence having at least 85%, 90%, 91%, 92%, 93%, 94%, 95%, 96%, 97%, 98%, 99%, or 100% identity to SEQ ID NO: 385, the LCDR2 comprises a sequence having at least 85%, 90%, 91%, 92%, 93%, 94%, 95%, 96%, 97%, 98%, 99%, or 100% identity to SEQ ID NO: 411, and the LCDR3 comprises a sequence having at least 85%, 90%, 91%, 92%, 93%, 94%, 95%, 96%, 97%, 98%, 99%, or 100% identity to SEQ ID NO: 437;
[0138] 2) the LCDR1 comprises a sequence having at least 85%, 90%, 91%, 92%, 93%, 94%, 95%, 96%, 97%, 98%, 99%, or 100% identity to SEQ ID NO: 386, the LCDR2 comprises a sequence having at least 85%, 90%, 91%, 92%, 93%, 94%, 95%, 96%, 97%, 98%, 99%, or 100% identity to SEQ ID NO: 412, and the LCDR3 comprises a sequence having at least 85%, 90%, 91%, 92%, 93%, 94%, 95%, 96%, 97%, 98%, 99%, or 100% identity to SEQ ID NO: 438;
[0139] 3) the LCDR1 comprises a sequence having at least 85%, 90%, 91%, 92%, 93%, 94%, 95%, 96%, 97%, 98%, 99%, or 100% identity to SEQ ID NO: 387, the LCDR2 comprises a sequence having at least 85%, 90%, 91%, 92%, 93%, 94%, 95%, 96%, 97%, 98%, 99%, or 100% identity to SEQ ID NO: 413, and the LCDR3 comprises a sequence having at least 85%, 90%, 91%, 92%, 93%, 94%, 95%, 96%, 97%, 98%, 99%, or 100% identity to SEQ ID NO: 439;
[0140] 4) the LCDR1 comprises a sequence having at least 85%, 90%, 91%, 92%, 93%, 94%, 95%, 96%, 97%, 98%, 99%, or 100% identity to SEQ ID NO: 388, the LCDR2 comprises a sequence having at least 85%, 90%, 91%, 92%, 93%, 94%, 95%, 96%, 97%, 98%, 99%, or 100% identity to SEQ ID NO: 414, and the LCDR3 comprises a sequence having at least 85%, 90%, 91%, 92%, 93%, 94%, 95%, 96%, 97%, 98%, 99%, or 100% identity to SEQ ID NO: 440;
[0141] 5) the LCDR1 comprises a sequence having at least 85%, 90%, 91%, 92%, 93%, 94%, 95%, 96%, 97%, 98%, 99%, or 100% identity to SEQ ID NO: 389, the LCDR2 comprises a sequence having at least 85%, 90%, 91%, 92%, 93%, 94%, 95%, 96%, 97%, 98%, 99%, or 100% identity to SEQ ID NO: 415, and the LCDR3 comprises a sequence having at least 85%, 90%, 91%, 92%, 93%, 94%, 95%, 96%, 97%, 98%, 99%, or 100% identity to SEQ ID NO: 441;
[0142] 6) the LCDR1 comprises a sequence having at least 85%, 90%, 91%, 92%, 93%, 94%, 95%, 96%, 97%, 98%, 99%, or 100% identity to SEQ ID NO: 390, the LCDR2 comprises a sequence having at least 85%, 90%, 91%, 92%, 93%, 94%, 95%, 96%, 97%, 98%, 99%, or 100% identity to SEQ ID NO: 416, and the LCDR3 comprises a sequence having at least 85%, 90%, 91%, 92%, 93%, 94%, 95%, 96%, 97%, 98%, 99%, or 100% identity to SEQ ID NO: 442;
[0143] 7) the LCDR1 comprises a sequence having at least 85%, 90%, 91%, 92%, 93%, 94%, 95%, 96%, 97%, 98%, 99%, or 100% identity to SEQ ID NO: 391, the LCDR2 comprises a sequence having at least 85%, 90%, 91%, 92%, 93%, 94%, 95%, 96%, 97%, 98%, 99%, or 100% identity to SEQ ID NO: 417, and the LCDR3 comprises a sequence having at least 85%, 90%, 91%, 92%, 93%, 94%, 95%, 96%, 97%, 98%, 99%, or 100% identity to SEQ ID NO: 443;
[0144] 8) the LCDR1 comprises a sequence having at least 85%, 90%, 91%, 92%, 93%, 94%, 95%, 96%, 97%, 98%, 99%, or 100% identity to SEQ ID NO: 392, the LCDR2 comprises a sequence having at least 85%, 90%, 91%, 92%, 93%, 94%, 95%, 96%, 97%, 98%, 99%, or 100% identity to SEQ ID NO: 418, and the LCDR3 comprises a sequence having at least 85%, 90%, 91%, 92%, 93%, 94%, 95%, 96%, 97%, 98%, 99%, or 100% identity to SEQ ID NO: 444;
[0145] 9) the LCDR1 comprises a sequence having at least 85%, 90%, 91%, 92%, 93%, 94%, 95%, 96%, 97%, 98%, 99%, or 100% identity to SEQ ID NO: 393, the LCDR2 comprises a sequence having at least 85%, 90%, 91%, 92%, 93%, 94%, 95%, 96%, 97%, 98%, 99%, or 100% identity to SEQ ID NO: 419, and the LCDR3 comprises a sequence having at least 85%, 90%, 91%, 92%, 93%, 94%, 95%, 96%, 97%, 98%, 99%, or 100% identity to SEQ ID NO: 445;
[0146] 10) the LCDR1 comprises a sequence having at least 85%, 90%, 91%, 92%, 93%, 94%, 95%, 96%, 97%, 98%, 99%, or 100% identity to SEQ ID NO: 394, the LCDR2 comprises a sequence having at least 85%, 90%, 91%, 92%, 93%, 94%, 95%, 96%, 97%, 98%, 99%, or 100% identity to SEQ ID NO: 420, and the LCDR3 comprises a sequence having at least 85%, 90%, 91%, 92%, 93%, 94%, 95%, 96%, 97%, 98%, 99%, or 100% identity to SEQ ID NO: 446;
[0147] 11) the LCDR1 comprises a sequence having at least 85%, 90%, 91%, 92%, 93%, 94%, 95%, 96%, 97%, 98%, 99%, or 100% identity to SEQ ID NO: 395, the LCDR2 comprises a sequence having at least 85%, 90%, 91%, 92%, 93%, 94%, 95%, 96%, 97%, 98%, 99%, or 100% identity to SEQ ID NO: 421, and the LCDR3 comprises a sequence having at least 85%, 90%, 91%, 92%, 93%, 94%, 95%, 96%, 97%, 98%, 99%, or 100% identity to SEQ ID NO: 447;
[0148] 12) the LCDR1 comprises a sequence having at least 85%, 90%, 91%, 92%, 93%, 94%, 95%, 96%, 97%, 98%, 99%, or 100% identity to SEQ ID NO: 396, the LCDR2 comprises a sequence having at least 85%, 90%, 91%, 92%, 93%, 94%, 95%, 96%, 97%, 98%, 99%, or 100% identity to SEQ ID NO: 422, and the LCDR3 comprises a sequence having at least 85%, 90%, 91%, 92%, 93%, 94%, 95%, 96%, 97%, 98%, 99%, or 100% identity to SEQ ID NO: 448;
[0149] 13) the LCDR1 comprises a sequence having at least 85%, 90%, 91%, 92%, 93%, 94%, 95%, 96%, 97%, 98%, 99%, or 100% identity to SEQ ID NO: 397, the LCDR2 comprises a sequence having at least 85%, 90%, 91%, 92%, 93%, 94%, 95%, 96%, 97%, 98%, 99%, or 100% identity to SEQ ID NO: 423, and the LCDR3 comprises a sequence having at least 85%, 90%, 91%, 92%, 93%, 94%, 95%, 96%, 97%, 98%, 99%, or 100% identity to SEQ ID NO: 449;
[0150] 14) the LCDR1 comprises a sequence having at least 85%, 90%, 91%, 92%, 93%, 94%, 95%, 96%, 97%, 98%, 99%, or 100% identity to SEQ ID NO: 398, the LCDR2 comprises a sequence having at least 85%, 90%, 91%, 92%, 93%, 94%, 95%, 96%, 97%, 98%, 99%, or 100% identity to SEQ ID NO: 424, and the LCDR3 comprises a sequence having at least 85%, 90%, 91%, 92%, 93%, 94%, 95%, 96%, 97%, 98%, 99%, or 100% identity to SEQ ID NO: 450;
[0151] 15) the LCDR1 comprises a sequence having at least 85%, 90%, 91%, 92%, 93%, 94%, 95%, 96%, 97%, 98%, 99%, or 100% identity to SEQ ID NO: 399, the LCDR2 comprises a sequence having at least 85%, 90%, 91%, 92%, 93%, 94%, 95%, 96%, 97%, 98%, 99%, or 100% identity to SEQ ID NO: 425, and the LCDR3 comprises a sequence having at least 85%, 90%, 91%, 92%, 93%, 94%, 95%, 96%, 97%, 98%, 99%, or 100% identity to SEQ ID NO: 451;
[0152] 16) the LCDR1 comprises a sequence having at least 85%, 90%, 91%, 92%, 93%, 94%, 95%, 96%, 97%, 98%, 99%, or 100% identity to SEQ ID NO: 400, the LCDR2 comprises a sequence having at least 85%, 90%, 91%, 92%, 93%, 94%, 95%, 96%, 97%, 98%, 99%, or 100% identity to SEQ ID NO: 426, and the LCDR3 comprises a sequence having at least 85%, 90%, 91%, 92%, 93%, 94%, 95%, 96%, 97%, 98%, 99%, or 100% identity to SEQ ID NO: 452;
[0153] 17) the LCDR1 comprises a sequence having at least 85%, 90%, 91%, 92%, 93%, 94%, 95%, 96%, 97%, 98%, 99%, or 100% identity to SEQ ID NO: 401, the LCDR2 comprises a sequence having at least 85%, 90%, 91%, 92%, 93%, 94%, 95%, 96%, 97%, 98%, 99%, or 100% identity to SEQ ID NO: 427, and the LCDR3 comprises a sequence having at least 85%, 90%, 91%, 92%, 93%, 94%, 95%, 96%, 97%, 98%, 99%, or 100% identity to SEQ ID NO: 453;
[0154] 18) the LCDR1 comprises a sequence having at least 85%, 90%, 91%, 92%, 93%, 94%, 95%, 96%, 97%, 98%, 99%, or 100% identity to SEQ ID NO: 402, the LCDR2 comprises a sequence having at least 85%, 90%, 91%, 92%, 93%, 94%, 95%, 96%, 97%, 98%, 99%, or 100% identity to SEQ ID NO: 428, and the LCDR3 comprises a sequence having at least 85%, 90%, 91%, 92%, 93%, 94%, 95%, 96%, 97%, 98%, 99%, or 100% identity to SEQ ID NO: 454;
[0155] 19) the LCDR1 comprises a sequence having at least 85%, 90%, 91%, 92%, 93%, 94%, 95%, 96%, 97%, 98%, 99%, or 100% identity to SEQ ID NO: 403, the LCDR2 comprises a sequence having at least 85%, 90%, 91%, 92%, 93%, 94%, 95%, 96%, 97%, 98%, 99%, or 100% identity to SEQ ID NO: 429, and the LCDR3 comprises a sequence having at least 85%, 90%, 91%, 92%, 93%, 94%, 95%, 96%, 97%, 98%, 99%, or 100% identity to SEQ ID NO: 455;
[0156] 20) the LCDR1 comprises a sequence having at least 85%, 90%, 91%, 92%, 93%, 94%, 95%, 96%, 97%, 98%, 99%, or 100% identity to SEQ ID NO: 404, the LCDR2 comprises a sequence having at least 85%, 90%, 91%, 92%, 93%, 94%, 95%, 96%, 97%, 98%, 99%, or 100% identity to SEQ ID NO: 430, and the LCDR3 comprises a sequence having at least 85%, 90%, 91%, 92%, 93%, 94%, 95%, 96%, 97%, 98%, 99%, or 100% identity to SEQ ID NO: 456;
[0157] 21) the LCDR1 comprises a sequence having at least 85%, 90%, 91%, 92%, 93%, 94%, 95%, 96%, 97%, 98%, 99%, or 100% identity to SEQ ID NO: 405, the LCDR2 comprises a sequence having at least 85%, 90%, 91%, 92%, 93%, 94%, 95%, 96%, 97%, 98%, 99%, or 100% identity to SEQ ID NO: 431, and the LCDR3 comprises a sequence having at least 85%, 90%, 91%, 92%, 93%, 94%, 95%, 96%, 97%, 98%, 99%, or 100% identity to SEQ ID NO: 457;
[0158] 22) the LCDR1 comprises a sequence having at least 85%, 90%, 91%, 92%, 93%, 94%, 95%, 96%, 97%, 98%, 99%, or 100% identity to SEQ ID NO: 406, the LCDR2 comprises a sequence having at least 85%, 90%, 91%, 92%, 93%, 94%, 95%, 96%, 97%, 98%, 99%, or 100% identity to SEQ ID NO: 432, and the LCDR3 comprises a sequence having at least 85%, 90%, 91%, 92%, 93%, 94%, 95%, 96%, 97%, 98%, 99%, or 100% identity to SEQ ID NO: 458;
[0159] 23) the LCDR1 comprises a sequence having at least 85%, 90%, 91%, 92%, 93%, 94%, 95%, 96%, 97%, 98%, 99%, or 100% identity to SEQ ID NO: 407, the LCDR2 comprises a sequence having at least 85%, 90%, 91%, 92%, 93%, 94%, 95%, 96%, 97%, 98%, 99%, or 100% identity to SEQ ID NO: 433, and the LCDR3 comprises a sequence having at least 85%, 90%, 91%, 92%, 93%, 94%, 95%, 96%, 97%, 98%, 99%, or 100% identity to SEQ ID NO: 459;
[0160] 24) the LCDR1 comprises a sequence having at least 85%, 90%, 91%, 92%, 93%, 94%, 95%, 96%, 97%, 98%, 99%, or 100% identity to SEQ ID NO: 408, the LCDR2 comprises a sequence having at least 85%, 90%, 91%, 92%, 93%, 94%, 95%, 96%, 97%, 98%, 99%, or 100% identity to SEQ ID NO: 434, and the LCDR3 comprises a sequence having at least 85%, 90%, 91%, 92%, 93%, 94%, 95%, 96%, 97%, 98%, 99%, or 100% identity to SEQ ID NO: 460;
[0161] 25) the LCDR1 comprises a sequence having at least 85%, 90%, 91%, 92%, 93%, 94%, 95%, 96%, 97%, 98%, 99%, or 100% identity to SEQ ID NO: 409, the LCDR2 comprises a sequence having at least 85%, 90%, 91%, 92%, 93%, 94%, 95%, 96%, 97%, 98%, 99%, or 100% identity to SEQ ID NO: 435, and the LCDR3 comprises a sequence having at least 85%, 90%, 91%, 92%, 93%, 94%, 95%, 96%, 97%, 98%, 99%, or 100% identity to SEQ ID NO: 461; or
[0162] 26) the LCDR1 comprises a sequence having at least 85%, 90%, 91%, 92%, 93%, 94%, 95%, 96%, 97%, 98%, 99%, or 100% identity to SEQ ID NO: 410, the LCDR2 comprises a sequence having at least 85%, 90%, 91%, 92%, 93%, 94%, 95%, 96%, 97%, 98%, 99%, or 100% identity to SEQ ID NO: 436, and the LCDR3 comprises a sequence having at least 85%, 90%, 91%, 92%, 93%, 94%, 95%, 96%, 97%, 98%, 99%, or 100% identity to SEQ ID NO: 462.

[0163] In some embodiments, 1) the HCDR1 comprises a sequence having at least 85%, 90%, 91%, 92%, 93%, 94%, 95%, 96%, 97%, 98%, 99%, or 100% identity to SEQ ID NO: 104, the HCDR2 comprises a sequence having at least 85%, 90%, 91%, 92%, 93%, 94%, 95%, 96%, 97%, 98%, 99%, or 100% identity to SEQ ID NO: 130, the HCDR3 comprises a sequence having at least 85%, 90%, 91%, 92%, 93%, 94%, 95%, 96%, 97%, 98%, 99%, or 100% identity to SEQ ID NO: 156; the LCDR1 comprises a sequence having at least 85%, 90%, 91%, 92%, 93%, 94%, 95%, 96%, 97%, 98%, 99%, or 100% identity to SEQ ID NO: 385, the LCDR2 comprises a sequence having at least 85%, 90%, 91%, 92%, 93%, 94%, 95%, 96%, 97%, 98%, 99%, or 100% identity to SEQ ID NO: 411, and the LCDR3 comprises a sequence having at least 85%, 90%, 91%, 92%, 93%, 94%, 95%, 96%, 97%, 98%, 99%, or 100% identity to SEQ ID NO: 437;
[0164] 2) the HCDR1 comprises a sequence having at least 85%, 90%, 91%, 92%, 93%, 94%, 95%, 96%, 97%, 98%, 99%, or 100% identity to SEQ ID NO: 105, the HCDR2 comprises a sequence having at least 85%, 90%, 91%, 92%, 93%, 94%, 95%, 96%, 97%, 98%, 99%, or 100% identity to SEQ ID NO: 131, the HCDR3 comprises a sequence having at least 85%, 90%, 91%, 92%, 93%, 94%, 95%, 96%, 97%, 98%, 99%, or 100% identity to SEQ ID NO: 157; the LCDR1 comprises a sequence having at least 85%, 90%, 91%, 92%, 93%, 94%, 95%, 96%, 97%, 98%, 99%, or 100% identity to SEQ ID NO: 386, the LCDR2 comprises a sequence having at least 85%, 90%, 91%, 92%, 93%, 94%, 95%, 96%, 97%, 98%, 99%, or 100% identity to SEQ ID NO: 412, and the LCDR3 comprises a sequence having at least 85%, 90%, 91%, 92%, 93%, 94%, 95%, 96%, 97%, 98%, 99%, or 100% identity to SEQ ID NO: 438;
[0165] 3) the HCDR1 comprises a sequence having at least 85%, 90%, 91%, 92%, 93%, 94%, 95%, 96%, 97%, 98%, 99%, or 100% identity to SEQ ID NO: 106, the HCDR2 comprises a sequence having at least 85%, 90%, 91%, 92%, 93%, 94%, 95%, 96%, 97%, 98%, 99%, or 100% identity to SEQ ID NO: 132, the HCDR3 comprises a sequence having at least 85%, 90%, 91%, 92%, 93%, 94%, 95%, 96%, 97%, 98%, 99%, or 100% identity to SEQ ID NO: 158; the LCDR1 comprises a sequence having at least 85%, 90%, 91%, 92%, 93%, 94%, 95%, 96%, 97%, 98%, 99%, or 100% identity to SEQ ID NO: 387, the LCDR2 comprises a sequence having at least 85%, 90%, 91%, 92%, 93%, 94%, 95%, 96%, 97%, 98%, 99%, or 100% identity to SEQ ID NO: 413, and the LCDR3 comprises a sequence having at least 85%, 90%, 91%, 92%, 93%, 94%, 95%, 96%, 97%, 98%, 99%, or 100% identity to SEQ ID NO: 439;
[0166] 4) the HCDR1 comprises a sequence having at least 85%, 90%, 91%, 92%, 93%, 94%, 95%, 96%, 97%, 98%, 99%, or 100% identity to SEQ ID NO: 107, the HCDR2 comprises a sequence having at least 85%, 90%, 91%, 92%, 93%, 94%, 95%, 96%, 97%, 98%, 99%, or 100% identity to SEQ ID NO: 133, the HCDR3 comprises a sequence having at least 85%, 90%, 91%, 92%, 93%, 94%, 95%, 96%, 97%, 98%, 99%, or 100% identity to SEQ ID NO: 159; the LCDR1 comprises a sequence having at least 85%, 90%, 91%, 92%, 93%, 94%, 95%, 96%, 97%, 98%, 99%, or 100% identity to SEQ ID NO: 388, the LCDR2 comprises a sequence having at least 85%, 90%, 91%, 92%, 93%, 94%, 95%, 96%, 97%, 98%, 99%, or 100% identity to SEQ ID NO: 414, and the LCDR3 comprises a sequence having at least 85%, 90%, 91%, 92%, 93%, 94%, 95%, 96%, 97%, 98%, 99%, or 100% identity to SEQ ID NO: 440;
[0167] 5) the HCDR1 comprises a sequence having at least 85%, 90%, 91%, 92%, 93%, 94%, 95%, 96%, 97%, 98%, 99%, or 100% identity to SEQ ID NO: 108, the HCDR2 comprises a sequence having at least 85%, 90%, 91%, 92%, 93%, 94%, 95%, 96%, 97%, 98%, 99%, or 100% identity to SEQ ID NO: 134, the HCDR3 comprises a sequence having at least 85%, 90%, 91%, 92%, 93%, 94%, 95%, 96%, 97%, 98%, 99%, or 100% identity to SEQ ID NO: 160; the LCDR1 comprises a sequence having at least 85%, 90%, 91%, 92%, 93%, 94%, 95%, 96%, 97%, 98%, 99%, or 100% identity to SEQ ID NO: 389, the LCDR2 comprises a sequence having at least 85%, 90%, 91%, 92%, 93%, 94%, 95%, 96%, 97%, 98%, 99%, or 100% identity to SEQ ID NO: 415, and the LCDR3 comprises a sequence having at least 85%, 90%, 91%, 92%, 93%, 94%, 95%, 96%, 97%, 98%, 99%, or 100% identity to SEQ ID NO: 441;
[0168] 6) the HCDR1 comprises a sequence having at least 85%, 90%, 91%, 92%, 93%, 94%, 95%, 96%, 97%, 98%, 99%, or 100% identity to SEQ ID NO: 109, the HCDR2 comprises a sequence having at least 85%, 90%, 91%, 92%, 93%, 94%, 95%, 96%, 97%, 98%, 99%, or 100% identity to SEQ ID NO: 135, the HCDR3 comprises a sequence having at least 85%, 90%, 91%, 92%, 93%, 94%, 95%, 96%, 97%, 98%, 99%, or 100% identity to SEQ ID NO: 161; the LCDR1 comprises a sequence having at least 85%, 90%, 91%, 92%, 93%, 94%, 95%, 96%, 97%, 98%, 99%, or 100% identity to SEQ ID NO: 390, the LCDR2 comprises a sequence having at least 85%, 90%, 91%, 92%, 93%, 94%, 95%, 96%, 97%, 98%, 99%, or 100% identity to SEQ ID NO: 416, and the LCDR3 comprises a sequence having at least 85%, 90%, 91%, 92%, 93%, 94%, 95%, 96%, 97%, 98%, 99%, or 100% identity to SEQ ID NO: 442;
[0169] 7) the HCDR1 comprises a sequence having at least 85%, 90%, 91%, 92%, 93%, 94%, 95%, 96%, 97%, 98%, 99%, or 100% identity to SEQ ID NO: 110, the HCDR2 comprises a sequence having at least 85%, 90%, 91%, 92%, 93%, 94%, 95%, 96%, 97%, 98%, 99%, or 100% identity to SEQ ID NO: 136, the HCDR3 comprises a sequence having at least 85%, 90%, 91%, 92%, 93%, 94%, 95%, 96%, 97%, 98%, 99%, or 100% identity to SEQ ID NO: 162; the LCDR1 comprises a sequence having at least 85%, 90%, 91%, 92%, 93%, 94%, 95%, 96%, 97%, 98%, 99%, or 100% identity to SEQ ID NO: 391, the LCDR2 comprises a sequence having at least 85%, 90%, 91%, 92%, 93%, 94%, 95%, 96%, 97%, 98%, 99%, or 100% identity to SEQ ID NO: 417, and the LCDR3 comprises a sequence having at least 85%, 90%, 91%, 92%, 93%, 94%, 95%, 96%, 97%, 98%, 99%, or 100% identity to SEQ ID NO: 443;
[0170] 8) the HCDR1 comprises a sequence having at least 85%, 90%, 91%, 92%, 93%, 94%, 95%, 96%, 97%, 98%, 99%, or 100% identity to SEQ ID NO: 111, the HCDR2 comprises a sequence having at least 85%, 90%, 91%, 92%, 93%, 94%, 95%, 96%, 97%, 98%, 99%, or 100% identity to SEQ ID NO: 137, the HCDR3 comprises a sequence having at least 85%, 90%, 91%, 92%, 93%, 94%, 95%, 96%, 97%, 98%, 99%, or 100% identity to SEQ ID NO: 163; the LCDR1 comprises a sequence having at least 85%, 90%, 91%, 92%, 93%, 94%, 95%, 96%, 97%, 98%, 99%, or 100% identity to SEQ ID NO: 392, the LCDR2 comprises a sequence having at least 85%, 90%, 91%, 92%, 93%, 94%, 95%, 96%, 97%, 98%, 99%, or 100% identity to SEQ ID NO: 418, and the LCDR3 comprises a sequence having at least 85%, 90%, 91%, 92%, 93%, 94%, 95%, 96%, 97%, 98%, 99%, or 100% identity to SEQ ID NO: 444;
[0171] 9) the HCDR1 comprises a sequence having at least 85%, 90%, 91%, 92%, 93%, 94%, 95%, 96%, 97%, 98%, 99%, or 100% identity to SEQ ID NO: 112, the HCDR2 comprises a sequence having at least 85%, 90%, 91%, 92%, 93%, 94%, 95%, 96%, 97%, 98%, 99%, or 100% identity to SEQ ID NO: 138, the HCDR3 comprises a sequence having at least 85%, 90%, 91%, 92%, 93%, 94%, 95%, 96%, 97%, 98%, 99%, or 100% identity to SEQ ID NO: 164; the LCDR1 comprises a sequence having at least 85%, 90%, 91%, 92%, 93%, 94%, 95%, 96%, 97%, 98%, 99%, or 100% identity to SEQ ID NO: 393, the LCDR2 comprises a sequence having at least 85%, 90%, 91%, 92%, 93%, 94%, 95%, 96%, 97%, 98%, 99%, or 100% identity to SEQ ID NO: 419, and the LCDR3 comprises a sequence having at least 85%, 90%, 91%, 92%, 93%, 94%, 95%, 96%, 97%, 98%, 99%, or 100% identity to SEQ ID NO: 445;
[0172] 10) the HCDR1 comprises a sequence having at least 85%, 90%, 91%, 92%, 93%, 94%, 95%, 96%, 97%, 98%, 99%, or 100% identity to SEQ ID NO: 113, the HCDR2 comprises a sequence having at least 85%, 90%, 91%, 92%, 93%, 94%, 95%, 96%, 97%, 98%, 99%, or 100% identity to SEQ ID NO: 139, the HCDR3 comprises a sequence having at least 85%, 90%, 91%, 92%, 93%, 94%, 95%, 96%, 97%, 98%, 99%, or 100% identity to SEQ ID NO: 165; the LCDR1 comprises a sequence having at least 85%, 90%, 91%, 92%, 93%, 94%, 95%, 96%, 97%, 98%, 99%, or 100% identity to SEQ ID NO: 394, the LCDR2 comprises a sequence having at least 85%, 90%, 91%, 92%, 93%, 94%, 95%, 96%, 97%, 98%, 99%, or 100% identity to SEQ ID NO: 420, and the LCDR3 comprises a sequence having at least 85%, 90%, 91%, 92%, 93%, 94%, 95%, 96%, 97%, 98%, 99%, or 100% identity to SEQ ID NO: 446;
[0173] 11) the HCDR1 comprises a sequence having at least 85%, 90%, 91%, 92%, 93%, 94%, 95%, 96%, 97%, 98%, 99%, or 100% identity to SEQ ID NO: 114, the HCDR2 comprises a sequence having at least 85%, 90%, 91%, 92%, 93%, 94%, 95%, 96%, 97%, 98%, 99%, or 100% identity to SEQ ID NO: 140, the HCDR3 comprises a sequence having at least 85%, 90%, 91%, 92%, 93%, 94%, 95%, 96%, 97%, 98%, 99%, or 100% identity to SEQ ID NO: 166; the LCDR1 comprises a sequence having at least 85%, 90%, 91%, 92%, 93%, 94%, 95%, 96%, 97%, 98%, 99%, or 100% identity to SEQ ID NO: 395, the LCDR2 comprises a sequence having at least 85%, 90%, 91%, 92%, 93%, 94%, 95%, 96%, 97%, 98%, 99%, or 100% identity to SEQ ID NO: 421, and the LCDR3 comprises a sequence having at least 85%, 90%, 91%, 92%, 93%, 94%, 95%, 96%, 97%, 98%, 99%, or 100% identity to SEQ ID NO: 447;
[0174] 12) the HCDR1 comprises a sequence having at least 85%, 90%, 91%, 92%, 93%, 94%, 95%, 96%, 97%, 98%, 99%, or 100% identity to SEQ ID NO: 115, the HCDR2 comprises a sequence having at least 85%, 90%, 91%, 92%, 93%, 94%, 95%, 96%, 97%, 98%, 99%, or 100% identity to SEQ ID NO: 141, the HCDR3 comprises a sequence having at least 85%, 90%, 91%, 92%, 93%, 94%, 95%, 96%, 97%, 98%, 99%, or 100% identity to SEQ ID NO: 167; the LCDR1 comprises a sequence having at least 85%, 90%, 91%, 92%, 93%, 94%, 95%, 96%, 97%, 98%, 99%, or 100% identity to SEQ ID NO: 396, the LCDR2 comprises a sequence having at least 85%, 90%, 91%, 92%, 93%, 94%, 95%, 96%, 97%, 98%, 99%, or 100% identity to SEQ ID NO: 422, and the LCDR3 comprises a sequence having at least 85%, 90%, 91%, 92%, 93%, 94%, 95%, 96%, 97%, 98%, 99%, or 100% identity to SEQ ID NO: 448;
[0175] 13) the HCDR1 comprises a sequence having at least 85%, 90%, 91%, 92%, 93%, 94%, 95%, 96%, 97%, 98%, 99%, or 100% identity to SEQ ID NO: 116, the HCDR2 comprises a sequence having at least 85%, 90%, 91%, 92%, 93%, 94%, 95%, 96%, 97%, 98%, 99%, or 100% identity to SEQ ID NO: 142, the HCDR3 comprises a sequence having at least 85%, 90%, 91%, 92%, 93%, 94%, 95%, 96%, 97%, 98%, 99%, or 100% identity to SEQ ID NO: 168; the LCDR1 comprises a sequence having at least 85%, 90%, 91%, 92%, 93%, 94%, 95%, 96%, 97%, 98%, 99%, or 100% identity to SEQ ID NO: 397, the LCDR2 comprises a sequence having at least 85%, 90%, 91%, 92%, 93%, 94%, 95%, 96%, 97%, 98%, 99%, or 100% identity to SEQ ID NO: 423, and the LCDR3 comprises a sequence having at least 85%, 90%, 91%, 92%, 93%, 94%, 95%, 96%, 97%, 98%, 99%, or 100% identity to SEQ ID NO: 449;
[0176] 14) the HCDR1 comprises a sequence having at least 85%, 90%, 91%, 92%, 93%, 94%, 95%, 96%, 97%, 98%, 99%, or 100% identity to SEQ ID NO: 117, the HCDR2 comprises a sequence having at least 85%, 90%, 91%, 92%, 93%, 94%, 95%, 96%, 97%, 98%, 99%, or 100% identity to SEQ ID NO: 143, the HCDR3 comprises a sequence having at least 85%, 90%, 91%, 92%, 93%, 94%, 95%, 96%, 97%, 98%, 99%, or 100% identity to SEQ ID NO: 169; the LCDR1 comprises a sequence having at least 85%, 90%, 91%, 92%, 93%, 94%, 95%, 96%, 97%, 98%, 99%, or 100% identity to SEQ ID NO: 398, the LCDR2 comprises a sequence having at least 85%, 90%, 91%, 92%, 93%, 94%, 95%, 96%, 97%, 98%, 99%, or 100% identity to SEQ ID NO: 424, and the LCDR3 comprises a sequence having at least 85%, 90%, 91%, 92%, 93%, 94%, 95%, 96%, 97%, 98%, 99%, or 100% identity to SEQ ID NO: 450;
[0177] 15) the HCDR1 comprises a sequence having at least 85%, 90%, 91%, 92%, 93%, 94%, 95%, 96%, 97%, 98%, 99%, or 100% identity to SEQ ID NO: 118, the HCDR2 comprises a sequence having at least 85%, 90%, 91%, 92%, 93%, 94%, 95%, 96%, 97%, 98%, 99%, or 100% identity to SEQ ID NO: 144, the HCDR3 comprises a sequence having at least 85%, 90%, 91%, 92%, 93%, 94%, 95%, 96%, 97%, 98%, 99%, or 100% identity to SEQ ID NO: 170; the LCDR1 comprises a sequence having at least 85%, 90%, 91%, 92%, 93%, 94%, 95%, 96%, 97%, 98%, 99%, or 100% identity to SEQ ID NO: 399, the LCDR2 comprises a sequence having at least 85%, 90%, 91%, 92%, 93%, 94%, 95%, 96%, 97%, 98%, 99%, or 100% identity to SEQ ID NO: 425, and the LCDR3 comprises a sequence having at least 85%, 90%, 91%, 92%, 93%, 94%, 95%, 96%, 97%, 98%, 99%, or 100% identity to SEQ ID NO: 451;
[0178] 16) the HCDR1 comprises a sequence having at least 85%, 90%, 91%, 92%, 93%, 94%, 95%, 96%, 97%, 98%, 99%, or 100% identity to SEQ ID NO: 119, the HCDR2 comprises a sequence having at least 85%, 90%, 91%, 92%, 93%, 94%, 95%, 96%, 97%, 98%, 99%, or 100% identity to SEQ ID NO: 145, the HCDR3 comprises a sequence having at least 85%, 90%, 91%, 92%, 93%, 94%, 95%, 96%, 97%, 98%, 99%, or 100% identity to SEQ ID NO: 171; the LCDR1 comprises a sequence having at least 85%, 90%, 91%, 92%, 93%, 94%, 95%, 96%, 97%, 98%, 99%, or 100% identity to SEQ ID NO: 400, the LCDR2 comprises a sequence having at least 85%, 90%, 91%, 92%, 93%, 94%, 95%, 96%, 97%, 98%, 99%, or 100% identity to SEQ ID NO: 426, and the LCDR3 comprises a sequence having at least 85%, 90%, 91%, 92%, 93%, 94%, 95%, 96%, 97%, 98%, 99%, or 100% identity to SEQ ID NO: 452;
[0179] 17) the HCDR1 comprises a sequence having at least 85%, 90%, 91%, 92%, 93%, 94%, 95%, 96%, 97%, 98%, 99%, or 100% identity to SEQ ID NO: 120, the HCDR2 comprises a sequence having at least 85%, 90%, 91%, 92%, 93%, 94%, 95%, 96%, 97%, 98%, 99%, or 100% identity to SEQ ID NO: 146, the HCDR3 comprises a sequence having at least 85%, 90%, 91%, 92%, 93%, 94%, 95%, 96%, 97%, 98%, 99%, or 100% identity to SEQ ID NO: 172; the LCDR1 comprises a sequence having at least 85%, 90%, 91%, 92%, 93%, 94%, 95%, 96%, 97%, 98%, 99%, or 100% identity to SEQ ID NO: 401, the LCDR2 comprises a sequence having at least 85%, 90%, 91%, 92%, 93%, 94%, 95%, 96%, 97%, 98%, 99%, or 100% identity to SEQ ID NO: 427, and the LCDR3 comprises a sequence having at least 85%, 90%, 91%, 92%, 93%, 94%, 95%, 96%, 97%, 98%, 99%, or 100% identity to SEQ ID NO: 453;
[0180] 18) the HCDR1 comprises a sequence having at least 85%, 90%, 91%, 92%, 93%, 94%, 95%, 96%, 97%, 98%, 99%, or 100% identity to SEQ ID NO: 121, the HCDR2 comprises a sequence having at least 85%, 90%, 91%, 92%, 93%, 94%, 95%, 96%, 97%, 98%, 99%, or 100% identity to SEQ ID NO: 147, the HCDR3 comprises a sequence having at least 85%, 90%, 91%, 92%, 93%, 94%, 95%, 96%, 97%, 98%, 99%, or 100% identity to SEQ ID NO: 173; the LCDR1 comprises a sequence having at least 85%, 90%, 91%, 92%, 93%, 94%, 95%, 96%, 97%, 98%, 99%, or 100% identity to SEQ ID NO: 402, the LCDR2 comprises a sequence having at least 85%, 90%, 91%, 92%, 93%, 94%, 95%, 96%, 97%, 98%, 99%, or 100% identity to SEQ ID NO: 428, and the LCDR3 comprises a sequence having at least 85%, 90%, 91%, 92%, 93%, 94%, 95%, 96%, 97%, 98%, 99%, or 100% identity to SEQ ID NO: 454;
[0181] 19) the HCDR1 comprises a sequence having at least 85%, 90%, 91%, 92%, 93%, 94%, 95%, 96%, 97%, 98%, 99%, or 100% identity to SEQ ID NO: 122, the HCDR2 comprises a sequence having at least 85%, 90%, 91%, 92%, 93%, 94%, 95%, 96%, 97%, 98%, 99%, or 100% identity to SEQ ID NO: 148, the HCDR3 comprises a sequence having at least 85%, 90%, 91%, 92%, 93%, 94%, 95%, 96%, 97%, 98%, 99%, or 100% identity to SEQ ID NO: 174; the LCDR1 comprises a sequence having at least 85%, 90%, 91%, 92%, 93%, 94%, 95%, 96%, 97%, 98%, 99%, or 100% identity to SEQ ID NO: 403, the LCDR2 comprises a sequence having at least 85%, 90%, 91%, 92%, 93%, 94%, 95%, 96%, 97%, 98%, 99%, or 100% identity to SEQ ID NO: 429, and the LCDR3 comprises a sequence having at least 85%, 90%, 91%, 92%, 93%, 94%, 95%, 96%, 97%, 98%, 99%, or 100% identity to SEQ ID NO: 455;
[0182] 20) the HCDR1 comprises a sequence having at least 85%, 90%, 91%, 92%, 93%, 94%, 95%, 96%, 97%, 98%, 99%, or 100% identity to SEQ ID NO: 123, the HCDR2 comprises a sequence having at least 85%, 90%, 91%, 92%, 93%, 94%, 95%, 96%, 97%, 98%, 99%, or 100% identity to SEQ ID NO: 149, the HCDR3 comprises a sequence having at least 85%, 90%, 91%, 92%, 93%, 94%, 95%, 96%, 97%, 98%, 99%, or 100% identity to SEQ ID NO: 175; the LCDR1 comprises a sequence having at least 85%, 90%, 91%, 92%, 93%, 94%, 95%, 96%, 97%, 98%, 99%, or 100% identity to SEQ ID NO: 404, the LCDR2 comprises a sequence having at least 85%, 90%, 91%, 92%, 93%, 94%, 95%, 96%, 97%, 98%, 99%, or 100% identity to SEQ ID NO: 430, and the LCDR3 comprises a sequence having at least 85%, 90%, 91%, 92%, 93%, 94%, 95%, 96%, 97%, 98%, 99%, or 100% identity to SEQ ID NO: 456;
[0183] 21) the HCDR1 comprises a sequence having at least 85%, 90%, 91%, 92%, 93%, 94%, 95%, 96%, 97%, 98%, 99%, or 100% identity to SEQ ID NO: 124, the HCDR2 comprises a sequence having at least 85%, 90%, 91%, 92%, 93%, 94%, 95%, 96%, 97%, 98%, 99%, or 100% identity to SEQ ID NO: 150, the HCDR3 comprises a sequence having at least 85%, 90%, 91%, 92%, 93%, 94%, 95%, 96%, 97%, 98%, 99%, or 100% identity to SEQ ID NO: 176; the LCDR1 comprises a sequence having at least 85%, 90%, 91%, 92%, 93%, 94%, 95%, 96%, 97%, 98%, 99%, or 100% identity to SEQ ID NO: 405, the LCDR2 comprises a sequence having at least 85%, 90%, 91%, 92%, 93%, 94%, 95%, 96%, 97%, 98%, 99%, or 100% identity to SEQ ID NO: 431, and the LCDR3 comprises a sequence having at least 85%, 90%, 91%, 92%, 93%, 94%, 95%, 96%, 97%, 98%, 99%, or 100% identity to SEQ ID NO: 457;
[0184] 22) the HCDR1 comprises a sequence having at least 85%, 90%, 91%, 92%, 93%, 94%, 95%, 96%, 97%, 98%, 99%, or 100% identity to SEQ ID NO: 125, the HCDR2 comprises a sequence having at least 85%, 90%, 91%, 92%, 93%, 94%, 95%, 96%, 97%, 98%, 99%, or 100% identity to SEQ ID NO: 151, the HCDR3 comprises a sequence having at least 85%, 90%, 91%, 92%, 93%, 94%, 95%, 96%, 97%, 98%, 99%, or 100% identity to SEQ ID NO: 177; the LCDR1 comprises a sequence having at least 85%, 90%, 91%, 92%, 93%, 94%, 95%, 96%, 97%, 98%, 99%, or 100% identity to SEQ ID NO: 406, the LCDR2 comprises a sequence having at least 85%, 90%, 91%, 92%, 93%, 94%, 95%, 96%, 97%, 98%, 99%, or 100% identity to SEQ ID NO: 432, and the LCDR3 comprises a sequence having at least 85%, 90%, 91%, 92%, 93%, 94%, 95%, 96%, 97%, 98%, 99%, or 100% identity to SEQ ID NO: 458;
[0185] 23) the HCDR1 comprises a sequence having at least 85%, 90%, 91%, 92%, 93%, 94%, 95%, 96%, 97%, 98%, 99%, or 100% identity to SEQ ID NO: 126, the HCDR2 comprises a sequence having at least 85%, 90%, 91%, 92%, 93%, 94%, 95%, 96%, 97%, 98%, 99%, or 100% identity to SEQ ID NO: 152, the HCDR3 comprises a sequence having at least 85%, 90%, 91%, 92%, 93%, 94%, 95%, 96%, 97%, 98%, 99%, or 100% identity to SEQ ID NO: 178; the LCDR1 comprises a sequence having at least 85%, 90%, 91%, 92%, 93%, 94%, 95%, 96%, 97%, 98%, 99%, or 100% identity to SEQ ID NO: 407, the LCDR2 comprises a sequence having at least 85%, 90%, 91%, 92%, 93%, 94%, 95%, 96%, 97%, 98%, 99%, or 100% identity to SEQ ID NO: 433, and the LCDR3 comprises a sequence having at least 85%, 90%, 91%, 92%, 93%, 94%, 95%, 96%, 97%, 98%, 99%, or 100% identity to SEQ ID NO: 459;
[0186] 24) the HCDR1 comprises a sequence having at least 85%, 90%, 91%, 92%, 93%, 94%, 95%, 96%, 97%, 98%, 99%, or 100% identity to SEQ ID NO: 127, the HCDR2 comprises a sequence having at least 85%, 90%, 91%, 92%, 93%, 94%, 95%, 96%, 97%, 98%, 99%, or 100% identity to SEQ ID NO: 153, the HCDR3 comprises a sequence having at least 85%, 90%, 91%, 92%, 93%, 94%, 95%, 96%, 97%, 98%, 99%, or 100% identity to SEQ ID NO: 179; the LCDR1 comprises a sequence having at least 85%, 90%, 91%, 92%, 93%, 94%, 95%, 96%, 97%, 98%, 99%, or 100% identity to SEQ ID NO: 408, the LCDR2 comprises a sequence having at least 85%, 90%, 91%, 92%, 93%, 94%, 95%, 96%, 97%, 98%, 99%, or 100% identity to SEQ ID NO: 434, and the LCDR3 comprises a sequence having at least 85%, 90%, 91%, 92%, 93%, 94%, 95%, 96%, 97%, 98%, 99%, or 100% identity to SEQ ID NO: 460;
[0187] 25) the HCDR1 comprises a sequence having at least 85%, 90%, 91%, 92%, 93%, 94%, 95%, 96%, 97%, 98%, 99%, or 100% identity to SEQ ID NO: 128, the HCDR2 comprises a sequence having at least 85%, 90%, 91%, 92%, 93%, 94%, 95%, 96%, 97%, 98%, 99%, or 100% identity to SEQ ID NO: 154, the HCDR3 comprises a sequence having at least 85%, 90%, 91%, 92%, 93%, 94%, 95%, 96%, 97%, 98%, 99%, or 100% identity to SEQ ID NO: 180; the LCDR1 comprises a sequence having at least 85%, 90%, 91%, 92%, 93%, 94%, 95%, 96%, 97%, 98%, 99%, or 100% identity to SEQ ID NO: 409, the LCDR2 comprises a sequence having at least 85%, 90%, 91%, 92%, 93%, 94%, 95%, 96%, 97%, 98%, 99%, or 100% identity to SEQ ID NO: 435, and the LCDR3 comprises a sequence having at least 85%, 90%, 91%, 92%, 93%, 94%, 95%, 96%, 97%, 98%, 99%, or 100% identity to SEQ ID NO: 461; or
[0188] 26) the HCDR1 comprises a sequence having at least 85%, 90%, 91%, 92%, 93%, 94%, 95%, 96%, 97%, 98%, 99%, or 100% identity to SEQ ID NO: 129, the HCDR2 comprises a sequence having at least 85%, 90%, 91%, 92%, 93%, 94%, 95%, 96%, 97%, 98%, 99%, or 100% identity to SEQ ID NO: 155, the HCDR3 comprises a sequence having at least 85%, 90%, 91%, 92%, 93%, 94%, 95%, 96%, 97%, 98%, 99%, or 100% identity to SEQ ID NO: 181, the LCDR1 comprises a sequence having at least 85%, 90%, 91%, 92%, 93%, 94%, 95%, 96%, 97%, 98%, 99%, or 100% identity to SEQ ID NO: 410, the LCDR2 comprises a sequence having at least 85%, 90%, 91%, 92%, 93%, 94%, 95%, 96%, 97%, 98%, 99%, or 100% identity to SEQ ID NO: 436, and the LCDR3 comprises a sequence having at least 85%, 90%, 91%, 92%, 93%, 94%, 95%, 96%, 97%, 98%, 99%, or 100% identity to SEQ ID NO: 462.

[0189] In some embodiments, the VH comprises a sequence having at least 85%, 90%, 91%, 92%, 93%, 94%, 95%, 96%, 97%, 98%, 99%, or 100% identity to any one of SEQ ID NOs: 260-285. In some embodiments, the VL comprises a sequence having at least 85%, 90%, 91%, 92%, 93%, 94%, 95%, 96%, 97%, 98%, 99%, or 100% identity to any one of SEQ ID NOs: 541-566. In some embodiments, the anti-BCMA binding moiety comprises a combination of VH and VL as depicted in FIG. 4.

[0190] In some embodiments, the HCDR1 is encoded by a nucleic acid comprising a sequence having at least 85%, 90%, 91%, 92%, 93%, 94%, 95%, 96%, 97%, 98%, 99%, or 100% identity to any one of SEQ ID NOs: 182-207. In some embodiments, the HCDR2 is encoded by a nucleic acid comprising a sequence having at least 85%, 90%, 91%, 92%, 93%, 94%, 95%, 96%, 97%, 98%, 99%, or 100% identity to any one of SEQ ID NOs: 208-233. In some embodiments, the HCDR3 is encoded by a nucleic acid comprising a sequence having at least 85%, 90%, 91%, 92%, 93%, 94%, 95%, 96%, 97%, 98%, 99%, or 100% identity to any one of SEQ ID NOs: 234-259.

[0191] In some embodiments, the LCDR1 is encoded by a nucleic acid comprising a sequence having at least 85%, 90%, 91%, 92%, 93%, 94%, 95%, 96%, 97%, 98%, 99%, or 100% identity to any one of SEQ ID NOs: 463-488. In some embodiments, the LCDR2 is encoded by a nucleic acid comprising a sequence having at least 85%, 90%, 91%, 92%, 93%, 94%, 95%, 96%, 97%, 98%, 99%, or 100% identity to any one of SEQ ID NOs: 489-514. In some embodiments, the LCDR3 is encoded by a nucleic acid comprising a sequence having at least 85%, 90%, 91%, 92%, 93%, 94%, 95%, 96%, 97%, 98%, 99%, or 100% identity to any one of SEQ ID NOs: 515-540.

[0192] In some embodiments, the VH comprises a sequence having at least 85%, 90%, 91%, 92%, 93%, 94%, 95%, 96%, 97%, 98%, 99%, or 100% identity to any one of SEQ ID NOs: 286-311. In some embodiments, the VH is encoded by a nucleic acid comprising a sequence having at least 85%, 90%, 91%, 92%, 93%, 94%, 95%, 96%, 97%, 98%, 99%, or 100% identity to any one of SEQ ID NOs: 286-311.

[0193] In some embodiments, the VL comprises a sequence having at least 85%, 90%, 91%, 92%, 93%, 94%, 95%, 96%, 97%, 98%, 99%, or 100% identity to any one of SEQ ID NOs: 567-592. In some embodiments, the VL is encoded by a nucleic acid comprising a sequence having at least 85%, 90%, 91%, 92%, 93%, 94%, 95%, 96%, 97%, 98%, 99%, or 100% identity to any one of SEQ ID NOs: 567-592.

[0194] In some embodiments, the VH further comprises a heavy chain signal peptide (H-SP). In some embodiments, the heavy chain signal peptide comprises the sequence of any one of SEQ ID NOs: 1-9. In some embodiments, the heavy chain signal peptide is encoded by a nucleic acid having the sequence of any one of SEQ ID NOs: 10-19. In some embodiments, the VH further comprises framework regions. In some embodiments, the VH comprises framework regions 1, 2, 3, and 4 (H-FR1, H-FR2, H-FR3, and H-FR4). In some embodiments, H-FR1 comprises the sequence of any one of SEQ ID NOs: 20-32. In some embodiments, H-FR2 comprises the sequence of any one of SEQ ID NOs: 33-38. In some embodiments, H-FR3 comprises the sequence of any one of SEQ ID NOs: 39-53. In some embodiments, H-FR4 comprises the sequence of SEQ ID NO: 54. In some embodiments, H-FR1 is encoded by a nucleic acid having the sequence of any one of SEQ ID NOs: 55-73. In some embodiments, H-FR2 is encoded by a nucleic acid having the sequence of any one of SEQ ID NOs: 74-84. In some embodiments, H-FR3 is encoded by a nucleic acid having the sequence of any one of SEQ ID NOs: 85-102. In some embodiments, H-FR4 is encoded by a nucleic acid having the sequence of SEQ ID NOs: 103.

[0195] In some embodiments, the VL further comprises a light chain signal peptide (L-SP). In some embodiments, the light chain signal peptide comprises the sequence of any one of SEQ ID NOs: 312-317. In some embodiments, the light chain signal peptide is encoded by a nucleic acid having the sequence of any one of SEQ ID NOs: 318-324. In some embodiments, the VL further comprises framework regions. In some embodiments, the VL comprises framework regions 1, 2, 3, and 4 (L-FR1, L-FR2, L-FR3, and L-FR4). In some embodiments, the L-FR1 comprises the sequence of any one of SEQ ID NOs: 325-331. In some embodiments, L-FR2 comprises the sequence of any one of SEQ ID NOs: 332-337. In some embodiments, L-FR3 comprises the sequence of any one of SEQ ID NOs: 338-347. In some embodiments, L-FR4 comprises the sequence of any one of SEQ ID NOs: 348-353. In some embodiments, L-FR1 is encoded by a nucleic acid having the sequence of any one of SEQ ID NOs: 354-357 or 1416-1420. In some embodiments, L-FR2 is encoded by a nucleic acid having the sequence of any one of SEQ ID NOs: 358-366. In some embodiments, L-FR3 is encoded by a nucleic acid having the sequence of any one of SEQ ID NOs: 367-377. In some embodiments, L-FR4 is encoded by a nucleic acid having the sequence of any one of SEQ ID NOs: 378-384.

[0196] Embodiments of the anti-BCMA binding moieties comprise various arrangements of the VH and VL disclosed herein. In some embodiments, the VH and VL are separated by a linker. In some embodiments, the linker comprises the sequence of SEQ ID NO: 1388.

[0197] In some embodiments of the anti-BCMA binding moieties, the VH is N-terminal of the VL. In some embodiments, the anti-BCMA binding moiety comprises a sequence having at least 85%, 90%, 91%, 92%, 93%, 94%, 95%, 96%, 97%, 98%, 99%, or 100% identity to any one of SEQ ID NOs: 593-618. In some embodiments, the anti-BCMA binding moiety is encoded by a nucleic acid comprising a sequence having at least 85%, 90%, 91%, 92%, 93%, 94%, 95%, 96%, 97%, 98%, 99%, or 100% identity to any one of SEQ ID NOs: 619-670.

[0198] In some embodiments of the anti-BCMA binding moieties, the VL is N-terminal of the VH. In some embodiments, the anti-BCMA binding moiety comprises a sequence having at least 85%, 90%, 91%, 92%, 93%, 94%, 95%, 96%, 97%, 98%, 99%, or 100% identity to any one of SEQ ID NOs: 671-696. In some embodiments, the anti-BCMA binding moiety is encoded by a nucleic acid comprising a sequence having at least 85%, 90%, 91%, 92%, 93%, 94%, 95%, 96%, 97%, 98%, 99%, or 100% identity to any one of SEQ ID NOs: 697-748.

[0199] In some embodiments, the anti-BCMA binding moiety comprises a sequence having at least 85%, 90%, 91%, 92%, 93%, 94%, 95%, 96%, 97%, 98%, 99%, or 100% identity to any one of SEQ ID NOs: 1421-1426. In some embodiments, the anti-BCMA binding moiety is encoded by a nucleic acid comprising a sequence having at least 85%, 90%, 91%, 92%, 93%, 94%, 95%, 96%, 97%, 98%, 99%, or 100% identity to any one of SEQ ID NOs: 1447-1472.

[0200] In some embodiments, the anti-BCMA binding moiety comprises a sequence having at least 85%, 90%, 91%, 92%, 93%, 94%, 95%, 96%, 97%, 98%, 99%, or 100% identity to any one of SEQ ID NOs: 1473-1498. In some embodiments, the anti-BCMA binding moiety is encoded by a nucleic acid comprising a sequence having at least 85%, 90%, 91%, 92%, 93%, 94%, 95%, 96%, 97%, 98%, 99%, or 100% identity to any one of SEQ ID NOs: 1499-1524.

[0201] In some embodiments, the anti-BCMA binding moiety comprises a sequence having at least 85%, 90%, 91%, 92%, 93%, 94%, 95%, 96%, 97%, 98%, 99%, or 100% identity to any one of SEQ ID NOs: 1582-1600. In some embodiments, the anti-BCMA binding moiety is encoded by a nucleic acid comprising a sequence having at least 85%, 90%, 91%, 92%, 93%, 94%, 95%, 96%, 97%, 98%, 99%, or 100% identity to any one of SEQ ID NOs: 1601-1619.

[0202] In some embodiments, the anti-BCMA binding moiety comprises a sequence having at least 85%, 90%, 91%, 92%, 93%, 94%, 95%, 96%, 97%, 98%, 99%, or 100% identity to any one of SEQ ID NOs: 1677-1695. In some embodiments, the anti-BCMA binding moiety is encoded by a nucleic acid comprising a sequence having at least 85%, 90%, 91%, 92%, 93%, 94%, 95%, 96%, 97%, 98%, 99%, or 100% identity to any one of SEQ ID NOs: 1696-1714.

[0203] In some embodiments, the anti-BCMA binding moiety comprises a sequence having at least 85%, 90%, 91%, 92%, 93%, 94%, 95%, 96%, 97%, 98%, 99%, or 100% identity to any one of SEQ ID NOs: 1715-1733. In some embodiments, the anti-BCMA binding moiety is encoded by a nucleic acid comprising a sequence having at least 85%, 90%, 91%, 92%, 93%, 94%, 95%, 96%, 97%, 98%, 99%, or 100% identity to any one of SEQ ID NOs: 1734-1771.

[0204] In some embodiments, the anti-BCMA binding moiety comprises a sequence having at least 85%, 90%, 91%, 92%, 93%, 94%, 95%, 96%, 97%, 98%, 99%, or 100% identity to any one of SEQ ID NOs: 1772-1790. In some embodiments, the anti-BCMA binding moiety is encoded by a nucleic acid comprising a sequence having at least 85%, 90%, 91%, 92%, 93%, 94%, 95%, 96%, 97%, 98%, 99%, or 100% identity to any one of SEQ ID NOs: 1791-1828.

[0205] In some embodiments, the anti-BCMA binding moiety comprises a sequence having at least 85%, 90%, 91%, 92%, 93%, 94%, 95%, 96%, 97%, 98%, 99%, or 100% identity to any one of SEQ ID NOs: 1829-1847. In some embodiments, the anti-BCMA binding moiety is encoded by a nucleic acid comprising a sequence having at least 85%, 90%, 91%, 92%, 93%, 94%, 95%, 96%, 97%, 98%, 99%, or 100% identity to any one of SEQ ID NOs: 1848-1866.

[0206] In some embodiments, the anti-BCMA binding moiety comprises a sequence having at least 85%, 90%, 91%, 92%, 93%, 94%, 95%, 96%, 97%, 98%, 99%, or 100% identity to any one of SEQ ID NOs: 1867-1885. In some embodiments, the anti-BCMA binding moiety is encoded by a nucleic acid comprising a sequence having at least 85%, 90%, 91%, 92%, 93%, 94%, 95%, 96%, 97%, 98%, 99%, or 100% identity to any one of SEQ ID NOs: 1886-1923.

[0207] In some embodiments, the anti-BCMA binding moiety comprises a sequence having at least 85%, 90%, 91%, 92%, 93%, 94%, 95%, 96%, 97%, 98%, 99%, or 100% identity to any one of SEQ ID NOs: 3255-3277. In some embodiments, the anti-BCMA binding moiety is encoded by a nucleic acid comprising a sequence having at least 85%, 90%, 91%, 92%, 93%, 94%, 95%, 96%, 97%, 98%, 99%, or 100% identity to any one of SEQ ID NOs: 3278-3323.

[0208] In some embodiments, the anti-BCMA binding moiety comprises a sequence having at least 85%, 90%, 91%, 92%, 93%, 94%, 95%, 96%, 97%, 98%, 99%, or 100% identity to any one of SEQ ID NOs: 3324-3346. In some embodiments, the anti-BCMA binding moiety is encoded by a nucleic acid comprising a sequence having at least 85%, 90%, 91%, 92%, 93%, 94%, 95%, 96%, 97%, 98%, 99%, or 100% identity to any one of SEQ ID NOs: 3347-3392.

[0209] In some embodiments, the anti-BCMA binding moiety comprises a sequence having at least 85%, 90%, 91%, 92%, 93%, 94%, 95%, 96%, 97%, 98%, 99%, or 100% identity to any one of SEQ ID NOs: 5457-5479. In some embodiments, the anti-BCMA binding moiety is encoded by a nucleic acid comprising a sequence having at least 85%, 90%, 91%, 92%, 93%, 94%, 95%, 96%, 97%, 98%, 99%, or 100% identity to any one of SEQ ID NOs: 5480-5502.

[0210] In some embodiments, the anti-BCMA binding moiety comprises a sequence having at least 85%, 90%, 91%, 92%, 93%, 94%, 95%, 96%, 97%, 98%, 99%, or 100% identity to any one of SEQ ID NOs: 3859-3862. In some embodiments, the anti-BCMA binding moiety is encoded by a nucleic acid comprising a sequence having at least 85%, 90%, 91%, 92%, 93%, 94%, 95%, 96%, 97%, 98%, 99%, or 100% identity to any one of SEQ ID NOs: 3875-3878.

[0211] In some embodiments, the anti-BCMA binding moiety comprises a VHH domain, having a sequence having at least 85%, 90%, 91%, 92%, 93%, 94%, 95%, 96%, 97%, 98%, 99%, or 100% identity to any one of SEQ ID NOs: 5457-5479. In some embodiments, the VHH domain is encoded by a nucleic acid comprising a sequence having at least 85%, 90%, 91%, 92%, 93%, 94%, 95%, 96%, 97%, 98%, 99%, or 100% identity to any one of SEQ ID NOs: 5480-5502.

[0212] In some embodiments, the binding moieties provided herein comprise one or more CDR(s) as part of a larger polypeptide chain. In some embodiments, the antigen-binding proteins covalently link the one or more CDR(s) to another polypeptide chain. In some embodiments, the antigen-binding proteins incorporate the one or more CDR(s) noncovalently. In some embodiments, the antigen-binding proteins may comprise at least one of the CDRs described herein incorporated into a biocompatible framework structure. In some embodiments, the biocompatible framework structure comprises a polypeptide or portion thereof that is sufficient to form a conformationally stable structural support, or framework, or scaffold, which is able to display one or more sequences of amino acids that bind to an antigen (e.g., CDRs, a variable region, etc.) in a localized surface region. Such structures can be a naturally occurring polypeptide or polypeptide “fold” (a structural motif), or can have one or more modifications, such as additions, deletions and/or substitutions of amino acids, relative to a naturally occurring polypeptide or fold. Depending on the embodiment, the scaffolds can be derived from a polypeptide of a variety of different species (or of more than one species), such as a human, a non-human primate or other mammal, other vertebrate, invertebrate, plant, bacteria or virus.

[0213] Depending on the embodiment, the biocompatible framework structures are based on protein scaffolds or skeletons other than immunoglobulin domains. In some such embodiments, those framework structures are based on fibronectin, ankyrin, lipocalin, neocarzinostain, cytochrome b, CP1 zinc finger, PST1, coiled coil, LACI-D1, Z domain and/or tendamistat domains.

[0214] There is also provided, in some embodiments, binding moieties with more than one binding site. In several embodiments, the binding sites are identical to one another while in some embodiments the binding sites are different from one another. For example, an antibody typically has two identical binding sites, while a “bispecific” or “bifunctional” antibody has two different binding sites. The two binding sites of a bispecific antigen-binding protein or antibody will bind to two different epitopes, which can reside on the same or different protein targets. In several embodiments, this is particularly advantageous, as a bispecific chimeric antigen receptor can impart to an engineered cell the ability to target multiple tumor markers, for example, BCMA and an additional tumor marker, such as CD19, CD38, CS1, FCRL5, GPR5CD, CD229, NKG2D or any other marker disclosed herein or appreciated in the art as a tumor specific antigen or tumor associated antigen.

[0215] Additional anti-BCMA binding moieties are known in the art, such as those disclosed in, for example, U.S. Pat. Nos. 9,765,342, 10,294,304, 10,174,095, European Patent No. EP 3230321, US Patent Publication No. 2018/0118842, US Patent Publication No. 2019/0153061, and PCT Patent Publication No. WO 2019/149269, the entirety of each of which is incorporated by reference herein.

[0216] As used herein, the term “chimeric antibody” shall be given its ordinary meaning, and shall also refer to an antibody that contains one or more regions from one antibody and one or more regions from one or more other antibodies. In some embodiments, one or more of the CDRs are derived from an anti-cancer antigen (e.g., BCMA) antibody. In several embodiments, all of the CDRs are derived from an anti-cancer antigen antibody (such as an anti-BCMA). In some embodiments, the CDRs from more than one anti-cancer antigen antibodies are mixed and matched in a chimeric antibody. For instance, a chimeric antibody may comprise a CDR1 from the light chain of a first anti-cancer antigen antibody, a CDR2 and a CDR3 from the light chain of a second anti-cancer antigen antibody, and the CDRs from the heavy chain from a third anti-cancer antigen antibody. Further, the framework regions of antigen-binding proteins disclosed herein may be derived from one of the same anti-cancer antigen (e.g., BCMA) antibodies, from one or more different antibodies, such as a human antibody, or from a humanized antibody. In one example of a chimeric antibody, a portion of the heavy and/or light chain is identical with, homologous to, or derived from an antibody from a particular species or belonging to a particular antibody class or subclass, while the remainder of the chain(s) is/are identical with, homologous to, or derived from an antibody or antibodies from another species or belonging to another antibody class or subclass. Also provided herein are fragments of such antibodies that exhibit the desired biological activity.

### Cytotoxic Signaling Complex

[0217] Some embodiments of the compositions and methods described herein relate to a chimeric antigen receptor, such as a BCMA-directed CAR, that includes a cytotoxic signaling complex. As disclosed herein, according to several embodiments, the provided cytotoxic receptor complexes comprise one or more transmembrane and/or intracellular domains that initiate cytotoxic signaling cascades upon the extracellular domain(s) binding to ligands on the surface of target cells. Certain embodiments disclosed herein relate to chimeric antigen receptor constructs wherein the tumor-targeting domain (e.g., an anti-BCMA binding moiety) is coupled to a cytotoxic signaling complex.

[0218] In several embodiments, the cytotoxic signaling complex comprises at least one transmembrane domain, at least one co-stimulatory domain, and/or at least one signaling domain. In some embodiments, more than one component part makes up a given domain—e.g., a co-stimulatory domain may comprise two subdomains. Moreover, in some embodiments, a domain may serve multiple functions, for example, a transmembrane domain may also serve to provide signaling function.

### Hinge Domains

[0219] Some embodiments of the CARs disclosed herein, such as the BCMA-directed CARs, comprise a hinge domain. The hinge domain typically serves to separate an extracellular binding moiety from the rest of the CAR components, including the intracellular components that are bridged to the extracellular binding moiety by a transmembrane domain. Any hinge domain disclosed herein or otherwise generally known in the art may be used in the BCMA-directed CARs disclosed herein.

[0220] In some embodiments, the hinge domain is a CD8 hinge domain. In some embodiments, the CD8 hinge domain comprises a sequence having at least 85%, 90%, 91%, 92%, 93%, 94%, 95%, 96%, 97%, 98%, 99%, or 100% identity to SEQ ID NO: 1389. In some embodiments, the CD8 hinge domain is encoded by a nucleic acid comprising a sequence having at least 85%, 90%, 91%, 92%, 93%, 94%, 95%, 96%, 97%, 98%, 99%, or 100% identity to SEQ ID NO: 1400. In some embodiments, the CD8 hinge domain is truncated or modified and is at least 70%, at least 75%, at least 80%, at least 85%, at least 90%, at least 95% homologous with the peptide having the sequence of SEQ ID NO: 1389.

[0221] In some embodiments, the hinge domain is an IgG4 hinge domain. In some embodiments, the IgG4 hinge domain comprises a sequence having at least 85%, 90%, 91%, 92%, 93%, 94%, 95%, 96%, 97%, 98%, 99%, or 100% identity to SEQ ID NO: 1390. In some embodiments, the IgG4 hinge domain is encoded by a nucleic acid comprising a sequence having at least 85%, 90%, 91%, 92%, 93%, 94%, 95%, 96%, 97%, 98%, 99%, or 100% identity to SEQ ID NO: 1401. In some embodiments, the IgG4 hinge domain is truncated or modified and is at least 70%, at least 75%, at least 80%, at least 85%, at least 90%, at least 95% homologous with the peptide having the sequence of SEQ ID NO: 1390.

[0222] In some embodiments, the hinge domain is an RQRCD8 hinge domain. As understood in the art, the “RQRCD8 hinge domain” is a CD8 hinge domain with additional CD20 and CD34 epitopes. The presence of these additional epitopes permit alternative methods of detection with these epitopes, as well as enabling the selected depletion of immune cells engineered with CARs having these epitopes (e.g. using antibodies specific for CD20 or CD34). In some embodiments, the RQRCD8 hinge domain comprises a sequence having at least 85%, 90%, 91%, 92%, 93%, 94%, 95%, 96%, 97%, 98%, 99%, or 100% identity to SEQ ID NO: 1391. In some embodiments, the RQRCD8 hinge domain is encoded by a nucleic acid comprising a sequence having at least 85%, 90%, 91%, 92%, 93%, 94%, 95%, 96%, 97%, 98%, 99%, or 100% identity to SEQ ID NO: 1402. In some embodiments, the RQRCD8 hinge domain is truncated or modified and is at least 70%, at least 75%, at least 80%, at least 85%, at least 90%, at least 95% homologous with the peptide having the sequence of SEQ ID NO: 1391. The RQRCD8 hinge domain (also referred as “RQR8”) is explored in Philip et al. “A highly compact epitope-based marker/suicide gene for easier and safer T-cell therapy” Blood 124(8):1277-1287 and PCT publication WO 2013/153391, each of which is hereby expressly incorporated by reference in its entirety.

### Transmembrane Domains

[0223] Some embodiments of the CARs disclosed herein, such as the BCMA-directed CARs, comprise a transmembrane domain. As conventionally understood, the transmembrane domain serves to act as the region spanning the plasma membrane of a cell to connect the extracellular and intracellular domains of the CAR. Any transmembrane domain disclosed herein or otherwise generally known in the art may be used in the BCMA-directed CARs disclosed herein.

[0224] In some embodiments, the transmembrane domain is a CD8 transmembrane domain (CD8TM). In some embodiments, the CD8 transmembrane domain comprises a sequence having at least 85%, 90%, 91%, 92%, 93%, 94%, 95%, 96%, 97%, 98%, 99%, or 100% identity to SEQ ID NO: 1392. In some embodiments, the CD8 transmembrane domain is encoded by a nucleic acid comprising a sequence having at least 85%, 90%, 91%, 92%, 93%, 94%, 95%, 96%, 97%, 98%, 99%, or 100% identity to SEQ ID NO: 1403. In some embodiments, the CD8 transmembrane domain is truncated or modified and is at least 70%, at least 75%, at least 80%, at least 85%, at least 90%, at least 95% homologous with the peptide having the sequence of SEQ ID NO: 1392.

[0225] In some embodiments, the CD8 transmembrane domain may also comprise a CD8 intracellular domain (CD8IC). In some embodiments, the CD8 intracellular domain comprises the sequence of SEQ ID NO: 1393. In some embodiments, the CD8 intracellular domain is encoded by a nucleic acid comprising the sequence of SEQ ID NO: 1404. In some embodiments, for the purposes for this disclosure, the CD8 transmembrane domain can be considered to include the CD8 intracellular domain, such that the CD8 transmembrane domain comprises the sequences of SEQ ID NO: 1392 and SEQ ID NO: 1393 from N-terminal to C-terminal orientation.

[0226] In some embodiments, the transmembrane domain is CD28 transmembrane domain (CD28TM). In some embodiments, the CD28 transmembrane domain comprises a sequence having at least 85%, 90%, 91%, 92%, 93%, 94%, 95%, 96%, 97%, 98%, 99%, or 100% identity to SEQ ID NO: 1414. In some embodiments, the CD8 transmembrane domain is encoded by a nucleic acid comprising a sequence having at least 85%, 90%, 91%, 92%, 93%, 94%, 95%, 96%, 97%, 98%, 99%, or 100% identity to SEQ ID NO: 1415. In some embodiments, the CD8 transmembrane domain is truncated or modified and is at least 70%, at least 75%, at least 80%, at least 85%, at least 90%, at least 95% homologous with the peptide having the sequence of SEQ ID NO: 1414.

### Signaling Domains

[0227] Some embodiments of the CARs disclosed herein, such as the BCMA-directed CARs, comprise an intracellular signaling domain. As generally understood in the art, unexpectedly enhanced signaling can be achieved through the use of multiple signaling domains whose activities act synergistically. Any intracellular signaling domain disclosed herein or otherwise generally known in the art may be used in the BCMA-directed CARs disclosed herein.

[0228] In some embodiments, the intracellular signaling domain comprises an OX40 subdomain and a CD3ζ subdomain. In some embodiments, the OX40 subdomain comprises a sequence having at least 85%, 90%, 91%, 92%, 93%, 94%, 95%, 96%, 97%, 98%, 99%, or 100% identity to SEQ ID NO: 1394. In some embodiments, the OX40 subdomain is encoded by a nucleic acid comprising a sequence having at least 85%, 90%, 91%, 92%, 93%, 94%, 95%, 96%, 97%, 98%, 99%, or 100% identity to SEQ ID NO: 1405. In some embodiments, the OX40 subdomain is truncated or modified and is at least 70%, at least 75%, at least 80%, at least 85%, at least 90%, at least 95% homologous with the peptide having the sequence of SEQ ID NO: 1394. In some embodiments, the CD3ζ subdomain comprises a sequence having at least 85%, 90%, 91%, 92%, 93%, 94%, 95%, 96%, 97%, 98%, 99%, or 100% identity to SEQ ID NO: 1395. In some embodiments, the CD3ζ subdomain is encoded by a nucleic acid comprising a sequence having at least 85%, 90%, 91%, 92%, 93%, 94%, 95%, 96%, 97%, 98%, 99%, or 100% identity to SEQ ID NO: 1406. In some embodiments, the CD3ζ subdomain is truncated or modified and is at least 70%, at least 75%, at least 80%, at least 85%, at least 90%, at least 95% homologous with the peptide having the sequence of SEQ ID NO: 1395. In some embodiments, the OX40 subdomain is N-terminal to the CD3ζ subdomain. In some embodiments, the CD3ζ subdomain is N-terminal to the OX40 subdomain.

### Co-Stimulatory Domains

[0229] In some embodiments, the CARs disclosed herein are expressed along with a co-stimulatory domain, where additional co-activating molecules improve aspects of CAR activity, including but not limited to cytotoxic activity, CAR stability, and cell longevity. In some embodiments, the additional co-activating molecules can be cytokines, including but not limited to certain interleukins, such as interleukin 2 (IL2) and/or interleukin 15 (IL15). In some embodiments, the immune cells expressing the CAR are also engineered to express such additional co-activating molecules as a secreted form. In some embodiments, the immune cells expressing the CAR are also engineered to express such additional co-activating molecules as a membrane bound form, acting as autocrine stimulatory molecules (or even as paracrine stimulators to neighboring cells). Membrane-bound IL15 is explored in WO 2015/174928, which is hereby expressly incorporated by reference in its entirety.

[0230] In some embodiments, the immune cells are engineered to express IL15, optionally as a membrane-bound IL15 (mbIL15). In such embodiments, mbIL15 expression on the immune cell enhances the cytotoxic effects of the engineered immune cells by enhancing the proliferation and/or longevity of the immune cells. In some embodiments, the IL15 is human IL15. In some embodiments, the IL15 comprises the sequence of SEQ ID NO: 1397. In some embodiments, the IL15 is encoded by a nucleic acid comprising the sequence of SEQ ID NO: 1408. In some embodiments, the mbIL15 is assembled by fusing an IL15 with one or more of a CD8 signal peptide (CD8SP), CD8 hinge (CD8h), CD8 transmembrane domain (CD8TM), and a CD8 intracellular domain (CD8IC). In some embodiments, the mbIL15 is assembled according to the order: CD8SP-IL15-CD8h-CD8TM-CD8IC, from N-terminus to C-terminus. However, other methods of producing a membrane-bound IL15 are also envisioned.

[0231] In some embodiments, the CD8SP of the mbIL15 comprises the sequence of SEQ ID NO: 1396. In some embodiments, the CD8h of the mbIL15 comprises the sequence of SEQ ID NO: 1400. In some embodiments, the CD8TM of the mbIL15 comprises the sequence of SEQ ID NO: 1392. In some embodiments, the CD8IC of the mbIL15 comprises the sequence of SEQ ID NO: 1393. In some embodiments, the CD8SP of the mbIL15 is encoded by a nucleic acid comprising the sequence of SEQ ID NO: 1407. In some embodiments, the CD8h of the mbIL15 is encoded by a nucleic acid comprising the sequence of SEQ ID NO: 1409. In some embodiments, the CD8TM of the mbIL15 is encoded by a nucleic acid comprising the sequence of SEQ ID NO: 1410. In some embodiments, the CD8IC of the mbIL15 is encoded by a nucleic acid comprising the sequence of SEQ ID NO: 1411. In some embodiments, the mbIL15 comprises a sequence having at least 85%, 90%, 91%, 92%, 93%, 94%, 95%, 96%, 97%, 98%, 99%, or 100% identity to the sequence of SEQ ID NO: 1398. In some embodiments, the mbIL15 is encoded by a nucleic acid comprising a sequence having at least 85%, 90%, 91%, 92%, 93%, 94%, 95%, 96%, 97%, 98%, 99%, or 100% identity to the sequence of SEQ ID NO: 1412. In some embodiments, the mbIL15 can be truncated or modified, such that it has at least 70%, at least 75%, at least 80%, at least 85%, at least 90%, at least 95% sequence identity with the sequence of SEQ ID NO: 1398.

[0232] In some embodiments, the CAR and mbIL15 are expressed simultaneously in a bicistronic configuration as a polypeptide comprising a self-cleaving peptide. In some embodiments, the CAR and mbIL15 are expressed simultaneously in a bicistronic configuration from a polynucleotide comprising a sequence encoding for a self-cleaving peptide. In some embodiments, the self-cleaving peptide is a T2A self-cleaving peptide, a P2A self-cleaving peptide, an E2A self-cleaving peptide, or an F2A self-cleaving peptide. In this way, the CAR and mbIL15 can be delivered to an immune cell as a single vector, if needed. In some embodiments, a T2A self-cleaving peptide is used. In some embodiments, the T2A self-cleaving peptide comprises the sequence of SEQ ID NO: 1399. In some embodiments, the T2A self-cleaving peptide is encoded by a nucleic acid comprising the sequence of SEQ ID NO: 1413.

### BCMA-Directed Chimeric Antigen Receptors

[0233] Disclosed herein are BCMA-directed CARs. In some embodiments, the BCMA-directed CARs comprise an extracellular anti-BCMA binding moiety, a hinge domain, a transmembrane domain, and an intracellular signaling domain comprising an OX40 subdomain and a CD3ζ subdomain. In some embodiments, the anti-BCMA binding moiety may be any one of the anti-BCMA binding moieties disclosed herein. In some embodiments, the hinge domain may be any one of the hinge domains disclosed herein. In some embodiments, the transmembrane domain may be any one of the transmembrane domains disclosed herein. In some embodiments, the intracellular signaling domain may be any one of the intracellular signaling domains disclosed herein.

[0234] In some embodiments, the OX40 subdomain (OX40) comprises a sequence having at least 85%, 90%, 91%, 92%, 93%, 94%, 95%, 96%, 97%, 98%, 99%, or 100% identity to SEQ ID NO: 1394. In some embodiments, the OX40 subdomain is encoded by a nucleic acid comprising a sequence having at least 85%, 90%, 91%, 92%, 93%, 94%, 95%, 96%, 97%, 98%, 99%, or 100% identity to SEQ ID NO: 1405. In some embodiments, the OX40 subdomain is truncated or modified and is at least 70%, at least 75%, at least 80%, at least 85%, at least 90%, at least 95% homologous with the peptide having the sequence of SEQ ID NO: 1394. In some embodiments, the CD3ζ subdomain comprises a sequence having at least 85%, 90%, 91%, 92%, 93%, 94%, 95%, 96%, 97%, 98%, 99%, or 100% identity to SEQ ID NO: 1395. In some embodiments, the CD3ζ subdomain is encoded by a nucleic acid comprising a sequence having at least 85%, 90%, 91%, 92%, 93%, 94%, 95%, 96%, 97%, 98%, 99%, or 100% identity to SEQ ID NO: 1406. In some embodiments, the CD3ζ subdomain is truncated or modified and is at least 70%, at least 75%, at least 80%, at least 85%, at least 90%, at least 95% homologous with the peptide having the sequence of SEQ ID NO: 1395. In some embodiments, the OX40 subdomain is N-terminal to the CD3ζ subdomain. In some embodiments, the CD3ζ subdomain is N-terminal to the OX40 subdomain.

[0235] In some embodiments, the transmembrane domain is a CD8 transmembrane domain (CD8TM). In some embodiments, the CD8 transmembrane domain comprises a sequence having at least 85%, 90%, 91%, 92%, 93%, 94%, 95%, 96%, 97%, 98%, 99%, or 100% identity to SEQ ID NO: 1392. In some embodiments, the CD8 transmembrane domain is encoded by a nucleic acid comprising a sequence having at least 85%, 90%, 91%, 92%, 93%, 94%, 95%, 96%, 97%, 98%, 99%, or 100% identity to SEQ ID NO: 1403. In some embodiments, the CD8 transmembrane domain is truncated or modified and is at least 70%, at least 75%, at least 80%, at least 85%, at least 90%, at least 95% homologous with the peptide having the sequence of SEQ ID NO: 1392.

[0236] In some embodiments, the transmembrane domain is CD28 transmembrane domain (CD28TM). In some embodiments, the CD28 transmembrane domain comprises a sequence having at least 85%, 90%, 91%, 92%, 93%, 94%, 95%, 96%, 97%, 98%, 99%, or 100% identity to SEQ ID NO: 1414. In some embodiments, the CD8 transmembrane domain is encoded by a nucleic acid comprising a sequence having at least 85%, 90%, 91%, 92%, 93%, 94%, 95%, 96%, 97%, 98%, 99%, or 100% identity to SEQ ID NO: 1415. In some embodiments, the CD8 transmembrane domain is truncated or modified and is at least 70%, at least 75%, at least 80%, at least 85%, at least 90%, at least 95% homologous with the peptide having the sequence of SEQ ID NO: 1414.

[0237] In some embodiments, the hinge domain is a CD8 hinge domain (CD8h). In some embodiments, the CD8 hinge domain comprises a sequence having at least 85%, 90%, 91%, 92%, 93%, 94%, 95%, 96%, 97%, 98%, 99%, or 100% identity to SEQ ID NO: 1389. In some embodiments, the CD8 hinge domain is encoded by a nucleic acid comprising a sequence having at least 85%, 90%, 91%, 92%, 93%, 94%, 95%, 96%, 97%, 98%, 99%, or 100% identity to SEQ ID NO: 1400. In some embodiments, the CD8 hinge domain is truncated or modified and is at least 70%, at least 75%, at least 80%, at least 85%, at least 90%, at least 95% homologous with the peptide having the sequence of SEQ ID NO: 1389.

[0238] In some embodiments, the CD8 hinge domain, transmembrane domain, and intracellular signaling domain make up the part of the BCMA-directed CAR other than the anti-BCMA binding moiety. In some embodiments, the BCMA-directed CAR comprises a CD8 hinge domain (CD8h), a CD8 transmembrane domain (CD8TM), a CD8 intracellular domain (CD8IC), an OX40 subdomain (OX40), and a CD3ζ subdomain (CD3ζ). In some embodiments, the CD8h, CD8TM, CD8IC, OX40, and CD3ζ are in the order of CD8h-CD8TM-CD8IC-OX40-CD3ζ, from N-terminus to C-terminus. In some embodiments, the CD8 hinge domain, transmembrane domain, and intracellular signaling domain are represented by a sequence having at least 85%, 90%, 91%, 92%, 93%, 94%, 95%, 96%, 97%, 98%, 99%, or 100% identity to SEQ ID NO: 1375. In some embodiments, the CD8 hinge domain, transmembrane domain, and intracellular signaling domain are encoded by a nucleic acid comprising a sequence having at least 85%, 90%, 91%, 92%, 93%, 94%, 95%, 96%, 97%, 98%, 99%, or 100% identity to SEQ ID NO: 1376.

[0239] In some embodiments where the BCMA-directed CAR comprises a CD8h, CD8TM, CD8IC, OX40, and CD3ζ with the anti-BCMA binding moiety, the BCMA-directed CAR may comprise a sequence having at least 85%, 90%, 91%, 92%, 93%, 94%, 95%, 96%, 97%, 98%, 99%, or 100% identity to any one of SEQ ID NOs: 749-774. In some embodiments, the BCMA-directed CAR is encoded by a nucleic acid having a sequence at least 85%, 90%, 91%, 92%, 93%, 94%, 95%, 96%, 97%, 98%, 99%, or 100% identity to any one of SEQ ID NOs: 775-800. In some embodiments, the BCMA-directed CAR is encoded by a nucleic acid codon optimized for human and having a sequence at least 85%, 90%, 91%, 92%, 93%, 94%, 95%, 96%, 97%, 98%, 99%, or 100% identity to any one of SEQ ID NOs: 801-826. In some embodiments, the BCMA-directed CAR comprises a sequence having at least 85%, 90%, 91%, 92%, 93%, 94%, 95%, 96%, 97%, 98%, 99%, or 100% identity to any one of SEQ ID NOs: 905-930. In some embodiments, the BCMA-directed CAR is encoded by a nucleic acid having a sequence at least 85%, 90%, 91%, 92%, 93%, 94%, 95%, 96%, 97%, 98%, 99%, or 100% identity to any one of SEQ ID NOs: 931-956. In some embodiments, the BCMA-directed CAR is encoded by a nucleic acid codon optimized for human and having a sequence at least 85%, 90%, 91%, 92%, 93%, 94%, 95%, 96%, 97%, 98%, 99%, or 100% identity to any one of SEQ ID NOs: 957-982.

[0240] In some embodiments, the hinge domain is an IgG4 hinge domain. In some embodiments, the IgG4 hinge domain comprises a sequence having at least 85%, 90%, 91%, 92%, 93%, 94%, 95%, 96%, 97%, 98%, 99%, or 100% identity to SEQ ID NO: 1390. In some embodiments, the IgG4 hinge domain is encoded by a nucleic acid comprising a sequence having at least 85%, 90%, 91%, 92%, 93%, 94%, 95%, 96%, 97%, 98%, 99%, or 100% identity to SEQ ID NO: 1401. In some embodiments, the IgG4 hinge domain is truncated or modified and is at least 70%, at least 75%, at least 80%, at least 85%, at least 90%, at least 95% homologous with the peptide having the sequence of SEQ ID NO: 1390.

[0241] In some embodiments, the IgG4 hinge domain, transmembrane domain, and intracellular signaling domain make up the part of the BCMA-directed CAR other than the anti-BCMA binding moiety. In some embodiments, the BCMA-directed CAR comprises an IgG4 hinge domain (IgG4h), a CD8TM, a CD8IC, an OX40, and a CD3ζ. In some embodiments, the IgG4h, CD8TM, CD8IC, OX40, and CD3ζ are in the order of IgG4h-CD8TM-CD8IC-OX40-CD3ζ, from N-terminus to C-terminus. In some embodiments, the IgG4 hinge domain, transmembrane domain, and intracellular signaling domain are represented by a sequence having at least 85%, 90%, 91%, 92%, 93%, 94%, 95%, 96%, 97%, 98%, 99%, or 100% identity to SEQ ID NO: 1377. In some embodiments, the IgG4 hinge domain, transmembrane domain, and intracellular signaling domain are encoded by a nucleic acid comprising a sequence having at least 85%, 90%, 91%, 92%, 93%, 94%, 95%, 96%, 97%, 98%, 99%, or 100% identity to SEQ ID NO: 1378.

[0242] In some embodiments where the BCMA-directed CAR comprises an IgG4, CD8TM, CD8IC, OX40, and CD3ζ with the anti-BCMA binding moiety, the BCMA-directed CAR may comprise a sequence having at least 85%, 90%, 91%, 92%, 93%, 94%, 95%, 96%, 97%, 98%, 99%, or 100% identity to any one of SEQ ID NOs: 1061-1086. In some embodiments, the BCMA-directed CAR is encoded by a nucleic acid having a sequence at least 85%, 90%, 91%, 92%, 93%, 94%, 95%, 96%, 97%, 98%, 99%, or 100% identity to any one of SEQ ID NOs: 1087-1112. In some embodiments, the BCMA-directed CAR is encoded by a nucleic acid codon optimized for human and having a sequence at least 85%, 90%, 91%, 92%, 93%, 94%, 95%, 96%, 97%, 98%, 99%, or 100% identity to any one of SEQ ID NOs: 1113-1138.

[0243] In some embodiments, the hinge domain is an RQRCD8 hinge domain. In some embodiments, the RQRCD8 hinge domain comprises a sequence having at least 85%, 90%, 91%, 92%, 93%, 94%, 95%, 96%, 97%, 98%, 99%, or 100% identity to SEQ ID NO: 1391. In some embodiments, the RQRCD8 hinge domain is encoded by a nucleic acid comprising a sequence having at least 85%, 90%, 91%, 92%, 93%, 94%, 95%, 96%, 97%, 98%, 99%, or 100% identity to SEQ ID NO: 1402. In some embodiments, the RQRCD8 hinge domain is truncated or modified and is at least 70%, at least 75%, at least 80%, at least 85%, at least 90%, at least 95% homologous with the peptide having the sequence of SEQ ID NO: 1391.

[0244] In some embodiments, the RQRCD8 hinge domain, transmembrane domain, and intracellular signaling domain make up the part of the BCMA-directed CAR other than the anti-BCMA binding moiety. In some embodiments, the BCMA-directed CAR comprises an RQRCD8 hinge domain (RQRCD8h), a CD8TM, a CD8IC, an OX40, and a CD3ζ. In some embodiments, the RQRCD8h, CD8TM, CD8IC, OX40, and CD3ζ are in the order of RQRCD8h-CD8TM-CD8IC-OX40-CD3ζ, from N-terminus to C-terminus. In some embodiments, the RQRCD8 hinge domain, transmembrane domain, and intracellular signaling domain are represented by a sequence having at least 85%, 90%, 91%, 92%, 93%, 94%, 95%, 96%, 97%, 98%, 99%, or 100% identity to SEQ ID NO: 1379. In some embodiments, the RQRCD8 hinge domain, transmembrane domain, and intracellular signaling domain are encoded by a nucleic acid comprising a sequence having at least 85%, 90%, 91%, 92%, 93%, 94%, 95%, 96%, 97%, 98%, 99%, or 100% identity to SEQ ID NO: 1380.

[0245] In some embodiments where the BCMA-directed CAR comprises an RQRCD8, CD8TM, CD8IC, OX40, and CD3ζ with the anti-BCMA binding moiety, the BCMA-directed CAR may comprise a sequence having at least 85%, 90%, 91%, 92%, 93%, 94%, 95%, 96%, 97%, 98%, 99%, or 100% identity to any one of SEQ ID NOs: 1217-1242. In some embodiments, the BCMA-directed CAR is encoded by a nucleic acid having a sequence at least 85%, 90%, 91%, 92%, 93%, 94%, 95%, 96%, 97%, 98%, 99%, or 100% identity to any one of SEQ ID NOs: 1243-1268. In some embodiments, the BCMA-directed CAR is encoded by a nucleic acid codon optimized for human and having a sequence at least 85%, 90%, 91%, 92%, 93%, 94%, 95%, 96%, 97%, 98%, 99%, or 100% identity to any one of SEQ ID NOs: 1269-1294.

### BCMA-Directed Chimeric Antigen Receptor Constructs

[0246] In some embodiments, BCMA-directed CAR constructs comprising a BCMA-directed CAR are provided. FIG. 1 depicts exemplary BCMA-directed CAR constructs as embodied in the present disclosure. As shown in FIG. 1, embodiments of BCMA-directed CAR constructs comprise an anti-BCMA binding moiety, a hinge domain, a CD8 transmembrane domain, a CD8 intracellular domain, an OX40 subdomain, a CD3ζ subdomain, a T2A self-cleaving peptide, and a membrane-bound IL15. In some embodiments, the CD8 transmembrane domain may be substituted for a CD28 transmembrane domain. Any one or more of these components may be any of the embodiments of the respective components disclosed herein. In some embodiments, the BCMA-directed CAR is any one of the BCMA-directed CARs disclosed herein, and the BCMA-directed CAR constructs comprise said BCMA-directed CARs and a membrane-bound IL15 in a bicistronic configuration.

[0247] In some embodiments, the BCMA-directed CAR construct comprises a BCMA-directed CAR comprising an anti-BCMA binding moiety, a CD8h, a CD8TM, a CD8IC, an OX40, and a CD3ζ and a membrane-bound IL15 (mbIL15), where the BCMA-directed CAR and mbIL15 are separated by a self-cleaving peptide (e.g. a T2A self-cleaving peptide). In some embodiments, the BCMA-directed CAR construct is arranged in the order of the anti-BCMA binding moiety-CD8h-CD8TM-CD8IC-OX40-CD3ζ-T2A-mbIL15, from N-terminus to C-terminus. In some embodiments, the CD8h-CD8TM-CD8IC-OX40-CD3ζ-T2A-mbIL15 comprises a sequence having at least 85%, 90%, 91%, 92%, 93%, 94%, 95%, 96%, 97%, 98%, 99%, or 100% identity to SEQ ID NO: 1381. In some embodiments, the CD8h-CD8TM-CD8IC-OX40-CD3ζ-T2A-mbIL15 is encoded by a nucleic acid comprising a sequence having at least 85%, 90%, 91%, 92%, 93%, 94%, 95%, 96%, 97%, 98%, 99%, or 100% identity to SEQ ID NO: 1382. In some embodiments, the anti-BCMA binding moiety comprises a VH and VL arranged such that the VH is N-terminal to the VL. In some embodiments, the BCMA-directed CAR construct comprises a sequence having at least 85%, 90%, 91%, 92%, 93%, 94%, 95%, 96%, 97%, 98%, 99%, or 100% identity to any one of SEQ ID NOs: 827-852. In some embodiments, the BCMA-directed CAR construct is encoded by a nucleic acid comprising a sequence having at least 85%, 90%, 91%, 92%, 93%, 94%, 95%, 96%, 97%, 98%, 99%, or 100% identity to any one of SEQ ID NOs: 853-878. In some embodiments, the BCMA-directed CAR construct is encoded by a nucleic acid codon optimized for human and comprising a sequence having at least 85%, 90%, 91%, 92%, 93%, 94%, 95%, 96%, 97%, 98%, 99%, or 100% identity to any one of SEQ ID NOs: 879-904.

[0248] In some embodiments, the BCMA-directed CAR construct comprises a BCMA-directed CAR comprising an anti-BCMA binding moiety, a CD8h, a CD8TM, a CD8IC, an OX40, and a CD3ζ and an mbIL15, where the BCMA-directed CAR and mbIL15 are separated by a self-cleaving peptide (e.g. a T2A self-cleaving peptide). In some embodiments, the BCMA-directed CAR construct is arranged in the order of the anti-BCMA binding moiety-CD8h-CD8TM-CD8IC-OX40-CD3ζ-T2A-mbIL15, from N-terminus to C-terminus. In some embodiments, the CD8h-CD8TM-CD8IC-OX40-CD3ζ-T2A-mbIL15 comprises a sequence having at least 85%, 90%, 91%, 92%, 93%, 94%, 95%, 96%, 97%, 98%, 99%, or 100% identity to SEQ ID NO: 1381. In some embodiments, the CD8h-CD8TM-CD8IC-OX40-CD3ζ-T2A-mbIL15 is encoded by a nucleic acid comprising a sequence having at least 85%, 90%, 91%, 92%, 93%, 94%, 95%, 96%, 97%, 98%, 99%, or 100% identity to SEQ ID NO: 1382. In some embodiments, the anti-BCMA binding moiety comprises a VH and VL arranged such that the VL is N-terminal to the VH. In some embodiments, the BCMA-directed CAR construct comprises a sequence having at least 85%, 90%, 91%, 92%, 93%, 94%, 95%, 96%, 97%, 98%, 99%, or 100% identity to any one of SEQ ID NOs: 983-1008. In some embodiments, the BCMA-directed CAR construct is encoded by a nucleic acid comprising a sequence having at least 85%, 90%, 91%, 92%, 93%, 94%, 95%, 96%, 97%, 98%, 99%, or 100% identity to any one of SEQ ID NOs: 1009-1034. In some embodiments, the BCMA-directed CAR construct is encoded by a nucleic acid codon optimized for human and comprising a sequence having at least 85%, 90%, 91%, 92%, 93%, 94%, 95%, 96%, 97%, 98%, 99%, or 100% identity to any one of SEQ ID NOs: 1035-1060.

[0249] In some embodiments, the BCMA-directed CAR construct comprises a BCMA-directed CAR comprising an anti-BCMA binding moiety, an IgG4h, a CD8TM, a CD8IC, an OX40, and a CD3ζ and an mbIL15, where the BCMA-directed CAR and mbIL15 are separated by a self-cleaving peptide (e.g. a T2A self-cleaving peptide). In some embodiments, the BCMA-directed CAR construct is arranged in the order of the anti-BCMA binding moiety-IgG4h-CD8TM-CD8IC-OX40-CD3ζ-T2A-mbIL15, from N-terminus to C-terminus. In some embodiments, the IgG4h-CD8TM-CD8IC-OX40-CD3ζ-T2A-mbIL15 comprises a sequence having at least 85%, 90%, 91%, 92%, 93%, 94%, 95%, 96%, 97%, 98%, 99%, or 100% identity to SEQ ID NO: 1383. In some embodiments, the IgG4h-CD8TM-CD8IC-OX40-CD3ζ-T2A-mbIL15 is encoded by a nucleic acid comprising a sequence having at least 85%, 90%, 91%, 92%, 93%, 94%, 95%, 96%, 97%, 98%, 99%, or 100% identity to SEQ ID NO: 1384. In some embodiments, the BCMA-directed CAR construct comprises a sequence having at least 85%, 90%, 91%, 92%, 93%, 94%, 95%, 96%, 97%, 98%, 99%, or 100% identity to any one of SEQ ID NOs: 1139-1164. In some embodiments, the BCMA-directed CAR construct is encoded by a nucleic acid comprising a sequence having at least 85%, 90%, 91%, 92%, 93%, 94%, 95%, 96%, 97%, 98%, 99%, or 100% identity to any one of SEQ ID NOs: 1165-1190. In some embodiments, the BCMA-directed CAR construct is encoded by a nucleic acid codon optimized for human and comprising a sequence having at least 85%, 90%, 91%, 92%, 93%, 94%, 95%, 96%, 97%, 98%, 99%, or 100% identity to any one of SEQ ID NOs: 1191-1216.

[0250] In some embodiments, the BCMA-directed CAR construct comprises a BCMA-directed CAR comprising an anti-BCMA binding moiety, an RQR8CDh, a CD8TM, a CD8IC, an OX40, and a CD3ζ and an mbIL15, where the BCMA-directed CAR and mbIL15 are separated by a self-cleaving peptide (e.g. a T2A self-cleaving peptide). In some embodiments, the BCMA-directed CAR construct is arranged in the order of the anti-BCMA binding moiety-RQR8CDh-CD8TM-CD8IC-OX40-CD3ζ-T2A-mbIL15, from N-terminus to C-terminus. In some embodiments, the RQRCD8h-CD8TM-CD8IC-OX40-CD3ζ-T2A-mbIL15 comprises a sequence having at least 85%, 90%, 91%, 92%, 93%, 94%, 95%, 96%, 97%, 98%, 99%, or 100% identity to SEQ ID NO: 1385. In some embodiments, the RQRCD8h-CD8TM-CD8IC-OX40-CD3ζ-T2A-mbIL15 is encoded by a nucleic acid comprising a sequence having at least 85%, 90%, 91%, 92%, 93%, 94%, 95%, 96%, 97%, 98%, 99%, or 100% identity to SEQ ID NO: 1386. In some embodiments, the BCMA-directed CAR construct comprises a sequence having at least 85%, 90%, 91%, 92%, 93%, 94%, 95%, 96%, 97%, 98%, 99%, or 100% identity to any one of SEQ ID NOs: 1295-1320. In some embodiments, the BCMA-directed CAR construct is encoded by a nucleic acid comprising a sequence having at least 85%, 90%, 91%, 92%, 93%, 94%, 95%, 96%, 97%, 98%, 99%, or 100% identity to any one of SEQ ID NOs: 1321-1346. In some embodiments, the BCMA-directed CAR construct is encoded by a nucleic acid codon optimized for human and comprising a sequence having at least 85%, 90%, 91%, 92%, 93%, 94%, 95%, 96%, 97%, 98%, 99%, or 100% identity to any one of SEQ ID NOs: 1347-1372.

[0251] In some embodiments, the BCMA-directed CAR is encoded by a nucleic acid that also encodes mbIL15 and has at least 85%, 90%, 91%, 92%, 93%, 94%, 95%, 96%, 97%, 98%, 99%, or 100% identity to any one of SEQ ID NOs: 3851-3854.

[0252] In some embodiments, the BCMA-directed CAR comprises a sequence having at least 85%, 90%, 91%, 92%, 93%, 94%, 95%, 96%, 97%, 98%, 99%, or 100% identity to any one of SEQ ID NOs: 3867-3870. In some embodiments, the BCMA-directed CAR is encoded by a nucleic acid comprising a sequence having at least 85%, 90%, 91%, 92%, 93%, 94%, 95%, 96%, 97%, 98%, 99%, or 100% identity to any one of SEQ ID NOs: 3883-3886.

[0253] In some embodiments, the BCMA-directed CAR comprises a sequence having at least 85%, 90%, 91%, 92%, 93%, 94%, 95%, 96%, 97%, 98%, 99%, or 100% identity to any one of SEQ ID NOs: 3887-3912. In some embodiments, the BCMA-directed CAR is encoded by a nucleic acid comprising a sequence having at least 85%, 90%, 91%, 92%, 93%, 94%, 95%, 96%, 97%, 98%, 99%, or 100% identity to any one of SEQ ID NOs: 3913-3964.

[0254] In some embodiments, the BCMA-directed CAR is encoded by a nucleic acid that also encodes mbIL15 and has at least 85%, 90%, 91%, 92%, 93%, 94%, 95%, 96%, 97%, 98%, 99%, or 100% identity to any one of SEQ ID NOs: 3991-4042.

[0255] In some embodiments, the BCMA-directed CAR comprises a sequence having at least 85%, 90%, 91%, 92%, 93%, 94%, 95%, 96%, 97%, 98%, 99%, or 100% identity to any one of SEQ ID NOs: 4043-4068. In some embodiments, the BCMA-directed CAR is encoded by a nucleic acid comprising a sequence having at least 85%, 90%, 91%, 92%, 93%, 94%, 95%, 96%, 97%, 98%, 99%, or 100% identity to any one of SEQ ID NOs: 4069-4120. In some embodiments, the BCMA-directed CAR is encoded by a nucleic acid that also encodes mbIL15 and has at least 85%, 90%, 91%, 92%, 93%, 94%, 95%, 96%, 97%, 98%, 99%, or 100% identity to any one of SEQ ID NOs: 4147-4198.

[0256] In some embodiments, the BCMA-directed CAR comprises a sequence having at least 85%, 90%, 91%, 92%, 93%, 94%, 95%, 96%, 97%, 98%, 99%, or 100% identity to any one of SEQ ID NOs: 4199-4224. In some embodiments, the BCMA-directed CAR is encoded by a nucleic acid comprising a sequence having at least 85%, 90%, 91%, 92%, 93%, 94%, 95%, 96%, 97%, 98%, 99%, or 100% identity to any one of SEQ ID NOs: 4225-4276. In some embodiments, the BCMA-directed CAR is encoded by a nucleic acid that also encodes mbIL15 and has at least 85%, 90%, 91%, 92%, 93%, 94%, 95%, 96%, 97%, 98%, 99%, or 100% identity to any one of SEQ ID NOs: 4303-4354.

[0257] In some embodiments, the BCMA-directed CAR comprises a sequence having at least 85%, 90%, 91%, 92%, 93%, 94%, 95%, 96%, 97%, 98%, 99%, or 100% identity to any one of SEQ ID NOs: 4355-4380. In some embodiments, the BCMA-directed CAR is encoded by a nucleic acid comprising a sequence having at least 85%, 90%, 91%, 92%, 93%, 94%, 95%, 96%, 97%, 98%, 99%, or 100% identity to any one of SEQ ID NOs: 4381-4432. In some embodiments, the BCMA-directed CAR is encoded by a nucleic acid that also encodes mbIL15 and has at least 85%, 90%, 91%, 92%, 93%, 94%, 95%, 96%, 97%, 98%, 99%, or 100% identity to any one of SEQ ID NOs: 4459-4510.

[0258] In some embodiments, the BCMA-directed CAR comprises a sequence having at least 85%, 90%, 91%, 92%, 93%, 94%, 95%, 96%, 97%, 98%, 99%, or 100% identity to any one of SEQ ID NOs: 4513-4531. In some embodiments, the BCMA-directed CAR is encoded by a nucleic acid comprising a sequence having at least 85%, 90%, 91%, 92%, 93%, 94%, 95%, 96%, 97%, 98%, 99%, or 100% identity to any one of SEQ ID NOs: 4531-4569. In some embodiments, the BCMA-directed CAR is encoded by a nucleic acid that also encodes mbIL15 and has at least 85%, 90%, 91%, 92%, 93%, 94%, 95%, 96%, 97%, 98%, 99%, or 100% identity to any one of SEQ ID NOs: 4589-4626.

[0259] In some embodiments, the BCMA-directed CAR comprises a sequence having at least 85%, 90%, 91%, 92%, 93%, 94%, 95%, 96%, 97%, 98%, 99%, or 100% identity to any one of SEQ ID NOs: 4627-4645. In some embodiments, the BCMA-directed CAR is encoded by a nucleic acid comprising a sequence having at least 85%, 90%, 91%, 92%, 93%, 94%, 95%, 96%, 97%, 98%, 99%, or 100% identity to any one of SEQ ID NOs: 4646-4683. In some embodiments, the BCMA-directed CAR is encoded by a nucleic acid that also encodes mbIL15 and has at least 85%, 90%, 91%, 92%, 93%, 94%, 95%, 96%, 97%, 98%, 99%, or 100% identity to any one of SEQ ID NOs: 4703-4740.

[0260] In some embodiments, the BCMA-directed CAR comprises a sequence having at least 85%, 90%, 91%, 92%, 93%, 94%, 95%, 96%, 97%, 98%, 99%, or 100% identity to any one of SEQ ID NOs: 4741-4759. In some embodiments, the BCMA-directed CAR is encoded by a nucleic acid comprising a sequence having at least 85%, 90%, 91%, 92%, 93%, 94%, 95%, 96%, 97%, 98%, 99%, or 100% identity to any one of SEQ ID NOs: 4760-4797. In some embodiments, the BCMA-directed CAR is encoded by a nucleic acid that also encodes mbIL15 and has at least 85%, 90%, 91%, 92%, 93%, 94%, 95%, 96%, 97%, 98%, 99%, or 100% identity to any one of SEQ ID NOs: 4817-4854.

[0261] In some embodiments, the BCMA-directed CAR comprises a sequence having at least 85%, 90%, 91%, 92%, 93%, 94%, 95%, 96%, 97%, 98%, 99%, or 100% identity to any one of SEQ ID NOs: 4855-4873. In some embodiments, the BCMA-directed CAR is encoded by a nucleic acid comprising a sequence having at least 85%, 90%, 91%, 92%, 93%, 94%, 95%, 96%, 97%, 98%, 99%, or 100% identity to any one of SEQ ID NOs: 4874-4911. In some embodiments, the BCMA-directed CAR is encoded by a nucleic acid that also encodes mbIL15 and has at least 85%, 90%, 91%, 92%, 93%, 94%, 95%, 96%, 97%, 98%, 99%, or 100% identity to any one of SEQ ID NOs: 4931-4968.

[0262] In some embodiments, the BCMA-directed CAR comprises a sequence having at least 85%, 90%, 91%, 92%, 93%, 94%, 95%, 96%, 97%, 98%, 99%, or 100% identity to any one of SEQ ID NOs: 4969-4994. In some embodiments, the BCMA-directed CAR is encoded by a nucleic acid comprising a sequence having at least 85%, 90%, 91%, 92%, 93%, 94%, 95%, 96%, 97%, 98%, 99%, or 100% identity to any one of SEQ ID NOs: 4995-5046. In some embodiments, the BCMA-directed CAR is encoded by a nucleic acid that also encodes mbIL15 and has at least 85%, 90%, 91%, 92%, 93%, 94%, 95%, 96%, 97%, 98%, 99%, or 100% identity to any one of SEQ ID NOs: 5073-5124.

[0263] In some embodiments, the BCMA-directed CAR comprises a sequence having at least 85%, 90%, 91%, 92%, 93%, 94%, 95%, 96%, 97%, 98%, 99%, or 100% identity to any one of SEQ ID NOs: 5125-5150. In some embodiments, the BCMA-directed CAR is encoded by a nucleic acid comprising a sequence having at least 85%, 90%, 91%, 92%, 93%, 94%, 95%, 96%, 97%, 98%, 99%, or 100% identity to any one of SEQ ID NOs: 5151-5176. In some embodiments, the BCMA-directed CAR is encoded by a nucleic acid that also encodes mbIL15 and has at least 85%, 90%, 91%, 92%, 93%, 94%, 95%, 96%, 97%, 98%, 99%, or 100% identity to any one of SEQ ID NOs: 5203-5228.

[0264] In some embodiments, the BCMA-directed CAR comprises a sequence having at least 85%, 90%, 91%, 92%, 93%, 94%, 95%, 96%, 97%, 98%, 99%, or 100% identity to any one of SEQ ID NOs: 5229-5247. In some embodiments, the BCMA-directed CAR is encoded by a nucleic acid comprising a sequence having at least 85%, 90%, 91%, 92%, 93%, 94%, 95%, 96%, 97%, 98%, 99%, or 100% identity to any one of SEQ ID NOs: 5248-5285. In some embodiments, the BCMA-directed CAR is encoded by a nucleic acid that also encodes mbIL15 and has at least 85%, 90%, 91%, 92%, 93%, 94%, 95%, 96%, 97%, 98%, 99%, or 100% identity to any one of SEQ ID NOs: 5305-5342.

[0265] In some embodiments, the BCMA-directed CAR comprises a sequence having at least 85%, 90%, 91%, 92%, 93%, 94%, 95%, 96%, 97%, 98%, 99%, or 100% identity to any one of SEQ ID NOs: 5343-5361. In some embodiments, the BCMA-directed CAR is encoded by a nucleic acid comprising a sequence having at least 85%, 90%, 91%, 92%, 93%, 94%, 95%, 96%, 97%, 98%, 99%, or 100% identity to any one of SEQ ID NOs: 5362-5399. In some embodiments, the BCMA-directed CAR is encoded by a nucleic acid that also encodes mbIL15 and has at least 85%, 90%, 91%, 92%, 93%, 94%, 95%, 96%, 97%, 98%, 99%, or 100% identity to any one of SEQ ID NOs: 5419-5456.

[0266] In some embodiments, the BCMA-directed CAR comprises a sequence having at least 85%, 90%, 91%, 92%, 93%, 94%, 95%, 96%, 97%, 98%, 99%, or 100% identity to any one of SEQ ID NOs: 5503-5525. In some embodiments, the BCMA-directed CAR is encoded by a nucleic acid comprising a sequence having at least 85%, 90%, 91%, 92%, 93%, 94%, 95%, 96%, 97%, 98%, 99%, or 100% identity to any one of SEQ ID NOs: 5526-5571. In some embodiments, the BCMA-directed CAR is encoded by a nucleic acid that also encodes mbIL15 and has at least 85%, 90%, 91%, 92%, 93%, 94%, 95%, 96%, 97%, 98%, 99%, or 100% identity to any one of SEQ ID NOs: 5595-5640.

[0267] In some embodiments, the BCMA-directed CAR comprises a sequence having at least 85%, 90%, 91%, 92%, 93%, 94%, 95%, 96%, 97%, 98%, 99%, or 100% identity to any one of SEQ ID NOs: 5641-5663. In some embodiments, the BCMA-directed CAR is encoded by a nucleic acid comprising a sequence having at least 85%, 90%, 91%, 92%, 93%, 94%, 95%, 96%, 97%, 98%, 99%, or 100% identity to any one of SEQ ID NOs: 5664-5709. In some embodiments, the BCMA-directed CAR is encoded by a nucleic acid that also encodes mbIL15 and has at least 85%, 90%, 91%, 92%, 93%, 94%, 95%, 96%, 97%, 98%, 99%, or 100% identity to any one of SEQ ID NOs: 5733-5778.

[0268] In some embodiments, the BCMA-directed CAR comprises a VHH domain and comprises a sequence having at least 85%, 90%, 91%, 92%, 93%, 94%, 95%, 96%, 97%, 98%, 99%, or 100% identity to any one of SEQ ID NOs: 5779-5801. In some embodiments, the BCMA-directed VHH-CAR is encoded by a nucleic acid comprising a sequence having at least 85%, 90%, 91%, 92%, 93%, 94%, 95%, 96%, 97%, 98%, 99%, or 100% identity to any one of SEQ ID NOs: 5802-5847. In some embodiments, the BCMA-directed VHH-CAR is encoded by a nucleic acid that also encodes mbIL15 and has at least 85%, 90%, 91%, 92%, 93%, 94%, 95%, 96%, 97%, 98%, 99%, or 100% identity to any one of SEQ ID NOs: 5871-5916.

[0269] It shall be appreciated that, for any receptor construct described herein, certain sequence variability, extensions, and/or truncations of the disclosed sequences may result when combining sequences, as a result of, for example, ease or efficiency in cloning (e.g., for creation of a restriction site).

### Methods of Treatment and Administration and Dosing

[0270] Disclosed herein are populations of immune cells comprising any one of the anti-BCMA binding moieties, BCMA-directed CARs, or BCMA-directed CAR constructs disclosed herein. In some embodiments, the immune cells are NK cells and/or T cells. In some embodiments, the population of immune cells further comprise an additional extracellular moiety or CAR that binds a non-BCMA cancer marker. In some embodiments, the non-BCMA cancer marker comprises one or more of CD138, SLAMF7, CD38, GPRC5D, or CD19.

[0271] Also provided herein are embodiments relating to methods of treating, ameliorating, inhibiting, or preventing cancer with an immune cell or population of immune cells comprising any one of the anti-BCMA binding moieties, BCMA-directed CARs, or BCMA-directed CAR constructs disclosed herein. In some embodiments, the methods comprise administering a therapeutically effective amount of the immune cell or population of immune cells comprising any one of the anti-BCMA binding moieties, BCMA-directed CARs, or BCMA-directed CAR constructs disclosed herein.

[0272] In certain embodiments, treatment of a subject with a genetically engineered cell(s) described herein achieves one, two, three, four, or more of the following effects, including, for example: (i) reduction or amelioration the severity of disease or symptom associated therewith; (ii) reduction in the duration of a symptom associated with a disease; (iii) protection against the progression of a disease or symptom associated therewith; (iv) regression of a disease or symptom associated therewith; (v) protection against the development or onset of a symptom associated with a disease; (vi) protection against the recurrence of a symptom associated with a disease; (vii) reduction in the hospitalization of a subject; (viii) reduction in the hospitalization length; (ix) an increase in the survival of a subject with a disease; (x) a reduction in the number of symptoms associated with a disease; (xi) an enhancement, improvement, supplementation, complementation, or augmentation of the prophylactic or therapeutic effect(s) of another therapy. Each of these comparisons are versus, for example, a different therapy for a disease, which includes a cell-based immunotherapy for a disease using cells that do not express the constructs disclosed herein.

[0273] Administration can be by a variety of routes, including, without limitation, intravenous, intra-arterial, subcutaneous, intramuscular, intrahepatic, intraperitoneal and/or local delivery to an affected tissue. Doses of immune cells such as NK and/or T cells can be readily determined for a given subject based on their body mass, disease type and state, and desired aggressiveness of treatment, but range, depending on the embodiments, from about 10⁵ cells per kg to about 10¹² cells per kg (e.g., 10⁵-10⁷, 10⁷-10¹⁰, 10¹⁰-10¹² and overlapping ranges therein). In one embodiment, a dose escalation regimen is used. In several embodiments, a range of immune cells such as NK and/or T cells is administered, for example between about 1×10⁶ cells/kg to about 1×10⁸ cells/kg. Depending on the embodiment, various types of cancer can be treated. In several embodiments, hepatocellular carcinoma is treated. Additional embodiments provided for herein include treatment or prevention of the following non-limiting examples of cancers including, but not limited to, acute lymphoblastic leukemia (ALL), acute myeloid leukemia (AML), adrenocortical carcinoma, Kaposi sarcoma, lymphoma, gastrointestinal cancer, appendix cancer, central nervous system cancer, basal cell carcinoma, bile duct cancer, bladder cancer, bone cancer, brain tumors (including but not limited to astrocytomas, spinal cord tumors, brain stem glioma, glioblastoma, craniopharyngioma, ependymoblastoma, ependymoma, medulloblastoma, medulloepithelioma), breast cancer, bronchial tumors, Burkitt lymphoma, cervical cancer, colon cancer, chronic lymphocytic leukemia (CLL), chronic myelogenous leukemia (CML), chronic myeloproliferative disorders, ductal carcinoma, endometrial cancer, esophageal cancer, gastric cancer, Hodgkin lymphoma, non-Hodgkin lymphoma, hairy cell leukemia, renal cell cancer, leukemia, oral cancer, nasopharyngeal cancer, liver cancer, lung cancer (including but not limited to, non-small cell lung cancer, (NSCLC) and small cell lung cancer), pancreatic cancer, bowel cancer, lymphoma, melanoma, ocular cancer, ovarian cancer, pancreatic cancer, prostate cancer, pituitary cancer, uterine cancer, and vaginal cancer.

[0274] Also provided are uses of engineered NK cell as disclosed herein for the treatment of cancer and/or for the preparation of a medicament for the treatment of cancer. In several embodiments, the cancer is multiple myeloma.

[0275] In several embodiments, polynucleotides encoding the disclosed chimeric antigen receptors (including, but not limited to BCMA-directed chimeric antigen receptors) are mRNA. In some embodiments, the polynucleotide is DNA. In some embodiments, the polynucleotide is operably linked to at least one regulatory element for the expression of the cytotoxic receptor complex.

[0276] Additionally provided, according to several embodiments, is a vector comprising the polynucleotide encoding any of the polynucleotides provided for herein, wherein the polynucleotides are optionally operatively linked to at least one regulatory element for expression of a cytotoxic receptor complex. In several embodiments, the vector is a retrovirus.

[0277] Further provided herein are engineered immune cells (such as NK and/or T cells) comprising the polynucleotide, vector, or cytotoxic receptor complexes as disclosed herein. Further provided herein are compositions comprising a mixture of engineered immune cells (such as NK cells and/or engineered T cells), each population comprising the polynucleotide, vector, or cytotoxic receptor complexes as disclosed herein.

### Cancer Types

[0278] Some embodiments of the compositions and methods described herein relate to administering immune cells comprising a chimeric antigen receptor, such as a BCMA-directed chimeric antigen receptor, to a subject with cancer. Various embodiments provided for herein include treatment or prevention of the following non-limiting examples of cancers. Examples of cancer include, but are not limited to, multiple myeloma, acute lymphoblastic leukemia (ALL), acute myeloid leukemia (AML), adrenocortical carcinoma, Kaposi sarcoma, lymphoma, gastrointestinal cancer, appendix cancer, central nervous system cancer, basal cell carcinoma, bile duct cancer, bladder cancer, bone cancer, brain tumors (including but not limited to astrocytomas, spinal cord tumors, brain stem glioma, craniopharyngioma, ependymoblastoma, ependymoma, medulloblastoma, medulloepithelioma), breast cancer, bronchial tumors, Burkitt lymphoma, cervical cancer, colon cancer, chronic lymphocytic leukemia (CLL), chronic myelogenous leukemia (CML), chronic myeloproliferative disorders, ductal carcinoma, endometrial cancer, esophageal cancer, gastric cancer, Hodgkin lymphoma, non-Hodgkin lymphoma, hairy cell leukemia, renal cell cancer, leukemia, oral cancer, nasopharyngeal cancer, liver cancer, lung cancer (including but not limited to, non-small cell lung cancer, (NSCLC) and small cell lung cancer), pancreatic cancer, bowel cancer, lymphoma, melanoma, ocular cancer, ovarian cancer, pancreatic cancer, prostate cancer, pituitary cancer, uterine cancer, and vaginal cancer.

### Cancer Targets

[0279] Some embodiments of the compositions and methods described herein relate to immune cells comprising one or more chimeric antigen receptors that target a cancer antigen. Non-limiting examples of target antigens include: BCMA, CD19, CD38, CD138 (also known as syndecan 1), G protein-coupled receptor, class C group 5 member D (GPRC5D), SLAMF7, CD229 (SLAMF3), CD123, DLL3, epidermal growth factor receptor (EGFR), prostate-specific membrane antigen (PSMA), Fms Like Tyrosine Kinase 3 (FLT3); KREMEN2 (Kringle Containing Transmembrane Protein 2, Alkaline phosphatase, placental-like 2 (ALPPL2, claudin 4, claudin 6, CD5, CD22; CD30; CD171; CS1 (also referred to as CD2 subset 1, CRACC, SLAMF7, CD319, and 19A24); C-type lectin-like molecule-1 (CLL-1 or CLECLI); CD33; epidermal growth factor receptor variant III (EGFRviii); ganglioside G2 (GD2); ganglioside GD3 (aNeu5Ac(2-8)aNeu5Ac(2-3)bDGalp(1-4)bDGlcp(1-1)Cer); Tn antigen ((Tn Ag) or (GalNAca-Ser/Thr)); prostate-specific membrane antigen (PSMA); Receptor tyrosine kinase-like orphan receptor 1 (ROR1); Fms Like Tyrosine Kinase 3 (FLT3); Tumor-associated glycoprotein 72 (TAG72); CD38; CD44v6; a glycosylated CD43 epitope expressed on acute leukemia or lymphoma but not on hematopoietic progenitors, a glycosylated CD43 epitope expressed on non-hematopoietic cancers, Carcinoembryonic antigen (CEA); Epithelial cell adhesion molecule (EPCAM); B7H3 (CD276); KIT (CD117); Interleukin-13 receptor subunit alpha-2 (IL-13Ra2 or CD213A2); Mesothelin; Interleukin 11 receptor alpha (IL-11Ra); prostate stem cell antigen (PSCA); Protease Serine 21 (Testisin or PRSS21); vascular endothelial growth factor receptor 2 (VEGFR2); Lewis(Y) antigen; CD24; Platelet-derived growth factor receptor beta (PDGFR-beta); Stage-specific embryonic antigen-4 (SSEA-4); CD20; Folate receptor alpha (FRa or FR1); Folate receptor beta (FRb); Receptor tyrosine-protein kinase ERBB2 (Her2/neu); Mucin 1, cell surface associated (MUC1); epidermal growth factor receptor (EGFR); neural cell adhesion molecule (NCAM); Prostase; prostatic acid phosphatase (PAP); elongation factor 2 mutated (ELF2M); Ephrin B2; fibroblast activation protein alpha (FAP); insulin-like growth factor 1 receptor (IGF-I receptor), carbonic anhydrase IX (CAIX); Proteasome (Prosome, Macropain) Subunit, Beta Type, 9 (LMP2); glycoprotein 100 (gp100); oncogene fusion protein consisting of breakpoint cluster region (BCR) and Abelson murine leukemia viral oncogene homolog 1 (Abl) (bcr-abl); tyrosinase; ephrin type-A receptor 2 (EphA2); sialyl Lewis adhesion molecule (sLe); ganglioside GM3 (aNeu5Ac(2-3)bDClalp(1-4)bDGlcp(1-1)Cer); transglutaminase 5 (TGS5); high molecular weight-melanoma associated antigen (HMWMAA); o-acetyl-GD2 ganglioside (OAcGD2); tumor endothelial marker 1 (TEM1/CD248); tumor endothelial marker 7-related (TEM7R); claudin 6 (CLDN6); thyroid stimulating hormone receptor (TSHR); G protein coupled receptor class C group 5, member D (GPRC5D); chromosome X open reading frame 61 (CXORF61); CD97; CD179a; anaplastic lymphoma kinase (ALK); Polysialic acid; placenta-specific 1 (PLAC1); hexasaccharide portion of globoH glycoceramide (GloboH); mammary gland differentiation antigen (NY-BR-1); uroplakin 2 (UPK2); Hepatitis A virus cellular receptor 1 (HAVCR1); adrenoceptor beta 3 (ADRB3); pannexin 3 (PANX3); G protein-coupled receptor 20 (GPR20); lymphocyte antigen 6 complex, locus K 9 (LY6K); Olfactory receptor 51E2 (OR51E2); TCR Gamma Alternate Reading Frame Protein (TARP); Wilms tumor protein (WT1); Cancer/testis antigen 1 (NY-ESO-1); Cancer/testis antigen 2 (LAGE-la); Melanoma-associated antigen 1 (MAGE-A1); ETS translocation-variant gene 6, located on chromosome 12p (ETV6-AML); sperm protein 17 (SPA17); X Antigen Family, Member 1A (XAGE1); angiopoietin-binding cell surface receptor 2 (Tie 2); melanoma cancer testis antigen-1 (MAD-CT-1); melanoma cancer testis antigen-2 (MAD-CT-2); Fos-related antigen 1; tumor protein p53 (p53); p53 mutant; prostein; survivin; telomerase; prostate carcinoma tumor antigen-1 (PCT A-1 or Galectin 8), melanoma antigen recognized by T cells 1 (MelanA or MARTI); Rat sarcoma (Ras) mutant; human Telomerase; reverse transcriptase (hTERT); sarcoma translocation breakpoints; melanoma inhibitor of apoptosis (ML-IAP); ERG (transmembrane protease, serine 2 (TMPRSS2) ETS fusion gene); N-Acetyl glucosaminyl-transferase V (NA17); paired box protein Pax-3 (PAX3); Androgen receptor; Cyclin B1; v-myc avian myelocytomatosis viral oncogene neuroblastoma derived homolog (MYCN); Ras Homolog Family Member C (RhoC); Tyrosinase-related protein 2 (TRP-2); Cytochrome P450 IB 1 (CYPIB 1); CCCTC-Binding Factor (Zinc Finger Protein)-Like (BORIS or Brother of the Regulator ofimprinted Sites), Squamous Cell Carcinoma Antigen Recognized By T Cells 3 (SART3); Paired box protein Pax-5 (PAX5); proacrosin binding protein sp32 (OY-TES1); lymphocyte-specific protein tyrosine kinase (LCK); A kinase anchor protein 4 (AKAP-4); synovial sarcoma, X breakpoint 2 (SSX2); Receptor for Advanced Gly cation Endproducts (RAGE-1); renal ubiquitous 1 (RU1); renal ubiquitous 2 (RU2); legumain; human papilloma virus E6 (HPV E6); human papilloma virus E7 (HPV E7); intestinal carboxyl esterase; heat shock protein 70-2 mutated (mut hsp70-2); CD79a; CD79b; CD72; Leukocyte-associated immunoglobulin-like receptor 1 (LAIR1); Fc fragment of IgA receptor (FCAR or CD89); Leukocyte immunoglobulin-like receptor subfamily A member 2 (LILRA2); CD300 molecule-like family member f (CD300LF); C-type lectin domain family 12 member A (CLEC12A); bone marrow stromal cell antigen 2 (BST2); EGF-like module-containing mucin-like hormone receptor-like 2 (EMR2); lymphocyte antigen 75 (LY75); Glypican-3 (GPC3); Fc receptor-like 5 (FCRL5); and immunoglobulin lambda-like polypeptide 1 (IGLLI), MPL, Biotin, c-MYC epitope Tag, CD34, LAMP1 TROP2, GFRalpha4, CDH17, CDH6, NYBR1, CDH19, CD200R, Slea (CA19.9; Sialyl Lewis Antigen); Fucosyl-GMI, PTK7, gpNMB, CDH1-CD324, DLL3, CD276/B7H3, IL1 1Ra, IL13Ra2, CD179b-IGLll, TCRgamma-delta, NKG2D, CD32 (FCGR2A), Tn ag, Timl-/HVCR1, CSF2RA (GM-CSFR-alpha), TGFbetaR2, Lews Ag, TCR-beta1 chain, TCR-beta2 chain, TCR-gamma chain, TCR-delta chain, FITC, Leutenizing hormone receptor (LHR), Follicle stimulating hormone receptor (FSHR), Gonadotropin Hormone receptor (CGHR or GR), CCR4, GD3, SLAMF6, SLAMF4, HIV1 envelope glycoprotein, HTLVI-Tax, CMV pp65, EBV-EBNA3c, KSHV K8.1, KSHV-gH, influenza A hemagglutinin (HA), GAD, PDL1, Guanylyl cyclase C (GCC), auto antibody to desmoglein 3 (Dsg3), auto antibody to desmoglein 1 (Dsgl), HLA, HLA-A, HLA-A2, HLA-B, HLA-C, HLA-DP, HLA-DM, HLA-DOA, HLA-DOB, HLA-DQ, HLA-DR, HLA-G, IgE, CD99, Ras G12V, Tissue Factor 1 (TF1), AFP, GPRC5D, Claudin1 8.2 (CLD18A2 or CLDN18A.2)), P-glycoprotein, STEAP1, Liv1, Nectin-4, Cripto, gpA33, BST1/CD157, low conductance chloride channel, and the antigen recognized by TNT antibody.

### EXAMPLES

[0280] The materials and methods disclosed herein are non-limiting examples that are to be employed according to certain embodiments disclosed herein.

### Example 1—Anti-BCMA CAR Expression in NK Cells

[0281] According to several embodiments, NK cells will be isolated from peripheral blood mononuclear cells and expanded through the use of a feeder cell line. In several embodiments, the feeder cells are engineered to express certain stimulatory molecules (e.g. interleukins, CD3, 4-1BBL, etc.) to promote immune cell expansion and activation. Engineered feeder cells and related methods for expanding NK cells are disclosed in, for example, U.S. Pat. No. 7,435,596 or 8,026,097, International Patent Application PCT/SG2018/050138, International Patent Application PCT/US2020/044033, and U.S. Provisional Patent Application No. 63/073,671, each of which is expressly incorporated by reference in its entirety herein.

[0282] NK cells isolated from PBMC will be co-cultured with K562 cells expressing membrane-bound IL15 and 4-1BBL, with the media to be supplemented with IL2. Viral transduction, with a vector encoding an anti-BCMA-directed chimeric antigen receptor construct, such as any one of those disclosed herein, will be performed at approximately Day 7. Various anti-BCMA CAR constructs will be transduced into different populations of NK cells. Any combination of one or more transmembrane domains, one or more hinge domains, one or more co-stimulatory domains and one or more signaling domains disclosed herein may be used. In several embodiments, the anti-BCMA CAR will comprise an OX40 domain and a CD3ζ signaling domain. In several embodiments, the viral vector will also encode interleukin 15, optionally in a membrane-bound format to be expressed by the NK cells along with the anti-BCMA CAR. The resultant engineered NK cells will be evaluated at 14, or more, days of total culture time.

[0283] Expression of the anti-BCMA CAR constructs will be evaluated by detecting the CAR construct, for example by assessing the percentage of NK cells in a test population that express a tag sequence integrated into the CAR (e.g., a FLAG epitope tag or the CD34 and CD20 epitopes of the RQRCD8 hinge), although embodiments disclosed herein also provide for epitope tag-free CAR constructs. It is believed that at least about 75% or more of the NK cells will express the CAR in a stable manner (e.g., for at least 2-3 weeks in culture or more).

[0284] This is a prophetic example.

### Example 2—Anti-BCMA CAR Expression in T Cells

[0285] According to several embodiments, T cells will be isolated from peripheral blood mononuclear cells and expanded through the use of commercially available T cell expansion products (e.g., beads coupled to anti-CD3 and anti-CD28 antibodies).

[0286] Viral transduction of the T cells, with various vector encoding an anti-BCMA-directed chimeric antigen receptor construct, such as any one of those disclosed herein, will be performed at approximately Day 7. Various anti-BCMA CAR constructs will be transduced into different populations of T cells. Any combination of one or more transmembrane domains, one or more hinge domains, one or more co-stimulatory domains and one or more signaling domains disclosed herein may be used. In several embodiments, the anti-BCMA CAR will comprise an OX40 domain and a CD3ζ signaling domain. In several embodiments, the viral vector will also encode interleukin 15, optionally in a membrane-bound format to be expressed by the T cells along with the anti-BCMA CAR. The resultant engineered T cells will be evaluated at 14, or more, days of total culture time.

[0287] Expression of the anti-BCMA CAR constructs will be evaluated by detecting the CAR construct, for example by assessing the percentage of T cells in a test population that express a tag sequence integrated into the CAR (e.g., a FLAG epitope tag or the CD34 and CD20 epitopes of the RQRCD8 hinge), although embodiments disclosed herein also provide for epitope tag-free CAR constructs. It is believed that at least about 75% or more of the T cells will express the CAR in a stable manner (e.g., for at least 2-3 weeks in culture or more).

[0288] This is a prophetic example.

### Example 3—In Vitro Assessment of Cytotoxicity of Anti-BCMA CAR-Expressing NK and T Cells

[0289] NK cells and/or T cells expressing various anti-BCMA CARs, such as those disclosed herein, will be co-cultured with tumor cells expressing BCMA as well as cells expressing little or no BCMA as a control. Non-transduced NK and/or T cells can also be used as a negative control. Tumor cells will optionally be tagged with a fluorescent detection tag (e.g., GFP) for detection/quantification by flow cytometry. Various effector:target (E:T) ratios will be assessed, for example 8:1, 4:1, 2:1, 1:1, 1:2, 1:4, and/or 1:8. After co-culture, culture media will be collected and assayed for levels of various cytotoxic or proinflammatory cytokines. Tumor cell survival will be quantified.

[0290] It is believed that NK and/or T cells expressing anti-BCMA CARs and co-cultured with tumor cells expressing BCMA will result in higher release of cytotoxic effector molecules (such as Granzyme B, perforin, and/or interferon gamma) as compared to release of those effectors by non-transduced NK and/or T cells and BCMA-CAR-expressing NK and/or T cells cultured with tumor cells expressing reduced BCMA levels.

[0291] It is believed that NK and/or T cells expressing anti-BCMA CARs and co-cultured with tumor cells expressing BCMA will exhibit cytotoxic effects against the tumor cells in a manner dependent on the E:T ratio of a given experiment. It is believed that the engineered NK and/or T cells will exhibit anti-tumor cell effects that are persistent in nature (e.g., able to exhibit cytotoxicity for at least 2-3 weeks post transduction with the anti-BCMA CAR.

[0292] This is a prophetic example.

### Example 4—In Vivo Assessment of Cytotoxicity of Anti-BCMA CAR-Expressing NK and T Cells

[0293] NK and T cells will be isolated from PBMCs and expanded as described herein. NK cells and T cells will be engineered to express anti-BCMA CARs, such as any one of those disclosed herein, through viral transduction of the NK or T cells. Viral transduction will be performed at approximately Day 7 post-isolation. Various anti-BCMA CAR constructs will be transduced into different populations of NK cells and T cells. Any combination of one or more transmembrane domains, one or more hinge domains, one or more co-stimulatory domains and one or more signaling domains disclosed herein may be used. In several embodiments, the anti-BCMA CAR will comprise an OX40 domain and a CD3ζ signaling domain. In several embodiments, the viral vector will also encode interleukin 15, optionally in a membrane-bound format to be expressed by the NK cells along with the anti-BCMA CAR. The resultant engineered NK and engineered T cells will be evaluated at 14, or more, days of total culture time.

[0294] Immunodeficient NSG mice will be injected intravenously on Day 0 with BCMA-positive tumor cells (e.g., multiple myeloma cells such as NCI-H929, U266-B1, or RPMI-8226) at an appropriate dose (e.g., 1×10⁵ cells) and expressing a luminescence marker. At Day 1, mice will receive either a PBS control injection, non-transduced NK and/or T cells, or NK and/or T cells expressing one of the various anti-BCMA CARs disclosed herein. Bioluminescent imaging data will be collected at various time points, such as Day 0, Day 8, Day 11, Day 16, Day 20, Day 28, Day 32, and Day 40. Blood samples will be collected at various time points, such as Day 5, Day 15 and Day 20, Day 25, Day 30 Day, 35, and Day 40.

[0295] Blood samples will be analyzed for the presence and number of tumor cells using flow cytometry to detect BCMA or another identifying cell surface protein. Bioluminescent images will be reviewed for signal intensity across time points. It is expected that bioluminescence signal will increase over time for the PBS-control group and the non-transduced NK and/or T cells, indicating expansion of the tumor cells. It is anticipated that injection of NK cells expressing an anti-BCMA CAR will result in reduced progression of tumor cell growth. It is anticipated that injection of T cells expressing an anti-BCMA CAR will result in reduced progression of tumor cell growth. It is anticipated that injection of a combination of NK cells expressing an anti-BCMA CAR and T cells expressing an anti-BCMA CAR will yield marked, or even synergistic, reduction in the progression of tumor cell growth. In embodiments in which an additional epitope of BCMA is targeted (e.g., by a bi-specific CAR or a second CAR expressed by the NK and/or T cells), further enhanced cytotoxicity is expected.

[0296] It is expected that mice receiving NK cells and/or T cells expressing an anti-BCMA CAR (or CARs) will exhibit enhanced survival rate over the control groups.

[0297] This is a prophetic example.

### Example 5—Combinations of Other Cancer Targets with Anti-BCMA CAR-Expressing NK and/or T Cells

[0298] NK and T cells will be isolated from PBMCs and expanded as described herein. NK cells and T cells will be engineered to express anti-BCMA CARs, such as any one of those disclosed herein, through viral transduction of the NK or T cells. Viral transduction will be performed at approximately Day 7 post-isolation. Various anti-BCMA CAR constructs will be transduced into different populations of NK cells and T cells. Any combination of one or more transmembrane domains, one or more hinge domains, one or more co-stimulatory domains and one or more signaling domains disclosed herein may be used. In several embodiments, the anti-BCMA CAR will comprise an OX40 domain and a CD3ζ signaling domain. In several embodiments, the viral vector will also encode interleukin 15, optionally in a membrane-bound format to be expressed by the NK cells along with the anti-BCMA CAR.

[0299] NK cells and/or T cells will be engineered to express a CAR directed against an additional, e.g., non-BCMA, tumor marker. The additional tumor marker will be one or more of CD19, CD38, CD138, SLAM-F7, or GPRC5D, or other tumor marker generally known in the art. In several embodiments, a single CAR is engineered to target both BCMA and one or more of CD19, CD38, CD138, SLAM-F7, or GPRC5D, or other tumor marker generally known in the art. As with the BCMA-targeting CARs, any combination of one or more transmembrane domains, one or more hinge domains, one or more co-stimulatory domains and one or more signaling domains disclosed herein may be used. In several embodiments, the CAR directed against a non-BCMA marker will comprise an OX40 domain and a CD3ζ signaling domain. In several embodiments, the viral vector used to transduce NK and/or T cells with the non-BCMA CAR will also encode interleukin 15, optionally in a membrane-bound format to be expressed by the NK cells along with the non-BCMA CAR (or bispecific CAR). The resultant engineered NK and engineered T cells will be evaluated at 14, or more, days of total culture time.

[0300] Immunodeficient NSG mice will be injected intravenously on Day 0 with tumor cells (at an appropriate dose, such as 1×10⁵ cells) that are BCMA-positive, positive for one or more non-BCMA tumor markers (e.g., CD19, CD38, CD138, SLAM-F7, or GPRC5D) and expressing a luminescence marker. At Day 1, mice will receive either a PBS control injection, non-transduced NK and/or T cells, or NK and/or T cells expressing one of the various anti-BCMA CARs disclosed herein, expressing one of the various non-BCMA CARs disclosed herein, or a bispecific BCMA/non-BCMA CAR. Bioluminescent imaging data will be collected at various time points, such as Day 0, Day 8, Day 11, Day 16, Day 20, Day 28, Day 32, and Day 40. Blood samples will be collected at various time points, such as Day 5, Day 15 and Day 20, Day 25, Day 30 Day, 35, and Day 40.

[0301] Blood samples will be analyzed for the presence and number of tumor cells using flow cytometry to detect BCMA and the non-BCMA cell surface protein. Bioluminescent images will be reviewed for signal intensity across time points. It is expected that bioluminescence signal will increase over time for the PBS-control group and the non-transduced NK and/or T cells, indicating expansion of the tumor cells. It is anticipated that injection of NK cells, T cells, and/or combinations of NK cells with T cells expressing an anti-BCMA CAR and a CAR directed to a non-BCMA target will result in reduced progression of tumor cell growth. It is anticipated that this reduction will yield tumor growth reductions that are greater than those achieved by cells expressing either an anti-BCMA or non-BCMA CAR would yield alone. In several embodiments, similar reductions in tumor cell growth will be expected with a bi-specific CAR targeting BCMA and a non-BCMA target, whether expressed on NK cells, T cells, or on both NK cell and T cells in combination.

[0302] It is expected that mice receiving NK cells and/or T cells expressing an anti-BCMA CAR and a non-BCMA targeting CAR (or a single, bi-specific CAR) will exhibit enhanced survival rate over the control groups as well as over groups treated with cells expressing only one CAR (either BCMA or non-BCMA-directed).

[0303] This is a prophetic example.

### Example 6—Screen of Tonic Versus Target Binding-Induced Signaling

[0304] As described above, CARs provided for herein employ various structural components and/or use the same component in a different structural configuration. In order to select CARs for use in immunotherapy, a series of experiments was conducted to evaluate how the various CAR components and CAR formats disclosed herein affect expression, target binding, and target binding-induced activation as compared to tonic signaling (e.g., signaling from the CAR in the absence of the target). As depicted in the Figures (as non-limiting embodiments) and as described herein, CARs employ various structures depending on the embodiment. For example, in several embodiments different hinge domains are used to operably connect the tumor binding portion of the CAR to the remainder of the CAR (e.g., the transmembrane and signaling regions). In several embodiments, CD8 alpha-derived domains are used. For example, in several embodiments, the CD8 hinge, transmembrane and intracellular domains are used in a CAR. In several embodiments, CD28 is used. In several embodiments, longer or shorter hinge domains are used. Likewise, for scFv-containing CARs may employ a VH-linker-VL or VL-linker-VH format, noting that the linker may be different between constructs. FIG. 19 shows the results of generating four non-limiting CAR structures, a VH-linker-VL-CD8 alpha hinge, a VL-linker-VH-CD8 alpha hinge, a VH-linker-VL-IgG4 hinge (short), and a VH-linker-VL-RQRCD8 hinge (long). Expression was measured by detection of a FLAG tag embedded in the nucleotide sequence encoding the construct. It shall be appreciated that any constructs presented herein that employ a FLAG (or other detection tag) are also envisioned absent the tag (and any corresponding additional sequences, such as an associated linker). Expression data for FIG. 19 are shown as Mean Fluorescence Intensity (MFI).

[0305] As shown in FIG. 19, each of these formats, regardless of linker employed were expressed by Jurkat cells. While expression did not appear to be significantly impacted by the choice of linker in this experiment, the VH-linker-VL scFv format did appear to result in greater expression levels. However, in several embodiments, the VL-linker-VH scFv format is still able to expressed sufficiently well to enable CARs employing such scFvs to bind the respective target (e.g., BCMA) and induce cytotoxicity against such a target-expressing tumor cell.

[0306] Cancer immunotherapy requires that engineered cells are able to bind tumor cells and largely or completely avoid targeting and acting on non-tumor cells. Certain CARs are responsive primarily, or only, when they bind the tumor marker to which they have been engineered to recognize. This is referred to herein as activation. Other CARs, which are less desirable for use in immunotherapy, exhibit signaling even when their corresponding tumor marker is not present. This is referred to herein as tonic signaling. Certain experiments discussed herein relate to the ratio of activation to tonic signaling, in which a larger value for the ratio represents greater signaling for a given CAR and/or less tonic signaling.

[0307] Activation and tonic signaling are evaluated in a model system for assessing signaling in which Jurkat cells are used (as a surrogate for other cells to be used in cell therapy). Jurkat cells are an immortal human leukemic T cell line that have seen widespread use in the assessment of T cell activation and signaling mechanisms. Although Jurkat cells do not secrete the complete repertoire cytokines that primary T cells do, and Jurkat cells lack significant cytolytic activity, Jurkat cells do produce IL-2 and upregulate CD69 upon activation. Due to the ease with which cell-surface CD69 expression can be detected using fluorescent antibodies (e.g., through flow-cytometry), evaluation of the induced expression of CD69 staining was used to determine activation of the Jurkat cells expressing CARs provided for herein in the presence and absence of BCMA-expressing target cells (here MM.S1 cells).

[0308] FIG. 20 shows the resultant data from an E:T ratio of 1:1 (Jurkat:MM.1S) which is plotted based off signaling of the engineered Jurkat cells in the absence of target cells. As compared to similar experiments when smaller numbers of tumor cells were present (e.g., E:T of 10:1, data not shown), an increase in the number of target tumor cells results in an increase in the expression of CD69. As shown in the scatterplot, several of the clones exhibit high activation as well as elevated tonic signaling (upper right). Likewise, some clones show low activation and elevated tonic signaling or low activation and low signaling (left portion of scatterplot). Select clones, however, show high activation and low tonic signaling, making them attractive for potential use in cancer immunotherapy.

[0309] The data such as those related to the tonic signaling and BCMA binding can be used to generate a ratio of BCMA binding-induced signaling to tonic signaling, which can serve as a data point to compare a given CAR to others in terms of on-target performance. FIG. 21 shows selected non-limiting CAR constructs that were compared in terms of their activation/tonic signaling ratio. Each of Construct A, Construct B, and Construct C have different architecture (e.g., order of VH/VL domains, linker, etc. Within a given architecture, each of Clone 1, 2, 3, and 4 vary in terms of their binder sequence. Two different control CAR architectures were used for control. The sequence of tumor marker binder within a given CAR architecture does afford some differences in terms of the activation/tonic signaling ratio. For example, Clone A1 appears to have an elevated ratio as compared to Clone A4. Similar results are seen, for example with Clone C1 as compared to C4. Marked differences are shown in comparing Clone A1 or C1 as compared to Clone A3 or C3. While the overall Clone 1 and Clone 3 groups share a similar pattern, Clone A3 and C3 show markedly higher activation/tonic signaling ratios. These data demonstrate that the architecture of a CAR can significantly impact the activation/tonic signaling ratio. Thus, according to several embodiments, CAR architecture (e.g., VH-linker A-VL, VL-linker A-VH, VH-linker B-VL, or VL-linker B-VH) can be optimized to enhance the degree of activity that is due to binding of the CAR to a tumor marker, such as BCMA, while reducing/eliminating tonic signaling that occurs even when the tumor marker is minimally expressed, or not expressed at all.

### Example 7—Assessment of CAR Components on Expression and Function

[0310] Building on the results of the prior Example, further experiments were undertaken to evaluate BCMA-directed CAR expression and function. As provided for herein, two series of CARs were designed and constructed that varied in their architecture, as outlined below.

TABLE 1
CAR Architectures

| | | | | | | | | | |
|---|---|---|---|---|---|---|---|---|---|
| Structure | Binder Clone | Chain 1 | Linker | Chain 2 | Hinge | TM | IC | Co-stim | Stim |

Round 1

| | | | | | | | | | |
|---|---|---|---|---|---|---|---|---|---|
| A | 1-26 | VH | GS3 | VL | CD8 | CD8 | CD8 | OX40 | CD3z |
| B | 1-26 | VL | | VH | CD8 | | | | |
| C | 1-26 | VH | | VL | Short | | | | |
| D | 1-26 | VH | | VL | Long | | | | |
| E.1 | 1^{st} of 26 | VL | Whitlow | VH | CD8 | | | | |
| E.2 | 2^{nd} of 26 | VL | | VH | CD8 | | | | |
| E.3 | 3^{rd} of 26 | VL | | VH | CD8 | | | | |
| E.4 | 4^{th} of 26 | VL | | VH | CD8 | | | | |

Round 2

| | | | | | | | | | |
|---|---|---|---|---|---|---|---|---|---|
| F | 1-19 | VH | GS3 | VL | CD8 | CD8 | CD8 | Ox40 | CD3z |
| G | 1-19 | VH | Whitlow | VL | | | | | |
| H | 1-19 | VL | | VH | | | | | |
| I | 1-19 | VH | GS3 | VL | CD28 | CD28 | CD28 | | |

[0311] Based on the various structures above, assays were performed to determine if particular CAR architecture, and particular sequences within a given architecture, result in enhanced expression and/or activity (e.g., elevated activation with reduced tonic signaling).

[0312] FIG. 22 show a series of histograms that relate to expression of each of the clones within a given CAR architecture (architecture F is shown in this Figure as non-limiting data). The left panel of FIG. 22 shows expression of CARs by Jurkat cells as measured by detection of a FLAG tag integrated into the nucleic acid encoding the CAR. Data are shown as MFI, which represents the degree to which a particular cell expresses the Car (e.g., “copies” of the CAR per cell). As can be seen, even within a given architecture, certain clone sequences express more robustly than others. The right panel of FIG. 22 relates to the ability of each of the clones within a given architecture to bind BCMA, the intended target. Interestingly, while some robustly expressing cells achieved elevated BCMA binding, even some of those that were low expressing still exhibited BCMA binding on par with other CARs that had higher mean expression. This data indicate that not only is sequence important for expression, but that binding can be independent of expression. Analysis of both aspects of a CAR is thus important, in several embodiments, in so far as a lower-expressing CAR may overcome that lower expression level with elevated binding activity.

[0313] Another characteristic that can be evaluated, as discussed above, is the activation (based on target binding) to tonic signaling ratio. This ratio helps to evaluate the potential “on-” and “off-target” potential for a particular CAR. FIGS. 23A-23B shows scatter plots related to BCMA binding-induced activation (23A) and undesired tonic signaling (23B). As can be seen in FIG. 23A, several of the constructs (from varying architectures and also within an architecture) achieve activation of the CAR based on binding to BCMA. These are depicted as the circles above the 10,000 value threshold horizontal line. Those below the threshold line were deemed to have insufficient activation for passing through the screen (at least based on activation alone). FIG. 23B shows the corresponding data for tonic signaling. Again those CAR-expressing cells that are activated, even in the absence of all or substantially all target tumor marker, are deemed to exhibit some degree of tonic signaling. Those circles above the 10,000 unit threshold are deemed to show some degree of tonic signaling. Those that are below the threshold do not. However, assessing either tonic signaling or activation alone is a partial analysis. In looking at the clones that show activation above the threshold, but do not exhibit tonic signaling, five CARs satisfy those criteria in this particular screen. They are identified by arrows in FIG. 23A.

[0314] Building on this analysis, FIG. 24 shows a scatterplot of BCMA binding as a function of CAR expression, with labels indicating various groupings of the CARs. The lower left of the plot shows those CARS that neither express sufficiently well nor show sufficient BCMA binding. The lower right shows the subpopulation of CARs that express well, but show insufficient BCMA binding. The two clones in the central portion of the plot are those that exhibit good expression and good BCMA binding. However, as discussed above, for a more robust understanding of a given CAR, expression and activation can be considered along with an assessment of tonic signaling (or lack thereof).

[0315] FIG. 25 shows a scatterplot of the ratio of activation/tonic signaling in a screen of a portion of the CARs provided for herein. The activation/tonic signaling ratio is shown on the Y axis, with expression shown on the X axis. As with the prior figure, those in the lower left portion show low expression or a low activation/tonic signaling ratio (indicative of a greater than desired degree of tonic signaling, which lowers the ratio). The lower right shows those clones with reasonable expression, but undesirable activation/tonic signaling ratios. The large number of clones in the central portion of the graph exhibit varied amounts of acceptable expression levels and higher activation/tonic signaling ratios.

[0316] Further assessment of the impact of CAR architecture was undertaken to determine if a particular feature of CAR architecture showed a dominant impact on expression, target binding, or activation/tonic signaling. FIGS. 26A and 26B show data related to the activation/tonic signaling ratio (26A) and expression (26B) when using a Whitlow versus a GS linker. While certain individual clones appeared to behave uniquely, the majority of clones did not appear to deviate from the norm in terms of activation/tonic signaling or expression. A somewhat greater distribution of expression and activation/tonic signaling ratio was identified when comparing the orientation of heavy and light chains in the scFv. FIG. 26C shows the activation/tonic signaling ratio when comparing VH-linker-VL scFv structure (Y axis) versus VL-linker-VH scFv structure (X axis). While certain clones show improved activation with VH-VL ordering, others show better activity with VL-VH ordering. Similar, clone-specific, results are shown in FIG. 26D with respect to expression.

[0317] Because certain CARs in this screen differed in the sub-components of the transmembrane and signaling domains, an additional comparison was made to compare the activation/tonic signaling ratio in those CARs with CD28-derived sequences for the hinge, transmembrane and intracellular domains as compared to those using corresponding domains from CD8 alpha (with the OX40 co-stimulatory domain. Here, the data as shown in FIG. 26E seem to suggest a general trend towards improved activation/tonic signaling ratio when the CD8-OX40 domains are used, as opposed to the CD28 domains. This also appears to be the case, perhaps even more clearly, with respect to expression of the CAR constructs, as shown in FIG. 26F. These data show that both structural and sequence-based changes can influence CAR expression, binding, and activation. According to several embodiments disclosed herein, BCMA-directed CARs can achieve suitable expression in immune cells (such as NK cells), and desirable levels of activation and tonic signaling, making them appropriate candidates for BCMA-directed cancer immunotherapy.

### Example 8—Evaluation of VHH-Containing CARs

[0318] Also provided for herein are CARs that, rather than an scFv tumor binder format, employ a camelid-based tumor binder. In several embodiments, a monovalent (single VHH) CAR is used, while in other embodiments a bivalent (VHH-linker-VHH) CAR format is used. Similar to the examples discussed above, experiments were undertaken to determine if structural or sequence-based alterations to the VHH-CAR architecture impacted expression, target binding, and/or activation of the cell expressing the VHH-CAR. Monovalent or bivalent VHH-CARs were expressed in Jurkat and assessed for expression, BCMA binding, and activation/tonic signaling ratio.

[0319] FIG. 27 shows data plotting the degree of expression of monovalent and bivalent VHH-CARs relative to BCMA binding. These data indicate a relatively similar degree of expression for both monovalent (circles) and bivalent (triangles) VHH-CARs, albeit with variation among the individual clones. These data also appear to show a trend for bivalent VHH-CARs to show increased BMCA binding. This is not entirely unexpected, given the dual binding domain format of a bivalent VHH-CAR.

[0320] FIGS. 28A-28B further support this initial suggestion. FIG. 28A shows data for expression of bivalent versus monovalent VHH-CARs. As shown in the scatterplot, most of the data points lie above the threshold line of equivalence, indicating that expression is greater for the bivalent VHH-CARs. Similar, if not more profound, results are shown in FIG. 28B, where BCMA binding appears more robust when using bivalent VHH-CARs as compared to monovalent VHH-CARs.

[0321] As discussed above, however, there is a need to understand the potential interplay between binding of a target tumor marker and the activation of a cell expressing a CAR in the absence of a target tumor marker (e.g., tonic activation). FIG. 29A shows data related to the detection of tonic signaling for bivalent and monovalent VHH-CARs. These data suggest that tonic signaling is more prevalent in a bivalent VHH-CAR format. FIG. 29B assesses the activation/tonic signaling ratio, which shows a fairly even distribution of the ratio among the monovalent versus bivalent format. This may be explained, in part, by the apparent increase in BMCA binding shown by bivalent constructs. Thus, both the numerator (binding/activation) and the denominator (tonic signaling) are increased in the bivalent format, thus making the evaluation based on the ratio appear more similar to that of the monovalent.

[0322] FIGS. 29C-29D break out a subset of the data, using the six VHH-CARs showing the most preferred characteristics for the monovalent and bivalent formats. FIG. 29C is a histogram comparing the activation/tonic signaling ratio. These data suggest that the monovalent format shows a generally higher ratio than the bivalent format. The underlying mechanism appears to be borne out in FIG. 29B, which shows that the tonic signaling of the bivalent format is much greater than the monovalent construct.

[0323] Taking each of these examples into account, an analysis was performed to compare scFv-CARs with VHH-CARs. These data are shown in FIGS. 30A and 30B. FIG. 30A shows the degree of tonic signaling as a function of expression. Candidate VHH-CARs show significantly greater tonic signaling than candidate scFv's (as well as control VHH-CARs). FIG. 30B shows data related to cell activation and reveal that, while VHH-CARs in general have higher activation than scFv, the nominally lower activation when scFv CARs bind BCMA, in conjunction with the dramatically lower tonic signaling, scFv CAR formats appear to perform in a preferred manner, making them therefore likely candidates for use in cellular immunotherapy. While this particular data suggests that scFv-CARs are preferred, in some embodiments/formats, VHH-CARs may be utilized as well. Nonetheless, these data suggest that an independent evaluation of each of these parameters may be warranted to fully understand the features of a given CAR.

[0324] It is contemplated that various combinations or subcombinations of the specific features and aspects of the embodiments disclosed above may be made and still fall within one or more of the inventions. Further, the disclosure herein of any particular feature, aspect, method, property, characteristic, quality, attribute, element, or the like in connection with an embodiment can be used in all other embodiments set forth herein. Accordingly, it should be understood that various features and aspects of the disclosed embodiments can be combined with or substituted for one another in order to form varying modes of the disclosed inventions. Thus, it is intended that the scope of the present inventions herein disclosed should not be limited by the particular disclosed embodiments described above. Moreover, while the invention is susceptible to various modifications, and alternative forms, specific examples thereof have been shown in the drawings and are herein described in detail. It should be understood, however, that the invention is not to be limited to the particular forms or methods disclosed, but to the contrary, the invention is to cover all modifications, equivalents, and alternatives falling within the spirit and scope of the various embodiments described and the appended claims. Any methods disclosed herein need not be performed in the order recited. The methods disclosed herein include certain actions taken by a practitioner; however, they can also include any third-party instruction of those actions, either expressly or by implication. In addition, where features or aspects of the disclosure are described in terms of Markush groups, those skilled in the art will recognize that the disclosure is also thereby described in terms of any individual member or subgroup of members of the Markush group.

[0325] The ranges disclosed herein also encompass any and all overlap, sub-ranges, and combinations thereof. Language such as “up to,” “at least,” “greater than,” “less than,” “between,” and the like includes the number recited. Numbers preceded by a term such as “about” or “approximately” include the recited numbers. For example, “about 90%” includes “90%.” In some embodiments, a sequence having at least 95% sequence identity includes sequences having 96%, 97%, 98%, 99%, and 100% sequence identity to the reference sequence. In addition, when a sequence is disclosed as “comprising” a nucleotide or amino acid sequence, such a reference shall also include, unless otherwise indicated, that the sequence “comprises”, “consists of” or “consists essentially of” the recited sequence.

[0326] In several embodiments, there are provided amino acid sequences that correspond to any of the nucleic acids disclosed herein, while accounting for degeneracy of the nucleic acid code. Furthermore, those sequences (whether nucleic acid or amino acid) that vary from those expressly disclosed herein, but have functional similarity or equivalency are also contemplated within the scope of the present disclosure. The foregoing includes mutants, truncations, substitutions, or other types of modifications.

[0327] Any titles or subheadings used herein are for organization purposes and should not be used to limit the scope of embodiments disclosed herein.

[0328] All references cited herein, including but not limited to published and unpublished applications, patents, and literature references, are incorporated herein by reference in their entirety and are hereby made a part of this specification. To the extent publications and patents or patent applications incorporated by reference contradict the disclosure contained in the specification, the specification is intended to supersede and/or take precedence over any such contradictory material.

The application's sequence listing, which the Patent Office published only in electronic form, follows.

SEQUENCE LISTING (5916 sequences)

SEQ ID NO: 1 - protein, 19 aa, synthetic construct
  REGION 1..19: note = Synthetic
MELGLSWVFLVALLRGVQC

SEQ ID NO: 2 - protein, 19 aa, synthetic construct
  REGION 1..19: note = Synthetic
MEFGLSWVFLVALVRGVQC

SEQ ID NO: 3 - protein, 19 aa, synthetic construct
  REGION 1..19: note = Synthetic
MEFGLSWLFLVAILKGVQC

SEQ ID NO: 4 - protein, 19 aa, synthetic construct
  REGION 1..19: note = Synthetic
MEFGLSWVFLVALLRGVQC

SEQ ID NO: 5 - protein, 19 aa, synthetic construct
  REGION 1..19: note = Synthetic
MDWTWSILFLVAAATGAHS

SEQ ID NO: 6 - protein, 19 aa, synthetic construct
  REGION 1..19: note = Synthetic
MEFGLSWVFLVAILKGVQC

SEQ ID NO: 7 - protein, 19 aa, synthetic construct
  REGION 1..19: note = Synthetic
MDWTWRFLLLVAAPRWVLS

SEQ ID NO: 8 - protein, 19 aa, synthetic construct
  REGION 1..19: note = Synthetic
MEFGLRWLFLVAILKGVQC

SEQ ID NO: 9 - protein, 19 aa, synthetic construct
  REGION 1..19: note = Synthetic
MEFGLRWLFLVAILKGVQC

SEQ ID NO: 10 - DNA, 57 bp, synthetic construct
  misc_feature 1..57: note = Synthetic
  source 1..57: mol_type = other DNA
atggagcttgggctgagctgggtcttcctcgttgctcttttaagaggtgtccagtgt

SEQ ID NO: 11 - DNA, 57 bp, synthetic construct
  misc_feature 1..57: note = Synthetic
  source 1..57: mol_type = other DNA
atggagtttgggctgagctgggttttcctcgttgctcttgtaagaggtgtccagtgt

SEQ ID NO: 12 - DNA, 57 bp, synthetic construct
  misc_feature 1..57: note = Synthetic
  source 1..57: mol_type = other DNA
atggagtttgggctgagctggctttttcttgtggctattttaaaaggtgtccaatgt

SEQ ID NO: 13 - DNA, 57 bp, synthetic construct
  misc_feature 1..57: note = Synthetic
  source 1..57: mol_type = other DNA
atggagtttgggctgagctgggttttcctcgttgctcttttaagaggtgtccagtgt

SEQ ID NO: 14 - DNA, 57 bp, synthetic construct
  misc_feature 1..57: note = Synthetic
  source 1..57: mol_type = other DNA
atggactggacctggagcatccttttcttggtggcagcagcaacaggtgcccactcc

SEQ ID NO: 15 - DNA, 57 bp, synthetic construct
  misc_feature 1..57: note = Synthetic
  source 1..57: mol_type = other DNA
atggagtttgggctgagctggctctttcttgtggctattttaaaaggtgtccagtgt

SEQ ID NO: 16 - DNA, 57 bp, synthetic construct
  misc_feature 1..57: note = Synthetic
  source 1..57: mol_type = other DNA
atggagtttgggctgagctggctttttcttgtggctattttaaaaggtgtccagtgt

SEQ ID NO: 17 - DNA, 57 bp, synthetic construct
  misc_feature 1..57: note = Synthetic
  source 1..57: mol_type = other DNA
atggagtttgggctgagctgggttttccttgttgctattttaaaaggtgtccagtgt

SEQ ID NO: 18 - DNA, 57 bp, synthetic construct
  misc_feature 1..57: note = Synthetic
  source 1..57: mol_type = other DNA
atggactggacctggaggttcctcctgctggtggcggctcccagatgggtcctgtcc

SEQ ID NO: 19 - DNA, 57 bp, synthetic construct
  misc_feature 1..57: note = Synthetic
  source 1..57: mol_type = other DNA
atggagtttgggctgaggtggctttttcttgtggctattttaaaaggtgtccagtgt

SEQ ID NO: 20 - protein, 30 aa, synthetic construct
  REGION 1..30: note = Synthetic
QVQLVESGGGVVQPGRSLRLSCAASGFTFN

SEQ ID NO: 21 - protein, 30 aa, synthetic construct
  REGION 1..30: note = Synthetic
QVQLVESGGGVVQPGRSLRLSCAASGFTFS

SEQ ID NO: 22 - protein, 30 aa, synthetic construct
  REGION 1..30: note = Synthetic
EVQLLESGGGLVQPGGSLRLSCAASGFTFS

SEQ ID NO: 23 - protein, 30 aa, synthetic construct
  REGION 1..30: note = Synthetic
QVQLVQSGAEVKKPGASVKVSCKASGYTFT

SEQ ID NO: 24 - protein, 30 aa, synthetic construct
  REGION 1..30: note = Synthetic
EVQLLESGGGLVQPGGSLRLSCTASGFTFS

SEQ ID NO: 25 - protein, 30 aa, synthetic construct
  REGION 1..30: note = Synthetic
EVQLLESGGGLVQPGGSLRLSCAASGFTFN

SEQ ID NO: 26 - protein, 30 aa, synthetic construct
  REGION 1..30: note = Synthetic
EVQLLESGGDLVQPGGSLRLSCAASGFTFS

SEQ ID NO: 27 - protein, 30 aa, synthetic construct
  REGION 1..30: note = Synthetic
QVQLVESGGGVVQPGRSLRLSCAASGFNFS

SEQ ID NO: 28 - protein, 30 aa, synthetic construct
  REGION 1..30: note = Synthetic
EVHLLESGGGLVQPGGSLRLSCAASGFTFS

SEQ ID NO: 29 - protein, 30 aa, synthetic construct
  REGION 1..30: note = Synthetic
QVQLVESGGGVVQPGRSLRLSCAASGFTFT

SEQ ID NO: 30 - protein, 30 aa, synthetic construct
  REGION 1..30: note = Synthetic
EVQLVESGGGVVRPGGSLRLSCAASGFTFD

SEQ ID NO: 31 - protein, 30 aa, synthetic construct
  REGION 1..30: note = Synthetic
QLQLQESGPGLVKPSETLSLTCTVSGGSIS

SEQ ID NO: 32 - protein, 30 aa, synthetic construct
  REGION 1..30: note = Synthetic
QVQLVQSGAEVKKSGASVKVSCKASGYTLT

SEQ ID NO: 33 - protein, 14 aa, synthetic construct
  REGION 1..14: note = Synthetic
WVRQAPGKGLEWVA

SEQ ID NO: 34 - protein, 14 aa, synthetic construct
  REGION 1..14: note = Synthetic
WVRQAPGKGLEWVT

SEQ ID NO: 35 - protein, 14 aa, synthetic construct
  REGION 1..14: note = Synthetic
WVRQAPGKGLEWVS

SEQ ID NO: 36 - protein, 14 aa, synthetic construct
  REGION 1..14: note = Synthetic
WVRQAPGQGLDWMG

SEQ ID NO: 37 - protein, 14 aa, synthetic construct
  REGION 1..14: note = Synthetic
WIRQPPGKGLEWIG

SEQ ID NO: 38 - protein, 14 aa, synthetic construct
  REGION 1..14: note = Synthetic
WVRQAPGQGLEWMG

SEQ ID NO: 39 - protein, 32 aa, synthetic construct
  REGION 1..32: note = Synthetic
RFTISRDNSKNTLYLQMNSLRAEDTAVYYCAR

SEQ ID NO: 40 - protein, 32 aa, synthetic construct
  REGION 1..32: note = Synthetic
RFTISRDNSKTTLDLQMNSLRAEDTAVYYCAK

SEQ ID NO: 41 - protein, 32 aa, synthetic construct
  REGION 1..32: note = Synthetic
RFTISRDNSKNTLYLQMNSLRAEDTAMYYCAR

SEQ ID NO: 42 - protein, 32 aa, synthetic construct
  REGION 1..32: note = Synthetic
RVTMTTDTSTTTAYMELRSLRSDDTAVYYCAR

SEQ ID NO: 43 - protein, 32 aa, synthetic construct
  REGION 1..32: note = Synthetic
RFTISRDNSKTTLYLQMNSLRAEDTAVYSCAK

SEQ ID NO: 44 - protein, 32 aa, synthetic construct
  REGION 1..32: note = Synthetic
RFTISRDNSKNTLFLQMNSLRAEDTAVYYCAK

SEQ ID NO: 45 - protein, 32 aa, synthetic construct
  REGION 1..32: note = Synthetic
RFTISRDNSKNTLYLQMNSLRAEDTAVYYCAK

SEQ ID NO: 46 - protein, 32 aa, synthetic construct
  REGION 1..32: note = Synthetic
RFTISRDNSKNTLDLRMNSLRAEDTAVYYCAR

SEQ ID NO: 47 - protein, 32 aa, synthetic construct
  REGION 1..32: note = Synthetic
RFTISRDNSKNTLYLQMNSLRAEDTAVYYCAS

SEQ ID NO: 48 - protein, 32 aa, synthetic construct
  REGION 1..32: note = Synthetic
RFTTSRDNSKNTLYLQMNSLRAEDTAVYYCAK

SEQ ID NO: 49 - protein, 32 aa, synthetic construct
  REGION 1..32: note = Synthetic
RFTISRDNAKNSLYLQMNSLRAEDTALYHCAR

SEQ ID NO: 50 - protein, 32 aa, synthetic construct
  REGION 1..32: note = Synthetic
RVTISVDTSKNQFSLKLSSVTAADTAVYYCTT

SEQ ID NO: 51 - protein, 32 aa, synthetic construct
  REGION 1..32: note = Synthetic
RFTISRDNSKNTLDLQMNSLRAEDTAVYYCAR

SEQ ID NO: 52 - protein, 32 aa, synthetic construct
  REGION 1..32: note = Synthetic
RVTMTTDTSTSTAYMELRSLRSDDTAVYYCVR

SEQ ID NO: 53 - protein, 32 aa, synthetic construct
  REGION 1..32: note = Synthetic
RFTISRDNSKSTLYLHMNSLRTEDTAVYYCAR

SEQ ID NO: 54 - protein, 11 aa, synthetic construct
  REGION 1..11: note = Synthetic
WGKGTTVTVSS

SEQ ID NO: 55 - DNA, 90 bp, synthetic construct
  misc_feature 1..90: note = Synthetic
  source 1..90: mol_type = other DNA
caggtgcagctggtggagtctgggggaggcgtggtccagcctgggaggtccctgagactctcctgtgcagcgtctggattcaccttcaat

SEQ ID NO: 56 - DNA, 90 bp, synthetic construct
  misc_feature 1..90: note = Synthetic
  source 1..90: mol_type = other DNA
caggtgcagctggtggagtctgggggaggcgtggtccagcctgggaggtccctgagactctcctgtgcagcgtctgggttcaccttcagt

SEQ ID NO: 57 - DNA, 90 bp, synthetic construct
  misc_feature 1..90: note = Synthetic
  source 1..90: mol_type = other DNA
gaggtgcagctgctggagtctgggggaggcttggtacagcctggggggtccctgagactctcctgtgcagcctctggattcacctttagc

SEQ ID NO: 58 - DNA, 90 bp, synthetic construct
  misc_feature 1..90: note = Synthetic
  source 1..90: mol_type = other DNA
caggtgcagctggtggagtctgggggaggcgtggtccagcctgggaggtccctgagactctcctgtgcagcgtctggattcaccttcagt

SEQ ID NO: 59 - DNA, 90 bp, synthetic construct
  misc_feature 1..90: note = Synthetic
  source 1..90: mol_type = other DNA
caggttcagttggtacagtctggagctgaggtgaagaagcctggggcctcagtgaaggtctcctgtaaggcttctggttacacctttacc

SEQ ID NO: 60 - DNA, 90 bp, synthetic construct
  misc_feature 1..90: note = Synthetic
  source 1..90: mol_type = other DNA
gaggtgcagctgctggagtctgggggaggcctggtacagcctggggggtccctgagactctcctgtacagcctctggattcacctttagc

SEQ ID NO: 61 - DNA, 90 bp, synthetic construct
  misc_feature 1..90: note = Synthetic
  source 1..90: mol_type = other DNA
gaggtgcagctgctggagtctgggggaggcttggtacagcctggggggtccctgagactctcctgtgcagcctctggattcacctttaac

SEQ ID NO: 62 - DNA, 90 bp, synthetic construct
  misc_feature 1..90: note = Synthetic
  source 1..90: mol_type = other DNA
gaggtccaattattggagtctgggggagacttggtacagcctggggggtccctgagactctcctgtgcagcctctggattcacctttagc

SEQ ID NO: 63 - DNA, 90 bp, synthetic construct
  misc_feature 1..90: note = Synthetic
  source 1..90: mol_type = other DNA
gaggtgcagttgttggagtctgggggaggcttggtacagcctggggggtccctgagactctcctgtgcagcctctggattcacctttagc

SEQ ID NO: 64 - DNA, 90 bp, synthetic construct
  misc_feature 1..90: note = Synthetic
  source 1..90: mol_type = other DNA
caggtgcagctggtggagtctgggggaggcgtggtccagcctgggaggtccctgagactctcctgtgcagcgtctggattcaacttcagt

SEQ ID NO: 65 - DNA, 90 bp, synthetic construct
  misc_feature 1..90: note = Synthetic
  source 1..90: mol_type = other DNA
gaagtgcacctgttggagtctgggggaggcttggtccagcctggggggtccctgagactctcctgtgcggcctctggattcacctttagc

SEQ ID NO: 66 - DNA, 90 bp, synthetic construct
  misc_feature 1..90: note = Synthetic
  source 1..90: mol_type = other DNA
gaggtgcagctgttggagtctgggggaggcttggtacagcctggggggtccctgagactctcctgtgcagcctctggattcaccttcagc

SEQ ID NO: 67 - DNA, 90 bp, synthetic construct
  misc_feature 1..90: note = Synthetic
  source 1..90: mol_type = other DNA
caggtgcagctggtggagtctgggggaggcgtggtccagcctgggaggtccctgagactctcctgtgcagcgtctgggttcaccttcact

SEQ ID NO: 68 - DNA, 90 bp, synthetic construct
  misc_feature 1..90: note = Synthetic
  source 1..90: mol_type = other DNA
gaggtgcagctggtggagtctgggggaggtgtggtacggcctggggggtccctgagactctcctgtgcagcctctggattcacctttgat

SEQ ID NO: 69 - DNA, 90 bp, synthetic construct
  misc_feature 1..90: note = Synthetic
  source 1..90: mol_type = other DNA
gaggtgcagctgttggagtctgggggaggcttggtacagcctggggggtccctgagactctcctgtgcagcctctggattcacctttagc

SEQ ID NO: 70 - DNA, 90 bp, synthetic construct
  misc_feature 1..90: note = Synthetic
  source 1..90: mol_type = other DNA
cagctgcagctgcaggagtcgggcccaggactggtgaagccttcggagaccctgtccctcacctgcactgtctctggtggctccatcagc

SEQ ID NO: 71 - DNA, 90 bp, synthetic construct
  misc_feature 1..90: note = Synthetic
  source 1..90: mol_type = other DNA
gaggtgcagctgttggagtctgggggaggcttggtgcagcctggggggtccctgagactctcctgtgcagcctctggattcacctttagc

SEQ ID NO: 72 - DNA, 90 bp, synthetic construct
  misc_feature 1..90: note = Synthetic
  source 1..90: mol_type = other DNA
caggttcagctggtacagtctggagctgaggtgaagaagtctggggcctcagtgaaggtctcctgcaaggcttctggttacaccttaacc

SEQ ID NO: 73 - DNA, 90 bp, synthetic construct
  misc_feature 1..90: note = Synthetic
  source 1..90: mol_type = other DNA
gaggtgcagctgttggagtctgggggagacttggtacagcctggggggtccctgcgactctcctgtgcagcctctggattcacctttagc

SEQ ID NO: 74 - DNA, 42 bp, synthetic construct
  misc_feature 1..42: note = Synthetic
  source 1..42: mol_type = other DNA
tgggtccgccaggccccaggcaaggggctggagtgggtggca

SEQ ID NO: 75 - DNA, 42 bp, synthetic construct
  misc_feature 1..42: note = Synthetic
  source 1..42: mol_type = other DNA
tgggtccgccaggccccaggcaaggggctggagtgggtgaca

SEQ ID NO: 76 - DNA, 42 bp, synthetic construct
  misc_feature 1..42: note = Synthetic
  source 1..42: mol_type = other DNA
tgggtccgccaggctccagggaaggggctggagtgggtctca

SEQ ID NO: 77 - DNA, 42 bp, synthetic construct
  misc_feature 1..42: note = Synthetic
  source 1..42: mol_type = other DNA
tgggtgcgacaggcccctggacaagggcttgactggatggga

SEQ ID NO: 78 - DNA, 42 bp, synthetic construct
  misc_feature 1..42: note = Synthetic
  source 1..42: mol_type = other DNA
tgggtccgccaggctccagggaaggggctggaatgggtctca

SEQ ID NO: 79 - DNA, 42 bp, synthetic construct
  misc_feature 1..42: note = Synthetic
  source 1..42: mol_type = other DNA
tgggtccgccaggctccaggcaaggggctggagtgggtggca

SEQ ID NO: 80 - DNA, 42 bp, synthetic construct
  misc_feature 1..42: note = Synthetic
  source 1..42: mol_type = other DNA
tgggtccgccaggctccagggaaggggctggagtgggtctct

SEQ ID NO: 81 - DNA, 42 bp, synthetic construct
  misc_feature 1..42: note = Synthetic
  source 1..42: mol_type = other DNA
tgggtccgccaagctccagggaaggggctggagtgggtctct

SEQ ID NO: 82 - DNA, 42 bp, synthetic construct
  misc_feature 1..42: note = Synthetic
  source 1..42: mol_type = other DNA
tggatccgccagcccccagggaaggggctggagtggattggg

SEQ ID NO: 83 - DNA, 42 bp, synthetic construct
  misc_feature 1..42: note = Synthetic
  source 1..42: mol_type = other DNA
tgggtccgccaggctccaggcaaggggctggagtgggtgtca

SEQ ID NO: 84 - DNA, 42 bp, synthetic construct
  misc_feature 1..42: note = Synthetic
  source 1..42: mol_type = other DNA
tgggtgcgacaggcccctggacaagggcttgagtggatggga

SEQ ID NO: 85 - DNA, 96 bp, synthetic construct
  misc_feature 1..96: note = Synthetic
  source 1..96: mol_type = other DNA
cgattcaccatctccagagacaattccaagaacacgctgtatctgcaaatgaacagcctgagagccgaggacacggctgtgtattactgtgcgaga

SEQ ID NO: 86 - DNA, 96 bp, synthetic construct
  misc_feature 1..96: note = Synthetic
  source 1..96: mol_type = other DNA
cggttcaccatctccagagacaattccaagaccacgctggatctgcaaatgaacagcctgagagccgaggacacggccgtatattactgtgcgaaa

SEQ ID NO: 87 - DNA, 96 bp, synthetic construct
  misc_feature 1..96: note = Synthetic
  source 1..96: mol_type = other DNA
cgattcaccatttccagagacaattccaagaacacgctgtatctacaaatgaacagcctgagagccgaggacacggctatgtattactgtgcgaga

SEQ ID NO: 88 - DNA, 96 bp, synthetic construct
  misc_feature 1..96: note = Synthetic
  source 1..96: mol_type = other DNA
agagtcaccatgaccactgacacatccacgaccacagcctacatggagctgaggagcctgagatctgacgacacggccgtctattactgtgcgaga

SEQ ID NO: 89 - DNA, 96 bp, synthetic construct
  misc_feature 1..96: note = Synthetic
  source 1..96: mol_type = other DNA
cggttcaccatctcccgagacaattccaagaccacgctgtatctgcaaatgaacagcctgagagccgaggacacggccgtatattcctgtgcgaag

SEQ ID NO: 90 - DNA, 96 bp, synthetic construct
  misc_feature 1..96: note = Synthetic
  source 1..96: mol_type = other DNA
cggttcaccatctccagagacaattccaagaccactctgtatctgcaaatgaacagcctgagagccgaggacacggccgtatattcctgtgcgaaa

SEQ ID NO: 91 - DNA, 96 bp, synthetic construct
  misc_feature 1..96: note = Synthetic
  source 1..96: mol_type = other DNA
cggttcaccatctccagagacaattccaagaacacgctatttctacaaatgaacagcctgagagccgaggacacggccgtatattactgtgcgaaa

SEQ ID NO: 92 - DNA, 96 bp, synthetic construct
  misc_feature 1..96: note = Synthetic
  source 1..96: mol_type = other DNA
cgattcaccatctccagagacaattccaagaacacgctgtatctgcaaatgaacagcctgagagccgaagacacggctgtgtattactgtgcgaga

SEQ ID NO: 93 - DNA, 96 bp, synthetic construct
  misc_feature 1..96: note = Synthetic
  source 1..96: mol_type = other DNA
cggttcaccatctccagagacaattccaagaacacgctgtatctgcaaatgaacagcctgagagccgaggacacggccgtatattactgtgcgaaa

SEQ ID NO: 94 - DNA, 96 bp, synthetic construct
  misc_feature 1..96: note = Synthetic
  source 1..96: mol_type = other DNA
cgattcaccatttccagagacaattccaagaacacgctggatctgcgaatgaacagcctgagagccgaggacacggctgtgtattactgtgcgcga

SEQ ID NO: 95 - DNA, 96 bp, synthetic construct
  misc_feature 1..96: note = Synthetic
  source 1..96: mol_type = other DNA
cggttcaccatctccagagacaattccaagaacacgctgtatctgcaaatgaacagcctgagagccgaggacacggccgtatattactgtgcgtct

SEQ ID NO: 96 - DNA, 96 bp, synthetic construct
  misc_feature 1..96: note = Synthetic
  source 1..96: mol_type = other DNA
cggttcaccacctccagagacaattccaagaacacgctgtatctgcaaatgaacagcctgagagccgaggacacggccgtttattactgtgcgaaa

SEQ ID NO: 97 - DNA, 96 bp, synthetic construct
  misc_feature 1..96: note = Synthetic
  source 1..96: mol_type = other DNA
cgattcaccatctccagagacaacgccaagaactccctgtatctgcaaatgaacagtctgagagccgaggacacggccttgtatcactgtgcgaga

SEQ ID NO: 98 - DNA, 96 bp, synthetic construct
  misc_feature 1..96: note = Synthetic
  source 1..96: mol_type = other DNA
cgagtcaccatatccgtagacacgtccaagaaccagttctccctgaagctgagctctgtgaccgccgcagacacggctgtgtattactgcacaact

SEQ ID NO: 99 - DNA, 96 bp, synthetic construct
  misc_feature 1..96: note = Synthetic
  source 1..96: mol_type = other DNA
cggttcaccatctccagagacaattccaagaacacgctgtatctgcaaatgaacagcctgagagccgaggacacggccgtatattactgtgcgaga

SEQ ID NO: 100 - DNA, 96 bp, synthetic construct
  misc_feature 1..96: note = Synthetic
  source 1..96: mol_type = other DNA
cgattcaccatctccagagacaattccaagaacacgctggatctgcaaatgaacagcctgagagccgaggacacggctgtgtattactgtgcgaga

SEQ ID NO: 101 - DNA, 96 bp, synthetic construct
  misc_feature 1..96: note = Synthetic
  source 1..96: mol_type = other DNA
agagtcaccatgaccacagacacatccacgagcacagcctacatggagctgaggagcctgagatctgacgacacggccgtgtattactgtgtgaga

SEQ ID NO: 102 - DNA, 96 bp, synthetic construct
  misc_feature 1..96: note = Synthetic
  source 1..96: mol_type = other DNA
cggttcaccatctccagagacaattccaagagcacgctgtatctgcacatgaacagcctgagaaccgaggacacggccgtatattactgtgcgaga

SEQ ID NO: 103 - DNA, 33 bp, synthetic construct
  misc_feature 1..33: note = Synthetic
  source 1..33: mol_type = other DNA
tggggcaaagggaccacggtcaccgtctcctca

SEQ ID NO: 104 - protein, 5 aa, synthetic construct
  REGION 1..5: note = Synthetic
NYDMY

SEQ ID NO: 105 - protein, 5 aa, synthetic construct
  REGION 1..5: note = Synthetic
NYDMH

SEQ ID NO: 106 - protein, 5 aa, synthetic construct
  REGION 1..5: note = Synthetic
NYDMH

SEQ ID NO: 107 - protein, 5 aa, synthetic construct
  REGION 1..5: note = Synthetic
IYAMS

SEQ ID NO: 108 - protein, 5 aa, synthetic construct
  REGION 1..5: note = Synthetic
NYDKH

SEQ ID NO: 109 - protein, 5 aa, synthetic construct
  REGION 1..5: note = Synthetic
NYGFS

SEQ ID NO: 110 - protein, 5 aa, synthetic construct
  REGION 1..5: note = Synthetic
SFAMS

SEQ ID NO: 111 - protein, 5 aa, synthetic construct
  REGION 1..5: note = Synthetic
TYAMS

SEQ ID NO: 112 - protein, 5 aa, synthetic construct
  REGION 1..5: note = Synthetic
TYAMS

SEQ ID NO: 113 - protein, 5 aa, synthetic construct
  REGION 1..5: note = Synthetic
SYGMH

SEQ ID NO: 114 - protein, 5 aa, synthetic construct
  REGION 1..5: note = Synthetic
SFAMS

SEQ ID NO: 115 - protein, 5 aa, synthetic construct
  REGION 1..5: note = Synthetic
TFDIH

SEQ ID NO: 116 - protein, 5 aa, synthetic construct
  REGION 1..5: note = Synthetic
SYAMN

SEQ ID NO: 117 - protein, 5 aa, synthetic construct
  REGION 1..5: note = Synthetic
NYAMT

SEQ ID NO: 118 - protein, 5 aa, synthetic construct
  REGION 1..5: note = Synthetic
NYDMH

SEQ ID NO: 119 - protein, 5 aa, synthetic construct
  REGION 1..5: note = Synthetic
NYDMH

SEQ ID NO: 120 - protein, 5 aa, synthetic construct
  REGION 1..5: note = Synthetic
DYGMS

SEQ ID NO: 121 - protein, 5 aa, synthetic construct
  REGION 1..5: note = Synthetic
SYAMS

SEQ ID NO: 122 - protein, 7 aa, synthetic construct
  REGION 1..7: note = Synthetic
SSSYYWG

SEQ ID NO: 123 - protein, 5 aa, synthetic construct
  REGION 1..5: note = Synthetic
SYAMT

SEQ ID NO: 124 - protein, 5 aa, synthetic construct
  REGION 1..5: note = Synthetic
SYDMH

SEQ ID NO: 125 - protein, 5 aa, synthetic construct
  REGION 1..5: note = Synthetic
SYDMH

SEQ ID NO: 126 - protein, 5 aa, synthetic construct
  REGION 1..5: note = Synthetic
SYGIS

SEQ ID NO: 127 - protein, 5 aa, synthetic construct
  REGION 1..5: note = Synthetic
SYGIS

SEQ ID NO: 128 - protein, 5 aa, synthetic construct
  REGION 1..5: note = Synthetic
TYAMT

SEQ ID NO: 129 - protein, 5 aa, synthetic construct
  REGION 1..5: note = Synthetic
TYAMT

SEQ ID NO: 130 - protein, 17 aa, synthetic construct
  REGION 1..17: note = Synthetic
VTWYDGSNKYYADSVKG

SEQ ID NO: 131 - protein, 17 aa, synthetic construct
  REGION 1..17: note = Synthetic
IIWHDASNKYYLDSVKG

SEQ ID NO: 132 - protein, 17 aa, synthetic construct
  REGION 1..17: note = Synthetic
IIWHDGSNKYYLDSVKG

SEQ ID NO: 133 - protein, 17 aa, synthetic construct
  REGION 1..17: note = Synthetic
AISGGGDTTYYADSVKG

SEQ ID NO: 134 - protein, 17 aa, synthetic construct
  REGION 1..17: note = Synthetic
VIWYDGSNKYYADSVKG

SEQ ID NO: 135 - protein, 17 aa, synthetic construct
  REGION 1..17: note = Synthetic
WISAYNGYTNYTQKLQG

SEQ ID NO: 136 - protein, 17 aa, synthetic construct
  REGION 1..17: note = Synthetic
AMSGSGDTTYYADSVKG

SEQ ID NO: 137 - protein, 17 aa, synthetic construct
  REGION 1..17: note = Synthetic
AMSGSGDTTYYADSVKG

SEQ ID NO: 138 - protein, 17 aa, synthetic construct
  REGION 1..17: note = Synthetic
AISGSGENIYYADSVKG

SEQ ID NO: 139 - protein, 17 aa, synthetic construct
  REGION 1..17: note = Synthetic
VIWYDGINKYYADSVKG

SEQ ID NO: 140 - protein, 17 aa, synthetic construct
  REGION 1..17: note = Synthetic
AVSGSGDDTYYADSVKG

SEQ ID NO: 141 - protein, 17 aa, synthetic construct
  REGION 1..17: note = Synthetic
LIWYDGSYKYYADSVKG

SEQ ID NO: 142 - protein, 17 aa, synthetic construct
  REGION 1..17: note = Synthetic
SISGSGSSSYYADSVKG

SEQ ID NO: 143 - protein, 17 aa, synthetic construct
  REGION 1..17: note = Synthetic
AISGSGIGTYYADSVQG

SEQ ID NO: 144 - protein, 17 aa, synthetic construct
  REGION 1..17: note = Synthetic
IIWHDGSNKYYLDSVRG

SEQ ID NO: 145 - protein, 17 aa, synthetic construct
  REGION 1..17: note = Synthetic
IIWHDGSNKYYLDSVKG

SEQ ID NO: 146 - protein, 17 aa, synthetic construct
  REGION 1..17: note = Synthetic
GINWNGGSTGYVDSVKG

SEQ ID NO: 147 - protein, 17 aa, synthetic construct
  REGION 1..17: note = Synthetic
AISGSGGSTYYADSVKG

SEQ ID NO: 148 - protein, 16 aa, synthetic construct
  REGION 1..16: note = Synthetic
SIYYSGSTYYNPSLKS

SEQ ID NO: 149 - protein, 17 aa, synthetic construct
  REGION 1..17: note = Synthetic
AISGSGGSTYYADSVKG

SEQ ID NO: 150 - protein, 17 aa, synthetic construct
  REGION 1..17: note = Synthetic
VIWYDGSNKKYGDSAKG

SEQ ID NO: 151 - protein, 17 aa, synthetic construct
  REGION 1..17: note = Synthetic
VIWYDGSNKKYGDSAKG

SEQ ID NO: 152 - protein, 17 aa, synthetic construct
  REGION 1..17: note = Synthetic
WISAYNGNINYAQKFQG

SEQ ID NO: 153 - protein, 17 aa, synthetic construct
  REGION 1..17: note = Synthetic
WISAYNGNINYAQKFQG

SEQ ID NO: 154 - protein, 17 aa, synthetic construct
  REGION 1..17: note = Synthetic
AISGTSGSTYYADSVKG

SEQ ID NO: 155 - protein, 17 aa, synthetic construct
  REGION 1..17: note = Synthetic
AISGTSGSTYYADSVKG

SEQ ID NO: 156 - protein, 16 aa, synthetic construct
  REGION 1..16: note = Synthetic
GDNWNDEHHYFYYMDV

SEQ ID NO: 157 - protein, 16 aa, synthetic construct
  REGION 1..16: note = Synthetic
GDNWNDEHHYFYYMDV

SEQ ID NO: 158 - protein, 16 aa, synthetic construct
  REGION 1..16: note = Synthetic
GDNWNDEHHYFYYMDV

SEQ ID NO: 159 - protein, 8 aa, synthetic construct
  REGION 1..8: note = Synthetic
HTSYYMDV

SEQ ID NO: 160 - protein, 16 aa, synthetic construct
  REGION 1..16: note = Synthetic
GDNWNDEHHYFYYMDV

SEQ ID NO: 161 - protein, 12 aa, synthetic construct
  REGION 1..12: note = Synthetic
RGLLYYYYSMDV

SEQ ID NO: 162 - protein, 8 aa, synthetic construct
  REGION 1..8: note = Synthetic
HTTYYMDV

SEQ ID NO: 163 - protein, 8 aa, synthetic construct
  REGION 1..8: note = Synthetic
HTSYYMDV

SEQ ID NO: 164 - protein, 8 aa, synthetic construct
  REGION 1..8: note = Synthetic
HTSYYMDV

SEQ ID NO: 165 - protein, 13 aa, synthetic construct
  REGION 1..13: note = Synthetic
ERLERRYYYYMDV

SEQ ID NO: 166 - protein, 8 aa, synthetic construct
  REGION 1..8: note = Synthetic
HTSYYLDV

SEQ ID NO: 167 - protein, 16 aa, synthetic construct
  REGION 1..16: note = Synthetic
NDNWNDEHYYHYYMDV

SEQ ID NO: 168 - protein, 18 aa, synthetic construct
  REGION 1..18: note = Synthetic
RGFNSQYPPGYYYYYMDV

SEQ ID NO: 169 - protein, 8 aa, synthetic construct
  REGION 1..8: note = Synthetic
GGYNWKDV

SEQ ID NO: 170 - protein, 16 aa, synthetic construct
  REGION 1..16: note = Synthetic
GDNWNDEHHYFYYMDV

SEQ ID NO: 171 - protein, 16 aa, synthetic construct
  REGION 1..16: note = Synthetic
GDNWNDEHHYFYYMDV

SEQ ID NO: 172 - protein, 12 aa, synthetic construct
  REGION 1..12: note = Synthetic
PVTTDYYYYMDV

SEQ ID NO: 173 - protein, 20 aa, synthetic construct
  REGION 1..20: note = Synthetic
KGTSYNWNDVHYYYYYYMDV

SEQ ID NO: 174 - protein, 13 aa, synthetic construct
  REGION 1..13: note = Synthetic
GTTAYYYYYYMDV

SEQ ID NO: 175 - protein, 13 aa, synthetic construct
  REGION 1..13: note = Synthetic
GGYNWHYYYYMDV

SEQ ID NO: 176 - protein, 17 aa, synthetic construct
  REGION 1..17: note = Synthetic
GDNWNDEGGYYYYYMDV

SEQ ID NO: 177 - protein, 17 aa, synthetic construct
  REGION 1..17: note = Synthetic
GDNWNDEGGYYYYYMDV

SEQ ID NO: 178 - protein, 14 aa, synthetic construct
  REGION 1..14: note = Synthetic
DGDRYNWNHSYMDV

SEQ ID NO: 179 - protein, 14 aa, synthetic construct
  REGION 1..14: note = Synthetic
DGDRYNWNHSYMDV

SEQ ID NO: 180 - protein, 13 aa, synthetic construct
  REGION 1..13: note = Synthetic
GGYNWHYYYYMDV

SEQ ID NO: 181 - protein, 13 aa, synthetic construct
  REGION 1..13: note = Synthetic
GGYNWHYYYYMDV

SEQ ID NO: 182 - DNA, 15 bp, synthetic construct
  misc_feature 1..15: note = Synthetic
  source 1..15: mol_type = other DNA
aattatgacatgtac

SEQ ID NO: 183 - DNA, 15 bp, synthetic construct
  misc_feature 1..15: note = Synthetic
  source 1..15: mol_type = other DNA
aactatgacatgcac

SEQ ID NO: 184 - DNA, 15 bp, synthetic construct
  misc_feature 1..15: note = Synthetic
  source 1..15: mol_type = other DNA
aactatgacatgcac

SEQ ID NO: 185 - DNA, 15 bp, synthetic construct
  misc_feature 1..15: note = Synthetic
  source 1..15: mol_type = other DNA
atctatgccatgagc

SEQ ID NO: 186 - DNA, 15 bp, synthetic construct
  misc_feature 1..15: note = Synthetic
  source 1..15: mol_type = other DNA
aactatgacaagcac

SEQ ID NO: 187 - DNA, 15 bp, synthetic construct
  misc_feature 1..15: note = Synthetic
  source 1..15: mol_type = other DNA
aactatggtttcagc

SEQ ID NO: 188 - DNA, 15 bp, synthetic construct
  misc_feature 1..15: note = Synthetic
  source 1..15: mol_type = other DNA
agctttgccatgagc

SEQ ID NO: 189 - DNA, 15 bp, synthetic construct
  misc_feature 1..15: note = Synthetic
  source 1..15: mol_type = other DNA
acctatgccatgagc

SEQ ID NO: 190 - DNA, 15 bp, synthetic construct
  misc_feature 1..15: note = Synthetic
  source 1..15: mol_type = other DNA
acctatgccatgagc

SEQ ID NO: 191 - DNA, 15 bp, synthetic construct
  misc_feature 1..15: note = Synthetic
  source 1..15: mol_type = other DNA
agttatggcatgcac

SEQ ID NO: 192 - DNA, 15 bp, synthetic construct
  misc_feature 1..15: note = Synthetic
  source 1..15: mol_type = other DNA
agctttgccatgagc

SEQ ID NO: 193 - DNA, 15 bp, synthetic construct
  misc_feature 1..15: note = Synthetic
  source 1..15: mol_type = other DNA
acctttgacatacac

SEQ ID NO: 194 - DNA, 15 bp, synthetic construct
  misc_feature 1..15: note = Synthetic
  source 1..15: mol_type = other DNA
agctatgccatgaac

SEQ ID NO: 195 - DNA, 15 bp, synthetic construct
  misc_feature 1..15: note = Synthetic
  source 1..15: mol_type = other DNA
aactatgccatgacc

SEQ ID NO: 196 - DNA, 15 bp, synthetic construct
  misc_feature 1..15: note = Synthetic
  source 1..15: mol_type = other DNA
aactatgacatgcac

SEQ ID NO: 197 - DNA, 15 bp, synthetic construct
  misc_feature 1..15: note = Synthetic
  source 1..15: mol_type = other DNA
aactatgacatgcac

SEQ ID NO: 198 - DNA, 15 bp, synthetic construct
  misc_feature 1..15: note = Synthetic
  source 1..15: mol_type = other DNA
gattatggcatgagc

SEQ ID NO: 199 - DNA, 15 bp, synthetic construct
  misc_feature 1..15: note = Synthetic
  source 1..15: mol_type = other DNA
agctatgccatgagc

SEQ ID NO: 200 - DNA, 21 bp, synthetic construct
  misc_feature 1..21: note = Synthetic
  source 1..21: mol_type = other DNA
agtagtagttactactggggc

SEQ ID NO: 201 - DNA, 15 bp, synthetic construct
  misc_feature 1..15: note = Synthetic
  source 1..15: mol_type = other DNA
agctatgccatgacc

SEQ ID NO: 202 - DNA, 15 bp, synthetic construct
  misc_feature 1..15: note = Synthetic
  source 1..15: mol_type = other DNA
agctatgacatgcac

SEQ ID NO: 203 - DNA, 15 bp, synthetic construct
  misc_feature 1..15: note = Synthetic
  source 1..15: mol_type = other DNA
agctatgacatgcac

SEQ ID NO: 204 - DNA, 15 bp, synthetic construct
  misc_feature 1..15: note = Synthetic
  source 1..15: mol_type = other DNA
agctatggcatcagc

SEQ ID NO: 205 - DNA, 15 bp, synthetic construct
  misc_feature 1..15: note = Synthetic
  source 1..15: mol_type = other DNA
agctatggcatcagc

SEQ ID NO: 206 - DNA, 15 bp, synthetic construct
  misc_feature 1..15: note = Synthetic
  source 1..15: mol_type = other DNA
acctatgccatgacc

SEQ ID NO: 207 - DNA, 15 bp, synthetic construct
  misc_feature 1..15: note = Synthetic
  source 1..15: mol_type = other DNA
acctatgccatgacc

SEQ ID NO: 208 - DNA, 51 bp, synthetic construct
  misc_feature 1..51: note = Synthetic
  source 1..51: mol_type = other DNA
gttacatggtatgatggaagtaataaatactatgcagactccgtgaagggc

SEQ ID NO: 209 - DNA, 51 bp, synthetic construct
  misc_feature 1..51: note = Synthetic
  source 1..51: mol_type = other DNA
attatatggcatgatgcaagtaataaatattatttagactccgtgaagggc

SEQ ID NO: 210 - DNA, 51 bp, synthetic construct
  misc_feature 1..51: note = Synthetic
  source 1..51: mol_type = other DNA
attatatggcatgatggaagtaataaatattatttagactccgtgaagggc

SEQ ID NO: 211 - DNA, 51 bp, synthetic construct
  misc_feature 1..51: note = Synthetic
  source 1..51: mol_type = other DNA
gctattagtggtggtggtgataccacatactacgcagactccgtgaagggc

SEQ ID NO: 212 - DNA, 51 bp, synthetic construct
  misc_feature 1..51: note = Synthetic
  source 1..51: mol_type = other DNA
gttatatggtatgatggaagtaataagtactatgcagactccgtgaagggc

SEQ ID NO: 213 - DNA, 51 bp, synthetic construct
  misc_feature 1..51: note = Synthetic
  source 1..51: mol_type = other DNA
tggatcagcgcttacaatggttacacaaattatacacagaaactccagggc

SEQ ID NO: 214 - DNA, 51 bp, synthetic construct
  misc_feature 1..51: note = Synthetic
  source 1..51: mol_type = other DNA
gctatgagtggtagtggtgataccacatactacgcagactccgtgaagggc

SEQ ID NO: 215 - DNA, 51 bp, synthetic construct; identical to SEQ ID NO: 214
  misc_feature 1..51: note = Synthetic
  source 1..51: mol_type = other DNA

SEQ ID NO: 216 - DNA, 51 bp, synthetic construct
  misc_feature 1..51: note = Synthetic
  source 1..51: mol_type = other DNA
gctattagtggtagtggtgaaaacatatactacgcagactccgtgaagggc

SEQ ID NO: 217 - DNA, 51 bp, synthetic construct
  misc_feature 1..51: note = Synthetic
  source 1..51: mol_type = other DNA
gttatatggtatgatggaattaataaatactatgcagactccgtgaagggc

SEQ ID NO: 218 - DNA, 51 bp, synthetic construct
  misc_feature 1..51: note = Synthetic
  source 1..51: mol_type = other DNA
gctgttagtggtagtggtgatgacacatactacgcagactccgtgaagggc

SEQ ID NO: 219 - DNA, 51 bp, synthetic construct
  misc_feature 1..51: note = Synthetic
  source 1..51: mol_type = other DNA
cttatatggtatgatggaagttataaatactatgcagactccgtgaagggc

SEQ ID NO: 220 - DNA, 51 bp, synthetic construct
  misc_feature 1..51: note = Synthetic
  source 1..51: mol_type = other DNA
tctattagtggtagtggtagtagctcatactacgcagactccgtgaagggc

SEQ ID NO: 221 - DNA, 51 bp, synthetic construct
  misc_feature 1..51: note = Synthetic
  source 1..51: mol_type = other DNA
gctattagtggtagtggtattggcacatactacgcagactccgtgcagggc

SEQ ID NO: 222 - DNA, 51 bp, synthetic construct
  misc_feature 1..51: note = Synthetic
  source 1..51: mol_type = other DNA
attatatggcatgatggaagtaataaatattatttagactccgtgaggggc

SEQ ID NO: 223 - DNA, 51 bp, synthetic construct; identical to SEQ ID NO: 210
  misc_feature 1..51: note = Synthetic
  source 1..51: mol_type = other DNA

SEQ ID NO: 224 - DNA, 51 bp, synthetic construct
  misc_feature 1..51: note = Synthetic
  source 1..51: mol_type = other DNA
ggtattaattggaatggtggtagcacaggttatgtagactctgtgaagggc

SEQ ID NO: 225 - DNA, 51 bp, synthetic construct
  misc_feature 1..51: note = Synthetic
  source 1..51: mol_type = other DNA
gctattagtggtagtggtggtagcacatactacgcagactccgtgaagggc

SEQ ID NO: 226 - DNA, 48 bp, synthetic construct
  misc_feature 1..48: note = Synthetic
  source 1..48: mol_type = other DNA
agtatctattatagtgggagcacctactacaacccgtccctcaagagt

SEQ ID NO: 227 - DNA, 51 bp, synthetic construct; identical to SEQ ID NO: 225
  misc_feature 1..51: note = Synthetic
  source 1..51: mol_type = other DNA

SEQ ID NO: 228 - DNA, 51 bp, synthetic construct
  misc_feature 1..51: note = Synthetic
  source 1..51: mol_type = other DNA
gttatatggtatgatggaagtaataaaaagtatggagactccgcgaagggc

SEQ ID NO: 229 - DNA, 51 bp, synthetic construct; identical to SEQ ID NO: 228
  misc_feature 1..51: note = Synthetic
  source 1..51: mol_type = other DNA

SEQ ID NO: 230 - DNA, 51 bp, synthetic construct
  misc_feature 1..51: note = Synthetic
  source 1..51: mol_type = other DNA
tggatcagcgcttacaatggtaacataaactatgcacagaagttccagggc

SEQ ID NO: 231 - DNA, 51 bp, synthetic construct; identical to SEQ ID NO: 230
  misc_feature 1..51: note = Synthetic
  source 1..51: mol_type = other DNA

SEQ ID NO: 232 - DNA, 51 bp, synthetic construct
  misc_feature 1..51: note = Synthetic
  source 1..51: mol_type = other DNA
gctattagtggtactagtggtagcacatactacgcagactccgtgaagggc

SEQ ID NO: 233 - DNA, 51 bp, synthetic construct; identical to SEQ ID NO: 232
  misc_feature 1..51: note = Synthetic
  source 1..51: mol_type = other DNA

SEQ ID NO: 234 - DNA, 48 bp, synthetic construct
  misc_feature 1..48: note = Synthetic
  source 1..48: mol_type = other DNA
ggtgacaactggaatgacgaacaccactatttttactacatggacgtc

SEQ ID NO: 235 - DNA, 48 bp, synthetic construct
  misc_feature 1..48: note = Synthetic
  source 1..48: mol_type = other DNA
ggtgacaactggaacgacgaacaccactacttctactacatggacgtc

SEQ ID NO: 236 - DNA, 48 bp, synthetic construct; identical to SEQ ID NO: 235
  misc_feature 1..48: note = Synthetic
  source 1..48: mol_type = other DNA

SEQ ID NO: 237 - DNA, 24 bp, synthetic construct
  misc_feature 1..24: note = Synthetic
  source 1..24: mol_type = other DNA
cacactagctactacatggacgtc

SEQ ID NO: 238 - DNA, 48 bp, synthetic construct; identical to SEQ ID NO: 235
  misc_feature 1..48: note = Synthetic
  source 1..48: mol_type = other DNA

SEQ ID NO: 239 - DNA, 36 bp, synthetic construct
  misc_feature 1..36: note = Synthetic
  source 1..36: mol_type = other DNA
agaggactactctactactactactccatggacgtc

SEQ ID NO: 240 - DNA, 24 bp, synthetic construct
  misc_feature 1..24: note = Synthetic
  source 1..24: mol_type = other DNA
cacactacctactacatggacgtc

SEQ ID NO: 241 - DNA, 24 bp, synthetic construct
  misc_feature 1..24: note = Synthetic
  source 1..24: mol_type = other DNA
cacacttcctactacatggacgtc

SEQ ID NO: 242 - DNA, 24 bp, synthetic construct
  misc_feature 1..24: note = Synthetic
  source 1..24: mol_type = other DNA
cacactagctattacatggacgtc

SEQ ID NO: 243 - DNA, 39 bp, synthetic construct
  misc_feature 1..39: note = Synthetic
  source 1..39: mol_type = other DNA
gaacggctggaacgaaggtactactactacatggacgtc

SEQ ID NO: 244 - DNA, 24 bp, synthetic construct
  misc_feature 1..24: note = Synthetic
  source 1..24: mol_type = other DNA
cacactagctactacctggacgtc

SEQ ID NO: 245 - DNA, 48 bp, synthetic construct
  misc_feature 1..48: note = Synthetic
  source 1..48: mol_type = other DNA
aatgacaactggaacgacgaacactactaccactattacatggacgtc

SEQ ID NO: 246 - DNA, 54 bp, synthetic construct
  misc_feature 1..54: note = Synthetic
  source 1..54: mol_type = other DNA
cgtggattcaactcccagtatcctcccggatactactactactacatggacgtc

SEQ ID NO: 247 - DNA, 24 bp, synthetic construct
  misc_feature 1..24: note = Synthetic
  source 1..24: mol_type = other DNA
ggggggtacaactggaaggacgtc

SEQ ID NO: 248 - DNA, 48 bp, synthetic construct; identical to SEQ ID NO: 235
  misc_feature 1..48: note = Synthetic
  source 1..48: mol_type = other DNA

SEQ ID NO: 249 - DNA, 48 bp, synthetic construct; identical to SEQ ID NO: 235
  misc_feature 1..48: note = Synthetic
  source 1..48: mol_type = other DNA

SEQ ID NO: 250 - DNA, 36 bp, synthetic construct
  misc_feature 1..36: note = Synthetic
  source 1..36: mol_type = other DNA
ccagtaactacggactactactactacatggacgtc

SEQ ID NO: 251 - DNA, 60 bp, synthetic construct
  misc_feature 1..60: note = Synthetic
  source 1..60: mol_type = other DNA
aaggggacgtcgtacaactggaacgacgtccattactactactactactacatggacgtc

SEQ ID NO: 252 - DNA, 39 bp, synthetic construct
  misc_feature 1..39: note = Synthetic
  source 1..39: mol_type = other DNA
ggaacgacggcttactactactactactacatggacgtc

SEQ ID NO: 253 - DNA, 39 bp, synthetic construct
  misc_feature 1..39: note = Synthetic
  source 1..39: mol_type = other DNA
ggcgggtataactggcactactactactacatggacgtc

SEQ ID NO: 254 - DNA, 51 bp, synthetic construct
  misc_feature 1..51: note = Synthetic
  source 1..51: mol_type = other DNA
ggcgacaactggaacgacgaaggtggctactactactactacatggacgtc

SEQ ID NO: 255 - DNA, 51 bp, synthetic construct; identical to SEQ ID NO: 254
  misc_feature 1..51: note = Synthetic
  source 1..51: mol_type = other DNA

SEQ ID NO: 256 - DNA, 42 bp, synthetic construct
  misc_feature 1..42: note = Synthetic
  source 1..42: mol_type = other DNA
gatggggaccggtacaactggaaccacagctacatggacgtc

SEQ ID NO: 257 - DNA, 42 bp, synthetic construct; identical to SEQ ID NO: 256
  misc_feature 1..42: note = Synthetic
  source 1..42: mol_type = other DNA

SEQ ID NO: 258 - DNA, 39 bp, synthetic construct
  misc_feature 1..39: note = Synthetic
  source 1..39: mol_type = other DNA
ggcggatataactggcactactactactacatggacgtc

SEQ ID NO: 259 - DNA, 39 bp, synthetic construct; identical to SEQ ID NO: 258
  misc_feature 1..39: note = Synthetic
  source 1..39: mol_type = other DNA

SEQ ID NO: 260 - protein, 125 aa, synthetic construct
  REGION 1..125: note = Synthetic
QVQLVESGGGVVQPGRSLRLSCAASGFTFNNYDMYWVRQAPGKGLEWVAVTWYDGSNKYYADSVKGRFTISRDNSKNTLYLQMNSLRAEDTAVYYCARGDNWNDEHHYFYYMDVWGKGTTVTVSS

SEQ ID NO: 261 - protein, 125 aa, synthetic construct
  REGION 1..125: note = Synthetic
QVQLVESGGGVVQPGRSLRLSCAASGFTFSNYDMHWVRQAPGKGLEWVTIIWHDASNKYYLDSVKGRFTISRDNSKNTLYLQMNSLRAEDTAVYYCARGDNWNDEHHYFYYMDVWGKGTTVTVSS

SEQ ID NO: 262 - protein, 125 aa, synthetic construct
  REGION 1..125: note = Synthetic
QVQLVESGGGVVQPGRSLRLSCAASGFTFSNYDMHWVRQAPGKGLEWVTIIWHDGSNKYYLDSVKGRFTISRDNSKNTLYLQMNSLRAEDTAVYYCARGDNWNDEHHYFYYMDVWGKGTTVTVSS

SEQ ID NO: 263 - protein, 117 aa, synthetic construct
  REGION 1..117: note = Synthetic
EVQLLESGGGLVQPGGSLRLSCAASGFTFSIYAMSWVRQAPGKGLEWVSAISGGGDTTYYADSVKGRFTISRDNSKTTLDLQMNSLRAEDTAVYYCAKHTSYYMDVWGKGTTVTVSS

SEQ ID NO: 264 - protein, 125 aa, synthetic construct
  REGION 1..125: note = Synthetic
QVQLVESGGGVVQPGRSLRLSCAASGFTFSNYDKHWVRQAPGKGLEWVAVIWYDGSNKYYADSVKGRFTISRDNSKNTLYLQMNSLRAEDTAMYYCARGDNWNDEHHYFYYMDVWGKGTTVTVSS

SEQ ID NO: 265 - protein, 121 aa, synthetic construct
  REGION 1..121: note = Synthetic
QVQLVQSGAEVKKPGASVKVSCKASGYTFTNYGFSWVRQAPGQGLDWMGWISAYNGYTNYTQKLQGRVTMTTDTSTTTAYMELRSLRSDDTAVYYCARRGLLYYYYSMDVWGKGTTVTVSS

SEQ ID NO: 266 - protein, 117 aa, synthetic construct
  REGION 1..117: note = Synthetic
EVQLLESGGGLVQPGGSLRLSCTASGFTFSSFAMSWVRQAPGKGLEWVSAMSGSGDTTYYADSVKGRFTISRDNSKTTLYLQMNSLRAEDTAVYSCAKHTTYYMDVWGKGTTVTVSS

SEQ ID NO: 267 - protein, 117 aa, synthetic construct
  REGION 1..117: note = Synthetic
EVQLLESGGGLVQPGGSLRLSCAASGFTFNTYAMSWVRQAPGKGLEWVSAMSGSGDTTYYADSVKGRFTISRDNSKTTLYLQMNSLRAEDTAVYSCAKHTSYYMDVWGKGTTVTVSS

SEQ ID NO: 268 - protein, 117 aa, synthetic construct
  REGION 1..117: note = Synthetic
EVQLLESGGDLVQPGGSLRLSCAASGFTFSTYAMSWVRQAPGKGLEWVSAISGSGENIYYADSVKGRFTISRDNSKNTLFLQMNSLRAEDTAVYYCAKHTSYYMDVWGKGTTVTVSS

SEQ ID NO: 269 - protein, 122 aa, synthetic construct
  REGION 1..122: note = Synthetic
QVQLVESGGGVVQPGRSLRLSCAASGFTFSSYGMHWVRQAPGKGLEWVAVIWYDGINKYYADSVKGRFTISRDNSKNTLYLQMNSLRAEDTAVYYCARERLERRYYYYMDVWGKGTTVTVSS

SEQ ID NO: 270 - protein, 117 aa, synthetic construct
  REGION 1..117: note = Synthetic
EVQLLESGGGLVQPGGSLRLSCAASGFTFSSFAMSWVRQAPGKGLEWVSAVSGSGDDTYYADSVKGRFTISRDNSKNTLYLQMNSLRAEDTAVYYCAKHTSYYLDVWGKGTTVTVSS

SEQ ID NO: 271 - protein, 125 aa, synthetic construct
  REGION 1..125: note = Synthetic
QVQLVESGGGVVQPGRSLRLSCAASGFNFSTFDIHWVRQAPGKGLEWVALIWYDGSYKYYADSVKGRFTISRDNSKNTLDLRMNSLRAEDTAVYYCARNDNWNDEHYYHYYMDVWGKGTTVTVSS

SEQ ID NO: 272 - protein, 127 aa, synthetic construct
  REGION 1..127: note = Synthetic
EVHLLESGGGLVQPGGSLRLSCAASGFTFSSYAMNWVRQAPGKGLEWVSSISGSGSSSYYADSVKGRFTISRDNSKNTLYLQMNSLRAEDTAVYYCASRGFNSQYPPGYYYYYMDVWGKGTTVTVSS

SEQ ID NO: 273 - protein, 117 aa, synthetic construct
  REGION 1..117: note = Synthetic
EVQLLESGGGLVQPGGSLRLSCAASGFTFSNYAMTWVRQAPGKGLEWVSAISGSGIGTYYADSVQGRFTTSRDNSKNTLYLQMNSLRAEDTAVYYCAKGGYNWKDVWGKGTTVTVSS

SEQ ID NO: 274 - protein, 125 aa, synthetic construct
  REGION 1..125: note = Synthetic
QVQLVESGGGVVQPGRSLRLSCAASGFTFTNYDMHWVRQAPGKGLEWVTIIWHDGSNKYYLDSVRGRFTISRDNSKNTLYLQMNSLRAEDTAVYYCARGDNWNDEHHYFYYMDVWGKGTTVTVSS

SEQ ID NO: 275 - protein, 125 aa, synthetic construct; identical to SEQ ID NO: 262
  REGION 1..125: note = Synthetic

SEQ ID NO: 276 - protein, 121 aa, synthetic construct
  REGION 1..121: note = Synthetic
EVQLVESGGGVVRPGGSLRLSCAASGFTFDDYGMSWVRQAPGKGLEWVSGINWNGGSTGYVDSVKGRFTISRDNAKNSLYLQMNSLRAEDTALYHCARPVTTDYYYYMDVWGKGTTVTVSS

SEQ ID NO: 277 - protein, 129 aa, synthetic construct
  REGION 1..129: note = Synthetic
EVQLLESGGGLVQPGGSLRLSCAASGFTFSSYAMSWVRQAPGKGLEWVSAISGSGGSTYYADSVKGRFTISRDNSKNTLYLQMNSLRAEDTAVYYCAKKGTSYNWNDVHYYYYYYMDVWGKGTTVTVSS

SEQ ID NO: 278 - protein, 123 aa, synthetic construct
  REGION 1..123: note = Synthetic
QLQLQESGPGLVKPSETLSLTCTVSGGSISSSSYYWGWIRQPPGKGLEWIGSIYYSGSTYYNPSLKSRVTISVDTSKNQFSLKLSSVTAADTAVYYCTTGTTAYYYYYYMDVWGKGTTVTVSS

SEQ ID NO: 279 - protein, 122 aa, synthetic construct
  REGION 1..122: note = Synthetic
EVQLLESGGGLVQPGGSLRLSCAASGFTFSSYAMTWVRQAPGKGLEWVSAISGSGGSTYYADSVKGRFTISRDNSKNTLYLQMNSLRAEDTAVYYCARGGYNWHYYYYMDVWGKGTTVTVSS

SEQ ID NO: 280 - protein, 126 aa, synthetic construct
  REGION 1..126: note = Synthetic
QVQLVESGGGVVQPGRSLRLSCAASGFTFSSYDMHWVRQAPGKGLEWVSVIWYDGSNKKYGDSAKGRFTISRDNSKNTLDLQMNSLRAEDTAVYYCARGDNWNDEGGYYYYYMDVWGKGTTVTVSS

SEQ ID NO: 281 - protein, 126 aa, synthetic construct; identical to SEQ ID NO: 280
  REGION 1..126: note = Synthetic

SEQ ID NO: 282 - protein, 123 aa, synthetic construct
  REGION 1..123: note = Synthetic
QVQLVQSGAEVKKSGASVKVSCKASGYTLTSYGISWVRQAPGQGLEWMGWISAYNGNINYAQKFQGRVTMTTDTSTSTAYMELRSLRSDDTAVYYCVRDGDRYNWNHSYMDVWGKGTTVTVSS

SEQ ID NO: 283 - protein, 123 aa, synthetic construct; identical to SEQ ID NO: 282
  REGION 1..123: note = Synthetic

SEQ ID NO: 284 - protein, 122 aa, synthetic construct
  REGION 1..122: note = Synthetic
EVQLLESGGDLVQPGGSLRLSCAASGFTFSTYAMTWVRQAPGKGLEWVSAISGTSGSTYYADSVKGRFTISRDNSKSTLYLHMNSLRTEDTAVYYCARGGYNWHYYYYMDVWGKGTTVTVSS

SEQ ID NO: 285 - protein, 122 aa, synthetic construct; identical to SEQ ID NO: 284
  REGION 1..122: note = Synthetic

SEQ ID NO: 286 - DNA, 375 bp, synthetic construct
  misc_feature 1..375: note = Synthetic
  source 1..375: mol_type = other DNA
caggtgcagctggtggagtctgggggaggcgtggtccagcctgggaggtccctgagactctcctgtgcagcgtctggattcaccttcaataattatgacatgtactgggtccgccaggccccaggcaaggggctggagtgggtggcagttacatggtatgatggaagtaataaatactatgcagactccgtgaagggccgattcaccatctccagagacaattccaagaacacgctgtatctgcaaatgaacagcctgagagccgaggacacggctgtgtattactgtgcgagaggtgacaactggaatgacgaacaccactatttttactacatggacgtctggggcaaagggaccacggtcaccgtctcctca

SEQ ID NO: 287 - DNA, 375 bp, synthetic construct
  misc_feature 1..375: note = Synthetic
  source 1..375: mol_type = other DNA
caggtgcagctggtggagtctgggggaggcgtggtccagcctgggaggtccctgagactctcctgtgcagcgtctgggttcaccttcagtaactatgacatgcactgggtccgccaggccccaggcaaggggctggagtgggtgacaattatatggcatgatgcaagtaataaatattatttagactccgtgaagggccgattcaccatctccagagacaattccaagaacacgctgtatctgcaaatgaacagcctgagagccgaggacacggctgtgtattactgtgcgagaggtgacaactggaacgacgaacaccactacttctactacatggacgtctggggcaaagggaccacggtcaccgtctcctca

SEQ ID NO: 288 - DNA, 375 bp, synthetic construct
  misc_feature 1..375: note = Synthetic
  source 1..375: mol_type = other DNA
caggtgcagctggtggagtctgggggaggcgtggtccagcctgggaggtccctgagactctcctgtgcagcgtctgggttcaccttcagtaactatgacatgcactgggtccgccaggccccaggcaaggggctggagtgggtgacaattatatggcatgatggaagtaataaatattatttagactccgtgaagggccgattcaccatctccagagacaattccaagaacacgctgtatctgcaaatgaacagcctgagagccgaggacacggctgtgtattactgtgcgagaggtgacaactggaacgacgaacaccactacttctactacatggacgtctggggcaaagggaccacggtcaccgtctcctca

SEQ ID NO: 289 - DNA, 351 bp, synthetic construct
  misc_feature 1..351: note = Synthetic
  source 1..351: mol_type = other DNA
gaggtgcagctgctggagtctgggggaggcttggtacagcctggggggtccctgagactctcctgtgcagcctctggattcacctttagcatctatgccatgagctgggtccgccaggctccagggaaggggctggagtgggtctcagctattagtggtggtggtgataccacatactacgcagactccgtgaagggccggttcaccatctccagagacaattccaagaccacgctggatctgcaaatgaacagcctgagagccgaggacacggccgtatattactgtgcgaaacacactagctactacatggacgtctggggcaaagggaccacggtcaccgtctcctca

SEQ ID NO: 290 - DNA, 375 bp, synthetic construct
  misc_feature 1..375: note = Synthetic
  source 1..375: mol_type = other DNA
caggtgcagctggtggagtctgggggaggcgtggtccagcctgggaggtccctgagactctcctgtgcagcgtctggattcaccttcagtaactatgacaagcactgggtccgccaggccccaggcaaggggctggagtgggtggcagttatatggtatgatggaagtaataagtactatgcagactccgtgaagggccgattcaccatttccagagacaattccaagaacacgctgtatctacaaatgaacagcctgagagccgaggacacggctatgtattactgtgcgagaggtgacaactggaacgacgaacaccactacttctactacatggacgtctggggcaaagggaccacggtcaccgtctcctca

SEQ ID NO: 291 - DNA, 363 bp, synthetic construct
  misc_feature 1..363: note = Synthetic
  source 1..363: mol_type = other DNA
caggttcagttggtacagtctggagctgaggtgaagaagcctggggcctcagtgaaggtctcctgtaaggcttctggttacacctttaccaactatggtttcagctgggtgcgacaggcccctggacaagggcttgactggatgggatggatcagcgcttacaatggttacacaaattatacacagaaactccagggcagagtcaccatgaccactgacacatccacgaccacagcctacatggagctgaggagcctgagatctgacgacacggccgtctattactgtgcgagaagaggactactctactactactactccatggacgtctggggcaaagggaccacggtcaccgtctcctca

SEQ ID NO: 292 - DNA, 351 bp, synthetic construct
  misc_feature 1..351: note = Synthetic
  source 1..351: mol_type = other DNA
gaggtgcagctgctggagtctgggggaggcctggtacagcctggggggtccctgagactctcctgtacagcctctggattcacctttagcagctttgccatgagctgggtccgccaggctccagggaaggggctggagtgggtctcagctatgagtggtagtggtgataccacatactacgcagactccgtgaagggccggttcaccatctcccgagacaattccaagaccacgctgtatctgcaaatgaacagcctgagagccgaggacacggccgtatattcctgtgcgaagcacactacctactacatggacgtctggggcaaagggaccacggtcaccgtctcctca

SEQ ID NO: 293 - DNA, 351 bp, synthetic construct
  misc_feature 1..351: note = Synthetic
  source 1..351: mol_type = other DNA
gaggtgcagctgctggagtctgggggaggcttggtacagcctggggggtccctgagactctcctgtgcagcctctggattcacctttaacacctatgccatgagctgggtccgccaggctccagggaaggggctggagtgggtctcagctatgagtggtagtggtgataccacatactacgcagactccgtgaagggccggttcaccatctccagagacaattccaagaccactctgtatctgcaaatgaacagcctgagagccgaggacacggccgtatattcctgtgcgaaacacacttcctactacatggacgtctggggcaaagggaccacggtcaccgtctcctca

SEQ ID NO: 294 - DNA, 351 bp, synthetic construct
  misc_feature 1..351: note = Synthetic
  source 1..351: mol_type = other DNA
gaggtccaattattggagtctgggggagacttggtacagcctggggggtccctgagactctcctgtgcagcctctggattcacctttagcacctatgccatgagctgggtccgccaggctccagggaaggggctggaatgggtctcagctattagtggtagtggtgaaaacatatactacgcagactccgtgaagggccggttcaccatctccagagacaattccaagaacacgctatttctacaaatgaacagcctgagagccgaggacacggccgtatattactgtgcgaaacacactagctattacatggacgtctggggcaaagggaccacggtcaccgtctcctca

SEQ ID NO: 295 - DNA, 366 bp, synthetic construct
  misc_feature 1..366: note = Synthetic
  source 1..366: mol_type = other DNA
caggtgcagctggtggagtctgggggaggcgtggtccagcctgggaggtccctgagactctcctgtgcagcgtctggattcaccttcagtagttatggcatgcactgggtccgccaggctccaggcaaggggctggagtgggtggcagttatatggtatgatggaattaataaatactatgcagactccgtgaagggccgattcaccatctccagagacaattccaagaacacgctgtatctgcaaatgaacagcctgagagccgaagacacggctgtgtattactgtgcgagagaacggctggaacgaaggtactactactacatggacgtctggggcaaagggaccacggtcaccgtctcctca

SEQ ID NO: 296 - DNA, 351 bp, synthetic construct
  misc_feature 1..351: note = Synthetic
  source 1..351: mol_type = other DNA
gaggtgcagttgttggagtctgggggaggcttggtacagcctggggggtccctgagactctcctgtgcagcctctggattcacctttagcagctttgccatgagctgggtccgccaggctccagggaaggggctggaatgggtctcagctgttagtggtagtggtgatgacacatactacgcagactccgtgaagggccggttcaccatctccagagacaattccaagaacacgctgtatctgcaaatgaacagcctgagagccgaggacacggccgtatattactgtgcgaaacacactagctactacctggacgtctggggcaaagggaccacggtcaccgtctcctca

SEQ ID NO: 297 - DNA, 375 bp, synthetic construct
  misc_feature 1..375: note = Synthetic
  source 1..375: mol_type = other DNA
caggtgcagctggtggagtctgggggaggcgtggtccagcctgggaggtccctgagactctcctgtgcagcgtctggattcaacttcagtacctttgacatacactgggtccgccaggctccaggcaaggggctggagtgggtggcacttatatggtatgatggaagttataaatactatgcagactccgtgaagggccgattcaccatttccagagacaattccaagaacacgctggatctgcgaatgaacagcctgagagccgaggacacggctgtgtattactgtgcgcgaaatgacaactggaacgacgaacactactaccactattacatggacgtctggggcaaagggaccacggtcaccgtctcctca

SEQ ID NO: 298 - DNA, 381 bp, synthetic construct
  misc_feature 1..381: note = Synthetic
  source 1..381: mol_type = other DNA
gaagtgcacctgttggagtctgggggaggcttggtccagcctggggggtccctgagactctcctgtgcggcctctggattcacctttagcagctatgccatgaactgggtccgccaggctccagggaaggggctggagtgggtctcttctattagtggtagtggtagtagctcatactacgcagactccgtgaagggccggttcaccatctccagagacaattccaagaacacgctgtatctgcaaatgaacagcctgagagccgaggacacggccgtatattactgtgcgtctcgtggattcaactcccagtatcctcccggatactactactactacatggacgtctggggcaaagggaccacggtcaccgtctcctca

SEQ ID NO: 299 - DNA, 351 bp, synthetic construct
  misc_feature 1..351: note = Synthetic
  source 1..351: mol_type = other DNA
gaggtgcagctgttggagtctgggggaggcttggtacagcctggggggtccctgagactctcctgtgcagcctctggattcaccttcagcaactatgccatgacctgggtccgccaggctccagggaaggggctggagtgggtctcagctattagtggtagtggtattggcacatactacgcagactccgtgcagggccggttcaccacctccagagacaattccaagaacacgctgtatctgcaaatgaacagcctgagagccgaggacacggccgtttattactgtgcgaaaggggggtacaactggaaggacgtctggggcaaagggaccacggtcaccgtctcctca

SEQ ID NO: 300 - DNA, 375 bp, synthetic construct
  misc_feature 1..375: note = Synthetic
  source 1..375: mol_type = other DNA
caggtgcagctggtggagtctgggggaggcgtggtccagcctgggaggtccctgagactctcctgtgcagcgtctgggttcaccttcactaactatgacatgcactgggtccgccaggccccaggcaaggggctggagtgggtgacaattatatggcatgatggaagtaataaatattatttagactccgtgaggggccgattcaccatctccagagacaattccaagaacacgctgtatctgcaaatgaacagcctgagagccgaggacacggctgtgtattactgtgcgagaggtgacaactggaacgacgaacaccactacttctactacatggacgtctggggcaaagggaccacggtcaccgtctcctca

SEQ ID NO: 301 - DNA, 375 bp, synthetic construct; identical to SEQ ID NO: 288
  misc_feature 1..375: note = Synthetic
  source 1..375: mol_type = other DNA

SEQ ID NO: 302 - DNA, 363 bp, synthetic construct
  misc_feature 1..363: note = Synthetic
  source 1..363: mol_type = other DNA
gaggtgcagctggtggagtctgggggaggtgtggtacggcctggggggtccctgagactctcctgtgcagcctctggattcacctttgatgattatggcatgagctgggtccgccaagctccagggaaggggctggagtgggtctctggtattaattggaatggtggtagcacaggttatgtagactctgtgaagggccgattcaccatctccagagacaacgccaagaactccctgtatctgcaaatgaacagtctgagagccgaggacacggccttgtatcactgtgcgagaccagtaactacggactactactactacatggacgtctggggcaaagggaccacggtcaccgtctcctca

SEQ ID NO: 303 - DNA, 387 bp, synthetic construct
  misc_feature 1..387: note = Synthetic
  source 1..387: mol_type = other DNA
gaggtgcagctgttggagtctgggggaggcttggtacagcctggggggtccctgagactctcctgtgcagcctctggattcacctttagcagctatgccatgagctgggtccgccaggctccagggaaggggctggagtgggtctcagctattagtggtagtggtggtagcacatactacgcagactccgtgaagggccggttcaccatctccagagacaattccaagaacacgctgtatctgcaaatgaacagcctgagagccgaggacacggccgtatattactgtgcgaaaaaggggacgtcgtacaactggaacgacgtccattactactactactactacatggacgtctggggcaaagggaccacggtcaccgtctcctca

SEQ ID NO: 304 - DNA, 369 bp, synthetic construct
  misc_feature 1..369: note = Synthetic
  source 1..369: mol_type = other DNA
cagctgcagctgcaggagtcgggcccaggactggtgaagccttcggagaccctgtccctcacctgcactgtctctggtggctccatcagcagtagtagttactactggggctggatccgccagcccccagggaaggggctggagtggattgggagtatctattatagtgggagcacctactacaacccgtccctcaagagtcgagtcaccatatccgtagacacgtccaagaaccagttctccctgaagctgagctctgtgaccgccgcagacacggctgtgtattactgcacaactggaacgacggcttactactactactactacatggacgtctggggcaaagggaccacggtcaccgtctcctca

SEQ ID NO: 305 - DNA, 366 bp, synthetic construct
  misc_feature 1..366: note = Synthetic
  source 1..366: mol_type = other DNA
gaggtgcagctgttggagtctgggggaggcttggtgcagcctggggggtccctgagactctcctgtgcagcctctggattcacctttagcagctatgccatgacctgggtccgccaggctccagggaaggggctggagtgggtctcagctattagtggtagtggtggtagcacatactacgcagactccgtgaagggccggttcaccatctccagagacaattccaagaacacgctgtatctgcaaatgaacagcctgagagccgaggacacggccgtatattactgtgcgagaggcgggtataactggcactactactactacatggacgtctggggcaaagggaccacggtcaccgtctcctca

SEQ ID NO: 306 - DNA, 378 bp, synthetic construct
  misc_feature 1..378: note = Synthetic
  source 1..378: mol_type = other DNA
caggtgcagctggtggagtctgggggaggcgtggtccagcctgggaggtccctgagactctcctgtgcagcgtctggattcaccttcagtagctatgacatgcactgggtccgccaggctccaggcaaggggctggagtgggtgtcagttatatggtatgatggaagtaataaaaagtatggagactccgcgaagggccgattcaccatctccagagacaattccaagaacacgctggatctgcaaatgaacagcctgagagccgaggacacggctgtgtattactgtgcgagaggcgacaactggaacgacgaaggtggctactactactactacatggacgtctggggcaaagggaccacggtcaccgtctcctca

SEQ ID NO: 307 - DNA, 378 bp, synthetic construct; identical to SEQ ID NO: 306
  misc_feature 1..378: note = Synthetic
  source 1..378: mol_type = other DNA

SEQ ID NO: 308 - DNA, 369 bp, synthetic construct
  misc_feature 1..369: note = Synthetic
  source 1..369: mol_type = other DNA
caggttcagctggtacagtctggagctgaggtgaagaagtctggggcctcagtgaaggtctcctgcaaggcttctggttacaccttaaccagctatggcatcagctgggtgcgacaggcccctggacaagggcttgagtggatgggatggatcagcgcttacaatggtaacataaactatgcacagaagttccagggcagagtcaccatgaccacagacacatccacgagcacagcctacatggagctgaggagcctgagatctgacgacacggccgtgtattactgtgtgagagatggggaccggtacaactggaaccacagctacatggacgtctggggcaaagggaccacggtcaccgtctcctca

SEQ ID NO: 309 - DNA, 369 bp, synthetic construct; identical to SEQ ID NO: 308
  misc_feature 1..369: note = Synthetic
  source 1..369: mol_type = other DNA

SEQ ID NO: 310 - DNA, 366 bp, synthetic construct
  misc_feature 1..366: note = Synthetic
  source 1..366: mol_type = other DNA
gaggtgcagctgttggagtctgggggagacttggtacagcctggggggtccctgcgactctcctgtgcagcctctggattcacctttagcacctatgccatgacctgggtccgccaggctccagggaaggggctggagtgggtctcagctattagtggtactagtggtagcacatactacgcagactccgtgaagggccggttcaccatctccagagacaattccaagagcacgctgtatctgcacatgaacagcctgagaaccgaggacacggccgtatattactgtgcgagaggcggatataactggcactactactactacatggacgtctggggcaaagggaccacggtcaccgtctcctca

SEQ ID NO: 311 - DNA, 366 bp, synthetic construct; identical to SEQ ID NO: 310
  misc_feature 1..366: note = Synthetic
  source 1..366: mol_type = other DNA

SEQ ID NO: 312 - protein, 20 aa, synthetic construct
  REGION 1..20: note = Synthetic
MVSPLQLIGFLLLWVPASRG

SEQ ID NO: 313 - protein, 19 aa, synthetic construct
  REGION 1..19: note = Synthetic
MAWMMLLLGLLAYGSGVDS

SEQ ID NO: 314 - protein, 20 aa, synthetic construct
  REGION 1..20: note = Synthetic
METPAQLLFLLLLWLPDTTG

SEQ ID NO: 315 - protein, 20 aa, synthetic construct
  REGION 1..20: note = Synthetic
MEAPAQLLFLLLLWLPDTTG

SEQ ID NO: 316 - protein, 20 aa, synthetic construct
  REGION 1..20: note = Synthetic
MRVLAQLLGLLLLCFPGARC

SEQ ID NO: 317 - protein, 23 aa, synthetic construct
  REGION 1..23: note = Synthetic
MEPWKPQHSFFFLLLLWLPDTTG

SEQ ID NO: 318 - DNA, 60 bp, synthetic construct
  misc_feature 1..60: note = Synthetic
  source 1..60: mol_type = other DNA
atggtgtccccgttgcaactcattgggtttctgctgctctgggttccagcctccaggggt

SEQ ID NO: 319 - DNA, 57 bp, synthetic construct
  misc_feature 1..57: note = Synthetic
  source 1..57: mol_type = other DNA
atggcctggatgatgcttctcctcggactccttgcttatggatcaggagtggattct

SEQ ID NO: 320 - DNA, 60 bp, synthetic construct
  misc_feature 1..60: note = Synthetic
  source 1..60: mol_type = other DNA
atggaaaccccagcgcagcttctcttcctcctgctactctggctcccagataccaccgga

SEQ ID NO: 321 - DNA, 57 bp, synthetic construct
  misc_feature 1..57: note = Synthetic
  source 1..57: mol_type = other DNA
atggcctggatgatgcttctcctcggactccttgcttatggatcaggagtagattct

SEQ ID NO: 322 - DNA, 60 bp, synthetic construct
  misc_feature 1..60: note = Synthetic
  source 1..60: mol_type = other DNA
atggaagccccagctcagcttctcttcctcctgctactctggctcccagataccaccgga

SEQ ID NO: 323 - DNA, 60 bp, synthetic construct
  misc_feature 1..60: note = Synthetic
  source 1..60: mol_type = other DNA
atgagagtcctcgctcagctcctggggctcctgctgctctgtttcccaggtgccagatgt

SEQ ID NO: 324 - DNA, 69 bp, synthetic construct
  misc_feature 1..69: note = Synthetic
  source 1..69: mol_type = other DNA
atggaaccatggaagccccagcacagcttcttcttcctcctgctactctggctcccagataccaccgga

SEQ ID NO: 325 - protein, 23 aa, synthetic construct
  REGION 1..23: note = Synthetic
EIVLTQSPDFQSVTPKEKVTITC

SEQ ID NO: 326 - protein, 22 aa, synthetic construct
  REGION 1..22: note = Synthetic
QTVVTQEPSLSVSPGGTVTLTC

SEQ ID NO: 327 - protein, 23 aa, synthetic construct
  REGION 1..23: note = Synthetic
EIVLTQSPATLSLSPGERATLSC

SEQ ID NO: 328 - protein, 22 aa, synthetic construct
  REGION 1..22: note = Synthetic
QTVVTQEPSFSVSPGGTVTLTC

SEQ ID NO: 329 - protein, 23 aa, synthetic construct
  REGION 1..23: note = Synthetic
EIVLTQSPGTLSLSPGERATLSC

SEQ ID NO: 330 - protein, 23 aa, synthetic construct
  REGION 1..23: note = Synthetic
DIQMTQSPSSLSTSVGDRVTITC

SEQ ID NO: 331 - protein, 23 aa, synthetic construct
  REGION 1..23: note = Synthetic
EIVMTQSPATLSLSPGERATLSC

SEQ ID NO: 332 - protein, 15 aa, synthetic construct
  REGION 1..15: note = Synthetic
WYQQKPDQSPKLLIK

SEQ ID NO: 333 - protein, 15 aa, synthetic construct
  REGION 1..15: note = Synthetic
WYQQTPGQAPRTLIY

SEQ ID NO: 334 - protein, 15 aa, synthetic construct
  REGION 1..15: note = Synthetic
WYQQKPGLAPRLLIY

SEQ ID NO: 335 - protein, 15 aa, synthetic construct
  REGION 1..15: note = Synthetic
WYRQTPGQAPRTLIY

SEQ ID NO: 336 - protein, 15 aa, synthetic construct
  REGION 1..15: note = Synthetic
WYQQKPGQAPRLLIY

SEQ ID NO: 337 - protein, 15 aa, synthetic construct
  REGION 1..15: note = Synthetic
WFQQKPGKAPKSLIY

SEQ ID NO: 338 - protein, 32 aa, synthetic construct
  REGION 1..32: note = Synthetic
GVPSRFSGSGSGTDFTLTIHSLEAEDAATYYC

SEQ ID NO: 339 - protein, 32 aa, synthetic construct
  REGION 1..32: note = Synthetic
GVPDRFSGSILGNKAALTITGAQADDESDYYC

SEQ ID NO: 340 - protein, 32 aa, synthetic construct
  REGION 1..32: note = Synthetic
GVPDRFSGSGSGTDFTLTISTLEPEDFAVYYC

SEQ ID NO: 341 - protein, 32 aa, synthetic construct
  REGION 1..32: note = Synthetic
GVPSRFSGSGSGTDFTLTINSLEAEDAATYFC

SEQ ID NO: 342 - protein, 32 aa, synthetic construct
  REGION 1..32: note = Synthetic
GVPDRFSGSIIGNKAALTITGAQADDESDYFC

SEQ ID NO: 343 - protein, 32 aa, synthetic construct
  REGION 1..32: note = Synthetic
GIPARFSGSGSGTDFTLTISSLEPEDFAVYYC

SEQ ID NO: 344 - protein, 32 aa, synthetic construct
  REGION 1..32: note = Synthetic
GIPDRFSGSGSGTDFTLTISRLEPEDFAVYYC

SEQ ID NO: 345 - protein, 32 aa, synthetic construct
  REGION 1..32: note = Synthetic
GVPSRFSGSGSGTDFTLTINSLEAEDAAAYYC

SEQ ID NO: 346 - protein, 32 aa, synthetic construct
  REGION 1..32: note = Synthetic
GVPSKFSGSGSGTDFSLTISSLQPEDFATYYC

SEQ ID NO: 347 - protein, 32 aa, synthetic construct
  REGION 1..32: note = Synthetic
GIPARFSGSGSGTDFTLTISSLQPEDFAVYYC

SEQ ID NO: 348 - protein, 10 aa, synthetic construct
  REGION 1..10: note = Synthetic
FGQGTKVEIK

SEQ ID NO: 349 - protein, 10 aa, synthetic construct
  REGION 1..10: note = Synthetic
FGSGTKVTVL

SEQ ID NO: 350 - protein, 10 aa, synthetic construct
  REGION 1..10: note = Synthetic
FGQGTKLEIK

SEQ ID NO: 351 - protein, 10 aa, synthetic construct
  REGION 1..10: note = Synthetic
FGGGTKLTVL

SEQ ID NO: 352 - protein, 10 aa, synthetic construct
  REGION 1..10: note = Synthetic
FGGGTKVEIK

SEQ ID NO: 353 - protein, 10 aa, synthetic construct
  REGION 1..10: note = Synthetic
FGQGTRLEIK

SEQ ID NO: 354 - DNA, 69 bp, synthetic construct
  misc_feature 1..69: note = Synthetic
  source 1..69: mol_type = other DNA
gaaattgtgttgacacagtctccagccaccctgtctttgtctccaggggaaagagccaccctctcctgc

SEQ ID NO: 355 - DNA, 69 bp, synthetic construct
  misc_feature 1..69: note = Synthetic
  source 1..69: mol_type = other DNA
gaaattgtgttgacgcagtctccaggcaccctgtctttgtctccaggggaaagagccaccctctcctgc

SEQ ID NO: 356 - DNA, 69 bp, synthetic construct
  misc_feature 1..69: note = Synthetic
  source 1..69: mol_type = other DNA
gacatccagatgacccagtctccatcctcactgtctacatctgtaggagacagagtcaccatcacttgt

SEQ ID NO: 357 - DNA, 69 bp, synthetic construct
  misc_feature 1..69: note = Synthetic
  source 1..69: mol_type = other DNA
gaaattgtaatgacacagtctccagccaccctgtctttgtctccaggggaaagagccaccctctcctgc

SEQ ID NO: 358 - DNA, 45 bp, synthetic construct
  misc_feature 1..45: note = Synthetic
  source 1..45: mol_type = other DNA
tggtaccagcagaaaccagatcagtctccaaagctcctcatcaag

SEQ ID NO: 359 - DNA, 45 bp, synthetic construct
  misc_feature 1..45: note = Synthetic
  source 1..45: mol_type = other DNA
tggtaccagcagaccccaggccaggctccacgcacgctcatctac

SEQ ID NO: 360 - DNA, 45 bp, synthetic construct
  misc_feature 1..45: note = Synthetic
  source 1..45: mol_type = other DNA
tggtaccagcagaaacctggcctggcgcccaggctcctcatctat

SEQ ID NO: 361 - DNA, 45 bp, synthetic construct
  misc_feature 1..45: note = Synthetic
  source 1..45: mol_type = other DNA
tggtaccggcagaccccaggccaggctccacgcacgctcatctac

SEQ ID NO: 362 - DNA, 45 bp, synthetic construct
  misc_feature 1..45: note = Synthetic
  source 1..45: mol_type = other DNA
tggtaccagcagacccccggccaggctccacgcacgctcatctac

SEQ ID NO: 363 - DNA, 45 bp, synthetic construct
  misc_feature 1..45: note = Synthetic
  source 1..45: mol_type = other DNA
tggtaccaacagaaacctggccaggctccccggctcctcatctat

SEQ ID NO: 364 - DNA, 45 bp, synthetic construct
  misc_feature 1..45: note = Synthetic
  source 1..45: mol_type = other DNA
tggtaccagcagaaacctggccaggctcccaggctcctcatctat

SEQ ID NO: 365 - DNA, 45 bp, synthetic construct
  misc_feature 1..45: note = Synthetic
  source 1..45: mol_type = other DNA
tggtttcagcagaaaccagggaaagcccctaagtccctgatctat

SEQ ID NO: 366 - DNA, 45 bp, synthetic construct
  misc_feature 1..45: note = Synthetic
  source 1..45: mol_type = other DNA
tggtaccagcagaaacctgggctggctcccaggctcctcatctat

SEQ ID NO: 367 - DNA, 96 bp, synthetic construct
  misc_feature 1..96: note = Synthetic
  source 1..96: mol_type = other DNA
ggggtcccctcgaggttcagtggcagtggatctgggacagatttcaccctcaccatccatagcctggaagctgaagatgctgcaacgtattactgt

SEQ ID NO: 368 - DNA, 96 bp, synthetic construct
  misc_feature 1..96: note = Synthetic
  source 1..96: mol_type = other DNA
ggggtccctgatcgcttctctggctccatccttgggaacaaagctgccctcaccatcacgggggcccaggcagatgatgaatctgattattattgt

SEQ ID NO: 369 - DNA, 96 bp, synthetic construct
  misc_feature 1..96: note = Synthetic
  source 1..96: mol_type = other DNA
ggcgtcccagacaggttcagtggcagtgggtctgggacagacttcactctcaccatcagcacactggagcctgaagattttgcagtgtattactgt

SEQ ID NO: 370 - DNA, 96 bp, synthetic construct
  misc_feature 1..96: note = Synthetic
  source 1..96: mol_type = other DNA
ggggtccctgatcgcttctctggctccatccttgggaacaaagctgccctcaccatcacgggggcccaggcagatgatgaatctgattattactgt

SEQ ID NO: 371 - DNA, 96 bp, synthetic construct
  misc_feature 1..96: note = Synthetic
  source 1..96: mol_type = other DNA
ggggtcccctcgaggttcagtggcagtggatctgggacagatttcaccctcaccatcaatagcctggaagctgaagatgctgcaacgtatttctgt

SEQ ID NO: 372 - DNA, 96 bp, synthetic construct
  misc_feature 1..96: note = Synthetic
  source 1..96: mol_type = other DNA
ggggtccctgatcgcttctctggctccattattgggaacaaagctgccctcaccatcacgggggcccaggcagatgatgaatctgattatttctgt

SEQ ID NO: 373 - DNA, 96 bp, synthetic construct
  misc_feature 1..96: note = Synthetic
  source 1..96: mol_type = other DNA
ggcatcccagccaggttcagtggcagtgggtctgggacagacttcactctcaccatcagcagcctagagcctgaagattttgcagtttattactgt

SEQ ID NO: 374 - DNA, 96 bp, synthetic construct
  misc_feature 1..96: note = Synthetic
  source 1..96: mol_type = other DNA
ggcatcccagacaggttcagtggcagtgggtctgggacagacttcactctcaccatcagcagactggagcctgaagattttgcagtgtattactgt

SEQ ID NO: 375 - DNA, 96 bp, synthetic construct
  misc_feature 1..96: note = Synthetic
  source 1..96: mol_type = other DNA
ggggtcccctcgaggttcagtggcagtggatctgggacagatttcaccctcaccatcaatagcctggaagctgaagatgctgcagcgtattactgt

SEQ ID NO: 376 - DNA, 96 bp, synthetic construct
  misc_feature 1..96: note = Synthetic
  source 1..96: mol_type = other DNA
ggggtcccatcaaagttcagcggcagtggatctgggacagatttctctctcaccattagcagcctgcagcctgaagattttgcaacttattactgc

SEQ ID NO: 377 - DNA, 96 bp, synthetic construct
  misc_feature 1..96: note = Synthetic
  source 1..96: mol_type = other DNA
ggcatcccagccaggttcagtggcagtgggtctgggacagacttcactctcaccatcagcagcctgcagcctgaagattttgcagtttattactgt

SEQ ID NO: 378 - DNA, 30 bp, synthetic construct
  misc_feature 1..30: note = Synthetic
  source 1..30: mol_type = other DNA
ttcggccaagggaccaaggtggaaatcaaa

SEQ ID NO: 379 - DNA, 30 bp, synthetic construct
  misc_feature 1..30: note = Synthetic
  source 1..30: mol_type = other DNA
ttcggcagtggaaccaaggtcactgtccta

SEQ ID NO: 380 - DNA, 30 bp, synthetic construct
  misc_feature 1..30: note = Synthetic
  source 1..30: mol_type = other DNA
tttggccaggggaccaagctggagatcaaa

SEQ ID NO: 381 - DNA, 30 bp, synthetic construct
  misc_feature 1..30: note = Synthetic
  source 1..30: mol_type = other DNA
ttcggcagtggaaccaaggtcactgtcctg

SEQ ID NO: 382 - DNA, 30 bp, synthetic construct
  misc_feature 1..30: note = Synthetic
  source 1..30: mol_type = other DNA
ttcggtggaggaaccaagctgactgtccta

SEQ ID NO: 383 - DNA, 30 bp, synthetic construct
  misc_feature 1..30: note = Synthetic
  source 1..30: mol_type = other DNA
ttcggcggagggaccaaggtggagatcaaa

SEQ ID NO: 384 - DNA, 30 bp, synthetic construct
  misc_feature 1..30: note = Synthetic
  source 1..30: mol_type = other DNA
ttcggccaagggacacgactggagattaaa

SEQ ID NO: 385 - protein, 11 aa, synthetic construct
  REGION 1..11: note = Synthetic
RASQSIGSSLH

SEQ ID NO: 386 - protein, 11 aa, synthetic construct
  REGION 1..11: note = Synthetic
RASQSIGSSLH

SEQ ID NO: 387 - protein, 11 aa, synthetic construct
  REGION 1..11: note = Synthetic
RASQSIGSSLH

SEQ ID NO: 388 - protein, 14 aa, synthetic construct
  REGION 1..14: note = Synthetic
GLSSGSVSTSYYPS

SEQ ID NO: 389 - protein, 11 aa, synthetic construct
  REGION 1..11: note = Synthetic
RASQSIGSSLH

SEQ ID NO: 390 - protein, 12 aa, synthetic construct
  REGION 1..12: note = Synthetic
GASQSVYNSYLA

SEQ ID NO: 391 - protein, 14 aa, synthetic construct
  REGION 1..14: note = Synthetic
GLSSGSVSTSDYPS

SEQ ID NO: 392 - protein, 14 aa, synthetic construct
  REGION 1..14: note = Synthetic
GLSSGSVSTSDYPS

SEQ ID NO: 393 - protein, 14 aa, synthetic construct
  REGION 1..14: note = Synthetic
GLYSDSVSTSYYPS

SEQ ID NO: 394 - protein, 14 aa, synthetic construct
  REGION 1..14: note = Synthetic
GLSSGSVSTSYYPG

SEQ ID NO: 395 - protein, 14 aa, synthetic construct
  REGION 1..14: note = Synthetic
ALSSDSVSTSYFPS

SEQ ID NO: 396 - protein, 11 aa, synthetic construct
  REGION 1..11: note = Synthetic
RASQSIGSSLH

SEQ ID NO: 397 - protein, 14 aa, synthetic construct
  REGION 1..14: note = Synthetic
GLSSGSVSTSYFPS

SEQ ID NO: 398 - protein, 11 aa, synthetic construct
  REGION 1..11: note = Synthetic
RASQSIGSSLH

SEQ ID NO: 399 - protein, 11 aa, synthetic construct
  REGION 1..11: note = Synthetic
RASQSIGSSLH

SEQ ID NO: 400 - protein, 11 aa, synthetic construct
  REGION 1..11: note = Synthetic
RASQSVSSSLA

SEQ ID NO: 401 - protein, 12 aa, synthetic construct
  REGION 1..12: note = Synthetic
RASQSVSSSYLA

SEQ ID NO: 402 - protein, 12 aa, synthetic construct
  REGION 1..12: note = Synthetic
RASQSVSSSYLA

SEQ ID NO: 403 - protein, 12 aa, synthetic construct
  REGION 1..12: note = Synthetic
RASQSVSSSYLA

SEQ ID NO: 404 - protein, 12 aa, synthetic construct
  REGION 1..12: note = Synthetic
RASQSVSSSYLA

SEQ ID NO: 405 - protein, 11 aa, synthetic construct
  REGION 1..11: note = Synthetic
RASQNIGSSLH

SEQ ID NO: 406 - protein, 11 aa, synthetic construct
  REGION 1..11: note = Synthetic
RASQGISNYLA

SEQ ID NO: 407 - protein, 11 aa, synthetic construct
  REGION 1..11: note = Synthetic
RASQNIGSSLH

SEQ ID NO: 408 - protein, 11 aa, synthetic construct
  REGION 1..11: note = Synthetic
RASQGISNYLA

SEQ ID NO: 409 - protein, 11 aa, synthetic construct
  REGION 1..11: note = Synthetic
RASQSIGSSLH

SEQ ID NO: 410 - protein, 12 aa, synthetic construct
  REGION 1..12: note = Synthetic
RASQSVSSSYLS

SEQ ID NO: 411 - protein, 7 aa, synthetic construct
  REGION 1..7: note = Synthetic
FASQSFS

SEQ ID NO: 412 - protein, 7 aa, synthetic construct
  REGION 1..7: note = Synthetic
FASQSFS

SEQ ID NO: 413 - protein, 7 aa, synthetic construct
  REGION 1..7: note = Synthetic
FASQSFS

SEQ ID NO: 414 - protein, 7 aa, synthetic construct
  REGION 1..7: note = Synthetic
STNIRSS

SEQ ID NO: 415 - protein, 7 aa, synthetic construct
  REGION 1..7: note = Synthetic
FASQSFS

SEQ ID NO: 416 - protein, 7 aa, synthetic construct
  REGION 1..7: note = Synthetic
DASLRAT

SEQ ID NO: 417 - protein, 7 aa, synthetic construct
  REGION 1..7: note = Synthetic
RTNTRSS

SEQ ID NO: 418 - protein, 7 aa, synthetic construct
  REGION 1..7: note = Synthetic
RTNTRSS

SEQ ID NO: 419 - protein, 7 aa, synthetic construct
  REGION 1..7: note = Synthetic
NTNTRSS

SEQ ID NO: 420 - protein, 7 aa, synthetic construct
  REGION 1..7: note = Synthetic
STNTRSS

SEQ ID NO: 421 - protein, 7 aa, synthetic construct
  REGION 1..7: note = Synthetic
NTNTRSS

SEQ ID NO: 422 - protein, 7 aa, synthetic construct
  REGION 1..7: note = Synthetic
FASQSFS

SEQ ID NO: 423 - protein, 7 aa, synthetic construct
  REGION 1..7: note = Synthetic
ITNTRSS

SEQ ID NO: 424 - protein, 7 aa, synthetic construct
  REGION 1..7: note = Synthetic
FASQSFS

SEQ ID NO: 425 - protein, 7 aa, synthetic construct
  REGION 1..7: note = Synthetic
FASQSFS

SEQ ID NO: 426 - protein, 7 aa, synthetic construct
  REGION 1..7: note = Synthetic
DASNRAT

SEQ ID NO: 427 - protein, 7 aa, synthetic construct
  REGION 1..7: note = Synthetic
GASSRAT

SEQ ID NO: 428 - protein, 7 aa, synthetic construct
  REGION 1..7: note = Synthetic
GASSRAT

SEQ ID NO: 429 - protein, 7 aa, synthetic construct
  REGION 1..7: note = Synthetic
GASSRAT

SEQ ID NO: 430 - protein, 7 aa, synthetic construct
  REGION 1..7: note = Synthetic
GASSRAT

SEQ ID NO: 431 - protein, 7 aa, synthetic construct
  REGION 1..7: note = Synthetic
FASQSIS

SEQ ID NO: 432 - protein, 7 aa, synthetic construct
  REGION 1..7: note = Synthetic
AASSLQS

SEQ ID NO: 433 - protein, 7 aa, synthetic construct
  REGION 1..7: note = Synthetic
FASQSIS

SEQ ID NO: 434 - protein, 7 aa, synthetic construct
  REGION 1..7: note = Synthetic
AASSLQS

SEQ ID NO: 435 - protein, 7 aa, synthetic construct
  REGION 1..7: note = Synthetic
YVSQSIS

SEQ ID NO: 436 - protein, 7 aa, synthetic construct
  REGION 1..7: note = Synthetic
GASTRAT

SEQ ID NO: 437 - protein, 9 aa, synthetic construct
  REGION 1..9: note = Synthetic
HQSSSLPWT

SEQ ID NO: 438 - protein, 9 aa, synthetic construct
  REGION 1..9: note = Synthetic
HQSSSLPWT

SEQ ID NO: 439 - protein, 9 aa, synthetic construct
  REGION 1..9: note = Synthetic
HQSSSLPWT

SEQ ID NO: 440 - protein, 9 aa, synthetic construct
  REGION 1..9: note = Synthetic
KLYMGSGII

SEQ ID NO: 441 - protein, 9 aa, synthetic construct
  REGION 1..9: note = Synthetic
HQSSSLPWT

SEQ ID NO: 442 - protein, 10 aa, synthetic construct
  REGION 1..10: note = Synthetic
QQYGGSPMYT

SEQ ID NO: 443 - protein, 9 aa, synthetic construct
  REGION 1..9: note = Synthetic
VLYMDSGII

SEQ ID NO: 444 - protein, 9 aa, synthetic construct
  REGION 1..9: note = Synthetic
VLYMGSGII

SEQ ID NO: 445 - protein, 9 aa, synthetic construct
  REGION 1..9: note = Synthetic
VLYMVSGIV

SEQ ID NO: 446 - protein, 10 aa, synthetic construct
  REGION 1..10: note = Synthetic
VLYMGSGMFI

SEQ ID NO: 447 - protein, 9 aa, synthetic construct
  REGION 1..9: note = Synthetic
VLYMGSGII

SEQ ID NO: 448 - protein, 9 aa, synthetic construct
  REGION 1..9: note = Synthetic
HQSSSLPWT

SEQ ID NO: 449 - protein, 10 aa, synthetic construct
  REGION 1..10: note = Synthetic
VLYMGSGTWV

SEQ ID NO: 450 - protein, 9 aa, synthetic construct
  REGION 1..9: note = Synthetic
HQSSSLPWT

SEQ ID NO: 451 - protein, 9 aa, synthetic construct
  REGION 1..9: note = Synthetic
HQSSSLPWT

SEQ ID NO: 452 - protein, 9 aa, synthetic construct
  REGION 1..9: note = Synthetic
QQRSNWPLT

SEQ ID NO: 453 - protein, 8 aa, synthetic construct
  REGION 1..8: note = Synthetic
QQYGSSWT

SEQ ID NO: 454 - protein, 8 aa, synthetic construct
  REGION 1..8: note = Synthetic
QQYGSSWT

SEQ ID NO: 455 - protein, 8 aa, synthetic construct
  REGION 1..8: note = Synthetic
QQYGSSWT

SEQ ID NO: 456 - protein, 8 aa, synthetic construct
  REGION 1..8: note = Synthetic
QQYGSSWT

SEQ ID NO: 457 - protein, 9 aa, synthetic construct
  REGION 1..9: note = Synthetic
HQSSSLPWT

SEQ ID NO: 458 - protein, 9 aa, synthetic construct
  REGION 1..9: note = Synthetic
QQYNSYPIT

SEQ ID NO: 459 - protein, 9 aa, synthetic construct
  REGION 1..9: note = Synthetic
HQSSSLPWT

SEQ ID NO: 460 - protein, 9 aa, synthetic construct
  REGION 1..9: note = Synthetic
QQYNSYPIT

SEQ ID NO: 461 - protein, 9 aa, synthetic construct
  REGION 1..9: note = Synthetic
HQSSSLPWT

SEQ ID NO: 462 - protein, 9 aa, synthetic construct
  REGION 1..9: note = Synthetic
QQDYNLPPT

SEQ ID NO: 463 - DNA, 33 bp, synthetic construct
  misc_feature 1..33: note = Synthetic
  source 1..33: mol_type = other DNA
cgggccagtcagagcattggtagtagcttacac

SEQ ID NO: 464 - DNA, 33 bp, synthetic construct; identical to SEQ ID NO: 463
  misc_feature 1..33: note = Synthetic
  source 1..33: mol_type = other DNA

SEQ ID NO: 465 - DNA, 33 bp, synthetic construct; identical to SEQ ID NO: 463
  misc_feature 1..33: note = Synthetic
  source 1..33: mol_type = other DNA

SEQ ID NO: 466 - DNA, 42 bp, synthetic construct
  misc_feature 1..42: note = Synthetic
  source 1..42: mol_type = other DNA
ggcttgagctctggctcagtctctactagttactaccccagc

SEQ ID NO: 467 - DNA, 33 bp, synthetic construct; identical to SEQ ID NO: 463
  misc_feature 1..33: note = Synthetic
  source 1..33: mol_type = other DNA

SEQ ID NO: 468 - DNA, 36 bp, synthetic construct
  misc_feature 1..36: note = Synthetic
  source 1..36: mol_type = other DNA
ggggccagtcagagtgtttacaacagttacttagcc

SEQ ID NO: 469 - DNA, 42 bp, synthetic construct
  misc_feature 1..42: note = Synthetic
  source 1..42: mol_type = other DNA
ggcttgagctctggctcagtctctactagtgactaccccagc

SEQ ID NO: 470 - DNA, 42 bp, synthetic construct
  misc_feature 1..42: note = Synthetic
  source 1..42: mol_type = other DNA
ggcttgagctctggctcagtctctactagtgactaccccagt

SEQ ID NO: 471 - DNA, 42 bp, synthetic construct
  misc_feature 1..42: note = Synthetic
  source 1..42: mol_type = other DNA
ggcttatactctgactcagtctctactagttactaccccagc

SEQ ID NO: 472 - DNA, 42 bp, synthetic construct
  misc_feature 1..42: note = Synthetic
  source 1..42: mol_type = other DNA
ggcttgagctctggctcagtctctactagttactaccccggc

SEQ ID NO: 473 - DNA, 42 bp, synthetic construct
  misc_feature 1..42: note = Synthetic
  source 1..42: mol_type = other DNA
gccttgagctctgactcagtctctactagttactttcccagc

SEQ ID NO: 474 - DNA, 33 bp, synthetic construct
  misc_feature 1..33: note = Synthetic
  source 1..33: mol_type = other DNA
cgggccagtcagagtattggtagtagcttacac

SEQ ID NO: 475 - DNA, 42 bp, synthetic construct
  misc_feature 1..42: note = Synthetic
  source 1..42: mol_type = other DNA
ggcttgagctctggctcagtctccactagttacttccccagc

SEQ ID NO: 476 - DNA, 33 bp, synthetic construct; identical to SEQ ID NO: 463
  misc_feature 1..33: note = Synthetic
  source 1..33: mol_type = other DNA

SEQ ID NO: 477 - DNA, 33 bp, synthetic construct; identical to SEQ ID NO: 463
  misc_feature 1..33: note = Synthetic
  source 1..33: mol_type = other DNA

SEQ ID NO: 478 - DNA, 33 bp, synthetic construct
  misc_feature 1..33: note = Synthetic
  source 1..33: mol_type = other DNA
agggccagtcagagtgttagcagctccttagcc

SEQ ID NO: 479 - DNA, 36 bp, synthetic construct
  misc_feature 1..36: note = Synthetic
  source 1..36: mol_type = other DNA
agggccagtcagagtgttagcagcagctacttagcc

SEQ ID NO: 480 - DNA, 36 bp, synthetic construct; identical to SEQ ID NO: 479
  misc_feature 1..36: note = Synthetic
  source 1..36: mol_type = other DNA

SEQ ID NO: 481 - DNA, 36 bp, synthetic construct; identical to SEQ ID NO: 479
  misc_feature 1..36: note = Synthetic
  source 1..36: mol_type = other DNA

SEQ ID NO: 482 - DNA, 36 bp, synthetic construct; identical to SEQ ID NO: 479
  misc_feature 1..36: note = Synthetic
  source 1..36: mol_type = other DNA

SEQ ID NO: 483 - DNA, 33 bp, synthetic construct
  misc_feature 1..33: note = Synthetic
  source 1..33: mol_type = other DNA
cgggccagtcagaacattggtagtagcttacac

SEQ ID NO: 484 - DNA, 33 bp, synthetic construct
  misc_feature 1..33: note = Synthetic
  source 1..33: mol_type = other DNA
cgggcgagtcagggcattagcaattatttagcc

SEQ ID NO: 485 - DNA, 33 bp, synthetic construct; identical to SEQ ID NO: 483
  misc_feature 1..33: note = Synthetic
  source 1..33: mol_type = other DNA

SEQ ID NO: 486 - DNA, 33 bp, synthetic construct; identical to SEQ ID NO: 484
  misc_feature 1..33: note = Synthetic
  source 1..33: mol_type = other DNA

SEQ ID NO: 487 - DNA, 33 bp, synthetic construct
  misc_feature 1..33: note = Synthetic
  source 1..33: mol_type = other DNA
cgggccagtcagagcattggaagtagcttacac

SEQ ID NO: 488 - DNA, 36 bp, synthetic construct
  misc_feature 1..36: note = Synthetic
  source 1..36: mol_type = other DNA
agggccagtcagagtgttagcagcagctacttatcc

SEQ ID NO: 489 - DNA, 21 bp, synthetic construct
  misc_feature 1..21: note = Synthetic
  source 1..21: mol_type = other DNA
tttgcttcccagtccttctca

SEQ ID NO: 490 - DNA, 21 bp, synthetic construct
  misc_feature 1..21: note = Synthetic
  source 1..21: mol_type = other DNA
tttgcttcccagtccttctca

SEQ ID NO: 491 - DNA, 21 bp, synthetic construct
  misc_feature 1..21: note = Synthetic
  source 1..21: mol_type = other DNA
tttgcttcccagtccttctca

SEQ ID NO: 492 - DNA, 21 bp, synthetic construct
  misc_feature 1..21: note = Synthetic
  source 1..21: mol_type = other DNA
agcacaaatattcggtcttct

SEQ ID NO: 493 - DNA, 21 bp, synthetic construct
  misc_feature 1..21: note = Synthetic
  source 1..21: mol_type = other DNA
tttgcttcccagtccttctca

SEQ ID NO: 494 - DNA, 21 bp, synthetic construct
  misc_feature 1..21: note = Synthetic
  source 1..21: mol_type = other DNA
gatgcatccctcagggccact

SEQ ID NO: 495 - DNA, 21 bp, synthetic construct
  misc_feature 1..21: note = Synthetic
  source 1..21: mol_type = other DNA
agaacaaacactcgctcttct

SEQ ID NO: 496 - DNA, 21 bp, synthetic construct
  misc_feature 1..21: note = Synthetic
  source 1..21: mol_type = other DNA
agaacaaacactcgctcttct

SEQ ID NO: 497 - DNA, 21 bp, synthetic construct
  misc_feature 1..21: note = Synthetic
  source 1..21: mol_type = other DNA
aacacaaacactcgctcttct

SEQ ID NO: 498 - DNA, 21 bp, synthetic construct
  misc_feature 1..21: note = Synthetic
  source 1..21: mol_type = other DNA
agcacaaacactcgctcttct

SEQ ID NO: 499 - DNA, 21 bp, synthetic construct
  misc_feature 1..21: note = Synthetic
  source 1..21: mol_type = other DNA
aacacaaacactcgctcttct

SEQ ID NO: 500 - DNA, 21 bp, synthetic construct
  misc_feature 1..21: note = Synthetic
  source 1..21: mol_type = other DNA
tttgcttcccagtccttctca

SEQ ID NO: 501 - DNA, 21 bp, synthetic construct
  misc_feature 1..21: note = Synthetic
  source 1..21: mol_type = other DNA
atcacaaacactcgctcttca

SEQ ID NO: 502 - DNA, 21 bp, synthetic construct
  misc_feature 1..21: note = Synthetic
  source 1..21: mol_type = other DNA
tttgcttcccagtccttctca

SEQ ID NO: 503 - DNA, 21 bp, synthetic construct
  misc_feature 1..21: note = Synthetic
  source 1..21: mol_type = other DNA
tttgcttcccagtccttctca

SEQ ID NO: 504 - DNA, 21 bp, synthetic construct
  misc_feature 1..21: note = Synthetic
  source 1..21: mol_type = other DNA
gatgcatccaacagggccact

SEQ ID NO: 505 - DNA, 21 bp, synthetic construct
  misc_feature 1..21: note = Synthetic
  source 1..21: mol_type = other DNA
ggtgcatccagcagggccact

SEQ ID NO: 506 - DNA, 21 bp, synthetic construct
  misc_feature 1..21: note = Synthetic
  source 1..21: mol_type = other DNA
ggtgcatccagcagggccact

SEQ ID NO: 507 - DNA, 21 bp, synthetic construct
  misc_feature 1..21: note = Synthetic
  source 1..21: mol_type = other DNA
ggtgcatccagcagggccact

SEQ ID NO: 508 - DNA, 21 bp, synthetic construct
  misc_feature 1..21: note = Synthetic
  source 1..21: mol_type = other DNA
ggtgcatccagcagggccact

SEQ ID NO: 509 - DNA, 21 bp, synthetic construct
  misc_feature 1..21: note = Synthetic
  source 1..21: mol_type = other DNA
tttgcttcccagtccatctca

SEQ ID NO: 510 - DNA, 21 bp, synthetic construct
  misc_feature 1..21: note = Synthetic
  source 1..21: mol_type = other DNA
gctgcatccagtttgcaaagt

SEQ ID NO: 511 - DNA, 21 bp, synthetic construct
  misc_feature 1..21: note = Synthetic
  source 1..21: mol_type = other DNA
tttgcttcccagtccatctca

SEQ ID NO: 512 - DNA, 21 bp, synthetic construct
  misc_feature 1..21: note = Synthetic
  source 1..21: mol_type = other DNA
gctgcatccagtttgcaaagt

SEQ ID NO: 513 - DNA, 21 bp, synthetic construct
  misc_feature 1..21: note = Synthetic
  source 1..21: mol_type = other DNA
tatgtttcccagtccatctca

SEQ ID NO: 514 - DNA, 21 bp, synthetic construct
  misc_feature 1..21: note = Synthetic
  source 1..21: mol_type = other DNA
ggtgcatccaccagggccact

SEQ ID NO: 515 - DNA, 27 bp, synthetic construct
  misc_feature 1..27: note = Synthetic
  source 1..27: mol_type = other DNA
catcagagtagtagtttaccgtggacg

SEQ ID NO: 516 - DNA, 27 bp, synthetic construct
  misc_feature 1..27: note = Synthetic
  source 1..27: mol_type = other DNA
catcagagtagtagtttaccgtggacg

SEQ ID NO: 517 - DNA, 27 bp, synthetic construct
  misc_feature 1..27: note = Synthetic
  source 1..27: mol_type = other DNA
catcagagtagtagtttaccgtggacg

SEQ ID NO: 518 - DNA, 27 bp, synthetic construct
  misc_feature 1..27: note = Synthetic
  source 1..27: mol_type = other DNA
aagctgtatatgggaagtggcattatt

SEQ ID NO: 519 - DNA, 27 bp, synthetic construct
  misc_feature 1..27: note = Synthetic
  source 1..27: mol_type = other DNA
catcagagtagtagtttaccgtggacg

SEQ ID NO: 520 - DNA, 30 bp, synthetic construct
  misc_feature 1..30: note = Synthetic
  source 1..30: mol_type = other DNA
cagcagtatggtggctcacccatgtacact

SEQ ID NO: 521 - DNA, 27 bp, synthetic construct
  misc_feature 1..27: note = Synthetic
  source 1..27: mol_type = other DNA
gtgctgtatatggatagtggcattatt

SEQ ID NO: 522 - DNA, 27 bp, synthetic construct
  misc_feature 1..27: note = Synthetic
  source 1..27: mol_type = other DNA
gtgctgtatatgggtagtggcattatt

SEQ ID NO: 523 - DNA, 27 bp, synthetic construct
  misc_feature 1..27: note = Synthetic
  source 1..27: mol_type = other DNA
gtactatatatggttagtggcattgtt

SEQ ID NO: 524 - DNA, 30 bp, synthetic construct
  misc_feature 1..30: note = Synthetic
  source 1..30: mol_type = other DNA
gtgctatatatgggtagtggcatgtttatt

SEQ ID NO: 525 - DNA, 27 bp, synthetic construct
  misc_feature 1..27: note = Synthetic
  source 1..27: mol_type = other DNA
gtgctatatatgggtagtggcattatt

SEQ ID NO: 526 - DNA, 27 bp, synthetic construct
  misc_feature 1..27: note = Synthetic
  source 1..27: mol_type = other DNA
catcagagtagtagtttaccgtggacg

SEQ ID NO: 527 - DNA, 30 bp, synthetic construct
  misc_feature 1..30: note = Synthetic
  source 1..30: mol_type = other DNA
gtactatatatgggtagtggcacttgggtg

SEQ ID NO: 528 - DNA, 27 bp, synthetic construct
  misc_feature 1..27: note = Synthetic
  source 1..27: mol_type = other DNA
catcagagtagtagtttaccgtggacg

SEQ ID NO: 529 - DNA, 27 bp, synthetic construct
  misc_feature 1..27: note = Synthetic
  source 1..27: mol_type = other DNA
catcagagtagtagtttaccgtggacg

SEQ ID NO: 530 - DNA, 27 bp, synthetic construct
  misc_feature 1..27: note = Synthetic
  source 1..27: mol_type = other DNA
cagcagcgtagcaactggcctctcact

SEQ ID NO: 531 - DNA, 24 bp, synthetic construct
  misc_feature 1..24: note = Synthetic
  source 1..24: mol_type = other DNA
cagcagtatggtagctcgtggacg

SEQ ID NO: 532 - DNA, 24 bp, synthetic construct
  misc_feature 1..24: note = Synthetic
  source 1..24: mol_type = other DNA
cagcagtatggtagctcgtggacg

SEQ ID NO: 533 - DNA, 24 bp, synthetic construct
  misc_feature 1..24: note = Synthetic
  source 1..24: mol_type = other DNA
cagcagtatggtagctcgtggacg

SEQ ID NO: 534 - DNA, 24 bp, synthetic construct
  misc_feature 1..24: note = Synthetic
  source 1..24: mol_type = other DNA
cagcagtatggtagctcgtggacg

SEQ ID NO: 535 - DNA, 27 bp, synthetic construct
  misc_feature 1..27: note = Synthetic
  source 1..27: mol_type = other DNA
catcagagtagtagtttaccgtggacg

SEQ ID NO: 536 - DNA, 27 bp, synthetic construct
  misc_feature 1..27: note = Synthetic
  source 1..27: mol_type = other DNA
caacagtataatagttacccgatcacc

SEQ ID NO: 537 - DNA, 27 bp, synthetic construct
  misc_feature 1..27: note = Synthetic
  source 1..27: mol_type = other DNA
catcagagtagtagtttaccgtggacg

SEQ ID NO: 538 - DNA, 27 bp, synthetic construct
  misc_feature 1..27: note = Synthetic
  source 1..27: mol_type = other DNA
caacagtataatagttacccgatcacc

SEQ ID NO: 539 - DNA, 27 bp, synthetic construct
  misc_feature 1..27: note = Synthetic
  source 1..27: mol_type = other DNA
catcagagtagtagtttaccgtggacg

SEQ ID NO: 540 - DNA, 27 bp, synthetic construct
  misc_feature 1..27: note = Synthetic
  source 1..27: mol_type = other DNA
cagcaggattataacttacctccgacg

SEQ ID NO: 541 - protein, 107 aa, synthetic construct
  REGION 1..107: note = Synthetic
EIVLTQSPDFQSVTPKEKVTITCRASQSIGSSLHWYQQKPDQSPKLLIKFASQSFSGVPSRFSGSGSGTDFTLTIHSLEAEDAATYYCHQSSSLPWTFGQGTKVEIK

SEQ ID NO: 542 - protein, 107 aa, synthetic construct; identical to SEQ ID NO: 541
  REGION 1..107: note = Synthetic

SEQ ID NO: 543 - protein, 107 aa, synthetic construct; identical to SEQ ID NO: 541
  REGION 1..107: note = Synthetic

SEQ ID NO: 544 - protein, 109 aa, synthetic construct
  REGION 1..109: note = Synthetic
QTVVTQEPSLSVSPGGTVTLTCGLSSGSVSTSYYPSWYQQTPGQAPRTLIYSTNIRSSGVPDRFSGSILGNKAALTITGAQADDESDYYCKLYMGSGIIFGSGTKVTVL

SEQ ID NO: 545 - protein, 107 aa, synthetic construct; identical to SEQ ID NO: 541
  REGION 1..107: note = Synthetic

SEQ ID NO: 546 - protein, 109 aa, synthetic construct
  REGION 1..109: note = Synthetic
EIVLTQSPATLSLSPGERATLSCGASQSVYNSYLAWYQQKPGLAPRLLIYDASLRATGVPDRFSGSGSGTDFTLTISTLEPEDFAVYYCQQYGGSPMYTFGQGTKLEIK

SEQ ID NO: 547 - protein, 109 aa, synthetic construct
  REGION 1..109: note = Synthetic
QTVVTQEPSLSVSPGGTVTLTCGLSSGSVSTSDYPSWYQQTPGQAPRTLIYRTNTRSSGVPDRFSGSILGNKAALTITGAQADDESDYYCVLYMDSGIIFGSGTKVTVL

SEQ ID NO: 548 - protein, 109 aa, synthetic construct
  REGION 1..109: note = Synthetic
QTVVTQEPSLSVSPGGTVTLTCGLSSGSVSTSDYPSWYQQTPGQAPRTLIYRTNTRSSGVPDRFSGSILGNKAALTITGAQADDESDYYCVLYMGSGIIFGSGTKVTVL

SEQ ID NO: 549 - protein, 109 aa, synthetic construct
  REGION 1..109: note = Synthetic
QTVVTQEPSFSVSPGGTVTLTCGLYSDSVSTSYYPSWYQQTPGQAPRTLIYNTNTRSSGVPDRFSGSILGNKAALTITGAQADDESDYYCVLYMVSGIVFGSGTKVTVL

SEQ ID NO: 550 - protein, 110 aa, synthetic construct
  REGION 1..110: note = Synthetic
QTVVTQEPSFSVSPGGTVTLTCGLSSGSVSTSYYPGWYQQTPGQAPRTLIYSTNTRSSGVPDRFSGSILGNKAALTITGAQADDESDYYCVLYMGSGMFIFGSGTKVTVL

SEQ ID NO: 551 - protein, 109 aa, synthetic construct
  REGION 1..109: note = Synthetic
QTVVTQEPSFSVSPGGTVTLTCALSSDSVSTSYFPSWYRQTPGQAPRTLIYNTNTRSSGVPDRFSGSILGNKAALTITGAQADDESDYYCVLYMGSGIIFGSGTKVTVL

SEQ ID NO: 552 - protein, 107 aa, synthetic construct
  REGION 1..107: note = Synthetic
EIVLTQSPDFQSVTPKEKVTITCRASQSIGSSLHWYQQKPDQSPKLLIKFASQSFSGVPSRFSGSGSGTDFTLTINSLEAEDAATYFCHQSSSLPWTFGQGTKVEIK

SEQ ID NO: 553 - protein, 110 aa, synthetic construct
  REGION 1..110: note = Synthetic
QTVVTQEPSFSVSPGGTVTLTCGLSSGSVSTSYFPSWYQQTPGQAPRTLIYITNTRSSGVPDRFSGSIIGNKAALTITGAQADDESDYFCVLYMGSGTWVFGGGTKLTVL

SEQ ID NO: 554 - protein, 107 aa, synthetic construct; identical to SEQ ID NO: 541
  REGION 1..107: note = Synthetic

SEQ ID NO: 555 - protein, 107 aa, synthetic construct; identical to SEQ ID NO: 541
  REGION 1..107: note = Synthetic

SEQ ID NO: 556 - protein, 107 aa, synthetic construct
  REGION 1..107: note = Synthetic
EIVLTQSPATLSLSPGERATLSCRASQSVSSSLAWYQQKPGQAPRLLIYDASNRATGIPARFSGSGSGTDFTLTISSLEPEDFAVYYCQQRSNWPLTFGGGTKVEIK

SEQ ID NO: 557 - protein, 107 aa, synthetic construct
  REGION 1..107: note = Synthetic
EIVLTQSPGTLSLSPGERATLSCRASQSVSSSYLAWYQQKPGQAPRLLIYGASSRATGIPDRFSGSGSGTDFTLTISRLEPEDFAVYYCQQYGSSWTFGQGTKVEIK

SEQ ID NO: 558 - protein, 107 aa, synthetic construct; identical to SEQ ID NO: 557
  REGION 1..107: note = Synthetic

SEQ ID NO: 559 - protein, 107 aa, synthetic construct; identical to SEQ ID NO: 557
  REGION 1..107: note = Synthetic

SEQ ID NO: 560 - protein, 107 aa, synthetic construct; identical to SEQ ID NO: 557
  REGION 1..107: note = Synthetic

SEQ ID NO: 561 - protein, 107 aa, synthetic construct
  REGION 1..107: note = Synthetic
EIVLTQSPDFQSVTPKEKVTITCRASQNIGSSLHWYQQKPDQSPKLLIKFASQSISGVPSRFSGSGSGTDFTLTINSLEAEDAAAYYCHQSSSLPWTFGQGTKVEIK

SEQ ID NO: 562 - protein, 107 aa, synthetic construct
  REGION 1..107: note = Synthetic
DIQMTQSPSSLSTSVGDRVTITCRASQGISNYLAWFQQKPGKAPKSLIYAASSLQSGVPSKFSGSGSGTDFSLTISSLQPEDFATYYCQQYNSYPITFGQGTRLEIK

SEQ ID NO: 563 - protein, 107 aa, synthetic construct; identical to SEQ ID NO: 561
  REGION 1..107: note = Synthetic

SEQ ID NO: 564 - protein, 107 aa, synthetic construct; identical to SEQ ID NO: 562
  REGION 1..107: note = Synthetic

SEQ ID NO: 565 - protein, 107 aa, synthetic construct
  REGION 1..107: note = Synthetic
EIVLTQSPDFQSVTPKEKVTITCRASQSIGSSLHWYQQKPDQSPKLLIKYVSQSISGVPSRFSGSGSGTDFTLTINSLEAEDAAAYYCHQSSSLPWTFGQGTKVEIK

SEQ ID NO: 566 - protein, 108 aa, synthetic construct
  REGION 1..108: note = Synthetic
EIVMTQSPATLSLSPGERATLSCRASQSVSSSYLSWYQQKPGLAPRLLIYGASTRATGIPARFSGSGSGTDFTLTISSLQPEDFAVYYCQQDYNLPPTFGQGTKVEIK

SEQ ID NO: 567 - DNA, 321 bp, synthetic construct
  misc_feature 1..321: note = Synthetic
  source 1..321: mol_type = other DNA
gaaattgtgctgactcagtctccagactttcagtctgtgactccaaaggagaaagtcaccatcacctgccgggccagtcagagcattggtagtagcttacactggtaccagcagaaaccagatcagtctccaaagctcctcatcaagtttgcttcccagtccttctcaggggtcccctcgaggttcagtggcagtggatctgggacagatttcaccctcaccatccatagcctggaagctgaagatgctgcaacgtattactgtcatcagagtagtagtttaccgtggacgttcggccaagggaccaaggtggaaatcaaa

SEQ ID NO: 568 - DNA, 321 bp, synthetic construct; identical to SEQ ID NO: 567
  misc_feature 1..321: note = Synthetic
  source 1..321: mol_type = other DNA

SEQ ID NO: 569 - DNA, 321 bp, synthetic construct; identical to SEQ ID NO: 567
  misc_feature 1..321: note = Synthetic
  source 1..321: mol_type = other DNA

SEQ ID NO: 570 - DNA, 327 bp, synthetic construct
  misc_feature 1..327: note = Synthetic
  source 1..327: mol_type = other DNA
cagactgtggtgacccaggagccatcgctctcagtgtcccctggagggacagtcacactcacttgtggcttgagctctggctcagtctctactagttactaccccagctggtaccagcagaccccaggccaggctccacgcacgctcatctacagcacaaatattcggtcttctggggtccctgatcgcttctctggctccatccttgggaacaaagctgccctcaccatcacgggggcccaggcagatgatgaatctgattattattgtaagctgtatatgggaagtggcattattttcggcagtggaaccaaggtcactgtccta

SEQ ID NO: 571 - DNA, 321 bp, synthetic construct; identical to SEQ ID NO: 567
  misc_feature 1..321: note = Synthetic
  source 1..321: mol_type = other DNA

SEQ ID NO: 572 - DNA, 327 bp, synthetic construct
  misc_feature 1..327: note = Synthetic
  source 1..327: mol_type = other DNA
gaaattgtgttgacgcagtctccagccaccctgtctttgtctccaggggaaagagccaccctctcctgcggggccagtcagagtgtttacaacagttacttagcctggtaccagcagaaacctggcctggcgcccaggctcctcatctatgatgcatccctcagggccactggcgtcccagacaggttcagtggcagtgggtctgggacagacttcactctcaccatcagcacactggagcctgaagattttgcagtgtattactgtcagcagtatggtggctcacccatgtacacttttggccaggggaccaagctggagatcaaa

SEQ ID NO: 573 - DNA, 327 bp, synthetic construct
  misc_feature 1..327: note = Synthetic
  source 1..327: mol_type = other DNA
cagactgtggtgacccaggagccatcgctctcagtgtcccctggagggacagtcacactcacttgtggcttgagctctggctcagtctctactagtgactaccccagctggtaccagcagaccccaggccaggctccacgcacgctcatctacagaacaaacactcgctcttctggggtccctgatcgcttctctggctccatccttgggaacaaagctgccctcaccatcacgggggcccaggcagatgatgaatctgattattactgtgtgctgtatatggatagtggcattattttcggcagtggaaccaaggtcactgtccta

SEQ ID NO: 574 - DNA, 327 bp, synthetic construct
  misc_feature 1..327: note = Synthetic
  source 1..327: mol_type = other DNA
cagactgtggtgacccaggagccatcgctctcagtgtcccctggagggacagtcacactcacttgtggcttgagctctggctcagtctctactagtgactaccccagttggtaccagcagaccccaggccaggctccacgcacgctcatctacagaacaaacactcgctcttctggggtccctgatcgcttctctggctccatccttgggaacaaagctgccctcaccatcacgggggcccaggcagatgatgaatctgattattactgtgtgctgtatatgggtagtggcattattttcggcagtggaaccaaggtcactgtccta

SEQ ID NO: 575 - DNA, 327 bp, synthetic construct
  misc_feature 1..327: note = Synthetic
  source 1..327: mol_type = other DNA
cagactgtggtgacccaggagccatcgttctcagtgtcccctggagggacagtcacactcacttgtggcttatactctgactcagtctctactagttactaccccagctggtaccagcagaccccaggccaggctccacgcacgctcatctacaacacaaacactcgctcttctggggtccctgatcgcttctctggctccatccttgggaacaaagctgccctcaccatcacgggggcccaggcagatgatgaatctgattattactgtgtactatatatggttagtggcattgttttcggcagtggaaccaaggtcactgtcctg

SEQ ID NO: 576 - DNA, 330 bp, synthetic construct
  misc_feature 1..330: note = Synthetic
  source 1..330: mol_type = other DNA
cagactgtggtgacccaggagccatcgttctcagtgtcccctggagggacagtcacactcacttgtggcttgagctctggctcagtctctactagttactaccccggctggtaccagcagaccccaggccaggctccacgcacgctcatctacagcacaaacactcgctcttctggggtccctgatcgcttctctggctccatccttgggaacaaagctgccctcaccatcacgggggcccaggcagatgatgaatctgattattactgtgtgctatatatgggtagtggcatgtttattttcggcagtggaaccaaggtcactgtccta

SEQ ID NO: 577 - DNA, 327 bp, synthetic construct
  misc_feature 1..327: note = Synthetic
  source 1..327: mol_type = other DNA
cagactgtggtgacccaggagccatcgttctcagtgtcccctggagggacagtcacactcacttgtgccttgagctctgactcagtctctactagttactttcccagctggtaccggcagaccccaggccaggctccacgcacgctcatctacaacacaaacactcgctcttctggggtccctgatcgcttctctggctccatccttgggaacaaagctgccctcaccatcacgggggcccaggcagatgatgaatctgattattactgtgtgctatatatgggtagtggcattattttcggcagtggaaccaaggtcactgtccta

SEQ ID NO: 578 - DNA, 321 bp, synthetic construct
  misc_feature 1..321: note = Synthetic
  source 1..321: mol_type = other DNA
gaaattgtcctgactcagtctccagactttcagtctgtgactccaaaggagaaagtcaccatcacctgccgggccagtcagagtattggtagtagcttacactggtaccagcagaaaccagatcagtctccaaagctcctcatcaagtttgcttcccagtccttctcaggggtcccctcgaggttcagtggcagtggatctgggacagatttcaccctcaccatcaatagcctggaagctgaagatgctgcaacgtatttctgtcatcagagtagtagtttaccgtggacgttcggccaagggaccaaggtggaaatcaaa

SEQ ID NO: 579 - DNA, 330 bp, synthetic construct
  misc_feature 1..330: note = Synthetic
  source 1..330: mol_type = other DNA
cagactgtggtgacccaggagccatcgttctcagtgtcccctggagggacagtcacactcacttgtggcttgagctctggctcagtctccactagttacttccccagctggtaccagcagacccccggccaggctccacgcacgctcatctacatcacaaacactcgctcttcaggggtccctgatcgcttctctggctccattattgggaacaaagctgccctcaccatcacgggggcccaggcagatgatgaatctgattatttctgtgtactatatatgggtagtggcacttgggtgttcggtggaggaaccaagctgactgtccta

SEQ ID NO: 580 - DNA, 321 bp, synthetic construct; identical to SEQ ID NO: 567
  misc_feature 1..321: note = Synthetic
  source 1..321: mol_type = other DNA

SEQ ID NO: 581 - DNA, 321 bp, synthetic construct; identical to SEQ ID NO: 567
  misc_feature 1..321: note = Synthetic
  source 1..321: mol_type = other DNA

SEQ ID NO: 582 - DNA, 321 bp, synthetic construct
  misc_feature 1..321: note = Synthetic
  source 1..321: mol_type = other DNA
gaaattgtgttgacacagtctccagccaccctgtctttgtctccaggggaaagagccaccctctcctgcagggccagtcagagtgttagcagctccttagcctggtaccaacagaaacctggccaggctccccggctcctcatctatgatgcatccaacagggccactggcatcccagccaggttcagtggcagtgggtctgggacagacttcactctcaccatcagcagcctagagcctgaagattttgcagtttattactgtcagcagcgtagcaactggcctctcactttcggcggagggaccaaggtggagatcaaa

SEQ ID NO: 583 - DNA, 321 bp, synthetic construct
  misc_feature 1..321: note = Synthetic
  source 1..321: mol_type = other DNA
gaaattgtgttgacgcagtctccaggcaccctgtctttgtctccaggggaaagagccaccctctcctgcagggccagtcagagtgttagcagcagctacttagcctggtaccagcagaaacctggccaggctcccaggctcctcatctatggtgcatccagcagggccactggcatcccagacaggttcagtggcagtgggtctgggacagacttcactctcaccatcagcagactggagcctgaagattttgcagtgtattactgtcagcagtatggtagctcgtggacgttcggccaagggaccaaggtggaaatcaaa

SEQ ID NO: 584 - DNA, 321 bp, synthetic construct; identical to SEQ ID NO: 583
  misc_feature 1..321: note = Synthetic
  source 1..321: mol_type = other DNA

SEQ ID NO: 585 - DNA, 321 bp, synthetic construct; identical to SEQ ID NO: 583
  misc_feature 1..321: note = Synthetic
  source 1..321: mol_type = other DNA

SEQ ID NO: 586 - DNA, 321 bp, synthetic construct; identical to SEQ ID NO: 583
  misc_feature 1..321: note = Synthetic
  source 1..321: mol_type = other DNA

SEQ ID NO: 587 - DNA, 321 bp, synthetic construct
  misc_feature 1..321: note = Synthetic
  source 1..321: mol_type = other DNA
gaaattgtgctgactcagtctccagactttcagtctgtgactccaaaggagaaagtcaccatcacctgccgggccagtcagaacattggtagtagcttacactggtaccagcagaaaccagatcagtctccaaagctcctcatcaagtttgcttcccagtccatctcaggggtcccctcgaggttcagtggcagtggatctgggacagatttcaccctcaccatcaatagcctggaagctgaagatgctgcagcgtattactgtcatcagagtagtagtttaccgtggacgttcggccaagggaccaaggtggaaatcaaa

SEQ ID NO: 588 - DNA, 321 bp, synthetic construct
  misc_feature 1..321: note = Synthetic
  source 1..321: mol_type = other DNA
gacatccagatgacccagtctccatcctcactgtctacatctgtaggagacagagtcaccatcacttgtcgggcgagtcagggcattagcaattatttagcctggtttcagcagaaaccagggaaagcccctaagtccctgatctatgctgcatccagtttgcaaagtggggtcccatcaaagttcagcggcagtggatctgggacagatttctctctcaccattagcagcctgcagcctgaagattttgcaacttattactgccaacagtataatagttacccgatcaccttcggccaagggacacgactggagattaaa

SEQ ID NO: 589 - DNA, 321 bp, synthetic construct; identical to SEQ ID NO: 587
  misc_feature 1..321: note = Synthetic
  source 1..321: mol_type = other DNA

SEQ ID NO: 590 - DNA, 321 bp, synthetic construct; identical to SEQ ID NO: 588
  misc_feature 1..321: note = Synthetic
  source 1..321: mol_type = other DNA

SEQ ID NO: 591 - DNA, 321 bp, synthetic construct
  misc_feature 1..321: note = Synthetic
  source 1..321: mol_type = other DNA
gaaattgtgctgactcagtctccagactttcagtctgtgactccaaaggagaaagtcaccatcacctgccgggccagtcagagcattggaagtagcttacactggtaccagcagaaaccagatcagtctccaaagctcctcatcaagtatgtttcccagtccatctcaggggtcccctcgaggttcagtggcagtggatctgggacagatttcaccctcaccatcaatagcctggaagctgaagatgctgcagcgtattactgtcatcagagtagtagtttaccgtggacgttcggccaagggaccaaggtggaaatcaaa

SEQ ID NO: 592 - DNA, 324 bp, synthetic construct
  misc_feature 1..324: note = Synthetic
  source 1..324: mol_type = other DNA
gaaattgtaatgacacagtctccagccaccctgtctttgtctccaggggaaagagccaccctctcctgcagggccagtcagagtgttagcagcagctacttatcctggtaccagcagaaacctgggctggctcccaggctcctcatctatggtgcatccaccagggccactggcatcccagccaggttcagtggcagtgggtctgggacagacttcactctcaccatcagcagcctgcagcctgaagattttgcagtttattactgtcagcaggattataacttacctccgacgttcggccaagggaccaaggtggaaatcaaa

SEQ ID NO: 593 - protein, 247 aa, synthetic construct
  REGION 1..247: note = Synthetic
QVQLVESGGGVVQPGRSLRLSCAASGFTFNNYDMYWVRQAPGKGLEWVAVTWYDGSNKYYADSVKGRFTISRDNSKNTLYLQMNSLRAEDTAVYYCARGDNWNDEHHYFYYMDVWGKGTTVTVSSGGGGSGGGGSGGGGSEIVLTQSPDFQSVTPKEKVTITCRASQSIGSSLHWYQQKPDQSPKLLIKFASQSFSGVPSRFSGSGSGTDFTLTIHSLEAEDAATYYCHQSSSLPWTFGQGTKVEIK

SEQ ID NO: 594 - protein, 247 aa, synthetic construct
  REGION 1..247: note = Synthetic
QVQLVESGGGVVQPGRSLRLSCAASGFTFSNYDMHWVRQAPGKGLEWVTIIWHDASNKYYLDSVKGRFTISRDNSKNTLYLQMNSLRAEDTAVYYCARGDNWNDEHHYFYYMDVWGKGTTVTVSSGGGGSGGGGSGGGGSEIVLTQSPDFQSVTPKEKVTITCRASQSIGSSLHWYQQKPDQSPKLLIKFASQSFSGVPSRFSGSGSGTDFTLTIHSLEAEDAATYYCHQSSSLPWTFGQGTKVEIK

SEQ ID NO: 595 - protein, 247 aa, synthetic construct
  REGION 1..247: note = Synthetic
QVQLVESGGGVVQPGRSLRLSCAASGFTFSNYDMHWVRQAPGKGLEWVTIIWHDGSNKYYLDSVKGRFTISRDNSKNTLYLQMNSLRAEDTAVYYCARGDNWNDEHHYFYYMDVWGKGTTVTVSSGGGGSGGGGSGGGGSEIVLTQSPDFQSVTPKEKVTITCRASQSIGSSLHWYQQKPDQSPKLLIKFASQSFSGVPSRFSGSGSGTDFTLTIHSLEAEDAATYYCHQSSSLPWTFGQGTKVEIK

SEQ ID NO: 596 - protein, 241 aa, synthetic construct
  REGION 1..241: note = Synthetic
EVQLLESGGGLVQPGGSLRLSCAASGFTFSIYAMSWVRQAPGKGLEWVSAISGGGDTTYYADSVKGRFTISRDNSKTTLDLQMNSLRAEDTAVYYCAKHTSYYMDVWGKGTTVTVSSGGGGSGGGGSGGGGSQTVVTQEPSLSVSPGGTVTLTCGLSSGSVSTSYYPSWYQQTPGQAPRTLIYSTNIRSSGVPDRFSGSILGNKAALTITGAQADDESDYYCKLYMGSGIIFGSGTKVTVL

SEQ ID NO: 597 - protein, 247 aa, synthetic construct
  REGION 1..247: note = Synthetic
QVQLVESGGGVVQPGRSLRLSCAASGFTFSNYDKHWVRQAPGKGLEWVAVIWYDGSNKYYADSVKGRFTISRDNSKNTLYLQMNSLRAEDTAMYYCARGDNWNDEHHYFYYMDVWGKGTTVTVSSGGGGSGGGGSGGGGSEIVLTQSPDFQSVTPKEKVTITCRASQSIGSSLHWYQQKPDQSPKLLIKFASQSFSGVPSRFSGSGSGTDFTLTIHSLEAEDAATYYCHQSSSLPWTFGQGTKVEIK

SEQ ID NO: 598 - protein, 245 aa, synthetic construct
  REGION 1..245: note = Synthetic
QVQLVQSGAEVKKPGASVKVSCKASGYTFTNYGFSWVRQAPGQGLDWMGWISAYNGYTNYTQKLQGRVTMTTDTSTTTAYMELRSLRSDDTAVYYCARRGLLYYYYSMDVWGKGTTVTVSSGGGGSGGGGSGGGGSEIVLTQSPATLSLSPGERATLSCGASQSVYNSYLAWYQQKPGLAPRLLIYDASLRATGVPDRFSGSGSGTDFTLTISTLEPEDFAVYYCQQYGGSPMYTFGQGTKLEIK

SEQ ID NO: 599 - protein, 241 aa, synthetic construct
  REGION 1..241: note = Synthetic
EVQLLESGGGLVQPGGSLRLSCTASGFTFSSFAMSWVRQAPGKGLEWVSAMSGSGDTTYYADSVKGRFTISRDNSKTTLYLQMNSLRAEDTAVYSCAKHTTYYMDVWGKGTTVTVSSGGGGSGGGGSGGGGSQTVVTQEPSLSVSPGGTVTLTCGLSSGSVSTSDYPSWYQQTPGQAPRTLIYRTNTRSSGVPDRFSGSILGNKAALTITGAQADDESDYYCVLYMDSGIIFGSGTKVTVL

SEQ ID NO: 600 - protein, 241 aa, synthetic construct
  REGION 1..241: note = Synthetic
EVQLLESGGGLVQPGGSLRLSCAASGFTFNTYAMSWVRQAPGKGLEWVSAMSGSGDTTYYADSVKGRFTISRDNSKTTLYLQMNSLRAEDTAVYSCAKHTSYYMDVWGKGTTVTVSSGGGGSGGGGSGGGGSQTVVTQEPSLSVSPGGTVTLTCGLSSGSVSTSDYPSWYQQTPGQAPRTLIYRTNTRSSGVPDRFSGSILGNKAALTITGAQADDESDYYCVLYMGSGIIFGSGTKVTVL

SEQ ID NO: 601 - protein, 241 aa, synthetic construct
  REGION 1..241: note = Synthetic
EVQLLESGGDLVQPGGSLRLSCAASGFTFSTYAMSWVRQAPGKGLEWVSAISGSGENIYYADSVKGRFTISRDNSKNTLFLQMNSLRAEDTAVYYCAKHTSYYMDVWGKGTTVTVSSGGGGSGGGGSGGGGSQTVVTQEPSFSVSPGGTVTLTCGLYSDSVSTSYYPSWYQQTPGQAPRTLIYNTNTRSSGVPDRFSGSILGNKAALTITGAQADDESDYYCVLYMVSGIVFGSGTKVTVL

SEQ ID NO: 602 - protein, 247 aa, synthetic construct
  REGION 1..247: note = Synthetic
QVQLVESGGGVVQPGRSLRLSCAASGFTFSSYGMHWVRQAPGKGLEWVAVIWYDGINKYYADSVKGRFTISRDNSKNTLYLQMNSLRAEDTAVYYCARERLERRYYYYMDVWGKGTTVTVSSGGGGSGGGGSGGGGSQTVVTQEPSFSVSPGGTVTLTCGLSSGSVSTSYYPGWYQQTPGQAPRTLIYSTNTRSSGVPDRFSGSILGNKAALTITGAQADDESDYYCVLYMGSGMFIFGSGTKVTVL

SEQ ID NO: 603 - protein, 241 aa, synthetic construct
  REGION 1..241: note = Synthetic
EVQLLESGGGLVQPGGSLRLSCAASGFTFSSFAMSWVRQAPGKGLEWVSAVSGSGDDTYYADSVKGRFTISRDNSKNTLYLQMNSLRAEDTAVYYCAKHTSYYLDVWGKGTTVTVSSGGGGSGGGGSGGGGSQTVVTQEPSFSVSPGGTVTLTCALSSDSVSTSYFPSWYRQTPGQAPRTLIYNTNTRSSGVPDRFSGSILGNKAALTITGAQADDESDYYCVLYMGSGIIFGSGTKVTVL

SEQ ID NO: 604 - protein, 247 aa, synthetic construct
  REGION 1..247: note = Synthetic
QVQLVESGGGVVQPGRSLRLSCAASGFNFSTFDIHWVRQAPGKGLEWVALIWYDGSYKYYADSVKGRFTISRDNSKNTLDLRMNSLRAEDTAVYYCARNDNWNDEHYYHYYMDVWGKGTTVTVSSGGGGSGGGGSGGGGSEIVLTQSPDFQSVTPKEKVTITCRASQSIGSSLHWYQQKPDQSPKLLIKFASQSFSGVPSRFSGSGSGTDFTLTINSLEAEDAATYFCHQSSSLPWTFGQGTKVEIK

SEQ ID NO: 605 - protein, 252 aa, synthetic construct
  REGION 1..252: note = Synthetic
EVHLLESGGGLVQPGGSLRLSCAASGFTFSSYAMNWVRQAPGKGLEWVSSISGSGSSSYYADSVKGRFTISRDNSKNTLYLQMNSLRAEDTAVYYCASRGFNSQYPPGYYYYYMDVWGKGTTVTVSSGGGGSGGGGSGGGGSQTVVTQEPSFSVSPGGTVTLTCGLSSGSVSTSYFPSWYQQTPGQAPRTLIYITNTRSSGVPDRFSGSIIGNKAALTITGAQADDESDYFCVLYMGSGTWVFGGGTKLTVL

SEQ ID NO: 606 - protein, 239 aa, synthetic construct
  REGION 1..239: note = Synthetic
EVQLLESGGGLVQPGGSLRLSCAASGFTFSNYAMTWVRQAPGKGLEWVSAISGSGIGTYYADSVQGRFTTSRDNSKNTLYLQMNSLRAEDTAVYYCAKGGYNWKDVWGKGTTVTVSSGGGGSGGGGSGGGGSEIVLTQSPDFQSVTPKEKVTITCRASQSIGSSLHWYQQKPDQSPKLLIKFASQSFSGVPSRFSGSGSGTDFTLTIHSLEAEDAATYYCHQSSSLPWTFGQGTKVEIK

SEQ ID NO: 607 - protein, 247 aa, synthetic construct
  REGION 1..247: note = Synthetic
QVQLVESGGGVVQPGRSLRLSCAASGFTFTNYDMHWVRQAPGKGLEWVTIIWHDGSNKYYLDSVRGRFTISRDNSKNTLYLQMNSLRAEDTAVYYCARGDNWNDEHHYFYYMDVWGKGTTVTVSSGGGGSGGGGSGGGGSEIVLTQSPDFQSVTPKEKVTITCRASQSIGSSLHWYQQKPDQSPKLLIKFASQSFSGVPSRFSGSGSGTDFTLTIHSLEAEDAATYYCHQSSSLPWTFGQGTKVEIK

SEQ ID NO: 608 - protein, 247 aa, synthetic construct
  REGION 1..247: note = Synthetic
QVQLVESGGGVVQPGRSLRLSCAASGFTFSNYDMHWVRQAPGKGLEWVTIIWHDGSNKYYLDSVKGRFTISRDNSKNTLYLQMNSLRAEDTAVYYCARGDNWNDEHHYFYYMDVWGKGTTVTVSSGGGGSGGGGSGGGGSEIVLTQSPATLSLSPGERATLSCRASQSVSSSLAWYQQKPGQAPRLLIYDASNRATGIPARFSGSGSGTDFTLTISSLEPEDFAVYYCQQRSNWPLTFGGGTKVEIK

SEQ ID NO: 609 - protein, 243 aa, synthetic construct
  REGION 1..243: note = Synthetic
EVQLVESGGGVVRPGGSLRLSCAASGFTFDDYGMSWVRQAPGKGLEWVSGINWNGGSTGYVDSVKGRFTISRDNAKNSLYLQMNSLRAEDTALYHCARPVTTDYYYYMDVWGKGTTVTVSSGGGGSGGGGSGGGGSEIVLTQSPGTLSLSPGERATLSCRASQSVSSSYLAWYQQKPGQAPRLLIYGASSRATGIPDRFSGSGSGTDFTLTISRLEPEDFAVYYCQQYGSSWTFGQGTKVEIK

SEQ ID NO: 610 - protein, 251 aa, synthetic construct
  REGION 1..251: note = Synthetic
EVQLLESGGGLVQPGGSLRLSCAASGFTFSSYAMSWVRQAPGKGLEWVSAISGSGGSTYYADSVKGRFTISRDNSKNTLYLQMNSLRAEDTAVYYCAKKGTSYNWNDVHYYYYYYMDVWGKGTTVTVSSGGGGSGGGGSGGGGSEIVLTQSPGTLSLSPGERATLSCRASQSVSSSYLAWYQQKPGQAPRLLIYGASSRATGIPDRFSGSGSGTDFTLTISRLEPEDFAVYYCQQYGSSWTFGQGTKVEIK

SEQ ID NO: 611 - protein, 245 aa, synthetic construct
  REGION 1..245: note = Synthetic
QLQLQESGPGLVKPSETLSLTCTVSGGSISSSSYYWGWIRQPPGKGLEWIGSIYYSGSTYYNPSLKSRVTISVDTSKNQFSLKLSSVTAADTAVYYCTTGTTAYYYYYYMDVWGKGTTVTVSSGGGGSGGGGSGGGGSEIVLTQSPGTLSLSPGERATLSCRASQSVSSSYLAWYQQKPGQAPRLLIYGASSRATGIPDRFSGSGSGTDFTLTISRLEPEDFAVYYCQQYGSSWTFGQGTKVEIK

SEQ ID NO: 612 - protein, 244 aa, synthetic construct
  REGION 1..244: note = Synthetic
EVQLLESGGGLVQPGGSLRLSCAASGFTFSSYAMTWVRQAPGKGLEWVSAISGSGGSTYYADSVKGRFTISRDNSKNTLYLQMNSLRAEDTAVYYCARGGYNWHYYYYMDVWGKGTTVTVSSGGGGSGGGGSGGGGSEIVLTQSPGTLSLSPGERATLSCRASQSVSSSYLAWYQQKPGQAPRLLIYGASSRATGIPDRFSGSGSGTDFTLTISRLEPEDFAVYYCQQYGSSWTFGQGTKVEIK

SEQ ID NO: 613 - protein, 248 aa, synthetic construct
  REGION 1..248: note = Synthetic
QVQLVESGGGVVQPGRSLRLSCAASGFTFSSYDMHWVRQAPGKGLEWVSVIWYDGSNKKYGDSAKGRFTISRDNSKNTLDLQMNSLRAEDTAVYYCARGDNWNDEGGYYYYYMDVWGKGTTVTVSSGGGGSGGGGSGGGGSEIVLTQSPDFQSVTPKEKVTITCRASQNIGSSLHWYQQKPDQSPKLLIKFASQSISGVPSRFSGSGSGTDFTLTINSLEAEDAAAYYCHQSSSLPWTFGQGTKVEIK

SEQ ID NO: 614 - protein, 248 aa, synthetic construct
  REGION 1..248: note = Synthetic
QVQLVESGGGVVQPGRSLRLSCAASGFTFSSYDMHWVRQAPGKGLEWVSVIWYDGSNKKYGDSAKGRFTISRDNSKNTLDLQMNSLRAEDTAVYYCARGDNWNDEGGYYYYYMDVWGKGTTVTVSSGGGGSGGGGSGGGGSDIQMTQSPSSLSTSVGDRVTITCRASQGISNYLAWFQQKPGKAPKSLIYAASSLQSGVPSKFSGSGSGTDFSLTISSLQPEDFATYYCQQYNSYPITFGQGTRLEIK

SEQ ID NO: 615 - protein, 245 aa, synthetic construct
  REGION 1..245: note = Synthetic
QVQLVQSGAEVKKSGASVKVSCKASGYTLTSYGISWVRQAPGQGLEWMGWISAYNGNINYAQKFQGRVTMTTDTSTSTAYMELRSLRSDDTAVYYCVRDGDRYNWNHSYMDVWGKGTTVTVSSGGGGSGGGGSGGGGSEIVLTQSPDFQSVTPKEKVTITCRASQNIGSSLHWYQQKPDQSPKLLIKFASQSISGVPSRFSGSGSGTDFTLTINSLEAEDAAAYYCHQSSSLPWTFGQGTKVEIK

SEQ ID NO: 616 - protein, 245 aa, synthetic construct
  REGION 1..245: note = Synthetic
QVQLVQSGAEVKKSGASVKVSCKASGYTLTSYGISWVRQAPGQGLEWMGWISAYNGNINYAQKFQGRVTMTTDTSTSTAYMELRSLRSDDTAVYYCVRDGDRYNWNHSYMDVWGKGTTVTVSSGGGGSGGGGSGGGGSDIQMTQSPSSLSTSVGDRVTITCRASQGISNYLAWFQQKPGKAPKSLIYAASSLQSGVPSKFSGSGSGTDFSLTISSLQPEDFATYYCQQYNSYPITFGQGTRLEIK

SEQ ID NO: 617 - protein, 244 aa, synthetic construct
  REGION 1..244: note = Synthetic
EVQLLESGGDLVQPGGSLRLSCAASGFTFSTYAMTWVRQAPGKGLEWVSAISGTSGSTYYADSVKGRFTISRDNSKSTLYLHMNSLRTEDTAVYYCARGGYNWHYYYYMDVWGKGTTVTVSSGGGGSGGGGSGGGGSEIVLTQSPDFQSVTPKEKVTITCRASQSIGSSLHWYQQKPDQSPKLLIKYVSQSISGVPSRFSGSGSGTDFTLTINSLEAEDAAAYYCHQSSSLPWTFGQGTKVEIK

SEQ ID NO: 618 - protein, 245 aa, synthetic construct
  REGION 1..245: note = Synthetic
EVQLLESGGDLVQPGGSLRLSCAASGFTFSTYAMTWVRQAPGKGLEWVSAISGTSGSTYYADSVKGRFTISRDNSKSTLYLHMNSLRTEDTAVYYCARGGYNWHYYYYMDVWGKGTTVTVSSGGGGSGGGGSGGGGSEIVMTQSPATLSLSPGERATLSCRASQSVSSSYLSWYQQKPGLAPRLLIYGASTRATGIPARFSGSGSGTDFTLTISSLQPEDFAVYYCQQDYNLPPTFGQGTKVEIK

SEQ ID NO: 619 - DNA, 741 bp, synthetic construct
  misc_feature 1..741: note = Synthetic
  source 1..741: mol_type = other DNA
caggtgcagctggtggagtctgggggaggcgtggtccagcctgggaggtccctgagactctcctgtgcagcgtctggattcaccttcaataattatgacatgtactgggtccgccaggccccaggcaaggggctggagtgggtggcagttacatggtatgatggaagtaataaatactatgcagactccgtgaagggccgattcaccatctccagagacaattccaagaacacgctgtatctgcaaatgaacagcctgagagccgaggacacggctgtgtattactgtgcgagaggtgacaactggaatgacgaacaccactatttttactacatggacgtctggggcaaagggaccacggtcaccgtctcctcaggtggaggcggttcaggcggaggtggctctggcggtggcggatcggaaattgtgctgactcagtctccagactttcagtctgtgactccaaaggagaaagtcaccatcacctgccgggccagtcagagcattggtagtagcttacactggtaccagcagaaaccagatcagtctccaaagctcctcatcaagtttgcttcccagtccttctcaggggtcccctcgaggttcagtggcagtggatctgggacagatttcaccctcaccatccatagcctggaagctgaagatgctgcaacgtattactgtcatcagagtagtagtttaccgtggacgttcggccaagggaccaaggtggaaatcaaa

SEQ ID NO: 620 - DNA, 741 bp, synthetic construct
  misc_feature 1..741: note = Synthetic
  source 1..741: mol_type = other DNA
caggtgcagctggtggagtctgggggaggcgtggtccagcctgggaggtccctgagactctcctgtgcagcgtctgggttcaccttcagtaactatgacatgcactgggtccgccaggccccaggcaaggggctggagtgggtgacaattatatggcatgatgcaagtaataaatattatttagactccgtgaagggccgattcaccatctccagagacaattccaagaacacgctgtatctgcaaatgaacagcctgagagccgaggacacggctgtgtattactgtgcgagaggtgacaactggaacgacgaacaccactacttctactacatggacgtctggggcaaagggaccacggtcaccgtctcctcaggtggaggcggttcaggcggaggtggctctggcggtggcggatcggaaattgtgctgactcagtctccagactttcagtctgtgactccaaaggagaaagtcaccatcacctgccgggccagtcagagcattggtagtagcttacactggtaccagcagaaaccagatcagtctccaaagctcctcatcaagtttgcttcccagtccttctcaggggtcccctcgaggttcagtggcagtggatctgggacagatttcaccctcaccatccatagcctggaagctgaagatgctgcaacgtattactgtcatcagagtagtagtttaccgtggacgttcggccaagggaccaaggtggaaatcaaa

SEQ ID NO: 621 - DNA, 741 bp, synthetic construct
  misc_feature 1..741: note = Synthetic
  source 1..741: mol_type = other DNA
caggtgcagctggtggagtctgggggaggcgtggtccagcctgggaggtccctgagactctcctgtgcagcgtctgggttcaccttcagtaactatgacatgcactgggtccgccaggccccaggcaaggggctggagtgggtgacaattatatggcatgatggaagtaataaatattatttagactccgtgaagggccgattcaccatctccagagacaattccaagaacacgctgtatctgcaaatgaacagcctgagagccgaggacacggctgtgtattactgtgcgagaggtgacaactggaacgacgaacaccactacttctactacatggacgtctggggcaaagggaccacggtcaccgtctcctcaggtggaggcggttcaggcggaggtggctctggcggtggcggatcggaaattgtgctgactcagtctccagactttcagtctgtgactccaaaggagaaagtcaccatcacctgccgggccagtcagagcattggtagtagcttacactggtaccagcagaaaccagatcagtctccaaagctcctcatcaagtttgcttcccagtccttctcaggggtcccctcgaggttcagtggcagtggatctgggacagatttcaccctcaccatccatagcctggaagctgaagatgctgcaacgtattactgtcatcagagtagtagtttaccgtggacgttcggccaagggaccaaggtggaaatcaaa

SEQ ID NO: 622 - DNA, 723 bp, synthetic construct
  misc_feature 1..723: note = Synthetic
  source 1..723: mol_type = other DNA
gaggtgcagctgctggagtctgggggaggcttggtacagcctggggggtccctgagactctcctgtgcagcctctggattcacctttagcatctatgccatgagctgggtccgccaggctccagggaaggggctggagtgggtctcagctattagtggtggtggtgataccacatactacgcagactccgtgaagggccggttcaccatctccagagacaattccaagaccacgctggatctgcaaatgaacagcctgagagccgaggacacggccgtatattactgtgcgaaacacactagctactacatggacgtctggggcaaagggaccacggtcaccgtctcctcaggtggaggcggttcaggcggaggtggctctggcggtggcggatcgcagactgtggtgacccaggagccatcgctctcagtgtcccctggagggacagtcacactcacttgtggcttgagctctggctcagtctctactagttactaccccagctggtaccagcagaccccaggccaggctccacgcacgctcatctacagcacaaatattcggtcttctggggtccctgatcgcttctctggctccatccttgggaacaaagctgccctcaccatcacgggggcccaggcagatgatgaatctgattattattgtaagctgtatatgggaagtggcattattttcggcagtggaaccaaggtcactgtccta

SEQ ID NO: 623 - DNA, 741 bp, synthetic construct
  misc_feature 1..741: note = Synthetic
  source 1..741: mol_type = other DNA
caggtgcagctggtggagtctgggggaggcgtggtccagcctgggaggtccctgagactctcctgtgcagcgtctggattcaccttcagtaactatgacaagcactgggtccgccaggccccaggcaaggggctggagtgggtggcagttatatggtatgatggaagtaataagtactatgcagactccgtgaagggccgattcaccatttccagagacaattccaagaacacgctgtatctacaaatgaacagcctgagagccgaggacacggctatgtattactgtgcgagaggtgacaactggaacgacgaacaccactacttctactacatggacgtctggggcaaagggaccacggtcaccgtctcctcaggtggaggcggttcaggcggaggtggctctggcggtggcggatcggaaattgtgctgactcagtctccagactttcagtctgtgactccaaaggagaaagtcaccatcacctgccgggccagtcagagcattggtagtagcttacactggtaccagcagaaaccagatcagtctccaaagctcctcatcaagtttgcttcccagtccttctcaggggtcccctcgaggttcagtggcagtggatctgggacagatttcaccctcaccatccatagcctggaagctgaagatgctgcaacgtattactgtcatcagagtagtagtttaccgtggacgttcggccaagggaccaaggtggaaatcaaa

SEQ ID NO: 624 - DNA, 735 bp, synthetic construct
  misc_feature 1..735: note = Synthetic
  source 1..735: mol_type = other DNA
caggttcagttggtacagtctggagctgaggtgaagaagcctggggcctcagtgaaggtctcctgtaaggcttctggttacacctttaccaactatggtttcagctgggtgcgacaggcccctggacaagggcttgactggatgggatggatcagcgcttacaatggttacacaaattatacacagaaactccagggcagagtcaccatgaccactgacacatccacgaccacagcctacatggagctgaggagcctgagatctgacgacacggccgtctattactgtgcgagaagaggactactctactactactactccatggacgtctggggcaaagggaccacggtcaccgtctcctcaggtggaggcggttcaggcggaggtggctctggcggtggcggatcggaaattgtgttgacgcagtctccagccaccctgtctttgtctccaggggaaagagccaccctctcctgcggggccagtcagagtgtttacaacagttacttagcctggtaccagcagaaacctggcctggcgcccaggctcctcatctatgatgcatccctcagggccactggcgtcccagacaggttcagtggcagtgggtctgggacagacttcactctcaccatcagcacactggagcctgaagattttgcagtgtattactgtcagcagtatggtggctcacccatgtacacttttggccaggggaccaagctggagatcaaa

SEQ ID NO: 625 - DNA, 723 bp, synthetic construct
  misc_feature 1..723: note = Synthetic
  source 1..723: mol_type = other DNA
gaggtgcagctgctggagtctgggggaggcctggtacagcctggggggtccctgagactctcctgtacagcctctggattcacctttagcagctttgccatgagctgggtccgccaggctccagggaaggggctggagtgggtctcagctatgagtggtagtggtgataccacatactacgcagactccgtgaagggccggttcaccatctcccgagacaattccaagaccacgctgtatctgcaaatgaacagcctgagagccgaggacacggccgtatattcctgtgcgaagcacactacctactacatggacgtctggggcaaagggaccacggtcaccgtctcctcaggtggaggcggttcaggcggaggtggctctggcggtggcggatcgcagactgtggtgacccaggagccatcgctctcagtgtcccctggagggacagtcacactcacttgtggcttgagctctggctcagtctctactagtgactaccccagctggtaccagcagaccccaggccaggctccacgcacgctcatctacagaacaaacactcgctcttctggggtccctgatcgcttctctggctccatccttgggaacaaagctgccctcaccatcacgggggcccaggcagatgatgaatctgattattactgtgtgctgtatatggatagtggcattattttcggcagtggaaccaaggtcactgtccta

SEQ ID NO: 626 - DNA, 723 bp, synthetic construct
  misc_feature 1..723: note = Synthetic
  source 1..723: mol_type = other DNA
gaggtgcagctgctggagtctgggggaggcttggtacagcctggggggtccctgagactctcctgtgcagcctctggattcacctttaacacctatgccatgagctgggtccgccaggctccagggaaggggctggagtgggtctcagctatgagtggtagtggtgataccacatactacgcagactccgtgaagggccggttcaccatctccagagacaattccaagaccactctgtatctgcaaatgaacagcctgagagccgaggacacggccgtatattcctgtgcgaaacacacttcctactacatggacgtctggggcaaagggaccacggtcaccgtctcctcaggtggaggcggttcaggcggaggtggctctggcggtggcggatcgcagactgtggtgacccaggagccatcgctctcagtgtcccctggagggacagtcacactcacttgtggcttgagctctggctcagtctctactagtgactaccccagttggtaccagcagaccccaggccaggctccacgcacgctcatctacagaacaaacactcgctcttctggggtccctgatcgcttctctggctccatccttgggaacaaagctgccctcaccatcacgggggcccaggcagatgatgaatctgattattactgtgtgctgtatatgggtagtggcattattttcggcagtggaaccaaggtcactgtccta

SEQ ID NO: 627 - DNA, 723 bp, synthetic construct
  misc_feature 1..723: note = Synthetic
  source 1..723: mol_type = other DNA
gaggtccaattattggagtctgggggagacttggtacagcctggggggtccctgagactctcctgtgcagcctctggattcacctttagcacctatgccatgagctgggtccgccaggctccagggaaggggctggaatgggtctcagctattagtggtagtggtgaaaacatatactacgcagactccgtgaagggccggttcaccatctccagagacaattccaagaacacgctatttctacaaatgaacagcctgagagccgaggacacggccgtatattactgtgcgaaacacactagctattacatggacgtctggggcaaagggaccacggtcaccgtctcctcaggtggaggcggttcaggcggaggtggctctggcggtggcggatcgcagactgtggtgacccaggagccatcgttctcagtgtcccctggagggacagtcacactcacttgtggcttatactctgactcagtctctactagttactaccccagctggtaccagcagaccccaggccaggctccacgcacgctcatctacaacacaaacactcgctcttctggggtccctgatcgcttctctggctccatccttgggaacaaagctgccctcaccatcacgggggcccaggcagatgatgaatctgattattactgtgtactatatatggttagtggcattgttttcggcagtggaaccaaggtcactgtcctg

SEQ ID NO: 628 - DNA, 741 bp, synthetic construct
  misc_feature 1..741: note = Synthetic
  source 1..741: mol_type = other DNA
caggtgcagctggtggagtctgggggaggcgtggtccagcctgggaggtccctgagactctcctgtgcagcgtctggattcaccttcagtagttatggcatgcactgggtccgccaggctccaggcaaggggctggagtgggtggcagttatatggtatgatggaattaataaatactatgcagactccgtgaagggccgattcaccatctccagagacaattccaagaacacgctgtatctgcaaatgaacagcctgagagccgaagacacggctgtgtattactgtgcgagagaacggctggaacgaaggtactactactacatggacgtctggggcaaagggaccacggtcaccgtctcctcaggtggaggcggttcaggcggaggtggctctggcggtggcggatcgcagactgtggtgacccaggagccatcgttctcagtgtcccctggagggacagtcacactcacttgtggcttgagctctggctcagtctctactagttactaccccggctggtaccagcagaccccaggccaggctccacgcacgctcatctacagcacaaacactcgctcttctggggtccctgatcgcttctctggctccatccttgggaacaaagctgccctcaccatcacgggggcccaggcagatgatgaatctgattattactgtgtgctatatatgggtagtggcatgtttattttcggcagtggaaccaaggtcactgtccta

SEQ ID NO: 629 - DNA, 723 bp, synthetic construct
  misc_feature 1..723: note = Synthetic
  source 1..723: mol_type = other DNA
gaggtgcagttgttggagtctgggggaggcttggtacagcctggggggtccctgagactctcctgtgcagcctctggattcacctttagcagctttgccatgagctgggtccgccaggctccagggaaggggctggaatgggtctcagctgttagtggtagtggtgatgacacatactacgcagactccgtgaagggccggttcaccatctccagagacaattccaagaacacgctgtatctgcaaatgaacagcctgagagccgaggacacggccgtatattactgtgcgaaacacactagctactacctggacgtctggggcaaagggaccacggtcaccgtctcctcaggtggaggcggttcaggcggaggtggctctggcggtggcggatcgcagactgtggtgacccaggagccatcgttctcagtgtcccctggagggacagtcacactcacttgtgccttgagctctgactcagtctctactagttactttcccagctggtaccggcagaccccaggccaggctccacgcacgctcatctacaacacaaacactcgctcttctggggtccctgatcgcttctctggctccatccttgggaacaaagctgccctcaccatcacgggggcccaggcagatgatgaatctgattattactgtgtgctatatatgggtagtggcattattttcggcagtggaaccaaggtcactgtccta

SEQ ID NO: 630 - DNA, 741 bp, synthetic construct
  misc_feature 1..741: note = Synthetic
  source 1..741: mol_type = other DNA
caggtgcagctggtggagtctgggggaggcgtggtccagcctgggaggtccctgagactctcctgtgcagcgtctggattcaacttcagtacctttgacatacactgggtccgccaggctccaggcaaggggctggagtgggtggcacttatatggtatgatggaagttataaatactatgcagactccgtgaagggccgattcaccatttccagagacaattccaagaacacgctggatctgcgaatgaacagcctgagagccgaggacacggctgtgtattactgtgcgcgaaatgacaactggaacgacgaacactactaccactattacatggacgtctggggcaaagggaccacggtcaccgtctcctcaggtggaggcggttcaggcggaggtggctctggcggtggcggatcggaaattgtcctgactcagtctccagactttcagtctgtgactccaaaggagaaagtcaccatcacctgccgggccagtcagagtattggtagtagcttacactggtaccagcagaaaccagatcagtctccaaagctcctcatcaagtttgcttcccagtccttctcaggggtcccctcgaggttcagtggcagtggatctgggacagatttcaccctcaccatcaatagcctggaagctgaagatgctgcaacgtatttctgtcatcagagtagtagtttaccgtggacgttcggccaagggaccaaggtggaaatcaaa

SEQ ID NO: 631 - DNA, 756 bp, synthetic construct
  misc_feature 1..756: note = Synthetic
  source 1..756: mol_type = other DNA
gaagtgcacctgttggagtctgggggaggcttggtccagcctggggggtccctgagactctcctgtgcggcctctggattcacctttagcagctatgccatgaactgggtccgccaggctccagggaaggggctggagtgggtctcttctattagtggtagtggtagtagctcatactacgcagactccgtgaagggccggttcaccatctccagagacaattccaagaacacgctgtatctgcaaatgaacagcctgagagccgaggacacggccgtatattactgtgcgtctcgtggattcaactcccagtatcctcccggatactactactactacatggacgtctggggcaaagggaccacggtcaccgtctcctcaggtggaggcggttcaggcggaggtggctctggcggtggcggatcgcagactgtggtgacccaggagccatcgttctcagtgtcccctggagggacagtcacactcacttgtggcttgagctctggctcagtctccactagttacttccccagctggtaccagcagacccccggccaggctccacgcacgctcatctacatcacaaacactcgctcttcaggggtccctgatcgcttctctggctccattattgggaacaaagctgccctcaccatcacgggggcccaggcagatgatgaatctgattatttctgtgtactatatatgggtagtggcacttgggtgttcggtggaggaaccaagctgactgtccta

SEQ ID NO: 632 - DNA, 717 bp, synthetic construct
  misc_feature 1..717: note = Synthetic
  source 1..717: mol_type = other DNA
gaggtgcagctgttggagtctgggggaggcttggtacagcctggggggtccctgagactctcctgtgcagcctctggattcaccttcagcaactatgccatgacctgggtccgccaggctccagggaaggggctggagtgggtctcagctattagtggtagtggtattggcacatactacgcagactccgtgcagggccggttcaccacctccagagacaattccaagaacacgctgtatctgcaaatgaacagcctgagagccgaggacacggccgtttattactgtgcgaaaggggggtacaactggaaggacgtctggggcaaagggaccacggtcaccgtctcctcaggtggaggcggttcaggcggaggtggctctggcggtggcggatcggaaattgtgctgactcagtctccagactttcagtctgtgactccaaaggagaaagtcaccatcacctgccgggccagtcagagcattggtagtagcttacactggtaccagcagaaaccagatcagtctccaaagctcctcatcaagtttgcttcccagtccttctcaggggtcccctcgaggttcagtggcagtggatctgggacagatttcaccctcaccatccatagcctggaagctgaagatgctgcaacgtattactgtcatcagagtagtagtttaccgtggacgttcggccaagggaccaaggtggaaatcaaa

SEQ ID NO: 633 - DNA, 741 bp, synthetic construct
  misc_feature 1..741: note = Synthetic
  source 1..741: mol_type = other DNA
caggtgcagctggtggagtctgggggaggcgtggtccagcctgggaggtccctgagactctcctgtgcagcgtctgggttcaccttcactaactatgacatgcactgggtccgccaggccccaggcaaggggctggagtgggtgacaattatatggcatgatggaagtaataaatattatttagactccgtgaggggccgattcaccatctccagagacaattccaagaacacgctgtatctgcaaatgaacagcctgagagccgaggacacggctgtgtattactgtgcgagaggtgacaactggaacgacgaacaccactacttctactacatggacgtctggggcaaagggaccacggtcaccgtctcctcaggtggaggcggttcaggcggaggtggctctggcggtggcggatcggaaattgtgctgactcagtctccagactttcagtctgtgactccaaaggagaaagtcaccatcacctgccgggccagtcagagcattggtagtagcttacactggtaccagcagaaaccagatcagtctccaaagctcctcatcaagtttgcttcccagtccttctcaggggtcccctcgaggttcagtggcagtggatctgggacagatttcaccctcaccatccatagcctggaagctgaagatgctgcaacgtattactgtcatcagagtagtagtttaccgtggacgttcggccaagggaccaaggtggaaatcaaa

SEQ ID NO: 634 - DNA, 741 bp, synthetic construct
  misc_feature 1..741: note = Synthetic
  source 1..741: mol_type = other DNA
caggtgcagctggtggagtctgggggaggcgtggtccagcctgggaggtccctgagactctcctgtgcagcgtctgggttcaccttcagtaactatgacatgcactgggtccgccaggccccaggcaaggggctggagtgggtgacaattatatggcatgatggaagtaataaatattatttagactccgtgaagggccgattcaccatctccagagacaattccaagaacacgctgtatctgcaaatgaacagcctgagagccgaggacacggctgtgtattactgtgcgagaggtgacaactggaacgacgaacaccactacttctactacatggacgtctggggcaaagggaccacggtcaccgtctcctcaggtggaggcggttcaggcggaggtggctctggcggtggcggatcggaaattgtgttgacacagtctccagccaccctgtctttgtctccaggggaaagagccaccctctcctgcagggccagtcagagtgttagcagctccttagcctggtaccaacagaaacctggccaggctccccggctcctcatctatgatgcatccaacagggccactggcatcccagccaggttcagtggcagtgggtctgggacagacttcactctcaccatcagcagcctagagcctgaagattttgcagtttattactgtcagcagcgtagcaactggcctctcactttcggcggagggaccaaggtggagatcaaa

SEQ ID NO: 635 - DNA, 729 bp, synthetic construct
  misc_feature 1..729: note = Synthetic
  source 1..729: mol_type = other DNA
gaggtgcagctggtggagtctgggggaggtgtggtacggcctggggggtccctgagactctcctgtgcagcctctggattcacctttgatgattatggcatgagctgggtccgccaagctccagggaaggggctggagtgggtctctggtattaattggaatggtggtagcacaggttatgtagactctgtgaagggccgattcaccatctccagagacaacgccaagaactccctgtatctgcaaatgaacagtctgagagccgaggacacggccttgtatcactgtgcgagaccagtaactacggactactactactacatggacgtctggggcaaagggaccacggtcaccgtctcctcaggtggaggcggttcaggcggaggtggctctggcggtggcggatcggaaattgtgttgacgcagtctccaggcaccctgtctttgtctccaggggaaagagccaccctctcctgcagggccagtcagagtgttagcagcagctacttagcctggtaccagcagaaacctggccaggctcccaggctcctcatctatggtgcatccagcagggccactggcatcccagacaggttcagtggcagtgggtctgggacagacttcactctcaccatcagcagactggagcctgaagattttgcagtgtattactgtcagcagtatggtagctcgtggacgttcggccaagggaccaaggtggaaatcaaa

SEQ ID NO: 636 - DNA, 753 bp, synthetic construct
  misc_feature 1..753: note = Synthetic
  source 1..753: mol_type = other DNA
gaggtgcagctgttggagtctgggggaggcttggtacagcctggggggtccctgagactctcctgtgcagcctctggattcacctttagcagctatgccatgagctgggtccgccaggctccagggaaggggctggagtgggtctcagctattagtggtagtggtggtagcacatactacgcagactccgtgaagggccggttcaccatctccagagacaattccaagaacacgctgtatctgcaaatgaacagcctgagagccgaggacacggccgtatattactgtgcgaaaaaggggacgtcgtacaactggaacgacgtccattactactactactactacatggacgtctggggcaaagggaccacggtcaccgtctcctcaggtggaggcggttcaggcggaggtggctctggcggtggcggatcggaaattgtgttgacgcagtctccaggcaccctgtctttgtctccaggggaaagagccaccctctcctgcagggccagtcagagtgttagcagcagctacttagcctggtaccagcagaaacctggccaggctcccaggctcctcatctatggtgcatccagcagggccactggcatcccagacaggttcagtggcagtgggtctgggacagacttcactctcaccatcagcagactggagcctgaagattttgcagtgtattactgtcagcagtatggtagctcgtggacgttcggccaagggaccaaggtggaaatcaaa

SEQ ID NO: 637 - DNA, 735 bp, synthetic construct
  misc_feature 1..735: note = Synthetic
  source 1..735: mol_type = other DNA
cagctgcagctgcaggagtcgggcccaggactggtgaagccttcggagaccctgtccctcacctgcactgtctctggtggctccatcagcagtagtagttactactggggctggatccgccagcccccagggaaggggctggagtggattgggagtatctattatagtgggagcacctactacaacccgtccctcaagagtcgagtcaccatatccgtagacacgtccaagaaccagttctccctgaagctgagctctgtgaccgccgcagacacggctgtgtattactgcacaactggaacgacggcttactactactactactacatggacgtctggggcaaagggaccacggtcaccgtctcctcaggtggaggcggttcaggcggaggtggctctggcggtggcggatcggaaattgtgttgacgcagtctccaggcaccctgtctttgtctccaggggaaagagccaccctctcctgcagggccagtcagagtgttagcagcagctacttagcctggtaccagcagaaacctggccaggctcccaggctcctcatctatggtgcatccagcagggccactggcatcccagacaggttcagtggcagtgggtctgggacagacttcactctcaccatcagcagactggagcctgaagattttgcagtgtattactgtcagcagtatggtagctcgtggacgttcggccaagggaccaaggtggaaatcaaa

SEQ ID NO: 638 - DNA, 732 bp, synthetic construct
  misc_feature 1..732: note = Synthetic
  source 1..732: mol_type = other DNA
gaggtgcagctgttggagtctgggggaggcttggtgcagcctggggggtccctgagactctcctgtgcagcctctggattcacctttagcagctatgccatgacctgggtccgccaggctccagggaaggggctggagtgggtctcagctattagtggtagtggtggtagcacatactacgcagactccgtgaagggccggttcaccatctccagagacaattccaagaacacgctgtatctgcaaatgaacagcctgagagccgaggacacggccgtatattactgtgcgagaggcgggtataactggcactactactactacatggacgtctggggcaaagggaccacggtcaccgtctcctcaggtggaggcggttcaggcggaggtggctctggcggtggcggatcggaaattgtgttgacgcagtctccaggcaccctgtctttgtctccaggggaaagagccaccctctcctgcagggccagtcagagtgttagcagcagctacttagcctggtaccagcagaaacctggccaggctcccaggctcctcatctatggtgcatccagcagggccactggcatcccagacaggttcagtggcagtgggtctgggacagacttcactctcaccatcagcagactggagcctgaagattttgcagtgtattactgtcagcagtatggtagctcgtggacgttcggccaagggaccaaggtggaaatcaaa

SEQ ID NO: 639 - DNA, 744 bp, synthetic construct
  misc_feature 1..744: note = Synthetic
  source 1..744: mol_type = other DNA
caggtgcagctggtggagtctgggggaggcgtggtccagcctgggaggtccctgagactctcctgtgcagcgtctggattcaccttcagtagctatgacatgcactgggtccgccaggctccaggcaaggggctggagtgggtgtcagttatatggtatgatggaagtaataaaaagtatggagactccgcgaagggccgattcaccatctccagagacaattccaagaacacgctggatctgcaaatgaacagcctgagagccgaggacacggctgtgtattactgtgcgagaggcgacaactggaacgacgaaggtggctactactactactacatggacgtctggggcaaagggaccacggtcaccgtctcctcaggtggaggcggttcaggcggaggtggctctggcggtggcggatcggaaattgtgctgactcagtctccagactttcagtctgtgactccaaaggagaaagtcaccatcacctgccgggccagtcagaacattggtagtagcttacactggtaccagcagaaaccagatcagtctccaaagctcctcatcaagtttgcttcccagtccatctcaggggtcccctcgaggttcagtggcagtggatctgggacagatttcaccctcaccatcaatagcctggaagctgaagatgctgcagcgtattactgtcatcagagtagtagtttaccgtggacgttcggccaagggaccaaggtggaaatcaaa

SEQ ID NO: 640 - DNA, 744 bp, synthetic construct
  misc_feature 1..744: note = Synthetic
  source 1..744: mol_type = other DNA
caggtgcagctggtggagtctgggggaggcgtggtccagcctgggaggtccctgagactctcctgtgcagcgtctggattcaccttcagtagctatgacatgcactgggtccgccaggctccaggcaaggggctggagtgggtgtcagttatatggtatgatggaagtaataaaaagtatggagactccgcgaagggccgattcaccatctccagagacaattccaagaacacgctggatctgcaaatgaacagcctgagagccgaggacacggctgtgtattactgtgcgagaggcgacaactggaacgacgaaggtggctactactactactacatggacgtctggggcaaagggaccacggtcaccgtctcctcaggtggaggcggttcaggcggaggtggctctggcggtggcggatcggacatccagatgacccagtctccatcctcactgtctacatctgtaggagacagagtcaccatcacttgtcgggcgagtcagggcattagcaattatttagcctggtttcagcagaaaccagggaaagcccctaagtccctgatctatgctgcatccagtttgcaaagtggggtcccatcaaagttcagcggcagtggatctgggacagatttctctctcaccattagcagcctgcagcctgaagattttgcaacttattactgccaacagtataatagttacccgatcaccttcggccaagggacacgactggagattaaa

SEQ ID NO: 641 - DNA, 735 bp, synthetic construct
  misc_feature 1..735: note = Synthetic
  source 1..735: mol_type = other DNA
caggttcagctggtacagtctggagctgaggtgaagaagtctggggcctcagtgaaggtctcctgcaaggcttctggttacaccttaaccagctatggcatcagctgggtgcgacaggcccctggacaagggcttgagtggatgggatggatcagcgcttacaatggtaacataaactatgcacagaagttccagggcagagtcaccatgaccacagacacatccacgagcacagcctacatggagctgaggagcctgagatctgacgacacggccgtgtattactgtgtgagagatggggaccggtacaactggaaccacagctacatggacgtctggggcaaagggaccacggtcaccgtctcctcaggtggaggcggttcaggcggaggtggctctggcggtggcggatcggaaattgtgctgactcagtctccagactttcagtctgtgactccaaaggagaaagtcaccatcacctgccgggccagtcagaacattggtagtagcttacactggtaccagcagaaaccagatcagtctccaaagctcctcatcaagtttgcttcccagtccatctcaggggtcccctcgaggttcagtggcagtggatctgggacagatttcaccctcaccatcaatagcctggaagctgaagatgctgcagcgtattactgtcatcagagtagtagtttaccgtggacgttcggccaagggaccaaggtggaaatcaaa

SEQ ID NO: 642 - DNA, 735 bp, synthetic construct
  misc_feature 1..735: note = Synthetic
  source 1..735: mol_type = other DNA
caggttcagctggtacagtctggagctgaggtgaagaagtctggggcctcagtgaaggtctcctgcaaggcttctggttacaccttaaccagctatggcatcagctgggtgcgacaggcccctggacaagggcttgagtggatgggatggatcagcgcttacaatggtaacataaactatgcacagaagttccagggcagagtcaccatgaccacagacacatccacgagcacagcctacatggagctgaggagcctgagatctgacgacacggccgtgtattactgtgtgagagatggggaccggtacaactggaaccacagctacatggacgtctggggcaaagggaccacggtcaccgtctcctcaggtggaggcggttcaggcggaggtggctctggcggtggcggatcggacatccagatgacccagtctccatcctcactgtctacatctgtaggagacagagtcaccatcacttgtcgggcgagtcagggcattagcaattatttagcctggtttcagcagaaaccagggaaagcccctaagtccctgatctatgctgcatccagtttgcaaagtggggtcccatcaaagttcagcggcagtggatctgggacagatttctctctcaccattagcagcctgcagcctgaagattttgcaacttattactgccaacagtataatagttacccgatcaccttcggccaagggacacgactggagattaaa

SEQ ID NO: 643 - DNA, 732 bp, synthetic construct
  misc_feature 1..732: note = Synthetic
  source 1..732: mol_type = other DNA
gaggtgcagctgttggagtctgggggagacttggtacagcctggggggtccctgcgactctcctgtgcagcctctggattcacctttagcacctatgccatgacctgggtccgccaggctccagggaaggggctggagtgggtctcagctattagtggtactagtggtagcacatactacgcagactccgtgaagggccggttcaccatctccagagacaattccaagagcacgctgtatctgcacatgaacagcctgagaaccgaggacacggccgtatattactgtgcgagaggcggatataactggcactactactactacatggacgtctggggcaaagggaccacggtcaccgtctcctcaggtggaggcggttcaggcggaggtggctctggcggtggcggatcggaaattgtgctgactcagtctccagactttcagtctgtgactccaaaggagaaagtcaccatcacctgccgggccagtcagagcattggaagtagcttacactggtaccagcagaaaccagatcagtctccaaagctcctcatcaagtatgtttcccagtccatctcaggggtcccctcgaggttcagtggcagtggatctgggacagatttcaccctcaccatcaatagcctggaagctgaagatgctgcagcgtattactgtcatcagagtagtagtttaccgtggacgttcggccaagggaccaaggtggaaatcaaa

SEQ ID NO: 644 - DNA, 735 bp, synthetic construct
  misc_feature 1..735: note = Synthetic
  source 1..735: mol_type = other DNA
gaggtgcagctgttggagtctgggggagacttggtacagcctggggggtccctgcgactctcctgtgcagcctctggattcacctttagcacctatgccatgacctgggtccgccaggctccagggaaggggctggagtgggtctcagctattagtggtactagtggtagcacatactacgcagactccgtgaagggccggttcaccatctccagagacaattccaagagcacgctgtatctgcacatgaacagcctgagaaccgaggacacggccgtatattactgtgcgagaggcggatataactggcactactactactacatggacgtctggggcaaagggaccacggtcaccgtctcctcaggtggaggcggttcaggcggaggtggctctggcggtggcggatcggaaattgtaatgacacagtctccagccaccctgtctttgtctccaggggaaagagccaccctctcctgcagggccagtcagagtgttagcagcagctacttatcctggtaccagcagaaacctgggctggctcccaggctcctcatctatggtgcatccaccagggccactggcatcccagccaggttcagtggcagtgggtctgggacagacttcactctcaccatcagcagcctgcagcctgaagattttgcagtttattactgtcagcaggattataacttacctccgacgttcggccaagggaccaaggtggaaatcaaa

SEQ ID NO: 645 - DNA, 741 bp, synthetic construct
  misc_feature 1..741: note = Synthetic
  source 1..741: mol_type = other DNA
caagtgcagctggtggagagcggcggaggagtggtgcaacctggccggagcctgagactgagctgcgctgccagcggcttcaccttcaacaactacgacatgtactgggtgcggcaggcccctggcaagggcctggaatgggtcgccgtgacatggtatgacggctccaacaagtactacgccgacagcgtgaagggcagattcaccatcagcagagataatagcaagaacaccctgtacctgcagatgaacagcctgcgggccgaggacaccgccgtgtactactgcgctagaggcgacaattggaacgacgagcaccattacttctactacatggacgtgtggggcaaaggcaccaccgtgaccgtgtccagcggcggcggtggatctggaggcggaggctctggaggcggcggctccgagatcgtgctgacacagtctccagatttccagtctgtgacccctaaggaaaaggttacaattacatgcagagcctctcagagcatcggaagctctctgcactggtatcagcagaaacctgatcagagccccaagctgctgatcaaattcgccagccagtccttcagcggcgtccccagccgcttcagcggcagcggcagcggcactgattttacactgaccatccacagcctggaggccgaggacgccgccacctactattgtcaccagagcagctccctgccttggacctttggccagggcacaaaggtggaaatcaag

SEQ ID NO: 646 - DNA, 741 bp, synthetic construct
  misc_feature 1..741: note = Synthetic
  source 1..741: mol_type = other DNA
caagtgcagctggtggagtctggcggcggagtggtgcaacctggaaggagcctgcggctgagctgcgctgccagcggcttcaccttcagcaattacgacatgcactgggtgcggcaggcccctggcaaaggcctggaatgggtcacaatcatctggcatgatgccagcaacaagtactacctggacagcgtcaagggcagattcacaatcagccgggacaacagcaagaacaccctgtacctgcagatgaacagcctgagagccgaggacaccgctgtgtactattgtgccagaggagataattggaacgacgagcaccactacttctactacatggacgtgtggggcaagggcaccaccgtgaccgtttctagcggcggaggcggctccggcggtggaggctccggaggcggcggctctgagatcgtgctgacacagagccctgattttcagagcgtgacacctaaagagaaggtgaccatcacctgcagagccagccagagcatcggctccagcctgcactggtatcagcagaagcccgaccagagcccaaagctgctgatcaagttcgcctcccagtctttttccggcgtgcccagcagattcagcgggagcggctctggcaccgacttcacactgaccatccactctctggaagccgaggatgccgccacctactattgccaccagagcagctctctcccttggaccttcggccagggcacaaaagtggaaattaag

SEQ ID NO: 647 - DNA, 741 bp, synthetic construct
  misc_feature 1..741: note = Synthetic
  source 1..741: mol_type = other DNA
caagtgcagctggtcgaaagcggcggaggcgtggtgcaacctggaagaagcctgagactgagctgcgccgcctctggcttcaccttttctaattacgacatgcactgggtgcggcaggcccctggcaagggtcttgagtgggttaccatcatctggcacgacggcagcaacaagtactacctggacagcgtgaagggcagatttacaatcagcagagataatagcaagaacaccctgtacctgcagatgaacagcctgcgggccgaggacaccgccgtgtactattgtgccagaggcgacaactggaacgacgagcaccactacttctactacatggacgtgtggggcaaaggcaccacagtgaccgtgtccagcggcggcggcggcagcggcggaggaggctctggcggaggcggcagcgagatcgtgctgacccagagccctgacttccagagcgtgacccctaaggaaaaggtgacaattacatgcagggccagccagtccatcggctcttctctgcattggtatcagcagaagcccgatcagtctccaaagctgctgatcaaattcgccagccagagcttcagcggagtccccagccggttcagcggatctggctccggcactgatttcaccctgaccatccacagcctggaggccgaagatgccgctacatactattgccaccagtcctccagcctgccttggacattcggccagggcaccaaggtggagatcaaa

SEQ ID NO: 648 - DNA, 723 bp, synthetic construct
  misc_feature 1..723: note = Synthetic
  source 1..723: mol_type = other DNA
gaggtgcagctgctggaaagcggcggcggactcgtgcaacctggcggctccctgcggctgtcttgcgccgcttctggcttcacattcagcatctacgccatgagctgggtcagacaggcccccggcaaaggcctggaatgggtgtccgccatcagcggcggcggagataccacctactacgccgacagcgtgaagggcagattcaccattagcagagataatagcaagaccacactggacctgcaaatgaacagcctgcgggccgaggacaccgccgtgtactactgtgctaagcacacctcttattacatggacgtgtggggaaaaggcacaaccgtgaccgtgtccagcggcggaggcggctctggcggcggcggcagcggcggtggcggaagccagaccgtggtgacacaggagccttctctgagcgtgagccccggcggcaccgtgaccctgacatgcggcctgagcagcggctccgtctccaccagctactatcctagctggtatcagcagacccctggccaggcccctagaaccctgatctacagcacaaacatccggagctctggagtgccagacagatttagcggaagcatcctgggcaacaaggccgccctgaccatcaccggcgcccaggctgacgacgagagtgattactactgcaagctgtacatgggctctggcatcatcttcggcagcggaacaaaggtgacagttctg

SEQ ID NO: 649 - DNA, 741 bp, synthetic construct
  misc_feature 1..741: note = Synthetic
  source 1..741: mol_type = other DNA
caagtgcagctggtggaaagcggcggtggagtggtgcaacctggcagaagcctgcggctgagctgcgccgcttctggcttcacattttctaattacgacaagcactgggtgcggcaggcccctggcaaaggcctggagtgggtcgctgtgatctggtatgacggcagcaacaagtactacgccgacagcgtgaagggcagattcaccatcagcagagacaacagcaagaacaccctgtacctgcagatgaacagcctgcgggctgaagataccgccatgtactattgtgccaggggcgataattggaacgacgagcaccactacttctactacatggacgtgtggggaaagggcaccacagtgaccgtgtccagcggcggcggcggcagcggcggcggcggcagcggcggcggcggcagcgagatcgtgctgacacagtcccctgactttcagagcgtgacccctaaggaaaaggtcacaattacatgcagagcctctcagagcatcggcagctctctgcactggtatcagcagaaacctgatcagagccccaagctgctgatcaaattcgccagccagagcttctccggcgtgccaagcagattcagcggcagcggcagcggaaccgatttcaccctgaccatccattctctggaggccgaggacgccgccacctactactgccaccagtctagcagcctgccctggaccttcggccagggcacaaaggttgagatcaag

SEQ ID NO: 650 - DNA, 735 bp, synthetic construct
  misc_feature 1..735: note = Synthetic
  source 1..735: mol_type = other DNA
caagtgcagctggtccagtctggagctgaggtgaagaagcccggcgccagcgtgaaggtgtcctgtaaagcctctggttatacattcacaaactatggcttcagctgggttagacaggcccctggacagggcctggactggatgggatggatcagcgcctacaacggctacaccaactacacccagaagctgcagggcagagtgacaatgaccacagataccagcaccaccacagcttacatggaactgaggtccctgcggagcgacgacaccgccgtgtactactgcgccagacggggcctgctgtactactactacagcatggacgtgtggggcaagggcaccaccgtgaccgtgtcttctggcggcggcggaagcggcggcggaggaagcggcggcggcggcagcgagatcgtgctgacccaatctcctgccacactgagcctctccccaggcgagcgggccaccctgagctgcggcgcttctcagagcgtgtacaatagctacctggcctggtatcagcagaaacccggcctggctcctagactgctgatctacgacgccagcctgagagccaccggcgtgcctgatagattcagcggcagcggcagcggaaccgacttcaccctgacaatcagcacactggaacccgaggattttgccgtgtactattgccagcagtacggcggcagccctatgtacacattcggccagggcaccaagctggaaatcaag

SEQ ID NO: 651 - DNA, 723 bp, synthetic construct
  misc_feature 1..723: note = Synthetic
  source 1..723: mol_type = other DNA
gaggtgcagctgctggaaagcggcggcggactggtgcaacctggcggctctctgcggctgtcctgtaccgccagcggcttcaccttcagcagcttcgccatgagctgggtcagacaggctccaggaaaaggcctggaatgggtgtctgccatgagcggatctggcgacaccacatactacgccgattccgtgaagggcagatttaccatcagcagagataatagcaagacaacactgtatctgcagatgaacagcctgagggccgaggacacagccgtgtacagctgcgccaagcacaccacctactacatggacgtgtggggcaaaggcaccaccgtcacagtgtccagcggcggaggcggcagcggaggcggcggcagcggcggaggaggctctcagaccgtggtgacccaggagcctagcctgtccgtgtcccctggcggcaccgtgaccctcacatgcggcctgagcagcggctcagtttccacgagcgactaccccagctggtatcagcaaacccctggacaggctcctcggaccctgatctacagaaccaacacccggagcagcggcgtgcccgatagattctctggctctatcctgggcaacaaggccgctctgaccattacaggcgcccaggccgacgacgagagcgattattactgcgtgctgtacatggacagcggcatcatcttcggctctggaacaaaggtgacagtgctg

SEQ ID NO: 652 - DNA, 723 bp, synthetic construct
  misc_feature 1..723: note = Synthetic
  source 1..723: mol_type = other DNA
gaggtgcagctgctggaaagcggcggcggcctggtgcaacctggcggaagtctgcggctgtcttgtgccgcttctggattcaccttcaacacctacgccatgagctgggtgcggcaggcccctggcaaaggcctggaatgggtctccgccatgagcggctctggcgacacaacctactatgccgacagcgtgaagggcagatttacaatcagcagggataacagcaagaccaccctgtacctgcagatgaacagcctccgggccgaggacaccgccgtgtacagctgcgccaagcacaccagctactacatggacgtgtggggcaaaggcaccaccgtgaccgtgtccagcggaggtggcggcagcggcggcggaggctccggcggcggaggctcacagaccgtcgtgacccaggagccttctctgagcgtgtctccaggaggcacagttactctgacatgcggcctgtctagcggcagcgtgtccaccagcgactaccccagctggtatcagcaaacacctggccaggctcctagaaccctgatctatagaacaaataccagaagcagcggcgtgcccgatagattcagcggaagcatcctgggcaacaaggccgccctgaccatcaccggcgcccaggctgacgacgagtctgattactactgcgtgctgtacatgggcagcggcatcattttcggcagcggaacaaaggtgacagtgctg

SEQ ID NO: 653 - DNA, 723 bp, synthetic construct
  misc_feature 1..723: note = Synthetic
  source 1..723: mol_type = other DNA
gaagtgcagctgctggaaagcggcggcgacctggtgcaacctggcggctccctgagactgagctgcgccgcttctggctttaccttcagcacctacgccatgagctgggtgcggcaggcccctggcaaaggactggagtgggtctccgccatcagcggcagcggcgagaatatctactacgctgatagcgtgaagggcagattcaccattagcagagataattctaagaacaccctgttcctgcagatgaacagcctgcgggccgaagataccgccgtgtactactgcgccaagcacacatcttactacatggacgtgtggggcaaaggcaccaccgtcacagtgtccagcggaggcggcggcagcggcggaggcggcagcggaggaggcggctcacagaccgtggtgacccaagagcccagcttctctgtgtccccaggtggcaccgtgacactgacatgcggcctgtacagcgacagcgtgtctacaagctactatcctagctggtatcagcagacacctggccaggctcctagaaccctgatctacaacaccaacacaagaagcagcggcgtgcccgaccggtttagcggaagcatcctgggcaacaaggccgccctgaccatcaccggcgcccaggccgacgacgagagcgactactattgtgtgctgtacatggtgtccggcatcgtgttcggctctggaacaaaggtgaccgttctg

SEQ ID NO: 654 - DNA, 741 bp, synthetic construct
  misc_feature 1..741: note = Synthetic
  source 1..741: mol_type = other DNA
caagtgcagctggtggaaagcggaggcggagttgtgcaacctggcagatctctgcgcctgtcatgcgccgccagcggctttacattctccagctacggcatgcactgggtgcggcaggcccctggcaaaggcctggaatgggtcgctgtgatctggtacgacggcatcaacaaatactacgccgacagcgtgaagggcagattcaccatcagcagagataatagcaagaacaccctgtacctgcagatgaacagcctgcgggccgaggacactgccgtgtactactgcgccagagagcggctggaacggagatactactactacatggacgtgtggggcaagggcaccaccgtgaccgtgtccagtggtggcggaggatctggcggaggcggctctggcggcggcggcagccagaccgtggtgacccaggagcctagcttcagcgtgtcccccggaggcacagtgaccctgacatgcggcctcagctctggctccgtcagcacctcttactatcctggatggtatcagcagacacctggccaggccccaagaaccctgatctacagcacaaacaccagaagcagcggcgtgcccgatagatttagcggcagcatcctgggcaacaaggccgccctgaccattacaggcgcccaggctgatgacgagagcgactactactgtgtgctgtacatgggcagcggcatgttcatcttcggctctggaaccaaggtgacagtgctg

SEQ ID NO: 655 - DNA, 723 bp, synthetic construct
  misc_feature 1..723: note = Synthetic
  source 1..723: mol_type = other DNA
gaggtgcagctgctggaatctggaggcggcctcgtgcagcctggaggcagcctgaggctgagctgcgctgcttctggcttcaccttcagcagcttcgccatgagctgggtcagacaagctcccggcaaaggcctggaatgggtgtccgccgtgtctggcagcggcgacgatacctactacgccgatagcgtgaaaggaagatttacaatcagccgggacaacagcaagaataccctgtacctgcagatgaactctctgcgggccgaggacaccgccgtgtactattgcgccaagcacaccagctactacctggacgtgtggggcaagggcaccaccgtgaccgtttccagcggcggcggcggcagcggcggaggtggaagcggcggaggcggatctcagacagtggtgacacaggagcctagcttttctgtgtcccctggcggcaccgtgacactgacatgcgccctgagctccgatagcgtgtcaacatcttacttccccagctggtatcggcagacccctggacaggcccctagaaccctgatctacaacaccaacaccagaagcagcggcgtgccagatagattcagcggctccatcctgggcaacaaggccgccctgaccattacaggcgcccaggccgacgacgagagcgactactactgtgtgctgtacatgggcagcggcatcatcttcggctctggcacaaaggtgaccgtcctg

SEQ ID NO: 656 - DNA, 741 bp, synthetic construct
  misc_feature 1..741: note = Synthetic
  source 1..741: mol_type = other DNA
caagtgcagctggtggaaagcggaggcggcgtcgtgcaacctggcagaagcctgagactgagctgcgccgccagcggctttaacttcagcaccttcgacatccactgggtgcggcaggcccctggaaaaggcctggagtgggtcgccctgatctggtatgacggcagctacaagtactacgccgatagcgttaagggcaggttcaccatcagcagagataattctaagaacaccctggacctgagaatgaacagcctccgggctgaggacaccgccgtgtactactgcgccagaaatgacaactggaacgacgagcattactatcactactacatggacgtgtggggcaagggcaccaccgtgacagtgtcctctggcggcggcggcagcggcggcggcggcagcggtggaggcggaagcgagatcgtgctgacccagtctcctgatttccagtccgtgacccctaaggaaaaggtgaccatcacctgtagagcttctcagagcatcggcagctctctgcactggtatcagcagaaacctgaccagagcccaaagctgctgatcaaattcgccagccagtccttcagcggcgtgccctcccggtttagcggctccggcagcggaacagacttcaccctgacaattaacagcctggaagccgaggatgccgccacatacttctgccaccagtcttctagcctgccctggacattcggccagggcacaaaggtggagatcaag

SEQ ID NO: 657 - DNA, 756 bp, synthetic construct
  misc_feature 1..756: note = Synthetic
  source 1..756: mol_type = other DNA
gaggtgcacctgctggaaagcggcggcggcctggtgcagcctggaggctctctgcggctgagctgtgccgcctctggttttaccttcagcagctacgccatgaattgggttagacaggcccctggcaagggcctggaatgggtcagcagcatcagcggctccggcagcagctcttactatgctgatagcgtgaagggcagattcaccattagcagagacaatagcaagaacaccctgtacctgcagatgaacagcctgcgggccgaggacaccgccgtgtactactgcgccagccggggcttcaactcccaataccctcctggctactactactactacatggacgtgtggggaaaaggcacgaccgtgaccgtgtcctccggcggcggcggaagcggcggcggcggctctggcggaggcggcagccagaccgtggtgacacaggagcctagcttcagcgtgtctccaggaggaacagtgaccctgacatgcggcctcagcagcggctctgtgtccaccagctatttccccagctggtatcagcagacccctggccaggctcccaggaccctgatctacatcaccaacacaagaagcagcggcgtgcccgacagattttctggcagcatcatcggcaacaaggccgctctgaccatcacaggcgcccaggccgacgacgagagtgattacttctgcgtgctgtacatgggcagcggaacatgggtgttcggcggaggcacaaagctgaccgtcctg

SEQ ID NO: 658 - DNA, 717 bp, synthetic construct
  misc_feature 1..717: note = Synthetic
  source 1..717: mol_type = other DNA
gaggtgcagctgctggaaagcggcggcggcctggtgcaacctggcggctccctgaggctgagctgcgccgccagcggcttcacctttagcaactacgctatgacctgggtcagacaggcccctggaaagggcctggagtgggtgtccgccatcagcggatctggtattggaacatactacgccgacagcgtgcaaggcagattcacaacaagcagagataattctaagaacaccctgtacctgcagatgaacagcctgcgggccgaggacaccgccgtgtactattgtgccaagggcggctacaactggaaggacgtgtggggcaagggaaccaccgtgaccgtttcttctggcggcggaggcagcggcggcggaggctccggaggcggaggcagcgagatcgtgctgacacagtctcccgactttcagagcgtgacccctaaagagaaggtgacaatcacctgcagagccagccagtcaatcggctctagcctgcactggtatcagcagaaacctgatcagagccctaagctgctgatcaagttcgcctctcagagcttcagcggcgtgccaagccggttcagcggctccggcagcggcaccgacttcaccctgaccatccacagcctggaggccgaagatgccgctacatactactgccaccagtccagcagcctcccctggaccttcggccagggcacaaaggtggaaatcaaa

SEQ ID NO: 659 - DNA, 741 bp, synthetic construct
  misc_feature 1..741: note = Synthetic
  source 1..741: mol_type = other DNA
caagtgcagctggtggagagcggcggcggcgtcgtgcagcccggcagaagcctgcggctgtcttgcgctgccagcggcttcacctttacaaactacgacatgcactgggtcagacaggcccctggcaaaggcctggaatgggtgaccatcatctggcacgacggctccaataagtactacctggacagcgtgcggggcagattcacgatcagcagagataattccaagaacaccctgtacctgcagatgaacagcctgagagccgaggacaccgccgtgtactattgcgccagaggcgacaactggaacgacgagcaccactacttctactacatggacgtgtggggcaagggcaccaccgtgaccgtgtccagcggcggaggcggctccggaggaggcggctctggtggcggcggcagcgagatcgtgctgacccagagccctgacttccagtctgtgacacctaaggaaaaggtgacaatcacctgtagggccagccaaagcatcggcagcagcctgcattggtatcagcagaagcccgatcagtctccaaagctgctgatcaaattcgccagccagagcttcagcggagttcctagccggttcagcggctctggcagcggaacagatttcaccctgacaattcactctctggaggccgaggatgccgccacatattactgccaccagtctagcagcctgccttggacctttggacagggcaccaaggtggaaatcaag

SEQ ID NO: 660 - DNA, 741 bp, synthetic construct
  misc_feature 1..741: note = Synthetic
  source 1..741: mol_type = other DNA
caggtgcagctggttgagagcggcggaggcgtggtgcaacctggaagatctctgcgcctgagctgcgccgccagcggcttcaccttcagcaactacgatatgcactgggtgcggcaggcccctggcaagggcctggaatgggtcaccattatctggcatgacggcagcaacaagtactacctggacagcgtgaaaggcagattcaccatcagcagagacaatagcaagaacaccctgtacctgcagatgaacagcctgcgggccgaggacaccgccgtgtactattgcgccagaggcgacaactggaacgacgagcaccactacttctactatatggacgtgtggggcaaaggcacaaccgtgaccgtcagcagcggcggcggaggcagcggaggcggaggctctggcggcggtggcagtgaaatcgtgctgacccagagccccgctacactgagcctctcccctggcgagcgggccacactgtcttgtagagcctctcagtccgtgtccagcagcctggcctggtatcagcagaagcccggccaggctccaagactgctgatctacgacgccagcaatagagccaccggcatccccgcccggttttccggcagcggatctggaacagattttaccctgaccatcagcagcctggaacctgaggatttcgccgtgtactactgccagcaaagaagcaactggcctctgacattcggcggcggcacaaaggtggaaatcaag

SEQ ID NO: 661 - DNA, 729 bp, synthetic construct
  misc_feature 1..729: note = Synthetic
  source 1..729: mol_type = other DNA
gaagtgcagctggtcgagagcggcggcggcgtggtgcggcctggcgggtccctgagactgagctgcgccgcctctggcttcaccttcgacgactatggcatgagctgggtcagacaggcccctggaaaaggcctggaatgggtgtccggaatcaactggaatggcggcagtacaggctacgtggacagcgtgaagggcagattcaccatcagccgggacaacgccaagaacagcctgtatctgcagatgaacagcctgcgggccgaggacaccgccctgtaccactgtgccagacctgtgacaaccgactactactactacatggacgtgtggggcaagggcaccaccgtgaccgtgtcttccggcggaggaggcagcggcggcggcggcagcggcggaggcggcagcgagatcgtgctgacacagagccccggaacactgagcctgagccctggcgagcgggctacactgtcttgcagagcttctcagagcgtttcctccagctacctggcctggtatcagcaaaagcccggccaagctccaagactgctgatctacggcgccagctctagggccaccggcattcctgatagattcagcggctctggcagcggaacagattttaccctgaccatcagcagactggagcctgaggatttcgccgtgtactactgccagcagtacggatctagctggacctttggccagggcaccaaggtggaaatcaaa

SEQ ID NO: 662 - DNA, 753 bp, synthetic construct
  misc_feature 1..753: note = Synthetic
  source 1..753: mol_type = other DNA
gaggtgcagctgctggagagcggaggaggcctggtgcaacctggcggcagcctgcggctgagctgcgccgcttccggcttcaccttcagcagctacgccatgagctgggtgcggcaggctcctggaaaaggcctggagtgggtcagcgccatcagcggcagcggaggctcaacatactacgccgacagcgtgaagggcagattcaccatcagccgcgacaactctaagaacaccctgtacctgcagatgaactctctgagagccgaggacaccgccgtgtactattgtgccaagaagggcacaagctacaactggaatgatgtgcactactactactactattatatggacgtgtggggcaaaggcacaaccgtgaccgtgtccagcggcggtggaggcagcggaggcggcggaagcggcggcggcggcagtgaaattgtgctgacccagagccccggcaccctgagcctgtctccaggcgagcgggctaccctgtcctgcagagccagccagtctgtttccagctcttacctggcctggtatcagcaaaagcctggacaggcccctagactgctgatctacggcgcctctagcagggctacaggcatccctgatagatttagcggcagcggctctggcaccgacttcaccctgaccatctccagactggaacccgaggatttcgccgtgtactactgccagcagtacggcagcagctggacatttggccagggcacaaaggtggaaatcaag

SEQ ID NO: 663 - DNA, 735 bp, synthetic construct
  misc_feature 1..735: note = Synthetic
  source 1..735: mol_type = other DNA
cagctgcaactgcaggagagcggtcctggactggtgaagccttctgagacactgagcctgacctgcaccgtgtccggcggctctatcagctcctccagctactactggggctggatcagacagccacctggcaagggcctggaatggatcggcagcatttactattctggctcaacatactacaaccccagccttaaaagcagagtgacaatcagcgtggacaccagcaagaaccagttcagcctgaagctgtcctctgtgaccgccgctgatactgccgtttactactgcaccaccggaacaacagcttattactactactactacatggacgtgtggggaaagggcaccacagtgaccgtgtccagcggcggaggcggcagcggcggaggaggatctggcggcggcggcagcgagatcgtgctgacccagtctccaggcaccctgagcctgagccccggcgagcgggccacactgagctgcagagcctctcagagcgtcagctctagctacctggcctggtatcagcaaaaacctggccaggcccctagactgctgatctacggcgccagcagccgggccaccggcatccctgatagattcagcggatctggcagcggcaccgactttaccctcaccatcagcagactggaacccgaggacttcgccgtgtactattgtcagcagtacggcagcagctggacattcggccagggcaccaaggtggaaatcaag

SEQ ID NO: 664 - DNA, 732 bp, synthetic construct
  misc_feature 1..732: note = Synthetic
  source 1..732: mol_type = other DNA
gaggtgcagctgctggagagcggtggaggcctggtgcaacctggcggctccctgcggctgagctgcgccgccagcggcttcacctttagctcttacgccatgacctgggtcagacaggcccctggcaagggactggaatgggtgtctgccatcagcggcagcggaggatctacatactacgctgatagcgtgaagggcagatttacaatcagccgcgacaatagcaagaacaccctgtacctgcagatgaacagcctgagagccgaggacaccgccgtgtactactgcgctagaggcggctacaactggcactactactactacatggacgtgtggggcaaaggaaccaccgtgaccgtgtccagcggcggcggcggctctggcggaggcggctctggcggcggcggaagcgagatcgtgctgacccagtctcccggaacactctccctgtccccaggcgagcgggctacactgagctgccgggccagccagagcgtgtcctcgtcttatctggcctggtatcagcagaaacctggccaagcccctagactgctgatctacggcgccagcagccgggccacaggcatccccgatagattcagcggcagcggaagcggcaccgacttcaccctgacaatcagcagactggaacctgaggacttcgccgtgtactattgtcagcagtacggcagcagctggaccttcggccagggcaccaaggttgaaattaag

SEQ ID NO: 665 - DNA, 744 bp, synthetic construct
  misc_feature 1..744: note = Synthetic
  source 1..744: mol_type = other DNA
caagtgcagctggtggagagcggaggcggagtcgtgcaacctggcagaagcctgagactgagctgcgccgcttctggcttcaccttttctagctacgacatgcactgggtgcggcaggcccctggaaaaggcctggaatgggtcagcgtgatctggtatgacggctccaacaagaagtacggcgacagcgccaagggcaggttcaccattagccgggacaattctaagaacaccctggacctgcagatgaacagcctgcgggctgaggacaccgccgtgtactattgtgccagaggcgataattggaacgacgagggcggctactactactactacatggacgtgtggggcaagggaacaaccgtgacagtgtccagcggcggcggcggaagcggcggcggcggatctggcggaggcggcagcgagatcgtgctgacccagagccccgacttccagtccgtgacccctaaggaaaaggtgaccatcacatgcagagccagccagaacatcggcagcagcctgcactggtatcagcagaaacctgatcagtctccaaagctgctgatcaaattcgcctctcagagcatcagcggtgttcctagcagattcagcggctccggcagcggcactgattttacactgaccatcaacagcctggaggccgaggatgccgctgcctactactgccaccagagctctagcctgccctggaccttcggccagggcacaaaggtggaaatcaag

SEQ ID NO: 666 - DNA, 744 bp, synthetic construct
  misc_feature 1..744: note = Synthetic
  source 1..744: mol_type = other DNA
caagtgcagctggtggagagcggcggcggcgtggtgcagcccggacgctccctgcggctgagctgcgccgccagcggctttaccttctctagctacgatatgcactgggtcagacaggctcctggcaaaggcctggaatgggtgtccgtgatctggtacgacggctccaacaagaagtacggcgacagcgccaagggcagattcaccatctctcgggacaatagcaagaacacactggacctgcagatgaactctctgagagccgaggacaccgccgtgtactactgcgccagaggcgataattggaacgacgagggcggttattactactactatatggacgtgtggggaaaaggcacaaccgtgaccgtttccagcggcggaggcggcagcggcggcggcggatctggcggaggcggcagcgacattcagatgacacagagccccagcagcctctccacctctgtgggcgatagagtgaccatcacatgccgggccagccagggcatcagcaactacctggcctggttccagcagaagcctggaaaggcccctaagagcctgatctacgccgccagcagcctgcagagcggagtgccatctaagttcagcggcagcggatctggcaccgacttcagcctgaccatcagctctctgcagcctgaggattttgccacatactactgtcagcagtacaacagctaccctatcacattcggccagggcaccagactggaaatcaag

SEQ ID NO: 667 - DNA, 735 bp, synthetic construct
  misc_feature 1..735: note = Synthetic
  source 1..735: mol_type = other DNA
caagtgcagctggtgcagtctggagccgaggtgaaaaagagcggcgcctcagtgaaggtgtcctgcaaggccagcggctacacactgaccagctacggcatctcttgggttagacaggcccctggacaaggcctggaatggatgggctggatcagcgcctacaacggcaacatcaactacgcccagaaattccagggcagagtgacaatgaccacagacaccagcacctccaccgcttacatggaactgcggagcctgagaagcgacgacaccgccgtgtactactgtgtgcgggacggcgatagatacaattggaaccacagctatatggacgtgtggggcaagggcacaacagtcaccgtgtcttctggaggcggaggcagcggaggcggcggcagcggcggcggcggcagcgagatcgtgctgacacagagccctgatttccaaagcgtgacccctaaggaaaaggtgaccatcacatgcagagcctctcagaacattggaagtagcctgcactggtatcagcagaaacccgatcagtccccaaagctgctgatcaagttcgccagccagagcatcagcggagtgcccagccggttcagcggctctggctctggcaccgacttcaccctgaccatcaatagcctggaggccgaggacgccgctgcttattactgccaccagagcagctccctgccttggacctttggccagggcaccaaggtcgagatcaag

SEQ ID NO: 668 - DNA, 735 bp, synthetic construct
  misc_feature 1..735: note = Synthetic
  source 1..735: mol_type = other DNA
caagtgcagctggttcagagcggagccgaggtgaaaaagtccggcgccagcgtgaaggtgtcatgcaaggcctctggctacaccctgacctcctacggcatcagctgggtccggcaggcccctggccagggcctggagtggatgggctggatcagcgcttataatggcaacatcaattacgcccagaagttccaaggcagagtgacaatgaccacagataccagcaccagcacagcttacatggaactgagatccctgcggagcgacgacaccgccgtgtactattgtgtgcgggacggcgacagatacaactggaaccacagctacatggacgtgtggggcaagggcaccaccgtgaccgtgtccagcggcggcggcggctctggaggcggcggatctggcggaggaggttccgacatccagatgacacagagccccagcagcctgagcacctctgtgggcgatagagtgaccatcacctgcagagccagccagggcatcagcaactacctggcctggttccagcagaaacctggaaaggcccctaagagcctgatctacgccgcttcttctctgcaaagcggcgtgccaagcaagttcagcggcagcggcagcggaacagacttcagcctgacaatttctagcctccagcctgaggattttgccacatactactgccagcagtacaacagctaccccatcaccttcggccagggcacaagactggaaatcaag

SEQ ID NO: 669 - DNA, 732 bp, synthetic construct
  misc_feature 1..732: note = Synthetic
  source 1..732: mol_type = other DNA
gaggtgcagctgctggaaagcggaggcgacctggtgcaacctggaggcagcctgcggctgagctgcgccgcttctggcttcacctttagcacctacgccatgacatgggttagacaggcccctggcaagggcctggagtgggtcagcgccatcagcggcaccagcggctctacctactacgccgacagcgtgaagggcagattcaccatctccagagataattcaaagagcaccctgtacctgcacatgaacagcctgagaaccgaggacaccgccgtgtactattgcgctagaggcggctacaactggcactactactactacatggacgtgtggggaaaaggcacaacagtgaccgtgtcttctggcggaggaggcagcggcggtggcggcagtggcggaggcggcagcgagatcgtgctgacacagtcccctgacttccagagcgtgacccctaaggaaaaggtgacaatcacctgccgggcctctcagagcatcggcagcagcctgcactggtatcagcagaagcccgatcagtccccaaagctgctgatcaaatacgtgtcccaatctatcagcggcgtgcccagccggttttctggcagcggcagcggaacagacttcaccctgaccattaactccctggaggccgaggatgccgctgcctactattgtcaccagagcagcagcctgccttggacattcggccagggcaccaaggtggaaatcaag

SEQ ID NO: 670 - DNA, 735 bp, synthetic construct
  misc_feature 1..735: note = Synthetic
  source 1..735: mol_type = other DNA
gaggtgcaactgctggaaagcggaggagatctggtgcagcccggcggctccctgcgcctgtcttgcgccgccagcggctttacattcagcacctacgccatgacatgggttagacaggcccctggaaaaggcctggaatgggtgtccgccatcagcggaaccagcggcagcacatactacgccgacagcgtgaagggcagattcaccatcagccgggacaacagcaagtccaccctgtacctgcacatgaacagcctgcggaccgaggacaccgccgtgtactattgcgctagaggcggttataattggcactactactactacatggacgtgtggggcaagggcacgaccgtgacagtgtccagcggcggcggaggcagcggcggaggaggctctggcggcggcggcagcgagatcgtgatgacccagtctcctgctacactgagcctgagccccggcgagcgggccaccctgagttgtagagccagccagagcgtgtcttctagctacctgagctggtatcagcaaaaacctggccttgctccaagactgctgatctacggcgcctctacaagagccaccggcatccccgccagatttagcggctctggcagcggcaccgacttcaccctgaccatctccagcctccagcctgaggatttcgccgtctactactgccagcaggattacaacctgcctcctaccttcggccagggcacaaaggtggaaattaag

SEQ ID NO: 671 - protein, 247 aa, synthetic construct
  REGION 1..247: note = Synthetic
EIVLTQSPDFQSVTPKEKVTITCRASQSIGSSLHWYQQKPDQSPKLLIKFASQSFSGVPSRFSGSGSGTDFTLTIHSLEAEDAATYYCHQSSSLPWTFGQGTKVEIKGGGGSGGGGSGGGGSQVQLVESGGGVVQPGRSLRLSCAASGFTFNNYDMYWVRQAPGKGLEWVAVTWYDGSNKYYADSVKGRFTISRDNSKNTLYLQMNSLRAEDTAVYYCARGDNWNDEHHYFYYMDVWGKGTTVTVSS

SEQ ID NO: 672 - protein, 247 aa, synthetic construct
  REGION 1..247: note = Synthetic
EIVLTQSPDFQSVTPKEKVTITCRASQSIGSSLHWYQQKPDQSPKLLIKFASQSFSGVPSRFSGSGSGTDFTLTIHSLEAEDAATYYCHQSSSLPWTFGQGTKVEIKGGGGSGGGGSGGGGSQVQLVESGGGVVQPGRSLRLSCAASGFTFSNYDMHWVRQAPGKGLEWVTIIWHDASNKYYLDSVKGRFTISRDNSKNTLYLQMNSLRAEDTAVYYCARGDNWNDEHHYFYYMDVWGKGTTVTVSS

SEQ ID NO: 673 - protein, 247 aa, synthetic construct
  REGION 1..247: note = Synthetic
EIVLTQSPDFQSVTPKEKVTITCRASQSIGSSLHWYQQKPDQSPKLLIKFASQSFSGVPSRFSGSGSGTDFTLTIHSLEAEDAATYYCHQSSSLPWTFGQGTKVEIKGGGGSGGGGSGGGGSQVQLVESGGGVVQPGRSLRLSCAASGFTFSNYDMHWVRQAPGKGLEWVTIIWHDGSNKYYLDSVKGRFTISRDNSKNTLYLQMNSLRAEDTAVYYCARGDNWNDEHHYFYYMDVWGKGTTVTVSS

SEQ ID NO: 674 - protein, 241 aa, synthetic construct
  REGION 1..241: note = Synthetic
QTVVTQEPSLSVSPGGTVTLTCGLSSGSVSTSYYPSWYQQTPGQAPRTLIYSTNIRSSGVPDRFSGSILGNKAALTITGAQADDESDYYCKLYMGSGIIFGSGTKVTVLGGGGSGGGGSGGGGSEVQLLESGGGLVQPGGSLRLSCAASGFTFSIYAMSWVRQAPGKGLEWVSAISGGGDTTYYADSVKGRFTISRDNSKTTLDLQMNSLRAEDTAVYYCAKHTSYYMDVWGKGTTVTVSS

SEQ ID NO: 675 - protein, 247 aa, synthetic construct
  REGION 1..247: note = Synthetic
EIVLTQSPDFQSVTPKEKVTITCRASQSIGSSLHWYQQKPDQSPKLLIKFASQSFSGVPSRFSGSGSGTDFTLTIHSLEAEDAATYYCHQSSSLPWTFGQGTKVEIKGGGGSGGGGSGGGGSQVQLVESGGGVVQPGRSLRLSCAASGFTFSNYDKHWVRQAPGKGLEWVAVIWYDGSNKYYADSVKGRFTISRDNSKNTLYLQMNSLRAEDTAMYYCARGDNWNDEHHYFYYMDVWGKGTTVTVSS

SEQ ID NO: 676 - protein, 245 aa, synthetic construct
  REGION 1..245: note = Synthetic
EIVLTQSPATLSLSPGERATLSCGASQSVYNSYLAWYQQKPGLAPRLLIYDASLRATGVPDRFSGSGSGTDFTLTISTLEPEDFAVYYCQQYGGSPMYTFGQGTKLEIKGGGGSGGGGSGGGGSQVQLVQSGAEVKKPGASVKVSCKASGYTFTNYGFSWVRQAPGQGLDWMGWISAYNGYTNYTQKLQGRVTMTTDTSTTTAYMELRSLRSDDTAVYYCARRGLLYYYYSMDVWGKGTTVTVSS

SEQ ID NO: 677 - protein, 241 aa, synthetic construct
  REGION 1..241: note = Synthetic
QTVVTQEPSLSVSPGGTVTLTCGLSSGSVSTSDYPSWYQQTPGQAPRTLIYRTNTRSSGVPDRFSGSILGNKAALTITGAQADDESDYYCVLYMDSGIIFGSGTKVTVLGGGGSGGGGSGGGGSEVQLLESGGGLVQPGGSLRLSCTASGFTFSSFAMSWVRQAPGKGLEWVSAMSGSGDTTYYADSVKGRFTISRDNSKTTLYLQMNSLRAEDTAVYSCAKHTTYYMDVWGKGTTVTVSS

SEQ ID NO: 678 - protein, 241 aa, synthetic construct
  REGION 1..241: note = Synthetic
QTVVTQEPSLSVSPGGTVTLTCGLSSGSVSTSDYPSWYQQTPGQAPRTLIYRTNTRSSGVPDRFSGSILGNKAALTITGAQADDESDYYCVLYMGSGIIFGSGTKVTVLGGGGSGGGGSGGGGSEVQLLESGGGLVQPGGSLRLSCAASGFTFNTYAMSWVRQAPGKGLEWVSAMSGSGDTTYYADSVKGRFTISRDNSKTTLYLQMNSLRAEDTAVYSCAKHTSYYMDVWGKGTTVTVSS

SEQ ID NO: 679 - protein, 241 aa, synthetic construct
  REGION 1..241: note = Synthetic
QTVVTQEPSFSVSPGGTVTLTCGLYSDSVSTSYYPSWYQQTPGQAPRTLIYNTNTRSSGVPDRFSGSILGNKAALTITGAQADDESDYYCVLYMVSGIVFGSGTKVTVLGGGGSGGGGSGGGGSEVQLLESGGDLVQPGGSLRLSCAASGFTFSTYAMSWVRQAPGKGLEWVSAISGSGENIYYADSVKGRFTISRDNSKNTLFLQMNSLRAEDTAVYYCAKHTSYYMDVWGKGTTVTVSS

SEQ ID NO: 680 - protein, 247 aa, synthetic construct
  REGION 1..247: note = Synthetic
QTVVTQEPSFSVSPGGTVTLTCGLSSGSVSTSYYPGWYQQTPGQAPRTLIYSTNTRSSGVPDRFSGSILGNKAALTITGAQADDESDYYCVLYMGSGMFIFGSGTKVTVLGGGGSGGGGSGGGGSQVQLVESGGGVVQPGRSLRLSCAASGFTFSSYGMHWVRQAPGKGLEWVAVIWYDGINKYYADSVKGRFTISRDNSKNTLYLQMNSLRAEDTAVYYCARERLERRYYYYMDVWGKGTTVTVSS

SEQ ID NO: 681 - protein, 241 aa, synthetic construct
  REGION 1..241: note = Synthetic
QTVVTQEPSFSVSPGGTVTLTCALSSDSVSTSYFPSWYRQTPGQAPRTLIYNTNTRSSGVPDRFSGSILGNKAALTITGAQADDESDYYCVLYMGSGIIFGSGTKVTVLGGGGSGGGGSGGGGSEVQLLESGGGLVQPGGSLRLSCAASGFTFSSFAMSWVRQAPGKGLEWVSAVSGSGDDTYYADSVKGRFTISRDNSKNTLYLQMNSLRAEDTAVYYCAKHTSYYLDVWGKGTTVTVSS

SEQ ID NO: 682 - protein, 247 aa, synthetic construct
  REGION 1..247: note = Synthetic
EIVLTQSPDFQSVTPKEKVTITCRASQSIGSSLHWYQQKPDQSPKLLIKFASQSFSGVPSRFSGSGSGTDFTLTINSLEAEDAATYFCHQSSSLPWTFGQGTKVEIKGGGGSGGGGSGGGGSQVQLVESGGGVVQPGRSLRLSCAASGFNFSTFDIHWVRQAPGKGLEWVALIWYDGSYKYYADSVKGRFTISRDNSKNTLDLRMNSLRAEDTAVYYCARNDNWNDEHYYHYYMDVWGKGTTVTVSS

SEQ ID NO: 683 - protein, 252 aa, synthetic construct
  REGION 1..252: note = Synthetic
QTVVTQEPSFSVSPGGTVTLTCGLSSGSVSTSYFPSWYQQTPGQAPRTLIYITNTRSSGVPDRFSGSIIGNKAALTITGAQADDESDYFCVLYMGSGTWVFGGGTKLTVLGGGGSGGGGSGGGGSEVHLLESGGGLVQPGGSLRLSCAASGFTFSSYAMNWVRQAPGKGLEWVSSISGSGSSSYYADSVKGRFTISRDNSKNTLYLQMNSLRAEDTAVYYCASRGFNSQYPPGYYYYYMDVWGKGTTVTVSS

SEQ ID NO: 684 - protein, 239 aa, synthetic construct
  REGION 1..239: note = Synthetic
EIVLTQSPDFQSVTPKEKVTITCRASQSIGSSLHWYQQKPDQSPKLLIKFASQSFSGVPSRFSGSGSGTDFTLTIHSLEAEDAATYYCHQSSSLPWTFGQGTKVEIKGGGGSGGGGSGGGGSEVQLLESGGGLVQPGGSLRLSCAASGFTFSNYAMTWVRQAPGKGLEWVSAISGSGIGTYYADSVQGRFTTSRDNSKNTLYLQMNSLRAEDTAVYYCAKGGYNWKDVWGKGTTVTVSS

SEQ ID NO: 685 - protein, 247 aa, synthetic construct
  REGION 1..247: note = Synthetic
EIVLTQSPDFQSVTPKEKVTITCRASQSIGSSLHWYQQKPDQSPKLLIKFASQSFSGVPSRFSGSGSGTDFTLTIHSLEAEDAATYYCHQSSSLPWTFGQGTKVEIKGGGGSGGGGSGGGGSQVQLVESGGGVVQPGRSLRLSCAASGFTFTNYDMHWVRQAPGKGLEWVTIIWHDGSNKYYLDSVRGRFTISRDNSKNTLYLQMNSLRAEDTAVYYCARGDNWNDEHHYFYYMDVWGKGTTVTVSS

SEQ ID NO: 686 - protein, 247 aa, synthetic construct
  REGION 1..247: note = Synthetic
EIVLTQSPATLSLSPGERATLSCRASQSVSSSLAWYQQKPGQAPRLLIYDASNRATGIPARFSGSGSGTDFTLTISSLEPEDFAVYYCQQRSNWPLTFGGGTKVEIKGGGGSGGGGSGGGGSQVQLVESGGGVVQPGRSLRLSCAASGFTFSNYDMHWVRQAPGKGLEWVTIIWHDGSNKYYLDSVKGRFTISRDNSKNTLYLQMNSLRAEDTAVYYCARGDNWNDEHHYFYYMDVWGKGTTVTVSS

SEQ ID NO: 687 - protein, 243 aa, synthetic construct
  REGION 1..243: note = Synthetic
EIVLTQSPGTLSLSPGERATLSCRASQSVSSSYLAWYQQKPGQAPRLLIYGASSRATGIPDRFSGSGSGTDFTLTISRLEPEDFAVYYCQQYGSSWTFGQGTKVEIKGGGGSGGGGSGGGGSEVQLVESGGGVVRPGGSLRLSCAASGFTFDDYGMSWVRQAPGKGLEWVSGINWNGGSTGYVDSVKGRFTISRDNAKNSLYLQMNSLRAEDTALYHCARPVTTDYYYYMDVWGKGTTVTVSS

SEQ ID NO: 688 - protein, 251 aa, synthetic construct
  REGION 1..251: note = Synthetic
EIVLTQSPGTLSLSPGERATLSCRASQSVSSSYLAWYQQKPGQAPRLLIYGASSRATGIPDRFSGSGSGTDFTLTISRLEPEDFAVYYCQQYGSSWTFGQGTKVEIKGGGGSGGGGSGGGGSEVQLLESGGGLVQPGGSLRLSCAASGFTFSSYAMSWVRQAPGKGLEWVSAISGSGGSTYYADSVKGRFTISRDNSKNTLYLQMNSLRAEDTAVYYCAKKGTSYNWNDVHYYYYYYMDVWGKGTTVTVSS

SEQ ID NO: 689 - protein, 245 aa, synthetic construct
  REGION 1..245: note = Synthetic
EIVLTQSPGTLSLSPGERATLSCRASQSVSSSYLAWYQQKPGQAPRLLIYGASSRATGIPDRFSGSGSGTDFTLTISRLEPEDFAVYYCQQYGSSWTFGQGTKVEIKGGGGSGGGGSGGGGSQLQLQESGPGLVKPSETLSLTCTVSGGSISSSSYYWGWIRQPPGKGLEWIGSIYYSGSTYYNPSLKSRVTISVDTSKNQFSLKLSSVTAADTAVYYCTTGTTAYYYYYYMDVWGKGTTVTVSS

SEQ ID NO: 690 - protein, 244 aa, synthetic construct
  REGION 1..244: note = Synthetic
EIVLTQSPGTLSLSPGERATLSCRASQSVSSSYLAWYQQKPGQAPRLLIYGASSRATGIPDRFSGSGSGTDFTLTISRLEPEDFAVYYCQQYGSSWTFGQGTKVEIKGGGGSGGGGSGGGGSEVQLLESGGGLVQPGGSLRLSCAASGFTFSSYAMTWVRQAPGKGLEWVSAISGSGGSTYYADSVKGRFTISRDNSKNTLYLQMNSLRAEDTAVYYCARGGYNWHYYYYMDVWGKGTTVTVSS

SEQ ID NO: 691 - protein, 248 aa, synthetic construct
  REGION 1..248: note = Synthetic
EIVLTQSPDFQSVTPKEKVTITCRASQNIGSSLHWYQQKPDQSPKLLIKFASQSISGVPSRFSGSGSGTDFTLTINSLEAEDAAAYYCHQSSSLPWTFGQGTKVEIKGGGGSGGGGSGGGGSQVQLVESGGGVVQPGRSLRLSCAASGFTFSSYDMHWVRQAPGKGLEWVSVIWYDGSNKKYGDSAKGRFTISRDNSKNTLDLQMNSLRAEDTAVYYCARGDNWNDEGGYYYYYMDVWGKGTTVTVSS

SEQ ID NO: 692 - protein, 248 aa, synthetic construct
  REGION 1..248: note = Synthetic
DIQMTQSPSSLSTSVGDRVTITCRASQGISNYLAWFQQKPGKAPKSLIYAASSLQSGVPSKFSGSGSGTDFSLTISSLQPEDFATYYCQQYNSYPITFGQGTRLEIKGGGGSGGGGSGGGGSQVQLVESGGGVVQPGRSLRLSCAASGFTFSSYDMHWVRQAPGKGLEWVSVIWYDGSNKKYGDSAKGRFTISRDNSKNTLDLQMNSLRAEDTAVYYCARGDNWNDEGGYYYYYMDVWGKGTTVTVSS

SEQ ID NO: 693 - protein, 245 aa, synthetic construct
  REGION 1..245: note = Synthetic
EIVLTQSPDFQSVTPKEKVTITCRASQNIGSSLHWYQQKPDQSPKLLIKFASQSISGVPSRFSGSGSGTDFTLTINSLEAEDAAAYYCHQSSSLPWTFGQGTKVEIKGGGGSGGGGSGGGGSQVQLVQSGAEVKKSGASVKVSCKASGYTLTSYGISWVRQAPGQGLEWMGWISAYNGNINYAQKFQGRVTMTTDTSTSTAYMELRSLRSDDTAVYYCVRDGDRYNWNHSYMDVWGKGTTVTVSS

SEQ ID NO: 694 - protein, 245 aa, synthetic construct
  REGION 1..245: note = Synthetic
DIQMTQSPSSLSTSVGDRVTITCRASQGISNYLAWFQQKPGKAPKSLIYAASSLQSGVPSKFSGSGSGTDFSLTISSLQPEDFATYYCQQYNSYPITFGQGTRLEIKGGGGSGGGGSGGGGSQVQLVQSGAEVKKSGASVKVSCKASGYTLTSYGISWVRQAPGQGLEWMGWISAYNGNINYAQKFQGRVTMTTDTSTSTAYMELRSLRSDDTAVYYCVRDGDRYNWNHSYMDVWGKGTTVTVSS

SEQ ID NO: 695 - protein, 244 aa, synthetic construct
  REGION 1..244: note = Synthetic
EIVLTQSPDFQSVTPKEKVTITCRASQSIGSSLHWYQQKPDQSPKLLIKYVSQSISGVPSRFSGSGSGTDFTLTINSLEAEDAAAYYCHQSSSLPWTFGQGTKVEIKGGGGSGGGGSGGGGSEVQLLESGGDLVQPGGSLRLSCAASGFTFSTYAMTWVRQAPGKGLEWVSAISGTSGSTYYADSVKGRFTISRDNSKSTLYLHMNSLRTEDTAVYYCARGGYNWHYYYYMDVWGKGTTVTVSS

SEQ ID NO: 696 - protein, 245 aa, synthetic construct
  REGION 1..245: note = Synthetic
EIVMTQSPATLSLSPGERATLSCRASQSVSSSYLSWYQQKPGLAPRLLIYGASTRATGIPARFSGSGSGTDFTLTISSLQPEDFAVYYCQQDYNLPPTFGQGTKVEIKGGGGSGGGGSGGGGSEVQLLESGGDLVQPGGSLRLSCAASGFTFSTYAMTWVRQAPGKGLEWVSAISGTSGSTYYADSVKGRFTISRDNSKSTLYLHMNSLRTEDTAVYYCARGGYNWHYYYYMDVWGKGTTVTVSS

SEQ ID NO: 697 - DNA, 741 bp, synthetic construct
  misc_feature 1..741: note = Synthetic
  source 1..741: mol_type = other DNA
gaaattgtgctgactcagtctccagactttcagtctgtgactccaaaggagaaagtcaccatcacctgccgggccagtcagagcattggtagtagcttacactggtaccagcagaaaccagatcagtctccaaagctcctcatcaagtttgcttcccagtccttctcaggggtcccctcgaggttcagtggcagtggatctgggacagatttcaccctcaccatccatagcctggaagctgaagatgctgcaacgtattactgtcatcagagtagtagtttaccgtggacgttcggccaagggaccaaggtggaaatcaaaggtggaggcggttcaggcggaggtggctctggcggtggcggatcgcaggtgcagctggtggagtctgggggaggcgtggtccagcctgggaggtccctgagactctcctgtgcagcgtctggattcaccttcaataattatgacatgtactgggtccgccaggccccaggcaaggggctggagtgggtggcagttacatggtatgatggaagtaataaatactatgcagactccgtgaagggccgattcaccatctccagagacaattccaagaacacgctgtatctgcaaatgaacagcctgagagccgaggacacggctgtgtattactgtgcgagaggtgacaactggaatgacgaacaccactatttttactacatggacgtctggggcaaagggaccacggtcaccgtctcctca

SEQ ID NO: 698 - DNA, 741 bp, synthetic construct
  misc_feature 1..741: note = Synthetic
  source 1..741: mol_type = other DNA
gaaattgtgctgactcagtctccagactttcagtctgtgactccaaaggagaaagtcaccatcacctgccgggccagtcagagcattggtagtagcttacactggtaccagcagaaaccagatcagtctccaaagctcctcatcaagtttgcttcccagtccttctcaggggtcccctcgaggttcagtggcagtggatctgggacagatttcaccctcaccatccatagcctggaagctgaagatgctgcaacgtattactgtcatcagagtagtagtttaccgtggacgttcggccaagggaccaaggtggaaatcaaaggtggaggcggttcaggcggaggtggctctggcggtggcggatcgcaggtgcagctggtggagtctgggggaggcgtggtccagcctgggaggtccctgagactctcctgtgcagcgtctgggttcaccttcagtaactatgacatgcactgggtccgccaggccccaggcaaggggctggagtgggtgacaattatatggcatgatgcaagtaataaatattatttagactccgtgaagggccgattcaccatctccagagacaattccaagaacacgctgtatctgcaaatgaacagcctgagagccgaggacacggctgtgtattactgtgcgagaggtgacaactggaacgacgaacaccactacttctactacatggacgtctggggcaaagggaccacggtcaccgtctcctca

SEQ ID NO: 699 - DNA, 741 bp, synthetic construct
  misc_feature 1..741: note = Synthetic
  source 1..741: mol_type = other DNA
gaaattgtgctgactcagtctccagactttcagtctgtgactccaaaggagaaagtcaccatcacctgccgggccagtcagagcattggtagtagcttacactggtaccagcagaaaccagatcagtctccaaagctcctcatcaagtttgcttcccagtccttctcaggggtcccctcgaggttcagtggcagtggatctgggacagatttcaccctcaccatccatagcctggaagctgaagatgctgcaacgtattactgtcatcagagtagtagtttaccgtggacgttcggccaagggaccaaggtggaaatcaaaggtggaggcggttcaggcggaggtggctctggcggtggcggatcgcaggtgcagctggtggagtctgggggaggcgtggtccagcctgggaggtccctgagactctcctgtgcagcgtctgggttcaccttcagtaactatgacatgcactgggtccgccaggccccaggcaaggggctggagtgggtgacaattatatggcatgatggaagtaataaatattatttagactccgtgaagggccgattcaccatctccagagacaattccaagaacacgctgtatctgcaaatgaacagcctgagagccgaggacacggctgtgtattactgtgcgagaggtgacaactggaacgacgaacaccactacttctactacatggacgtctggggcaaagggaccacggtcaccgtctcctca

SEQ ID NO: 700 - DNA, 723 bp, synthetic construct
  misc_feature 1..723: note = Synthetic
  source 1..723: mol_type = other DNA
cagactgtggtgacccaggagccatcgctctcagtgtcccctggagggacagtcacactcacttgtggcttgagctctggctcagtctctactagttactaccccagctggtaccagcagaccccaggccaggctccacgcacgctcatctacagcacaaatattcggtcttctggggtccctgatcgcttctctggctccatccttgggaacaaagctgccctcaccatcacgggggcccaggcagatgatgaatctgattattattgtaagctgtatatgggaagtggcattattttcggcagtggaaccaaggtcactgtcctaggtggaggcggttcaggcggaggtggctctggcggtggcggatcggaggtgcagctgctggagtctgggggaggcttggtacagcctggggggtccctgagactctcctgtgcagcctctggattcacctttagcatctatgccatgagctgggtccgccaggctccagggaaggggctggagtgggtctcagctattagtggtggtggtgataccacatactacgcagactccgtgaagggccggttcaccatctccagagacaattccaagaccacgctggatctgcaaatgaacagcctgagagccgaggacacggccgtatattactgtgcgaaacacactagctactacatggacgtctggggcaaagggaccacggtcaccgtctcctca

SEQ ID NO: 701 - DNA, 741 bp, synthetic construct
  misc_feature 1..741: note = Synthetic
  source 1..741: mol_type = other DNA
gaaattgtgctgactcagtctccagactttcagtctgtgactccaaaggagaaagtcaccatcacctgccgggccagtcagagcattggtagtagcttacactggtaccagcagaaaccagatcagtctccaaagctcctcatcaagtttgcttcccagtccttctcaggggtcccctcgaggttcagtggcagtggatctgggacagatttcaccctcaccatccatagcctggaagctgaagatgctgcaacgtattactgtcatcagagtagtagtttaccgtggacgttcggccaagggaccaaggtggaaatcaaaggtggaggcggttcaggcggaggtggctctggcggtggcggatcgcaggtgcagctggtggagtctgggggaggcgtggtccagcctgggaggtccctgagactctcctgtgcagcgtctggattcaccttcagtaactatgacaagcactgggtccgccaggccccaggcaaggggctggagtgggtggcagttatatggtatgatggaagtaataagtactatgcagactccgtgaagggccgattcaccatttccagagacaattccaagaacacgctgtatctacaaatgaacagcctgagagccgaggacacggctatgtattactgtgcgagaggtgacaactggaacgacgaacaccactacttctactacatggacgtctggggcaaagggaccacggtcaccgtctcctca

SEQ ID NO: 702 - DNA, 735 bp, synthetic construct
  misc_feature 1..735: note = Synthetic
  source 1..735: mol_type = other DNA
gaaattgtgttgacgcagtctccagccaccctgtctttgtctccaggggaaagagccaccctctcctgcggggccagtcagagtgtttacaacagttacttagcctggtaccagcagaaacctggcctggcgcccaggctcctcatctatgatgcatccctcagggccactggcgtcccagacaggttcagtggcagtgggtctgggacagacttcactctcaccatcagcacactggagcctgaagattttgcagtgtattactgtcagcagtatggtggctcacccatgtacacttttggccaggggaccaagctggagatcaaaggtggaggcggttcaggcggaggtggctctggcggtggcggatcgcaggttcagttggtacagtctggagctgaggtgaagaagcctggggcctcagtgaaggtctcctgtaaggcttctggttacacctttaccaactatggtttcagctgggtgcgacaggcccctggacaagggcttgactggatgggatggatcagcgcttacaatggttacacaaattatacacagaaactccagggcagagtcaccatgaccactgacacatccacgaccacagcctacatggagctgaggagcctgagatctgacgacacggccgtctattactgtgcgagaagaggactactctactactactactccatggacgtctggggcaaagggaccacggtcaccgtctcctca

SEQ ID NO: 703 - DNA, 723 bp, synthetic construct
  misc_feature 1..723: note = Synthetic
  source 1..723: mol_type = other DNA
cagactgtggtgacccaggagccatcgctctcagtgtcccctggagggacagtcacactcacttgtggcttgagctctggctcagtctctactagtgactaccccagctggtaccagcagaccccaggccaggctccacgcacgctcatctacagaacaaacactcgctcttctggggtccctgatcgcttctctggctccatccttgggaacaaagctgccctcaccatcacgggggcccaggcagatgatgaatctgattattactgtgtgctgtatatggatagtggcattattttcggcagtggaaccaaggtcactgtcctaggtggaggcggttcaggcggaggtggctctggcggtggcggatcggaggtgcagctgctggagtctgggggaggcctggtacagcctggggggtccctgagactctcctgtacagcctctggattcacctttagcagctttgccatgagctgggtccgccaggctccagggaaggggctggagtgggtctcagctatgagtggtagtggtgataccacatactacgcagactccgtgaagggccggttcaccatctcccgagacaattccaagaccacgctgtatctgcaaatgaacagcctgagagccgaggacacggccgtatattcctgtgcgaagcacactacctactacatggacgtctggggcaaagggaccacggtcaccgtctcctca

SEQ ID NO: 704 - DNA, 723 bp, synthetic construct
  misc_feature 1..723: note = Synthetic
  source 1..723: mol_type = other DNA
cagactgtggtgacccaggagccatcgctctcagtgtcccctggagggacagtcacactcacttgtggcttgagctctggctcagtctctactagtgactaccccagttggtaccagcagaccccaggccaggctccacgcacgctcatctacagaacaaacactcgctcttctggggtccctgatcgcttctctggctccatccttgggaacaaagctgccctcaccatcacgggggcccaggcagatgatgaatctgattattactgtgtgctgtatatgggtagtggcattattttcggcagtggaaccaaggtcactgtcctaggtggaggcggttcaggcggaggtggctctggcggtggcggatcggaggtgcagctgctggagtctgggggaggcttggtacagcctggggggtccctgagactctcctgtgcagcctctggattcacctttaacacctatgccatgagctgggtccgccaggctccagggaaggggctggagtgggtctcagctatgagtggtagtggtgataccacatactacgcagactccgtgaagggccggttcaccatctccagagacaattccaagaccactctgtatctgcaaatgaacagcctgagagccgaggacacggccgtatattcctgtgcgaaacacacttcctactacatggacgtctggggcaaagggaccacggtcaccgtctcctca

SEQ ID NO: 705 - DNA, 723 bp, synthetic construct
  misc_feature 1..723: note = Synthetic
  source 1..723: mol_type = other DNA
cagactgtggtgacccaggagccatcgttctcagtgtcccctggagggacagtcacactcacttgtggcttatactctgactcagtctctactagttactaccccagctggtaccagcagaccccaggccaggctccacgcacgctcatctacaacacaaacactcgctcttctggggtccctgatcgcttctctggctccatccttgggaacaaagctgccctcaccatcacgggggcccaggcagatgatgaatctgattattactgtgtactatatatggttagtggcattgttttcggcagtggaaccaaggtcactgtcctgggtggaggcggttcaggcggaggtggctctggcggtggcggatcggaggtccaattattggagtctgggggagacttggtacagcctggggggtccctgagactctcctgtgcagcctctggattcacctttagcacctatgccatgagctgggtccgccaggctccagggaaggggctggaatgggtctcagctattagtggtagtggtgaaaacatatactacgcagactccgtgaagggccggttcaccatctccagagacaattccaagaacacgctatttctacaaatgaacagcctgagagccgaggacacggccgtatattactgtgcgaaacacactagctattacatggacgtctggggcaaagggaccacggtcaccgtctcctca

SEQ ID NO: 706 - DNA, 741 bp, synthetic construct
  misc_feature 1..741: note = Synthetic
  source 1..741: mol_type = other DNA
cagactgtggtgacccaggagccatcgttctcagtgtcccctggagggacagtcacactcacttgtggcttgagctctggctcagtctctactagttactaccccggctggtaccagcagaccccaggccaggctccacgcacgctcatctacagcacaaacactcgctcttctggggtccctgatcgcttctctggctccatccttgggaacaaagctgccctcaccatcacgggggcccaggcagatgatgaatctgattattactgtgtgctatatatgggtagtggcatgtttattttcggcagtggaaccaaggtcactgtcctaggtggaggcggttcaggcggaggtggctctggcggtggcggatcgcaggtgcagctggtggagtctgggggaggcgtggtccagcctgggaggtccctgagactctcctgtgcagcgtctggattcaccttcagtagttatggcatgcactgggtccgccaggctccaggcaaggggctggagtgggtggcagttatatggtatgatggaattaataaatactatgcagactccgtgaagggccgattcaccatctccagagacaattccaagaacacgctgtatctgcaaatgaacagcctgagagccgaagacacggctgtgtattactgtgcgagagaacggctggaacgaaggtactactactacatggacgtctggggcaaagggaccacggtcaccgtctcctca

SEQ ID NO: 707 - DNA, 723 bp, synthetic construct
  misc_feature 1..723: note = Synthetic
  source 1..723: mol_type = other DNA
cagactgtggtgacccaggagccatcgttctcagtgtcccctggagggacagtcacactcacttgtgccttgagctctgactcagtctctactagttactttcccagctggtaccggcagaccccaggccaggctccacgcacgctcatctacaacacaaacactcgctcttctggggtccctgatcgcttctctggctccatccttgggaacaaagctgccctcaccatcacgggggcccaggcagatgatgaatctgattattactgtgtgctatatatgggtagtggcattattttcggcagtggaaccaaggtcactgtcctaggtggaggcggttcaggcggaggtggctctggcggtggcggatcggaggtgcagttgttggagtctgggggaggcttggtacagcctggggggtccctgagactctcctgtgcagcctctggattcacctttagcagctttgccatgagctgggtccgccaggctccagggaaggggctggaatgggtctcagctgttagtggtagtggtgatgacacatactacgcagactccgtgaagggccggttcaccatctccagagacaattccaagaacacgctgtatctgcaaatgaacagcctgagagccgaggacacggccgtatattactgtgcgaaacacactagctactacctggacgtctggggcaaagggaccacggtcaccgtctcctca

SEQ ID NO: 708 - DNA, 741 bp, synthetic construct
  misc_feature 1..741: note = Synthetic
  source 1..741: mol_type = other DNA
gaaattgtcctgactcagtctccagactttcagtctgtgactccaaaggagaaagtcaccatcacctgccgggccagtcagagtattggtagtagcttacactggtaccagcagaaaccagatcagtctccaaagctcctcatcaagtttgcttcccagtccttctcaggggtcccctcgaggttcagtggcagtggatctgggacagatttcaccctcaccatcaatagcctggaagctgaagatgctgcaacgtatttctgtcatcagagtagtagtttaccgtggacgttcggccaagggaccaaggtggaaatcaaaggtggaggcggttcaggcggaggtggctctggcggtggcggatcgcaggtgcagctggtggagtctgggggaggcgtggtccagcctgggaggtccctgagactctcctgtgcagcgtctggattcaacttcagtacctttgacatacactgggtccgccaggctccaggcaaggggctggagtgggtggcacttatatggtatgatggaagttataaatactatgcagactccgtgaagggccgattcaccatttccagagacaattccaagaacacgctggatctgcgaatgaacagcctgagagccgaggacacggctgtgtattactgtgcgcgaaatgacaactggaacgacgaacactactaccactattacatggacgtctggggcaaagggaccacggtcaccgtctcctca

SEQ ID NO: 709 - DNA, 756 bp, synthetic construct
  misc_feature 1..756: note = Synthetic
  source 1..756: mol_type = other DNA
cagactgtggtgacccaggagccatcgttctcagtgtcccctggagggacagtcacactcacttgtggcttgagctctggctcagtctccactagttacttccccagctggtaccagcagacccccggccaggctccacgcacgctcatctacatcacaaacactcgctcttcaggggtccctgatcgcttctctggctccattattgggaacaaagctgccctcaccatcacgggggcccaggcagatgatgaatctgattatttctgtgtactatatatgggtagtggcacttgggtgttcggtggaggaaccaagctgactgtcctaggtggaggcggttcaggcggaggtggctctggcggtggcggatcggaagtgcacctgttggagtctgggggaggcttggtccagcctggggggtccctgagactctcctgtgcggcctctggattcacctttagcagctatgccatgaactgggtccgccaggctccagggaaggggctggagtgggtctcttctattagtggtagtggtagtagctcatactacgcagactccgtgaagggccggttcaccatctccagagacaattccaagaacacgctgtatctgcaaatgaacagcctgagagccgaggacacggccgtatattactgtgcgtctcgtggattcaactcccagtatcctcccggatactactactactacatggacgtctggggcaaagggaccacggtcaccgtctcctca

SEQ ID NO: 710 - DNA, 717 bp, synthetic construct
  misc_feature 1..717: note = Synthetic
  source 1..717: mol_type = other DNA
gaaattgtgctgactcagtctccagactttcagtctgtgactccaaaggagaaagtcaccatcacctgccgggccagtcagagcattggtagtagcttacactggtaccagcagaaaccagatcagtctccaaagctcctcatcaagtttgcttcccagtccttctcaggggtcccctcgaggttcagtggcagtggatctgggacagatttcaccctcaccatccatagcctggaagctgaagatgctgcaacgtattactgtcatcagagtagtagtttaccgtggacgttcggccaagggaccaaggtggaaatcaaaggtggaggcggttcaggcggaggtggctctggcggtggcggatcggaggtgcagctgttggagtctgggggaggcttggtacagcctggggggtccctgagactctcctgtgcagcctctggattcaccttcagcaactatgccatgacctgggtccgccaggctccagggaaggggctggagtgggtctcagctattagtggtagtggtattggcacatactacgcagactccgtgcagggccggttcaccacctccagagacaattccaagaacacgctgtatctgcaaatgaacagcctgagagccgaggacacggccgtttattactgtgcgaaaggggggtacaactggaaggacgtctggggcaaagggaccacggtcaccgtctcctca

SEQ ID NO: 711 - DNA, 741 bp, synthetic construct
  misc_feature 1..741: note = Synthetic
  source 1..741: mol_type = other DNA
gaaattgtgctgactcagtctccagactttcagtctgtgactccaaaggagaaagtcaccatcacctgccgggccagtcagagcattggtagtagcttacactggtaccagcagaaaccagatcagtctccaaagctcctcatcaagtttgcttcccagtccttctcaggggtcccctcgaggttcagtggcagtggatctgggacagatttcaccctcaccatccatagcctggaagctgaagatgctgcaacgtattactgtcatcagagtagtagtttaccgtggacgttcggccaagggaccaaggtggaaatcaaaggtggaggcggttcaggcggaggtggctctggcggtggcggatcgcaggtgcagctggtggagtctgggggaggcgtggtccagcctgggaggtccctgagactctcctgtgcagcgtctgggttcaccttcactaactatgacatgcactgggtccgccaggccccaggcaaggggctggagtgggtgacaattatatggcatgatggaagtaataaatattatttagactccgtgaggggccgattcaccatctccagagacaattccaagaacacgctgtatctgcaaatgaacagcctgagagccgaggacacggctgtgtattactgtgcgagaggtgacaactggaacgacgaacaccactacttctactacatggacgtctggggcaaagggaccacggtcaccgtctcctca

SEQ ID NO: 712 - DNA, 741 bp, synthetic construct
  misc_feature 1..741: note = Synthetic
  source 1..741: mol_type = other DNA
gaaattgtgttgacacagtctccagccaccctgtctttgtctccaggggaaagagccaccctctcctgcagggccagtcagagtgttagcagctccttagcctggtaccaacagaaacctggccaggctccccggctcctcatctatgatgcatccaacagggccactggcatcccagccaggttcagtggcagtgggtctgggacagacttcactctcaccatcagcagcctagagcctgaagattttgcagtttattactgtcagcagcgtagcaactggcctctcactttcggcggagggaccaaggtggagatcaaaggtggaggcggttcaggcggaggtggctctggcggtggcggatcgcaggtgcagctggtggagtctgggggaggcgtggtccagcctgggaggtccctgagactctcctgtgcagcgtctgggttcaccttcagtaactatgacatgcactgggtccgccaggccccaggcaaggggctggagtgggtgacaattatatggcatgatggaagtaataaatattatttagactccgtgaagggccgattcaccatctccagagacaattccaagaacacgctgtatctgcaaatgaacagcctgagagccgaggacacggctgtgtattactgtgcgagaggtgacaactggaacgacgaacaccactacttctactacatggacgtctggggcaaagggaccacggtcaccgtctcctca

SEQ ID NO: 713 - DNA, 729 bp, synthetic construct
  misc_feature 1..729: note = Synthetic
  source 1..729: mol_type = other DNA
gaaattgtgttgacgcagtctccaggcaccctgtctttgtctccaggggaaagagccaccctctcctgcagggccagtcagagtgttagcagcagctacttagcctggtaccagcagaaacctggccaggctcccaggctcctcatctatggtgcatccagcagggccactggcatcccagacaggttcagtggcagtgggtctgggacagacttcactctcaccatcagcagactggagcctgaagattttgcagtgtattactgtcagcagtatggtagctcgtggacgttcggccaagggaccaaggtggaaatcaaaggtggaggcggttcaggcggaggtggctctggcggtggcggatcggaggtgcagctggtggagtctgggggaggtgtggtacggcctggggggtccctgagactctcctgtgcagcctctggattcacctttgatgattatggcatgagctgggtccgccaagctccagggaaggggctggagtgggtctctggtattaattggaatggtggtagcacaggttatgtagactctgtgaagggccgattcaccatctccagagacaacgccaagaactccctgtatctgcaaatgaacagtctgagagccgaggacacggccttgtatcactgtgcgagaccagtaactacggactactactactacatggacgtctggggcaaagggaccacggtcaccgtctcctca

SEQ ID NO: 714 - DNA, 753 bp, synthetic construct
  misc_feature 1..753: note = Synthetic
  source 1..753: mol_type = other DNA
gaaattgtgttgacgcagtctccaggcaccctgtctttgtctccaggggaaagagccaccctctcctgcagggccagtcagagtgttagcagcagctacttagcctggtaccagcagaaacctggccaggctcccaggctcctcatctatggtgcatccagcagggccactggcatcccagacaggttcagtggcagtgggtctgggacagacttcactctcaccatcagcagactggagcctgaagattttgcagtgtattactgtcagcagtatggtagctcgtggacgttcggccaagggaccaaggtggaaatcaaaggtggaggcggttcaggcggaggtggctctggcggtggcggatcggaggtgcagctgttggagtctgggggaggcttggtacagcctggggggtccctgagactctcctgtgcagcctctggattcacctttagcagctatgccatgagctgggtccgccaggctccagggaaggggctggagtgggtctcagctattagtggtagtggtggtagcacatactacgcagactccgtgaagggccggttcaccatctccagagacaattccaagaacacgctgtatctgcaaatgaacagcctgagagccgaggacacggccgtatattactgtgcgaaaaaggggacgtcgtacaactggaacgacgtccattactactactactactacatggacgtctggggcaaagggaccacggtcaccgtctcctca

SEQ ID NO: 715 - DNA, 735 bp, synthetic construct
  misc_feature 1..735: note = Synthetic
  source 1..735: mol_type = other DNA
gaaattgtgttgacgcagtctccaggcaccctgtctttgtctccaggggaaagagccaccctctcctgcagggccagtcagagtgttagcagcagctacttagcctggtaccagcagaaacctggccaggctcccaggctcctcatctatggtgcatccagcagggccactggcatcccagacaggttcagtggcagtgggtctgggacagacttcactctcaccatcagcagactggagcctgaagattttgcagtgtattactgtcagcagtatggtagctcgtggacgttcggccaagggaccaaggtggaaatcaaaggtggaggcggttcaggcggaggtggctctggcggtggcggatcgcagctgcagctgcaggagtcgggcccaggactggtgaagccttcggagaccctgtccctcacctgcactgtctctggtggctccatcagcagtagtagttactactggggctggatccgccagcccccagggaaggggctggagtggattgggagtatctattatagtgggagcacctactacaacccgtccctcaagagtcgagtcaccatatccgtagacacgtccaagaaccagttctccctgaagctgagctctgtgaccgccgcagacacggctgtgtattactgcacaactggaacgacggcttactactactactactacatggacgtctggggcaaagggaccacggtcaccgtctcctca

SEQ ID NO: 716 - DNA, 732 bp, synthetic construct
  misc_feature 1..732: note = Synthetic
  source 1..732: mol_type = other DNA
gaaattgtgttgacgcagtctccaggcaccctgtctttgtctccaggggaaagagccaccctctcctgcagggccagtcagagtgttagcagcagctacttagcctggtaccagcagaaacctggccaggctcccaggctcctcatctatggtgcatccagcagggccactggcatcccagacaggttcagtggcagtgggtctgggacagacttcactctcaccatcagcagactggagcctgaagattttgcagtgtattactgtcagcagtatggtagctcgtggacgttcggccaagggaccaaggtggaaatcaaaggtggaggcggttcaggcggaggtggctctggcggtggcggatcggaggtgcagctgttggagtctgggggaggcttggtgcagcctggggggtccctgagactctcctgtgcagcctctggattcacctttagcagctatgccatgacctgggtccgccaggctccagggaaggggctggagtgggtctcagctattagtggtagtggtggtagcacatactacgcagactccgtgaagggccggttcaccatctccagagacaattccaagaacacgctgtatctgcaaatgaacagcctgagagccgaggacacggccgtatattactgtgcgagaggcgggtataactggcactactactactacatggacgtctggggcaaagggaccacggtcaccgtctcctca

SEQ ID NO: 717 - DNA, 744 bp, synthetic construct
  misc_feature 1..744: note = Synthetic
  source 1..744: mol_type = other DNA
gaaattgtgctgactcagtctccagactttcagtctgtgactccaaaggagaaagtcaccatcacctgccgggccagtcagaacattggtagtagcttacactggtaccagcagaaaccagatcagtctccaaagctcctcatcaagtttgcttcccagtccatctcaggggtcccctcgaggttcagtggcagtggatctgggacagatttcaccctcaccatcaatagcctggaagctgaagatgctgcagcgtattactgtcatcagagtagtagtttaccgtggacgttcggccaagggaccaaggtggaaatcaaaggtggaggcggttcaggcggaggtggctctggcggtggcggatcgcaggtgcagctggtggagtctgggggaggcgtggtccagcctgggaggtccctgagactctcctgtgcagcgtctggattcaccttcagtagctatgacatgcactgggtccgccaggctccaggcaaggggctggagtgggtgtcagttatatggtatgatggaagtaataaaaagtatggagactccgcgaagggccgattcaccatctccagagacaattccaagaacacgctggatctgcaaatgaacagcctgagagccgaggacacggctgtgtattactgtgcgagaggcgacaactggaacgacgaaggtggctactactactactacatggacgtctggggcaaagggaccacggtcaccgtctcctca

SEQ ID NO: 718 - DNA, 744 bp, synthetic construct
  misc_feature 1..744: note = Synthetic
  source 1..744: mol_type = other DNA
gacatccagatgacccagtctccatcctcactgtctacatctgtaggagacagagtcaccatcacttgtcgggcgagtcagggcattagcaattatttagcctggtttcagcagaaaccagggaaagcccctaagtccctgatctatgctgcatccagtttgcaaagtggggtcccatcaaagttcagcggcagtggatctgggacagatttctctctcaccattagcagcctgcagcctgaagattttgcaacttattactgccaacagtataatagttacccgatcaccttcggccaagggacacgactggagattaaaggtggaggcggttcaggcggaggtggctctggcggtggcggatcgcaggtgcagctggtggagtctgggggaggcgtggtccagcctgggaggtccctgagactctcctgtgcagcgtctggattcaccttcagtagctatgacatgcactgggtccgccaggctccaggcaaggggctggagtgggtgtcagttatatggtatgatggaagtaataaaaagtatggagactccgcgaagggccgattcaccatctccagagacaattccaagaacacgctggatctgcaaatgaacagcctgagagccgaggacacggctgtgtattactgtgcgagaggcgacaactggaacgacgaaggtggctactactactactacatggacgtctggggcaaagggaccacggtcaccgtctcctca

SEQ ID NO: 719 - DNA, 735 bp, synthetic construct
  misc_feature 1..735: note = Synthetic
  source 1..735: mol_type = other DNA
gaaattgtgctgactcagtctccagactttcagtctgtgactccaaaggagaaagtcaccatcacctgccgggccagtcagaacattggtagtagcttacactggtaccagcagaaaccagatcagtctccaaagctcctcatcaagtttgcttcccagtccatctcaggggtcccctcgaggttcagtggcagtggatctgggacagatttcaccctcaccatcaatagcctggaagctgaagatgctgcagcgtattactgtcatcagagtagtagtttaccgtggacgttcggccaagggaccaaggtggaaatcaaaggtggaggcggttcaggcggaggtggctctggcggtggcggatcgcaggttcagctggtacagtctggagctgaggtgaagaagtctggggcctcagtgaaggtctcctgcaaggcttctggttacaccttaaccagctatggcatcagctgggtgcgacaggcccctggacaagggcttgagtggatgggatggatcagcgcttacaatggtaacataaactatgcacagaagttccagggcagagtcaccatgaccacagacacatccacgagcacagcctacatggagctgaggagcctgagatctgacgacacggccgtgtattactgtgtgagagatggggaccggtacaactggaaccacagctacatggacgtctggggcaaagggaccacggtcaccgtctcctca

SEQ ID NO: 720 - DNA, 735 bp, synthetic construct
  misc_feature 1..735: note = Synthetic
  source 1..735: mol_type = other DNA
gacatccagatgacccagtctccatcctcactgtctacatctgtaggagacagagtcaccatcacttgtcgggcgagtcagggcattagcaattatttagcctggtttcagcagaaaccagggaaagcccctaagtccctgatctatgctgcatccagtttgcaaagtggggtcccatcaaagttcagcggcagtggatctgggacagatttctctctcaccattagcagcctgcagcctgaagattttgcaacttattactgccaacagtataatagttacccgatcaccttcggccaagggacacgactggagattaaaggtggaggcggttcaggcggaggtggctctggcggtggcggatcgcaggttcagctggtacagtctggagctgaggtgaagaagtctggggcctcagtgaaggtctcctgcaaggcttctggttacaccttaaccagctatggcatcagctgggtgcgacaggcccctggacaagggcttgagtggatgggatggatcagcgcttacaatggtaacataaactatgcacagaagttccagggcagagtcaccatgaccacagacacatccacgagcacagcctacatggagctgaggagcctgagatctgacgacacggccgtgtattactgtgtgagagatggggaccggtacaactggaaccacagctacatggacgtctggggcaaagggaccacggtcaccgtctcctca

SEQ ID NO: 721 - DNA, 732 bp, synthetic construct
  misc_feature 1..732: note = Synthetic
  source 1..732: mol_type = other DNA
gaaattgtgctgactcagtctccagactttcagtctgtgactccaaaggagaaagtcaccatcacctgccgggccagtcagagcattggaagtagcttacactggtaccagcagaaaccagatcagtctccaaagctcctcatcaagtatgtttcccagtccatctcaggggtcccctcgaggttcagtggcagtggatctgggacagatttcaccctcaccatcaatagcctggaagctgaagatgctgcagcgtattactgtcatcagagtagtagtttaccgtggacgttcggccaagggaccaaggtggaaatcaaaggtggaggcggttcaggcggaggtggctctggcggtggcggatcggaggtgcagctgttggagtctgggggagacttggtacagcctggggggtccctgcgactctcctgtgcagcctctggattcacctttagcacctatgccatgacctgggtccgccaggctccagggaaggggctggagtgggtctcagctattagtggtactagtggtagcacatactacgcagactccgtgaagggccggttcaccatctccagagacaattccaagagcacgctgtatctgcacatgaacagcctgagaaccgaggacacggccgtatattactgtgcgagaggcggatataactggcactactactactacatggacgtctggggcaaagggaccacggtcaccgtctcctca

SEQ ID NO: 722 - DNA, 735 bp, synthetic construct
  misc_feature 1..735: note = Synthetic
  source 1..735: mol_type = other DNA
gaaattgtaatgacacagtctccagccaccctgtctttgtctccaggggaaagagccaccctctcctgcagggccagtcagagtgttagcagcagctacttatcctggtaccagcagaaacctgggctggctcccaggctcctcatctatggtgcatccaccagggccactggcatcccagccaggttcagtggcagtgggtctgggacagacttcactctcaccatcagcagcctgcagcctgaagattttgcagtttattactgtcagcaggattataacttacctccgacgttcggccaagggaccaaggtggaaatcaaaggtggaggcggttcaggcggaggtggctctggcggtggcggatcggaggtgcagctgttggagtctgggggagacttggtacagcctggggggtccctgcgactctcctgtgcagcctctggattcacctttagcacctatgccatgacctgggtccgccaggctccagggaaggggctggagtgggtctcagctattagtggtactagtggtagcacatactacgcagactccgtgaagggccggttcaccatctccagagacaattccaagagcacgctgtatctgcacatgaacagcctgagaaccgaggacacggccgtatattactgtgcgagaggcggatataactggcactactactactacatggacgtctggggcaaagggaccacggtcaccgtctcctca

SEQ ID NO: 723 - DNA, 741 bp, synthetic construct
  misc_feature 1..741: note = Synthetic
  source 1..741: mol_type = other DNA
gagatcgtgctgacacagtctccagatttccagtctgtgacccctaaggaaaaggttacaattacatgcagagcctctcagagcatcggaagctctctgcactggtatcagcagaaacctgatcagagccccaagctgctgatcaaattcgccagccagtccttcagcggcgtccccagccgcttcagcggcagcggcagcggcactgattttacactgaccatccacagcctggaggccgaggacgccgccacctactattgtcaccagagcagctccctgccttggacctttggccagggcacaaaggtggaaatcaagggcggcggtggatctggaggcggaggctctggaggcggcggctcccaagtgcagctggtggagagcggcggaggagtggtgcaacctggccggagcctgagactgagctgcgctgccagcggcttcaccttcaacaactacgacatgtactgggtgcggcaggcccctggcaagggcctggaatgggtcgccgtgacatggtatgacggctccaacaagtactacgccgacagcgtgaagggcagattcaccatcagcagagataatagcaagaacaccctgtacctgcagatgaacagcctgcgggccgaggacaccgccgtgtactactgcgctagaggcgacaattggaacgacgagcaccattacttctactacatggacgtgtggggcaaaggcaccaccgtgaccgtgtccagc

SEQ ID NO: 724 - DNA, 741 bp, synthetic construct
  misc_feature 1..741: note = Synthetic
  source 1..741: mol_type = other DNA
gagatcgtgctgacacagagccctgattttcagagcgtgacacctaaagagaaggtgaccatcacctgcagagccagccagagcatcggctccagcctgcactggtatcagcagaagcccgaccagagcccaaagctgctgatcaagttcgcctcccagtctttttccggcgtgcccagcagattcagcgggagcggctctggcaccgacttcacactgaccatccactctctggaagccgaggatgccgccacctactattgccaccagagcagctctctcccttggaccttcggccagggcacaaaagtggaaattaagggcggaggcggctccggcggtggaggctccggaggcggcggctctcaagtgcagctggtggagtctggcggcggagtggtgcaacctggaaggagcctgcggctgagctgcgctgccagcggcttcaccttcagcaattacgacatgcactgggtgcggcaggcccctggcaaaggcctggaatgggtcacaatcatctggcatgatgccagcaacaagtactacctggacagcgtcaagggcagattcacaatcagccgggacaacagcaagaacaccctgtacctgcagatgaacagcctgagagccgaggacaccgctgtgtactattgtgccagaggagataattggaacgacgagcaccactacttctactacatggacgtgtggggcaagggcaccaccgtgaccgtttctagc

SEQ ID NO: 725 - DNA, 741 bp, synthetic construct
  misc_feature 1..741: note = Synthetic
  source 1..741: mol_type = other DNA
gagatcgtgctgacccagagccctgacttccagagcgtgacccctaaggaaaaggtgacaattacatgcagggccagccagtccatcggctcttctctgcattggtatcagcagaagcccgatcagtctccaaagctgctgatcaaattcgccagccagagcttcagcggagtccccagccggttcagcggatctggctccggcactgatttcaccctgaccatccacagcctggaggccgaagatgccgctacatactattgccaccagtcctccagcctgccttggacattcggccagggcaccaaggtggagatcaaaggcggcggcggcagcggcggaggaggctctggcggaggcggcagccaagtgcagctggtcgaaagcggcggaggcgtggtgcaacctggaagaagcctgagactgagctgcgccgcctctggcttcaccttttctaattacgacatgcactgggtgcggcaggcccctggcaagggtcttgagtgggttaccatcatctggcacgacggcagcaacaagtactacctggacagcgtgaagggcagatttacaatcagcagagataatagcaagaacaccctgtacctgcagatgaacagcctgcgggccgaggacaccgccgtgtactattgtgccagaggcgacaactggaacgacgagcaccactacttctactacatggacgtgtggggcaaaggcaccacagtgaccgtgtccagc

SEQ ID NO: 726 - DNA, 723 bp, synthetic construct
  misc_feature 1..723: note = Synthetic
  source 1..723: mol_type = other DNA
cagaccgtggtgacacaggagccttctctgagcgtgagccccggcggcaccgtgaccctgacatgcggcctgagcagcggctccgtctccaccagctactatcctagctggtatcagcagacccctggccaggcccctagaaccctgatctacagcacaaacatccggagctctggagtgccagacagatttagcggaagcatcctgggcaacaaggccgccctgaccatcaccggcgcccaggctgacgacgagagtgattactactgcaagctgtacatgggctctggcatcatcttcggcagcggaacaaaggtgacagttctgggcggaggcggctctggcggcggcggcagcggcggtggcggaagcgaggtgcagctgctggaaagcggcggcggactcgtgcaacctggcggctccctgcggctgtcttgcgccgcttctggcttcacattcagcatctacgccatgagctgggtcagacaggcccccggcaaaggcctggaatgggtgtccgccatcagcggcggcggagataccacctactacgccgacagcgtgaagggcagattcaccattagcagagataatagcaagaccacactggacctgcaaatgaacagcctgcgggccgaggacaccgccgtgtactactgtgctaagcacacctcttattacatggacgtgtggggaaaaggcacaaccgtgaccgtgtccagc

SEQ ID NO: 727 - DNA, 741 bp, synthetic construct
  misc_feature 1..741: note = Synthetic
  source 1..741: mol_type = other DNA
gagatcgtgctgacacagtcccctgactttcagagcgtgacccctaaggaaaaggtcacaattacatgcagagcctctcagagcatcggcagctctctgcactggtatcagcagaaacctgatcagagccccaagctgctgatcaaattcgccagccagagcttctccggcgtgccaagcagattcagcggcagcggcagcggaaccgatttcaccctgaccatccattctctggaggccgaggacgccgccacctactactgccaccagtctagcagcctgccctggaccttcggccagggcacaaaggttgagatcaagggcggcggcggcagcggcggcggcggcagcggcggcggcggcagccaagtgcagctggtggaaagcggcggtggagtggtgcaacctggcagaagcctgcggctgagctgcgccgcttctggcttcacattttctaattacgacaagcactgggtgcggcaggcccctggcaaaggcctggagtgggtcgctgtgatctggtatgacggcagcaacaagtactacgccgacagcgtgaagggcagattcaccatcagcagagacaacagcaagaacaccctgtacctgcagatgaacagcctgcgggctgaagataccgccatgtactattgtgccaggggcgataattggaacgacgagcaccactacttctactacatggacgtgtggggaaagggcaccacagtgaccgtgtccagc

SEQ ID NO: 728 - DNA, 735 bp, synthetic construct
  misc_feature 1..735: note = Synthetic
  source 1..735: mol_type = other DNA
gagatcgtgctgacccaatctcctgccacactgagcctctccccaggcgagcgggccaccctgagctgcggcgcttctcagagcgtgtacaatagctacctggcctggtatcagcagaaacccggcctggctcctagactgctgatctacgacgccagcctgagagccaccggcgtgcctgatagattcagcggcagcggcagcggaaccgacttcaccctgacaatcagcacactggaacccgaggattttgccgtgtactattgccagcagtacggcggcagccctatgtacacattcggccagggcaccaagctggaaatcaagggcggcggcggaagcggcggcggaggaagcggcggcggcggcagccaagtgcagctggtccagtctggagctgaggtgaagaagcccggcgccagcgtgaaggtgtcctgtaaagcctctggttatacattcacaaactatggcttcagctgggttagacaggcccctggacagggcctggactggatgggatggatcagcgcctacaacggctacaccaactacacccagaagctgcagggcagagtgacaatgaccacagataccagcaccaccacagcttacatggaactgaggtccctgcggagcgacgacaccgccgtgtactactgcgccagacggggcctgctgtactactactacagcatggacgtgtggggcaagggcaccaccgtgaccgtgtcttct

SEQ ID NO: 729 - DNA, 723 bp, synthetic construct
  misc_feature 1..723: note = Synthetic
  source 1..723: mol_type = other DNA
cagaccgtggtgacccaggagcctagcctgtccgtgtcccctggcggcaccgtgaccctcacatgcggcctgagcagcggctcagtttccacgagcgactaccccagctggtatcagcaaacccctggacaggctcctcggaccctgatctacagaaccaacacccggagcagcggcgtgcccgatagattctctggctctatcctgggcaacaaggccgctctgaccattacaggcgcccaggccgacgacgagagcgattattactgcgtgctgtacatggacagcggcatcatcttcggctctggaacaaaggtgacagtgctgggcggaggcggcagcggaggcggcggcagcggcggaggaggctctgaggtgcagctgctggaaagcggcggcggactggtgcaacctggcggctctctgcggctgtcctgtaccgccagcggcttcaccttcagcagcttcgccatgagctgggtcagacaggctccaggaaaaggcctggaatgggtgtctgccatgagcggatctggcgacaccacatactacgccgattccgtgaagggcagatttaccatcagcagagataatagcaagacaacactgtatctgcagatgaacagcctgagggccgaggacacagccgtgtacagctgcgccaagcacaccacctactacatggacgtgtggggcaaaggcaccaccgtcacagtgtccagc

SEQ ID NO: 730 - DNA, 723 bp, synthetic construct
  misc_feature 1..723: note = Synthetic
  source 1..723: mol_type = other DNA
cagaccgtcgtgacccaggagccttctctgagcgtgtctccaggaggcacagttactctgacatgcggcctgtctagcggcagcgtgtccaccagcgactaccccagctggtatcagcaaacacctggccaggctcctagaaccctgatctatagaacaaataccagaagcagcggcgtgcccgatagattcagcggaagcatcctgggcaacaaggccgccctgaccatcaccggcgcccaggctgacgacgagtctgattactactgcgtgctgtacatgggcagcggcatcattttcggcagcggaacaaaggtgacagtgctgggaggtggcggcagcggcggcggaggctccggcggcggaggctcagaggtgcagctgctggaaagcggcggcggcctggtgcaacctggcggaagtctgcggctgtcttgtgccgcttctggattcaccttcaacacctacgccatgagctgggtgcggcaggcccctggcaaaggcctggaatgggtctccgccatgagcggctctggcgacacaacctactatgccgacagcgtgaagggcagatttacaatcagcagggataacagcaagaccaccctgtacctgcagatgaacagcctccgggccgaggacaccgccgtgtacagctgcgccaagcacaccagctactacatggacgtgtggggcaaaggcaccaccgtgaccgtgtccagc

SEQ ID NO: 731 - DNA, 723 bp, synthetic construct
  misc_feature 1..723: note = Synthetic
  source 1..723: mol_type = other DNA
cagaccgtggtgacccaagagcccagcttctctgtgtccccaggtggcaccgtgacactgacatgcggcctgtacagcgacagcgtgtctacaagctactatcctagctggtatcagcagacacctggccaggctcctagaaccctgatctacaacaccaacacaagaagcagcggcgtgcccgaccggtttagcggaagcatcctgggcaacaaggccgccctgaccatcaccggcgcccaggccgacgacgagagcgactactattgtgtgctgtacatggtgtccggcatcgtgttcggctctggaacaaaggtgaccgttctgggaggcggcggcagcggcggaggcggcagcggaggaggcggctcagaagtgcagctgctggaaagcggcggcgacctggtgcaacctggcggctccctgagactgagctgcgccgcttctggctttaccttcagcacctacgccatgagctgggtgcggcaggcccctggcaaaggactggagtgggtctccgccatcagcggcagcggcgagaatatctactacgctgatagcgtgaagggcagattcaccattagcagagataattctaagaacaccctgttcctgcagatgaacagcctgcgggccgaagataccgccgtgtactactgcgccaagcacacatcttactacatggacgtgtggggcaaaggcaccaccgtcacagtgtccagc

SEQ ID NO: 732 - DNA, 741 bp, synthetic construct
  misc_feature 1..741: note = Synthetic
  source 1..741: mol_type = other DNA
cagaccgtggtgacccaggagcctagcttcagcgtgtcccccggaggcacagtgaccctgacatgcggcctcagctctggctccgtcagcacctcttactatcctggatggtatcagcagacacctggccaggccccaagaaccctgatctacagcacaaacaccagaagcagcggcgtgcccgatagatttagcggcagcatcctgggcaacaaggccgccctgaccattacaggcgcccaggctgatgacgagagcgactactactgtgtgctgtacatgggcagcggcatgttcatcttcggctctggaaccaaggtgacagtgctgggtggcggaggatctggcggaggcggctctggcggcggcggcagccaagtgcagctggtggaaagcggaggcggagttgtgcaacctggcagatctctgcgcctgtcatgcgccgccagcggctttacattctccagctacggcatgcactgggtgcggcaggcccctggcaaaggcctggaatgggtcgctgtgatctggtacgacggcatcaacaaatactacgccgacagcgtgaagggcagattcaccatcagcagagataatagcaagaacaccctgtacctgcagatgaacagcctgcgggccgaggacactgccgtgtactactgcgccagagagcggctggaacggagatactactactacatggacgtgtggggcaagggcaccaccgtgaccgtgtccagt

SEQ ID NO: 733 - DNA, 723 bp, synthetic construct
  misc_feature 1..723: note = Synthetic
  source 1..723: mol_type = other DNA
cagacagtggtgacacaggagcctagcttttctgtgtcccctggcggcaccgtgacactgacatgcgccctgagctccgatagcgtgtcaacatcttacttccccagctggtatcggcagacccctggacaggcccctagaaccctgatctacaacaccaacaccagaagcagcggcgtgccagatagattcagcggctccatcctgggcaacaaggccgccctgaccattacaggcgcccaggccgacgacgagagcgactactactgtgtgctgtacatgggcagcggcatcatcttcggctctggcacaaaggtgaccgtcctgggcggcggcggcagcggcggaggtggaagcggcggaggcggatctgaggtgcagctgctggaatctggaggcggcctcgtgcagcctggaggcagcctgaggctgagctgcgctgcttctggcttcaccttcagcagcttcgccatgagctgggtcagacaagctcccggcaaaggcctggaatgggtgtccgccgtgtctggcagcggcgacgatacctactacgccgatagcgtgaaaggaagatttacaatcagccgggacaacagcaagaataccctgtacctgcagatgaactctctgcgggccgaggacaccgccgtgtactattgcgccaagcacaccagctactacctggacgtgtggggcaagggcaccaccgtgaccgtttccagc

SEQ ID NO: 734 - DNA, 741 bp, synthetic construct
  misc_feature 1..741: note = Synthetic
  source 1..741: mol_type = other DNA
gagatcgtgctgacccagtctcctgatttccagtccgtgacccctaaggaaaaggtgaccatcacctgtagagcttctcagagcatcggcagctctctgcactggtatcagcagaaacctgaccagagcccaaagctgctgatcaaattcgccagccagtccttcagcggcgtgccctcccggtttagcggctccggcagcggaacagacttcaccctgacaattaacagcctggaagccgaggatgccgccacatacttctgccaccagtcttctagcctgccctggacattcggccagggcacaaaggtggagatcaagggcggcggcggcagcggcggcggcggcagcggtggaggcggaagccaagtgcagctggtggaaagcggaggcggcgtcgtgcaacctggcagaagcctgagactgagctgcgccgccagcggctttaacttcagcaccttcgacatccactgggtgcggcaggcccctggaaaaggcctggagtgggtcgccctgatctggtatgacggcagctacaagtactacgccgatagcgttaagggcaggttcaccatcagcagagataattctaagaacaccctggacctgagaatgaacagcctccgggctgaggacaccgccgtgtactactgcgccagaaatgacaactggaacgacgagcattactatcactactacatggacgtgtggggcaagggcaccaccgtgacagtgtcctct

SEQ ID NO: 735 - DNA, 756 bp, synthetic construct
  misc_feature 1..756: note = Synthetic
  source 1..756: mol_type = other DNA
cagaccgtggtgacacaggagcctagcttcagcgtgtctccaggaggaacagtgaccctgacatgcggcctcagcagcggctctgtgtccaccagctatttccccagctggtatcagcagacccctggccaggctcccaggaccctgatctacatcaccaacacaagaagcagcggcgtgcccgacagattttctggcagcatcatcggcaacaaggccgctctgaccatcacaggcgcccaggccgacgacgagagtgattacttctgcgtgctgtacatgggcagcggaacatgggtgttcggcggaggcacaaagctgaccgtcctgggcggcggcggaagcggcggcggcggctctggcggaggcggcagcgaggtgcacctgctggaaagcggcggcggcctggtgcagcctggaggctctctgcggctgagctgtgccgcctctggttttaccttcagcagctacgccatgaattgggttagacaggcccctggcaagggcctggaatgggtcagcagcatcagcggctccggcagcagctcttactatgctgatagcgtgaagggcagattcaccattagcagagacaatagcaagaacaccctgtacctgcagatgaacagcctgcgggccgaggacaccgccgtgtactactgcgccagccggggcttcaactcccaataccctcctggctactactactactacatggacgtgtggggaaaaggcacgaccgtgaccgtgtcctcc

SEQ ID NO: 736 - DNA, 717 bp, synthetic construct
  misc_feature 1..717: note = Synthetic
  source 1..717: mol_type = other DNA
gagatcgtgctgacacagtctcccgactttcagagcgtgacccctaaagagaaggtgacaatcacctgcagagccagccagtcaatcggctctagcctgcactggtatcagcagaaacctgatcagagccctaagctgctgatcaagttcgcctctcagagcttcagcggcgtgccaagccggttcagcggctccggcagcggcaccgacttcaccctgaccatccacagcctggaggccgaagatgccgctacatactactgccaccagtccagcagcctcccctggaccttcggccagggcacaaaggtggaaatcaaaggcggcggaggcagcggcggcggaggctccggaggcggaggcagcgaggtgcagctgctggaaagcggcggcggcctggtgcaacctggcggctccctgaggctgagctgcgccgccagcggcttcacctttagcaactacgctatgacctgggtcagacaggcccctggaaagggcctggagtgggtgtccgccatcagcggatctggtattggaacatactacgccgacagcgtgcaaggcagattcacaacaagcagagataattctaagaacaccctgtacctgcagatgaacagcctgcgggccgaggacaccgccgtgtactattgtgccaagggcggctacaactggaaggacgtgtggggcaagggaaccaccgtgaccgtttcttct

SEQ ID NO: 737 - DNA, 741 bp, synthetic construct
  misc_feature 1..741: note = Synthetic
  source 1..741: mol_type = other DNA
gagatcgtgctgacccagagccctgacttccagtctgtgacacctaaggaaaaggtgacaatcacctgtagggccagccaaagcatcggcagcagcctgcattggtatcagcagaagcccgatcagtctccaaagctgctgatcaaattcgccagccagagcttcagcggagttcctagccggttcagcggctctggcagcggaacagatttcaccctgacaattcactctctggaggccgaggatgccgccacatattactgccaccagtctagcagcctgccttggacctttggacagggcaccaaggtggaaatcaagggcggaggcggctccggaggaggcggctctggtggcggcggcagccaagtgcagctggtggagagcggcggcggcgtcgtgcagcccggcagaagcctgcggctgtcttgcgctgccagcggcttcacctttacaaactacgacatgcactgggtcagacaggcccctggcaaaggcctggaatgggtgaccatcatctggcacgacggctccaataagtactacctggacagcgtgcggggcagattcacgatcagcagagataattccaagaacaccctgtacctgcagatgaacagcctgagagccgaggacaccgccgtgtactattgcgccagaggcgacaactggaacgacgagcaccactacttctactacatggacgtgtggggcaagggcaccaccgtgaccgtgtccagc

SEQ ID NO: 738 - DNA, 741 bp, synthetic construct
  misc_feature 1..741: note = Synthetic
  source 1..741: mol_type = other DNA
gaaatcgtgctgacccagagccccgctacactgagcctctcccctggcgagcgggccacactgtcttgtagagcctctcagtccgtgtccagcagcctggcctggtatcagcagaagcccggccaggctccaagactgctgatctacgacgccagcaatagagccaccggcatccccgcccggttttccggcagcggatctggaacagattttaccctgaccatcagcagcctggaacctgaggatttcgccgtgtactactgccagcaaagaagcaactggcctctgacattcggcggcggcacaaaggtggaaatcaagggcggcggaggcagcggaggcggaggctctggcggcggtggcagtcaggtgcagctggttgagagcggcggaggcgtggtgcaacctggaagatctctgcgcctgagctgcgccgccagcggcttcaccttcagcaactacgatatgcactgggtgcggcaggcccctggcaagggcctggaatgggtcaccattatctggcatgacggcagcaacaagtactacctggacagcgtgaaaggcagattcaccatcagcagagacaatagcaagaacaccctgtacctgcagatgaacagcctgcgggccgaggacaccgccgtgtactattgcgccagaggcgacaactggaacgacgagcaccactacttctactatatggacgtgtggggcaaaggcacaaccgtgaccgtcagcagc

SEQ ID NO: 739 - DNA, 729 bp, synthetic construct
  misc_feature 1..729: note = Synthetic
  source 1..729: mol_type = other DNA
gagatcgtgctgacacagagccccggaacactgagcctgagccctggcgagcgggctacactgtcttgcagagcttctcagagcgtttcctccagctacctggcctggtatcagcaaaagcccggccaagctccaagactgctgatctacggcgccagctctagggccaccggcattcctgatagattcagcggctctggcagcggaacagattttaccctgaccatcagcagactggagcctgaggatttcgccgtgtactactgccagcagtacggatctagctggacctttggccagggcaccaaggtggaaatcaaaggcggaggaggcagcggcggcggcggcagcggcggaggcggcagcgaagtgcagctggtcgagagcggcggcggcgtggtgcggcctggcgggtccctgagactgagctgcgccgcctctggcttcaccttcgacgactatggcatgagctgggtcagacaggcccctggaaaaggcctggaatgggtgtccggaatcaactggaatggcggcagtacaggctacgtggacagcgtgaagggcagattcaccatcagccgggacaacgccaagaacagcctgtatctgcagatgaacagcctgcgggccgaggacaccgccctgtaccactgtgccagacctgtgacaaccgactactactactacatggacgtgtggggcaagggcaccaccgtgaccgtgtcttcc

SEQ ID NO: 740 - DNA, 753 bp, synthetic construct
  misc_feature 1..753: note = Synthetic
  source 1..753: mol_type = other DNA
gaaattgtgctgacccagagccccggcaccctgagcctgtctccaggcgagcgggctaccctgtcctgcagagccagccagtctgtttccagctcttacctggcctggtatcagcaaaagcctggacaggcccctagactgctgatctacggcgcctctagcagggctacaggcatccctgatagatttagcggcagcggctctggcaccgacttcaccctgaccatctccagactggaacccgaggatttcgccgtgtactactgccagcagtacggcagcagctggacatttggccagggcacaaaggtggaaatcaagggcggtggaggcagcggaggcggcggaagcggcggcggcggcagtgaggtgcagctgctggagagcggaggaggcctggtgcaacctggcggcagcctgcggctgagctgcgccgcttccggcttcaccttcagcagctacgccatgagctgggtgcggcaggctcctggaaaaggcctggagtgggtcagcgccatcagcggcagcggaggctcaacatactacgccgacagcgtgaagggcagattcaccatcagccgcgacaactctaagaacaccctgtacctgcagatgaactctctgagagccgaggacaccgccgtgtactattgtgccaagaagggcacaagctacaactggaatgatgtgcactactactactactattatatggacgtgtggggcaaaggcacaaccgtgaccgtgtccagc

SEQ ID NO: 741 - DNA, 735 bp, synthetic construct
  misc_feature 1..735: note = Synthetic
  source 1..735: mol_type = other DNA
gagatcgtgctgacccagtctccaggcaccctgagcctgagccccggcgagcgggccacactgagctgcagagcctctcagagcgtcagctctagctacctggcctggtatcagcaaaaacctggccaggcccctagactgctgatctacggcgccagcagccgggccaccggcatccctgatagattcagcggatctggcagcggcaccgactttaccctcaccatcagcagactggaacccgaggacttcgccgtgtactattgtcagcagtacggcagcagctggacattcggccagggcaccaaggtggaaatcaagggcggaggcggcagcggcggaggaggatctggcggcggcggcagccagctgcaactgcaggagagcggtcctggactggtgaagccttctgagacactgagcctgacctgcaccgtgtccggcggctctatcagctcctccagctactactggggctggatcagacagccacctggcaagggcctggaatggatcggcagcatttactattctggctcaacatactacaaccccagccttaaaagcagagtgacaatcagcgtggacaccagcaagaaccagttcagcctgaagctgtcctctgtgaccgccgctgatactgccgtttactactgcaccaccggaacaacagcttattactactactactacatggacgtgtggggaaagggcaccacagtgaccgtgtccagc

SEQ ID NO: 742 - DNA, 732 bp, synthetic construct
  misc_feature 1..732: note = Synthetic
  source 1..732: mol_type = other DNA
gagatcgtgctgacccagtctcccggaacactctccctgtccccaggcgagcgggctacactgagctgccgggccagccagagcgtgtcctcgtcttatctggcctggtatcagcagaaacctggccaagcccctagactgctgatctacggcgccagcagccgggccacaggcatccccgatagattcagcggcagcggaagcggcaccgacttcaccctgacaatcagcagactggaacctgaggacttcgccgtgtactattgtcagcagtacggcagcagctggaccttcggccagggcaccaaggttgaaattaagggcggcggcggctctggcggaggcggctctggcggcggcggaagcgaggtgcagctgctggagagcggtggaggcctggtgcaacctggcggctccctgcggctgagctgcgccgccagcggcttcacctttagctcttacgccatgacctgggtcagacaggcccctggcaagggactggaatgggtgtctgccatcagcggcagcggaggatctacatactacgctgatagcgtgaagggcagatttacaatcagccgcgacaatagcaagaacaccctgtacctgcagatgaacagcctgagagccgaggacaccgccgtgtactactgcgctagaggcggctacaactggcactactactactacatggacgtgtggggcaaaggaaccaccgtgaccgtgtccagc

SEQ ID NO: 743 - DNA, 744 bp, synthetic construct
  misc_feature 1..744: note = Synthetic
  source 1..744: mol_type = other DNA
gagatcgtgctgacccagagccccgacttccagtccgtgacccctaaggaaaaggtgaccatcacatgcagagccagccagaacatcggcagcagcctgcactggtatcagcagaaacctgatcagtctccaaagctgctgatcaaattcgcctctcagagcatcagcggtgttcctagcagattcagcggctccggcagcggcactgattttacactgaccatcaacagcctggaggccgaggatgccgctgcctactactgccaccagagctctagcctgccctggaccttcggccagggcacaaaggtggaaatcaagggcggcggcggaagcggcggcggcggatctggcggaggcggcagccaagtgcagctggtggagagcggaggcggagtcgtgcaacctggcagaagcctgagactgagctgcgccgcttctggcttcaccttttctagctacgacatgcactgggtgcggcaggcccctggaaaaggcctggaatgggtcagcgtgatctggtatgacggctccaacaagaagtacggcgacagcgccaagggcaggttcaccattagccgggacaattctaagaacaccctggacctgcagatgaacagcctgcgggctgaggacaccgccgtgtactattgtgccagaggcgataattggaacgacgagggcggctactactactactacatggacgtgtggggcaagggaacaaccgtgacagtgtccagc

SEQ ID NO: 744 - DNA, 744 bp, synthetic construct
  misc_feature 1..744: note = Synthetic
  source 1..744: mol_type = other DNA
gacattcagatgacacagagccccagcagcctctccacctctgtgggcgatagagtgaccatcacatgccgggccagccagggcatcagcaactacctggcctggttccagcagaagcctggaaaggcccctaagagcctgatctacgccgccagcagcctgcagagcggagtgccatctaagttcagcggcagcggatctggcaccgacttcagcctgaccatcagctctctgcagcctgaggattttgccacatactactgtcagcagtacaacagctaccctatcacattcggccagggcaccagactggaaatcaagggcggaggcggcagcggcggcggcggatctggcggaggcggcagccaagtgcagctggtggagagcggcggcggcgtggtgcagcccggacgctccctgcggctgagctgcgccgccagcggctttaccttctctagctacgatatgcactgggtcagacaggctcctggcaaaggcctggaatgggtgtccgtgatctggtacgacggctccaacaagaagtacggcgacagcgccaagggcagattcaccatctctcgggacaatagcaagaacacactggacctgcagatgaactctctgagagccgaggacaccgccgtgtactactgcgccagaggcgataattggaacgacgagggcggttattactactactatatggacgtgtggggaaaaggcacaaccgtgaccgtttccagc

SEQ ID NO: 745 - DNA, 735 bp, synthetic construct
  misc_feature 1..735: note = Synthetic
  source 1..735: mol_type = other DNA
gagatcgtgctgacacagagccctgatttccaaagcgtgacccctaaggaaaaggtgaccatcacatgcagagcctctcagaacattggaagtagcctgcactggtatcagcagaaacccgatcagtccccaaagctgctgatcaagttcgccagccagagcatcagcggagtgcccagccggttcagcggctctggctctggcaccgacttcaccctgaccatcaatagcctggaggccgaggacgccgctgcttattactgccaccagagcagctccctgccttggacctttggccagggcaccaaggtcgagatcaagggaggcggaggcagcggaggcggcggcagcggcggcggcggcagccaagtgcagctggtgcagtctggagccgaggtgaaaaagagcggcgcctcagtgaaggtgtcctgcaaggccagcggctacacactgaccagctacggcatctcttgggttagacaggcccctggacaaggcctggaatggatgggctggatcagcgcctacaacggcaacatcaactacgcccagaaattccagggcagagtgacaatgaccacagacaccagcacctccaccgcttacatggaactgcggagcctgagaagcgacgacaccgccgtgtactactgtgtgcgggacggcgatagatacaattggaaccacagctatatggacgtgtggggcaagggcacaacagtcaccgtgtcttct

SEQ ID NO: 746 - DNA, 735 bp, synthetic construct
  misc_feature 1..735: note = Synthetic
  source 1..735: mol_type = other DNA
gacatccagatgacacagagccccagcagcctgagcacctctgtgggcgatagagtgaccatcacctgcagagccagccagggcatcagcaactacctggcctggttccagcagaaacctggaaaggcccctaagagcctgatctacgccgcttcttctctgcaaagcggcgtgccaagcaagttcagcggcagcggcagcggaacagacttcagcctgacaatttctagcctccagcctgaggattttgccacatactactgccagcagtacaacagctaccccatcaccttcggccagggcacaagactggaaatcaagggcggcggcggctctggaggcggcggatctggcggaggaggttcccaagtgcagctggttcagagcggagccgaggtgaaaaagtccggcgccagcgtgaaggtgtcatgcaaggcctctggctacaccctgacctcctacggcatcagctgggtccggcaggcccctggccagggcctggagtggatgggctggatcagcgcttataatggcaacatcaattacgcccagaagttccaaggcagagtgacaatgaccacagataccagcaccagcacagcttacatggaactgagatccctgcggagcgacgacaccgccgtgtactattgtgtgcgggacggcgacagatacaactggaaccacagctacatggacgtgtggggcaagggcaccaccgtgaccgtgtccagc

SEQ ID NO: 747 - DNA, 732 bp, synthetic construct
  misc_feature 1..732: note = Synthetic
  source 1..732: mol_type = other DNA
gagatcgtgctgacacagtcccctgacttccagagcgtgacccctaaggaaaaggtgacaatcacctgccgggcctctcagagcatcggcagcagcctgcactggtatcagcagaagcccgatcagtccccaaagctgctgatcaaatacgtgtcccaatctatcagcggcgtgcccagccggttttctggcagcggcagcggaacagacttcaccctgaccattaactccctggaggccgaggatgccgctgcctactattgtcaccagagcagcagcctgccttggacattcggccagggcaccaaggtggaaatcaagggcggaggaggcagcggcggtggcggcagtggcggaggcggcagcgaggtgcagctgctggaaagcggaggcgacctggtgcaacctggaggcagcctgcggctgagctgcgccgcttctggcttcacctttagcacctacgccatgacatgggttagacaggcccctggcaagggcctggagtgggtcagcgccatcagcggcaccagcggctctacctactacgccgacagcgtgaagggcagattcaccatctccagagataattcaaagagcaccctgtacctgcacatgaacagcctgagaaccgaggacaccgccgtgtactattgcgctagaggcggctacaactggcactactactactacatggacgtgtggggaaaaggcacaacagtgaccgtgtcttct

SEQ ID NO: 748 - DNA, 735 bp, synthetic construct
  misc_feature 1..735: note = Synthetic
  source 1..735: mol_type = other DNA
gagatcgtgatgacccagtctcctgctacactgagcctgagccccggcgagcgggccaccctgagttgtagagccagccagagcgtgtcttctagctacctgagctggtatcagcaaaaacctggccttgctccaagactgctgatctacggcgcctctacaagagccaccggcatccccgccagatttagcggctctggcagcggcaccgacttcaccctgaccatctccagcctccagcctgaggatttcgccgtctactactgccagcaggattacaacctgcctcctaccttcggccagggcacaaaggtggaaattaagggcggcggaggcagcggcggaggaggctctggcggcggcggcagcgaggtgcaactgctggaaagcggaggagatctggtgcagcccggcggctccctgcgcctgtcttgcgccgccagcggctttacattcagcacctacgccatgacatgggttagacaggcccctggaaaaggcctggaatgggtgtccgccatcagcggaaccagcggcagcacatactacgccgacagcgtgaagggcagattcaccatcagccgggacaacagcaagtccaccctgtacctgcacatgaacagcctgcggaccgaggacaccgccgtgtactattgcgctagaggcggttataattggcactactactactacatggacgtgtggggcaagggcacgaccgtgacagtgtccagc

SEQ ID NO: 749 - protein, 486 aa, synthetic construct
  REGION 1..486: note = Synthetic
MALPVTALLLPLALLLHAARPQVQLVESGGGVVQPGRSLRLSCAASGFTFNNYDMYWVRQAPGKGLEWVAVTWYDGSNKYYADSVKGRFTISRDNSKNTLYLQMNSLRAEDTAVYYCARGDNWNDEHHYFYYMDVWGKGTTVTVSSGGGGSGGGGSGGGGSEIVLTQSPDFQSVTPKEKVTITCRASQSIGSSLHWYQQKPDQSPKLLIKFASQSFSGVPSRFSGSGSGTDFTLTIHSLEAEDAATYYCHQSSSLPWTFGQGTKVEIKTTTPAPRPPTPAPTIASQPLSLRPEACRPAAGGAVHTRGLDFACDIYIWAPLAGTCGVLLLSLVITLYCRRDQRLPPDAHKPPGGGSFRTPIQEEQADAHSTLAKIRVKFSRSADAPAYQQGQNQLYNELNLGRREEYDVLDKRRGRDPEMGGKPRRKNPQEGLYNELQKDKMAEAYSEIGMKGERRRGKGHDGLYQGLSTATKDTYDALHMQALPPR

SEQ ID NO: 750 - protein, 486 aa, synthetic construct
  REGION 1..486: note = Synthetic
MALPVTALLLPLALLLHAARPQVQLVESGGGVVQPGRSLRLSCAASGFTFSNYDMHWVRQAPGKGLEWVTIIWHDASNKYYLDSVKGRFTISRDNSKNTLYLQMNSLRAEDTAVYYCARGDNWNDEHHYFYYMDVWGKGTTVTVSSGGGGSGGGGSGGGGSEIVLTQSPDFQSVTPKEKVTITCRASQSIGSSLHWYQQKPDQSPKLLIKFASQSFSGVPSRFSGSGSGTDFTLTIHSLEAEDAATYYCHQSSSLPWTFGQGTKVEIKTTTPAPRPPTPAPTIASQPLSLRPEACRPAAGGAVHTRGLDFACDIYIWAPLAGTCGVLLLSLVITLYCRRDQRLPPDAHKPPGGGSFRTPIQEEQADAHSTLAKIRVKFSRSADAPAYQQGQNQLYNELNLGRREEYDVLDKRRGRDPEMGGKPRRKNPQEGLYNELQKDKMAEAYSEIGMKGERRRGKGHDGLYQGLSTATKDTYDALHMQALPPR

SEQ ID NO: 751 - protein, 486 aa, synthetic construct
  REGION 1..486: note = Synthetic
MALPVTALLLPLALLLHAARPQVQLVESGGGVVQPGRSLRLSCAASGFTFSNYDMHWVRQAPGKGLEWVTIIWHDGSNKYYLDSVKGRFTISRDNSKNTLYLQMNSLRAEDTAVYYCARGDNWNDEHHYFYYMDVWGKGTTVTVSSGGGGSGGGGSGGGGSEIVLTQSPDFQSVTPKEKVTITCRASQSIGSSLHWYQQKPDQSPKLLIKFASQSFSGVPSRFSGSGSGTDFTLTIHSLEAEDAATYYCHQSSSLPWTFGQGTKVEIKTTTPAPRPPTPAPTIASQPLSLRPEACRPAAGGAVHTRGLDFACDIYIWAPLAGTCGVLLLSLVITLYCRRDQRLPPDAHKPPGGGSFRTPIQEEQADAHSTLAKIRVKFSRSADAPAYQQGQNQLYNELNLGRREEYDVLDKRRGRDPEMGGKPRRKNPQEGLYNELQKDKMAEAYSEIGMKGERRRGKGHDGLYQGLSTATKDTYDALHMQALPPR

SEQ ID NO: 752 - protein, 480 aa, synthetic construct
  REGION 1..480: note = Synthetic
MALPVTALLLPLALLLHAARPEVQLLESGGGLVQPGGSLRLSCAASGFTFSIYAMSWVRQAPGKGLEWVSAISGGGDTTYYADSVKGRFTISRDNSKTTLDLQMNSLRAEDTAVYYCAKHTSYYMDVWGKGTTVTVSSGGGGSGGGGSGGGGSQTVVTQEPSLSVSPGGTVTLTCGLSSGSVSTSYYPSWYQQTPGQAPRTLIYSTNIRSSGVPDRFSGSILGNKAALTITGAQADDESDYYCKLYMGSGIIFGSGTKVTVLTTTPAPRPPTPAPTIASQPLSLRPEACRPAAGGAVHTRGLDFACDIYIWAPLAGTCGVLLLSLVITLYCRRDQRLPPDAHKPPGGGSFRTPIQEEQADAHSTLAKIRVKFSRSADAPAYQQGQNQLYNELNLGRREEYDVLDKRRGRDPEMGGKPRRKNPQEGLYNELQKDKMAEAYSEIGMKGERRRGKGHDGLYQGLSTATKDTYDALHMQALPPR

SEQ ID NO: 753 - protein, 486 aa, synthetic construct
  REGION 1..486: note = Synthetic
MALPVTALLLPLALLLHAARPQVQLVESGGGVVQPGRSLRLSCAASGFTFSNYDKHWVRQAPGKGLEWVAVIWYDGSNKYYADSVKGRFTISRDNSKNTLYLQMNSLRAEDTAMYYCARGDNWNDEHHYFYYMDVWGKGTTVTVSSGGGGSGGGGSGGGGSEIVLTQSPDFQSVTPKEKVTITCRASQSIGSSLHWYQQKPDQSPKLLIKFASQSFSGVPSRFSGSGSGTDFTLTIHSLEAEDAATYYCHQSSSLPWTFGQGTKVEIKTTTPAPRPPTPAPTIASQPLSLRPEACRPAAGGAVHTRGLDFACDIYIWAPLAGTCGVLLLSLVITLYCRRDQRLPPDAHKPPGGGSFRTPIQEEQADAHSTLAKIRVKFSRSADAPAYQQGQNQLYNELNLGRREEYDVLDKRRGRDPEMGGKPRRKNPQEGLYNELQKDKMAEAYSEIGMKGERRRGKGHDGLYQGLSTATKDTYDALHMQALPPR

SEQ ID NO: 754 - protein, 484 aa, synthetic construct
  REGION 1..484: note = Synthetic
MALPVTALLLPLALLLHAARPQVQLVQSGAEVKKPGASVKVSCKASGYTFTNYGFSWVRQAPGQGLDWMGWISAYNGYTNYTQKLQGRVTMTTDTSTTTAYMELRSLRSDDTAVYYCARRGLLYYYYSMDVWGKGTTVTVSSGGGGSGGGGSGGGGSEIVLTQSPATLSLSPGERATLSCGASQSVYNSYLAWYQQKPGLAPRLLIYDASLRATGVPDRFSGSGSGTDFTLTISTLEPEDFAVYYCQQYGGSPMYTFGQGTKLEIKTTTPAPRPPTPAPTIASQPLSLRPEACRPAAGGAVHTRGLDFACDIYIWAPLAGTCGVLLLSLVITLYCRRDQRLPPDAHKPPGGGSFRTPIQEEQADAHSTLAKIRVKFSRSADAPAYQQGQNQLYNELNLGRREEYDVLDKRRGRDPEMGGKPRRKNPQEGLYNELQKDKMAEAYSEIGMKGERRRGKGHDGLYQGLSTATKDTYDALHMQALPPR

SEQ ID NO: 755 - protein, 480 aa, synthetic construct
  REGION 1..480: note = Synthetic
MALPVTALLLPLALLLHAARPEVQLLESGGGLVQPGGSLRLSCTASGFTFSSFAMSWVRQAPGKGLEWVSAMSGSGDTTYYADSVKGRFTISRDNSKTTLYLQMNSLRAEDTAVYSCAKHTTYYMDVWGKGTTVTVSSGGGGSGGGGSGGGGSQTVVTQEPSLSVSPGGTVTLTCGLSSGSVSTSDYPSWYQQTPGQAPRTLIYRTNTRSSGVPDRFSGSILGNKAALTITGAQADDESDYYCVLYMDSGIIFGSGTKVTVLTTTPAPRPPTPAPTIASQPLSLRPEACRPAAGGAVHTRGLDFACDIYIWAPLAGTCGVLLLSLVITLYCRRDQRLPPDAHKPPGGGSFRTPIQEEQADAHSTLAKIRVKFSRSADAPAYQQGQNQLYNELNLGRREEYDVLDKRRGRDPEMGGKPRRKNPQEGLYNELQKDKMAEAYSEIGMKGERRRGKGHDGLYQGLSTATKDTYDALHMQALPPR

SEQ ID NO: 756 - protein, 480 aa, synthetic construct
  REGION 1..480: note = Synthetic
MALPVTALLLPLALLLHAARPEVQLLESGGGLVQPGGSLRLSCAASGFTFNTYAMSWVRQAPGKGLEWVSAMSGSGDTTYYADSVKGRFTISRDNSKTTLYLQMNSLRAEDTAVYSCAKHTSYYMDVWGKGTTVTVSSGGGGSGGGGSGGGGSQTVVTQEPSLSVSPGGTVTLTCGLSSGSVSTSDYPSWYQQTPGQAPRTLIYRTNTRSSGVPDRFSGSILGNKAALTITGAQADDESDYYCVLYMGSGIIFGSGTKVTVLTTTPAPRPPTPAPTIASQPLSLRPEACRPAAGGAVHTRGLDFACDIYIWAPLAGTCGVLLLSLVITLYCRRDQRLPPDAHKPPGGGSFRTPIQEEQADAHSTLAKIRVKFSRSADAPAYQQGQNQLYNELNLGRREEYDVLDKRRGRDPEMGGKPRRKNPQEGLYNELQKDKMAEAYSEIGMKGERRRGKGHDGLYQGLSTATKDTYDALHMQALPPR

SEQ ID NO: 757 - protein, 480 aa, synthetic construct
  REGION 1..480: note = Synthetic
MALPVTALLLPLALLLHAARPEVQLLESGGDLVQPGGSLRLSCAASGFTFSTYAMSWVRQAPGKGLEWVSAISGSGENIYYADSVKGRFTISRDNSKNTLFLQMNSLRAEDTAVYYCAKHTSYYMDVWGKGTTVTVSSGGGGSGGGGSGGGGSQTVVTQEPSFSVSPGGTVTLTCGLYSDSVSTSYYPSWYQQTPGQAPRTLIYNTNTRSSGVPDRFSGSILGNKAALTITGAQADDESDYYCVLYMVSGIVFGSGTKVTVLTTTPAPRPPTPAPTIASQPLSLRPEACRPAAGGAVHTRGLDFACDIYIWAPLAGTCGVLLLSLVITLYCRRDQRLPPDAHKPPGGGSFRTPIQEEQADAHSTLAKIRVKFSRSADAPAYQQGQNQLYNELNLGRREEYDVLDKRRGRDPEMGGKPRRKNPQEGLYNELQKDKMAEAYSEIGMKGERRRGKGHDGLYQGLSTATKDTYDALHMQALPPR

SEQ ID NO: 758 - protein, 486 aa, synthetic construct
  REGION 1..486: note = Synthetic
MALPVTALLLPLALLLHAARPQVQLVESGGGVVQPGRSLRLSCAASGFTFSSYGMHWVRQAPGKGLEWVAVIWYDGINKYYADSVKGRFTISRDNSKNTLYLQMNSLRAEDTAVYYCARERLERRYYYYMDVWGKGTTVTVSSGGGGSGGGGSGGGGSQTVVTQEPSFSVSPGGTVTLTCGLSSGSVSTSYYPGWYQQTPGQAPRTLIYSTNTRSSGVPDRFSGSILGNKAALTITGAQADDESDYYCVLYMGSGMFIFGSGTKVTVLTTTPAPRPPTPAPTIASQPLSLRPEACRPAAGGAVHTRGLDFACDIYIWAPLAGTCGVLLLSLVITLYCRRDQRLPPDAHKPPGGGSFRTPIQEEQADAHSTLAKIRVKFSRSADAPAYQQGQNQLYNELNLGRREEYDVLDKRRGRDPEMGGKPRRKNPQEGLYNELQKDKMAEAYSEIGMKGERRRGKGHDGLYQGLSTATKDTYDALHMQALPPR

SEQ ID NO: 759 - protein, 480 aa, synthetic construct
  REGION 1..480: note = Synthetic
MALPVTALLLPLALLLHAARPEVQLLESGGGLVQPGGSLRLSCAASGFTFSSFAMSWVRQAPGKGLEWVSAVSGSGDDTYYADSVKGRFTISRDNSKNTLYLQMNSLRAEDTAVYYCAKHTSYYLDVWGKGTTVTVSSGGGGSGGGGSGGGGSQTVVTQEPSFSVSPGGTVTLTCALSSDSVSTSYFPSWYRQTPGQAPRTLIYNTNTRSSGVPDRFSGSILGNKAALTITGAQADDESDYYCVLYMGSGIIFGSGTKVTVLTTTPAPRPPTPAPTIASQPLSLRPEACRPAAGGAVHTRGLDFACDIYIWAPLAGTCGVLLLSLVITLYCRRDQRLPPDAHKPPGGGSFRTPIQEEQADAHSTLAKIRVKFSRSADAPAYQQGQNQLYNELNLGRREEYDVLDKRRGRDPEMGGKPRRKNPQEGLYNELQKDKMAEAYSEIGMKGERRRGKGHDGLYQGLSTATKDTYDALHMQALPPR

SEQ ID NO: 760 - protein, 486 aa, synthetic construct
  REGION 1..486: note = Synthetic
MALPVTALLLPLALLLHAARPQVQLVESGGGVVQPGRSLRLSCAASGFNFSTFDIHWVRQAPGKGLEWVALIWYDGSYKYYADSVKGRFTISRDNSKNTLDLRMNSLRAEDTAVYYCARNDNWNDEHYYHYYMDVWGKGTTVTVSSGGGGSGGGGSGGGGSEIVLTQSPDFQSVTPKEKVTITCRASQSIGSSLHWYQQKPDQSPKLLIKFASQSFSGVPSRFSGSGSGTDFTLTINSLEAEDAATYFCHQSSSLPWTFGQGTKVEIKTTTPAPRPPTPAPTIASQPLSLRPEACRPAAGGAVHTRGLDFACDIYIWAPLAGTCGVLLLSLVITLYCRRDQRLPPDAHKPPGGGSFRTPIQEEQADAHSTLAKIRVKFSRSADAPAYQQGQNQLYNELNLGRREEYDVLDKRRGRDPEMGGKPRRKNPQEGLYNELQKDKMAEAYSEIGMKGERRRGKGHDGLYQGLSTATKDTYDALHMQALPPR

SEQ ID NO: 761 - protein, 491 aa, synthetic construct
  REGION 1..491: note = Synthetic
MALPVTALLLPLALLLHAARPEVHLLESGGGLVQPGGSLRLSCAASGFTFSSYAMNWVRQAPGKGLEWVSSISGSGSSSYYADSVKGRFTISRDNSKNTLYLQMNSLRAEDTAVYYCASRGFNSQYPPGYYYYYMDVWGKGTTVTVSSGGGGSGGGGSGGGGSQTVVTQEPSFSVSPGGTVTLTCGLSSGSVSTSYFPSWYQQTPGQAPRTLIYITNTRSSGVPDRFSGSIIGNKAALTITGAQADDESDYFCVLYMGSGTWVFGGGTKLTVLTTTPAPRPPTPAPTIASQPLSLRPEACRPAAGGAVHTRGLDFACDIYIWAPLAGTCGVLLLSLVITLYCRRDQRLPPDAHKPPGGGSFRTPIQEEQADAHSTLAKIRVKFSRSADAPAYQQGQNQLYNELNLGRREEYDVLDKRRGRDPEMGGKPRRKNPQEGLYNELQKDKMAEAYSEIGMKGERRRGKGHDGLYQGLSTATKDTYDALHMQALPPR

SEQ ID NO: 762 - protein, 478 aa, synthetic construct
  REGION 1..478: note = Synthetic
MALPVTALLLPLALLLHAARPEVQLLESGGGLVQPGGSLRLSCAASGFTFSNYAMTWVRQAPGKGLEWVSAISGSGIGTYYADSVQGRFTTSRDNSKNTLYLQMNSLRAEDTAVYYCAKGGYNWKDVWGKGTTVTVSSGGGGSGGGGSGGGGSEIVLTQSPDFQSVTPKEKVTITCRASQSIGSSLHWYQQKPDQSPKLLIKFASQSFSGVPSRFSGSGSGTDFTLTIHSLEAEDAATYYCHQSSSLPWTFGQGTKVEIKTTTPAPRPPTPAPTIASQPLSLRPEACRPAAGGAVHTRGLDFACDIYIWAPLAGTCGVLLLSLVITLYCRRDQRLPPDAHKPPGGGSFRTPIQEEQADAHSTLAKIRVKFSRSADAPAYQQGQNQLYNELNLGRREEYDVLDKRRGRDPEMGGKPRRKNPQEGLYNELQKDKMAEAYSEIGMKGERRRGKGHDGLYQGLSTATKDTYDALHMQALPPR

SEQ ID NO: 763 - protein, 486 aa, synthetic construct
  REGION 1..486: note = Synthetic
MALPVTALLLPLALLLHAARPQVQLVESGGGVVQPGRSLRLSCAASGFTFTNYDMHWVRQAPGKGLEWVTIIWHDGSNKYYLDSVRGRFTISRDNSKNTLYLQMNSLRAEDTAVYYCARGDNWNDEHHYFYYMDVWGKGTTVTVSSGGGGSGGGGSGGGGSEIVLTQSPDFQSVTPKEKVTITCRASQSIGSSLHWYQQKPDQSPKLLIKFASQSFSGVPSRFSGSGSGTDFTLTIHSLEAEDAATYYCHQSSSLPWTFGQGTKVEIKTTTPAPRPPTPAPTIASQPLSLRPEACRPAAGGAVHTRGLDFACDIYIWAPLAGTCGVLLLSLVITLYCRRDQRLPPDAHKPPGGGSFRTPIQEEQADAHSTLAKIRVKFSRSADAPAYQQGQNQLYNELNLGRREEYDVLDKRRGRDPEMGGKPRRKNPQEGLYNELQKDKMAEAYSEIGMKGERRRGKGHDGLYQGLSTATKDTYDALHMQALPPR

SEQ ID NO: 764 - protein, 486 aa, synthetic construct
  REGION 1..486: note = Synthetic
MALPVTALLLPLALLLHAARPQVQLVESGGGVVQPGRSLRLSCAASGFTFSNYDMHWVRQAPGKGLEWVTIIWHDGSNKYYLDSVKGRFTISRDNSKNTLYLQMNSLRAEDTAVYYCARGDNWNDEHHYFYYMDVWGKGTTVTVSSGGGGSGGGGSGGGGSEIVLTQSPATLSLSPGERATLSCRASQSVSSSLAWYQQKPGQAPRLLIYDASNRATGIPARFSGSGSGTDFTLTISSLEPEDFAVYYCQQRSNWPLTFGGGTKVEIKTTTPAPRPPTPAPTIASQPLSLRPEACRPAAGGAVHTRGLDFACDIYIWAPLAGTCGVLLLSLVITLYCRRDQRLPPDAHKPPGGGSFRTPIQEEQADAHSTLAKIRVKFSRSADAPAYQQGQNQLYNELNLGRREEYDVLDKRRGRDPEMGGKPRRKNPQEGLYNELQKDKMAEAYSEIGMKGERRRGKGHDGLYQGLSTATKDTYDALHMQALPPR

SEQ ID NO: 765 - protein, 482 aa, synthetic construct
  REGION 1..482: note = Synthetic
MALPVTALLLPLALLLHAARPEVQLVESGGGVVRPGGSLRLSCAASGFTFDDYGMSWVRQAPGKGLEWVSGINWNGGSTGYVDSVKGRFTISRDNAKNSLYLQMNSLRAEDTALYHCARPVTTDYYYYMDVWGKGTTVTVSSGGGGSGGGGSGGGGSEIVLTQSPGTLSLSPGERATLSCRASQSVSSSYLAWYQQKPGQAPRLLIYGASSRATGIPDRFSGSGSGTDFTLTISRLEPEDFAVYYCQQYGSSWTFGQGTKVEIKTTTPAPRPPTPAPTIASQPLSLRPEACRPAAGGAVHTRGLDFACDIYIWAPLAGTCGVLLLSLVITLYCRRDQRLPPDAHKPPGGGSFRTPIQEEQADAHSTLAKIRVKFSRSADAPAYQQGQNQLYNELNLGRREEYDVLDKRRGRDPEMGGKPRRKNPQEGLYNELQKDKMAEAYSEIGMKGERRRGKGHDGLYQGLSTATKDTYDALHMQALPPR

SEQ ID NO: 766 - protein, 490 aa, synthetic construct
  REGION 1..490: note = Synthetic
MALPVTALLLPLALLLHAARPEVQLLESGGGLVQPGGSLRLSCAASGFTFSSYAMSWVRQAPGKGLEWVSAISGSGGSTYYADSVKGRFTISRDNSKNTLYLQMNSLRAEDTAVYYCAKKGTSYNWNDVHYYYYYYMDVWGKGTTVTVSSGGGGSGGGGSGGGGSEIVLTQSPGTLSLSPGERATLSCRASQSVSSSYLAWYQQKPGQAPRLLIYGASSRATGIPDRFSGSGSGTDFTLTISRLEPEDFAVYYCQQYGSSWTFGQGTKVEIKTTTPAPRPPTPAPTIASQPLSLRPEACRPAAGGAVHTRGLDFACDIYIWAPLAGTCGVLLLSLVITLYCRRDQRLPPDAHKPPGGGSFRTPIQEEQADAHSTLAKIRVKFSRSADAPAYQQGQNQLYNELNLGRREEYDVLDKRRGRDPEMGGKPRRKNPQEGLYNELQKDKMAEAYSEIGMKGERRRGKGHDGLYQGLSTATKDTYDALHMQALPPR

SEQ ID NO: 767 - protein, 484 aa, synthetic construct
  REGION 1..484: note = Synthetic
MALPVTALLLPLALLLHAARPQLQLQESGPGLVKPSETLSLTCTVSGGSISSSSYYWGWIRQPPGKGLEWIGSIYYSGSTYYNPSLKSRVTISVDTSKNQFSLKLSSVTAADTAVYYCTTGTTAYYYYYYMDVWGKGTTVTVSSGGGGSGGGGSGGGGSEIVLTQSPGTLSLSPGERATLSCRASQSVSSSYLAWYQQKPGQAPRLLIYGASSRATGIPDRFSGSGSGTDFTLTISRLEPEDFAVYYCQQYGSSWTFGQGTKVEIKTTTPAPRPPTPAPTIASQPLSLRPEACRPAAGGAVHTRGLDFACDIYIWAPLAGTCGVLLLSLVITLYCRRDQRLPPDAHKPPGGGSFRTPIQEEQADAHSTLAKIRVKFSRSADAPAYQQGQNQLYNELNLGRREEYDVLDKRRGRDPEMGGKPRRKNPQEGLYNELQKDKMAEAYSEIGMKGERRRGKGHDGLYQGLSTATKDTYDALHMQALPPR

SEQ ID NO: 768 - protein, 483 aa, synthetic construct
  REGION 1..483: note = Synthetic
MALPVTALLLPLALLLHAARPEVQLLESGGGLVQPGGSLRLSCAASGFTFSSYAMTWVRQAPGKGLEWVSAISGSGGSTYYADSVKGRFTISRDNSKNTLYLQMNSLRAEDTAVYYCARGGYNWHYYYYMDVWGKGTTVTVSSGGGGSGGGGSGGGGSEIVLTQSPGTLSLSPGERATLSCRASQSVSSSYLAWYQQKPGQAPRLLIYGASSRATGIPDRFSGSGSGTDFTLTISRLEPEDFAVYYCQQYGSSWTFGQGTKVEIKTTTPAPRPPTPAPTIASQPLSLRPEACRPAAGGAVHTRGLDFACDIYIWAPLAGTCGVLLLSLVITLYCRRDQRLPPDAHKPPGGGSFRTPIQEEQADAHSTLAKIRVKFSRSADAPAYQQGQNQLYNELNLGRREEYDVLDKRRGRDPEMGGKPRRKNPQEGLYNELQKDKMAEAYSEIGMKGERRRGKGHDGLYQGLSTATKDTYDALHMQALPPR

SEQ ID NO: 769 - protein, 487 aa, synthetic construct
  REGION 1..487: note = Synthetic
MALPVTALLLPLALLLHAARPQVQLVESGGGVVQPGRSLRLSCAASGFTFSSYDMHWVRQAPGKGLEWVSVIWYDGSNKKYGDSAKGRFTISRDNSKNTLDLQMNSLRAEDTAVYYCARGDNWNDEGGYYYYYMDVWGKGTTVTVSSGGGGSGGGGSGGGGSEIVLTQSPDFQSVTPKEKVTITCRASQNIGSSLHWYQQKPDQSPKLLIKFASQSISGVPSRFSGSGSGTDFTLTINSLEAEDAAAYYCHQSSSLPWTFGQGTKVEIKTTTPAPRPPTPAPTIASQPLSLRPEACRPAAGGAVHTRGLDFACDIYIWAPLAGTCGVLLLSLVITLYCRRDQRLPPDAHKPPGGGSFRTPIQEEQADAHSTLAKIRVKFSRSADAPAYQQGQNQLYNELNLGRREEYDVLDKRRGRDPEMGGKPRRKNPQEGLYNELQKDKMAEAYSEIGMKGERRRGKGHDGLYQGLSTATKDTYDALHMQALPPR

SEQ ID NO: 770 - protein, 487 aa, synthetic construct
  REGION 1..487: note = Synthetic
MALPVTALLLPLALLLHAARPQVQLVESGGGVVQPGRSLRLSCAASGFTFSSYDMHWVRQAPGKGLEWVSVIWYDGSNKKYGDSAKGRFTISRDNSKNTLDLQMNSLRAEDTAVYYCARGDNWNDEGGYYYYYMDVWGKGTTVTVSSGGGGSGGGGSGGGGSDIQMTQSPSSLSTSVGDRVTITCRASQGISNYLAWFQQKPGKAPKSLIYAASSLQSGVPSKFSGSGSGTDFSLTISSLQPEDFATYYCQQYNSYPITFGQGTRLEIKTTTPAPRPPTPAPTIASQPLSLRPEACRPAAGGAVHTRGLDFACDIYIWAPLAGTCGVLLLSLVITLYCRRDQRLPPDAHKPPGGGSFRTPIQEEQADAHSTLAKIRVKFSRSADAPAYQQGQNQLYNELNLGRREEYDVLDKRRGRDPEMGGKPRRKNPQEGLYNELQKDKMAEAYSEIGMKGERRRGKGHDGLYQGLSTATKDTYDALHMQALPPR

SEQ ID NO: 771 - protein, 484 aa, synthetic construct
  REGION 1..484: note = Synthetic
MALPVTALLLPLALLLHAARPQVQLVQSGAEVKKSGASVKVSCKASGYTLTSYGISWVRQAPGQGLEWMGWISAYNGNINYAQKFQGRVTMTTDTSTSTAYMELRSLRSDDTAVYYCVRDGDRYNWNHSYMDVWGKGTTVTVSSGGGGSGGGGSGGGGSEIVLTQSPDFQSVTPKEKVTITCRASQNIGSSLHWYQQKPDQSPKLLIKFASQSISGVPSRFSGSGSGTDFTLTINSLEAEDAAAYYCHQSSSLPWTFGQGTKVEIKTTTPAPRPPTPAPTIASQPLSLRPEACRPAAGGAVHTRGLDFACDIYIWAPLAGTCGVLLLSLVITLYCRRDQRLPPDAHKPPGGGSFRTPIQEEQADAHSTLAKIRVKFSRSADAPAYQQGQNQLYNELNLGRREEYDVLDKRRGRDPEMGGKPRRKNPQEGLYNELQKDKMAEAYSEIGMKGERRRGKGHDGLYQGLSTATKDTYDALHMQALPPR

SEQ ID NO: 772 - protein, 484 aa, synthetic construct
  REGION 1..484: note = Synthetic
MALPVTALLLPLALLLHAARPQVQLVQSGAEVKKSGASVKVSCKASGYTLTSYGISWVRQAPGQGLEWMGWISAYNGNINYAQKFQGRVTMTTDTSTSTAYMELRSLRSDDTAVYYCVRDGDRYNWNHSYMDVWGKGTTVTVSSGGGGSGGGGSGGGGSDIQMTQSPSSLSTSVGDRVTITCRASQGISNYLAWFQQKPGKAPKSLIYAASSLQSGVPSKFSGSGSGTDFSLTISSLQPEDFATYYCQQYNSYPITFGQGTRLEIKTTTPAPRPPTPAPTIASQPLSLRPEACRPAAGGAVHTRGLDFACDIYIWAPLAGTCGVLLLSLVITLYCRRDQRLPPDAHKPPGGGSFRTPIQEEQADAHSTLAKIRVKFSRSADAPAYQQGQNQLYNELNLGRREEYDVLDKRRGRDPEMGGKPRRKNPQEGLYNELQKDKMAEAYSEIGMKGERRRGKGHDGLYQGLSTATKDTYDALHMQALPPR

SEQ ID NO: 773 - protein, 483 aa, synthetic construct
  REGION 1..483: note = Synthetic
MALPVTALLLPLALLLHAARPEVQLLESGGDLVQPGGSLRLSCAASGFTFSTYAMTWVRQAPGKGLEWVSAISGTSGSTYYADSVKGRFTISRDNSKSTLYLHMNSLRTEDTAVYYCARGGYNWHYYYYMDVWGKGTTVTVSSGGGGSGGGGSGGGGSEIVLTQSPDFQSVTPKEKVTITCRASQSIGSSLHWYQQKPDQSPKLLIKYVSQSISGVPSRFSGSGSGTDFTLTINSLEAEDAAAYYCHQSSSLPWTFGQGTKVEIKTTTPAPRPPTPAPTIASQPLSLRPEACRPAAGGAVHTRGLDFACDIYIWAPLAGTCGVLLLSLVITLYCRRDQRLPPDAHKPPGGGSFRTPIQEEQADAHSTLAKIRVKFSRSADAPAYQQGQNQLYNELNLGRREEYDVLDKRRGRDPEMGGKPRRKNPQEGLYNELQKDKMAEAYSEIGMKGERRRGKGHDGLYQGLSTATKDTYDALHMQALPPR

SEQ ID NO: 774 - protein, 484 aa, synthetic construct
  REGION 1..484: note = Synthetic
MALPVTALLLPLALLLHAARPEVQLLESGGDLVQPGGSLRLSCAASGFTFSTYAMTWVRQAPGKGLEWVSAISGTSGSTYYADSVKGRFTISRDNSKSTLYLHMNSLRTEDTAVYYCARGGYNWHYYYYMDVWGKGTTVTVSSGGGGSGGGGSGGGGSEIVMTQSPATLSLSPGERATLSCRASQSVSSSYLSWYQQKPGLAPRLLIYGASTRATGIPARFSGSGSGTDFTLTISSLQPEDFAVYYCQQDYNLPPTFGQGTKVEIKTTTPAPRPPTPAPTIASQPLSLRPEACRPAAGGAVHTRGLDFACDIYIWAPLAGTCGVLLLSLVITLYCRRDQRLPPDAHKPPGGGSFRTPIQEEQADAHSTLAKIRVKFSRSADAPAYQQGQNQLYNELNLGRREEYDVLDKRRGRDPEMGGKPRRKNPQEGLYNELQKDKMAEAYSEIGMKGERRRGKGHDGLYQGLSTATKDTYDALHMQALPPR

SEQ ID NO: 775 - DNA, 1460 bp, synthetic construct
  misc_feature 1..1460: note = Synthetic
  source 1..1460: mol_type = other DNA
atggccttaccagtgaccgccttgctcctgccgctggccttgctgctccacgccgccaggccgcaggtgcagctggtggagtctgggggaggcgtggtccagcctgggaggtccctgagactctcctgtgcagcgtctggattcaccttcaataattatgacatgtactgggtccgccaggccccaggcaaggggctggagtgggtggcagttacatggtatgatggaagtaataaatactatgcagactccgtgaagggccgattcaccatctccagagacaattccaagaacacgctgtatctgcaaatgaacagcctgagagccgaggacacggctgtgtattactgtgcgagaggtgacaactggaatgacgaacaccactatttttactacatggacgtctggggcaaagggaccacggtcaccgtctcctcaggtggaggcggttcaggcggaggtggctctggcggtggcggatcggaaattgtgctgactcagtctccagactttcagtctgtgactccaaaggagaaagtcaccatcacctgccgggccagtcagagcattggtagtagcttacactggtaccagcagaaaccagatcagtctccaaagctcctcatcaagtttgcttcccagtccttctcaggggtcccctcgaggttcagtggcagtggatctgggacagatttcaccctcaccatccatagcctggaagctgaagatgctgcaacgtattactgtcatcagagtagtagtttaccgtggacgttcggccaagggaccaaggtggaaatcaaaaccacgacgccagcgccgcggccaccaacaccggcgcccaccatcgcgtcgcagcccctgtccctgcgcccagaggcgtgccggccagcggcggggggcgcagtgcacacgagggggctggacttcgcctgtgatatctacatctgggcgcccttggccgggacttgtggggtccttctcctgtcactggttatcaccctttactgccggagggaccagaggctgccccccgatgcccacaagccccctgggggaggcagtttccggacccccatccaagaggagcaggccgacgcccactccaccctggccaagatcagagtgaagttcagcaggagcgcagacgcccccgcgtaccagcagggccagaaccagctctataacgagctcaatctaggacgaagagaggagtacgatgttttggacaagagacgtggccgggaccctgagatggggggaaagccgagaaggaagaaccctcaggaaggcctgtacaatgaactgcagaaagataagatggcggaggcctacagtgagattgggatgaaaggcgagcgccggaggggcaaggggcacgatggcctttaccagggtctcagtacagccaccaaggacacctacgacgcccttcacatgcaggccctgccccctcgcgg

SEQ ID NO: 776 - DNA, 1460 bp, synthetic construct
  misc_feature 1..1460: note = Synthetic
  source 1..1460: mol_type = other DNA
atggccttaccagtgaccgccttgctcctgccgctggccttgctgctccacgccgccaggccgcaggtgcagctggtggagtctgggggaggcgtggtccagcctgggaggtccctgagactctcctgtgcagcgtctgggttcaccttcagtaactatgacatgcactgggtccgccaggccccaggcaaggggctggagtgggtgacaattatatggcatgatgcaagtaataaatattatttagactccgtgaagggccgattcaccatctccagagacaattccaagaacacgctgtatctgcaaatgaacagcctgagagccgaggacacggctgtgtattactgtgcgagaggtgacaactggaacgacgaacaccactacttctactacatggacgtctggggcaaagggaccacggtcaccgtctcctcaggtggaggcggttcaggcggaggtggctctggcggtggcggatcggaaattgtgctgactcagtctccagactttcagtctgtgactccaaaggagaaagtcaccatcacctgccgggccagtcagagcattggtagtagcttacactggtaccagcagaaaccagatcagtctccaaagctcctcatcaagtttgcttcccagtccttctcaggggtcccctcgaggttcagtggcagtggatctgggacagatttcaccctcaccatccatagcctggaagctgaagatgctgcaacgtattactgtcatcagagtagtagtttaccgtggacgttcggccaagggaccaaggtggaaatcaaaaccacgacgccagcgccgcggccaccaacaccggcgcccaccatcgcgtcgcagcccctgtccctgcgcccagaggcgtgccggccagcggcggggggcgcagtgcacacgagggggctggacttcgcctgtgatatctacatctgggcgcccttggccgggacttgtggggtccttctcctgtcactggttatcaccctttactgccggagggaccagaggctgccccccgatgcccacaagccccctgggggaggcagtttccggacccccatccaagaggagcaggccgacgcccactccaccctggccaagatcagagtgaagttcagcaggagcgcagacgcccccgcgtaccagcagggccagaaccagctctataacgagctcaatctaggacgaagagaggagtacgatgttttggacaagagacgtggccgggaccctgagatggggggaaagccgagaaggaagaaccctcaggaaggcctgtacaatgaactgcagaaagataagatggcggaggcctacagtgagattgggatgaaaggcgagcgccggaggggcaaggggcacgatggcctttaccagggtctcagtacagccaccaaggacacctacgacgcccttcacatgcaggccctgccccctcgcgg

SEQ ID NO: 777 - DNA, 1460 bp, synthetic construct
  misc_feature 1..1460: note = Synthetic
  source 1..1460: mol_type = other DNA
atggccttaccagtgaccgccttgctcctgccgctggccttgctgctccacgccgccaggccgcaggtgcagctggtggagtctgggggaggcgtggtccagcctgggaggtccctgagactctcctgtgcagcgtctgggttcaccttcagtaactatgacatgcactgggtccgccaggccccaggcaaggggctggagtgggtgacaattatatggcatgatggaagtaataaatattatttagactccgtgaagggccgattcaccatctccagagacaattccaagaacacgctgtatctgcaaatgaacagcctgagagccgaggacacggctgtgtattactgtgcgagaggtgacaactggaacgacgaacaccactacttctactacatggacgtctggggcaaagggaccacggtcaccgtctcctcaggtggaggcggttcaggcggaggtggctctggcggtggcggatcggaaattgtgctgactcagtctccagactttcagtctgtgactccaaaggagaaagtcaccatcacctgccgggccagtcagagcattggtagtagcttacactggtaccagcagaaaccagatcagtctccaaagctcctcatcaagtttgcttcccagtccttctcaggggtcccctcgaggttcagtggcagtggatctgggacagatttcaccctcaccatccatagcctggaagctgaagatgctgcaacgtattactgtcatcagagtagtagtttaccgtggacgttcggccaagggaccaaggtggaaatcaaaaccacgacgccagcgccgcggccaccaacaccggcgcccaccatcgcgtcgcagcccctgtccctgcgcccagaggcgtgccggccagcggcggggggcgcagtgcacacgagggggctggacttcgcctgtgatatctacatctgggcgcccttggccgggacttgtggggtccttctcctgtcactggttatcaccctttactgccggagggaccagaggctgccccccgatgcccacaagccccctgggggaggcagtttccggacccccatccaagaggagcaggccgacgcccactccaccctggccaagatcagagtgaagttcagcaggagcgcagacgcccccgcgtaccagcagggccagaaccagctctataacgagctcaatctaggacgaagagaggagtacgatgttttggacaagagacgtggccgggaccctgagatggggggaaagccgagaaggaagaaccctcaggaaggcctgtacaatgaactgcagaaagataagatggcggaggcctacagtgagattgggatgaaaggcgagcgccggaggggcaaggggcacgatggcctttaccagggtctcagtacagccaccaaggacacctacgacgcccttcacatgcaggccctgccccctcgcgg

SEQ ID NO: 778 - DNA, 1442 bp, synthetic construct
  misc_feature 1..1442: note = Synthetic
  source 1..1442: mol_type = other DNA
atggccttaccagtgaccgccttgctcctgccgctggccttgctgctccacgccgccaggccggaggtgcagctgctggagtctgggggaggcttggtacagcctggggggtccctgagactctcctgtgcagcctctggattcacctttagcatctatgccatgagctgggtccgccaggctccagggaaggggctggagtgggtctcagctattagtggtggtggtgataccacatactacgcagactccgtgaagggccggttcaccatctccagagacaattccaagaccacgctggatctgcaaatgaacagcctgagagccgaggacacggccgtatattactgtgcgaaacacactagctactacatggacgtctggggcaaagggaccacggtcaccgtctcctcaggtggaggcggttcaggcggaggtggctctggcggtggcggatcgcagactgtggtgacccaggagccatcgctctcagtgtcccctggagggacagtcacactcacttgtggcttgagctctggctcagtctctactagttactaccccagctggtaccagcagaccccaggccaggctccacgcacgctcatctacagcacaaatattcggtcttctggggtccctgatcgcttctctggctccatccttgggaacaaagctgccctcaccatcacgggggcccaggcagatgatgaatctgattattattgtaagctgtatatgggaagtggcattattttcggcagtggaaccaaggtcactgtcctaaccacgacgccagcgccgcggccaccaacaccggcgcccaccatcgcgtcgcagcccctgtccctgcgcccagaggcgtgccggccagcggcggggggcgcagtgcacacgagggggctggacttcgcctgtgatatctacatctgggcgcccttggccgggacttgtggggtccttctcctgtcactggttatcaccctttactgccggagggaccagaggctgccccccgatgcccacaagccccctgggggaggcagtttccggacccccatccaagaggagcaggccgacgcccactccaccctggccaagatcagagtgaagttcagcaggagcgcagacgcccccgcgtaccagcagggccagaaccagctctataacgagctcaatctaggacgaagagaggagtacgatgttttggacaagagacgtggccgggaccctgagatggggggaaagccgagaaggaagaaccctcaggaaggcctgtacaatgaactgcagaaagataagatggcggaggcctacagtgagattgggatgaaaggcgagcgccggaggggcaaggggcacgatggcctttaccagggtctcagtacagccaccaaggacacctacgacgcccttcacatgcaggccctgccccctcgcgg

SEQ ID NO: 779 - DNA, 1460 bp, synthetic construct
  misc_feature 1..1460: note = Synthetic
  source 1..1460: mol_type = other DNA
atggccttaccagtgaccgccttgctcctgccgctggccttgctgctccacgccgccaggccgcaggtgcagctggtggagtctgggggaggcgtggtccagcctgggaggtccctgagactctcctgtgcagcgtctggattcaccttcagtaactatgacaagcactgggtccgccaggccccaggcaaggggctggagtgggtggcagttatatggtatgatggaagtaataagtactatgcagactccgtgaagggccgattcaccatttccagagacaattccaagaacacgctgtatctacaaatgaacagcctgagagccgaggacacggctatgtattactgtgcgagaggtgacaactggaacgacgaacaccactacttctactacatggacgtctggggcaaagggaccacggtcaccgtctcctcaggtggaggcggttcaggcggaggtggctctggcggtggcggatcggaaattgtgctgactcagtctccagactttcagtctgtgactccaaaggagaaagtcaccatcacctgccgggccagtcagagcattggtagtagcttacactggtaccagcagaaaccagatcagtctccaaagctcctcatcaagtttgcttcccagtccttctcaggggtcccctcgaggttcagtggcagtggatctgggacagatttcaccctcaccatccatagcctggaagctgaagatgctgcaacgtattactgtcatcagagtagtagtttaccgtggacgttcggccaagggaccaaggtggaaatcaaaaccacgacgccagcgccgcggccaccaacaccggcgcccaccatcgcgtcgcagcccctgtccctgcgcccagaggcgtgccggccagcggcggggggcgcagtgcacacgagggggctggacttcgcctgtgatatctacatctgggcgcccttggccgggacttgtggggtccttctcctgtcactggttatcaccctttactgccggagggaccagaggctgccccccgatgcccacaagccccctgggggaggcagtttccggacccccatccaagaggagcaggccgacgcccactccaccctggccaagatcagagtgaagttcagcaggagcgcagacgcccccgcgtaccagcagggccagaaccagctctataacgagctcaatctaggacgaagagaggagtacgatgttttggacaagagacgtggccgggaccctgagatggggggaaagccgagaaggaagaaccctcaggaaggcctgtacaatgaactgcagaaagataagatggcggaggcctacagtgagattgggatgaaaggcgagcgccggaggggcaaggggcacgatggcctttaccagggtctcagtacagccaccaaggacacctacgacgcccttcacatgcaggccctgccccctcgcgg

SEQ ID NO: 780 - DNA, 1454 bp, synthetic construct
  misc_feature 1..1454: note = Synthetic
  source 1..1454: mol_type = other DNA
atggccttaccagtgaccgccttgctcctgccgctggccttgctgctccacgccgccaggccgcaggttcagttggtacagtctggagctgaggtgaagaagcctggggcctcagtgaaggtctcctgtaaggcttctggttacacctttaccaactatggtttcagctgggtgcgacaggcccctggacaagggcttgactggatgggatggatcagcgcttacaatggttacacaaattatacacagaaactccagggcagagtcaccatgaccactgacacatccacgaccacagcctacatggagctgaggagcctgagatctgacgacacggccgtctattactgtgcgagaagaggactactctactactactactccatggacgtctggggcaaagggaccacggtcaccgtctcctcaggtggaggcggttcaggcggaggtggctctggcggtggcggatcggaaattgtgttgacgcagtctccagccaccctgtctttgtctccaggggaaagagccaccctctcctgcggggccagtcagagtgtttacaacagttacttagcctggtaccagcagaaacctggcctggcgcccaggctcctcatctatgatgcatccctcagggccactggcgtcccagacaggttcagtggcagtgggtctgggacagacttcactctcaccatcagcacactggagcctgaagattttgcagtgtattactgtcagcagtatggtggctcacccatgtacacttttggccaggggaccaagctggagatcaaaaccacgacgccagcgccgcggccaccaacaccggcgcccaccatcgcgtcgcagcccctgtccctgcgcccagaggcgtgccggccagcggcggggggcgcagtgcacacgagggggctggacttcgcctgtgatatctacatctgggcgcccttggccgggacttgtggggtccttctcctgtcactggttatcaccctttactgccggagggaccagaggctgccccccgatgcccacaagccccctgggggaggcagtttccggacccccatccaagaggagcaggccgacgcccactccaccctggccaagatcagagtgaagttcagcaggagcgcagacgcccccgcgtaccagcagggccagaaccagctctataacgagctcaatctaggacgaagagaggagtacgatgttttggacaagagacgtggccgggaccctgagatggggggaaagccgagaaggaagaaccctcaggaaggcctgtacaatgaactgcagaaagataagatggcggaggcctacagtgagattgggatgaaaggcgagcgccggaggggcaaggggcacgatggcctttaccagggtctcagtacagccaccaaggacacctacgacgcccttcacatgcaggccctgccccctcgcgg

SEQ ID NO: 781 - DNA, 1442 bp, synthetic construct
  misc_feature 1..1442: note = Synthetic
  source 1..1442: mol_type = other DNA
atggccttaccagtgaccgccttgctcctgccgctggccttgctgctccacgccgccaggccggaggtgcagctgctggagtctgggggaggcctggtacagcctggggggtccctgagactctcctgtacagcctctggattcacctttagcagctttgccatgagctgggtccgccaggctccagggaaggggctggagtgggtctcagctatgagtggtagtggtgataccacatactacgcagactccgtgaagggccggttcaccatctcccgagacaattccaagaccacgctgtatctgcaaatgaacagcctgagagccgaggacacggccgtatattcctgtgcgaagcacactacctactacatggacgtctggggcaaagggaccacggtcaccgtctcctcaggtggaggcggttcaggcggaggtggctctggcggtggcggatcgcagactgtggtgacccaggagccatcgctctcagtgtcccctggagggacagtcacactcacttgtggcttgagctctggctcagtctctactagtgactaccccagctggtaccagcagaccccaggccaggctccacgcacgctcatctacagaacaaacactcgctcttctggggtccctgatcgcttctctggctccatccttgggaacaaagctgccctcaccatcacgggggcccaggcagatgatgaatctgattattactgtgtgctgtatatggatagtggcattattttcggcagtggaaccaaggtcactgtcctaaccacgacgccagcgccgcggccaccaacaccggcgcccaccatcgcgtcgcagcccctgtccctgcgcccagaggcgtgccggccagcggcggggggcgcagtgcacacgagggggctggacttcgcctgtgatatctacatctgggcgcccttggccgggacttgtggggtccttctcctgtcactggttatcaccctttactgccggagggaccagaggctgccccccgatgcccacaagccccctgggggaggcagtttccggacccccatccaagaggagcaggccgacgcccactccaccctggccaagatcagagtgaagttcagcaggagcgcagacgcccccgcgtaccagcagggccagaaccagctctataacgagctcaatctaggacgaagagaggagtacgatgttttggacaagagacgtggccgggaccctgagatggggggaaagccgagaaggaagaaccctcaggaaggcctgtacaatgaactgcagaaagataagatggcggaggcctacagtgagattgggatgaaaggcgagcgccggaggggcaaggggcacgatggcctttaccagggtctcagtacagccaccaaggacacctacgacgcccttcacatgcaggccctgccccctcgcgg

SEQ ID NO: 782 - DNA, 1442 bp, synthetic construct
  misc_feature 1..1442: note = Synthetic
  source 1..1442: mol_type = other DNA
atggccttaccagtgaccgccttgctcctgccgctggccttgctgctccacgccgccaggccggaggtgcagctgctggagtctgggggaggcttggtacagcctggggggtccctgagactctcctgtgcagcctctggattcacctttaacacctatgccatgagctgggtccgccaggctccagggaaggggctggagtgggtctcagctatgagtggtagtggtgataccacatactacgcagactccgtgaagggccggttcaccatctccagagacaattccaagaccactctgtatctgcaaatgaacagcctgagagccgaggacacggccgtatattcctgtgcgaaacacacttcctactacatggacgtctggggcaaagggaccacggtcaccgtctcctcaggtggaggcggttcaggcggaggtggctctggcggtggcggatcgcagactgtggtgacccaggagccatcgctctcagtgtcccctggagggacagtcacactcacttgtggcttgagctctggctcagtctctactagtgactaccccagttggtaccagcagaccccaggccaggctccacgcacgctcatctacagaacaaacactcgctcttctggggtccctgatcgcttctctggctccatccttgggaacaaagctgccctcaccatcacgggggcccaggcagatgatgaatctgattattactgtgtgctgtatatgggtagtggcattattttcggcagtggaaccaaggtcactgtcctaaccacgacgccagcgccgcggccaccaacaccggcgcccaccatcgcgtcgcagcccctgtccctgcgcccagaggcgtgccggccagcggcggggggcgcagtgcacacgagggggctggacttcgcctgtgatatctacatctgggcgcccttggccgggacttgtggggtccttctcctgtcactggttatcaccctttactgccggagggaccagaggctgccccccgatgcccacaagccccctgggggaggcagtttccggacccccatccaagaggagcaggccgacgcccactccaccctggccaagatcagagtgaagttcagcaggagcgcagacgcccccgcgtaccagcagggccagaaccagctctataacgagctcaatctaggacgaagagaggagtacgatgttttggacaagagacgtggccgggaccctgagatggggggaaagccgagaaggaagaaccctcaggaaggcctgtacaatgaactgcagaaagataagatggcggaggcctacagtgagattgggatgaaaggcgagcgccggaggggcaaggggcacgatggcctttaccagggtctcagtacagccaccaaggacacctacgacgcccttcacatgcaggccctgccccctcgcgg

SEQ ID NO: 783 - DNA, 1442 bp, synthetic construct
  misc_feature 1..1442: note = Synthetic
  source 1..1442: mol_type = other DNA
atggccttaccagtgaccgccttgctcctgccgctggccttgctgctccacgccgccaggccggaggtccaattattggagtctgggggagacttggtacagcctggggggtccctgagactctcctgtgcagcctctggattcacctttagcacctatgccatgagctgggtccgccaggctccagggaaggggctggaatgggtctcagctattagtggtagtggtgaaaacatatactacgcagactccgtgaagggccggttcaccatctccagagacaattccaagaacacgctatttctacaaatgaacagcctgagagccgaggacacggccgtatattactgtgcgaaacacactagctattacatggacgtctggggcaaagggaccacggtcaccgtctcctcaggtggaggcggttcaggcggaggtggctctggcggtggcggatcgcagactgtggtgacccaggagccatcgttctcagtgtcccctggagggacagtcacactcacttgtggcttatactctgactcagtctctactagttactaccccagctggtaccagcagaccccaggccaggctccacgcacgctcatctacaacacaaacactcgctcttctggggtccctgatcgcttctctggctccatccttgggaacaaagctgccctcaccatcacgggggcccaggcagatgatgaatctgattattactgtgtactatatatggttagtggcattgttttcggcagtggaaccaaggtcactgtcctgaccacgacgccagcgccgcggccaccaacaccggcgcccaccatcgcgtcgcagcccctgtccctgcgcccagaggcgtgccggccagcggcggggggcgcagtgcacacgagggggctggacttcgcctgtgatatctacatctgggcgcccttggccgggacttgtggggtccttctcctgtcactggttatcaccctttactgccggagggaccagaggctgccccccgatgcccacaagccccctgggggaggcagtttccggacccccatccaagaggagcaggccgacgcccactccaccctggccaagatcagagtgaagttcagcaggagcgcagacgcccccgcgtaccagcagggccagaaccagctctataacgagctcaatctaggacgaagagaggagtacgatgttttggacaagagacgtggccgggaccctgagatggggggaaagccgagaaggaagaaccctcaggaaggcctgtacaatgaactgcagaaagataagatggcggaggcctacagtgagattgggatgaaaggcgagcgccggaggggcaaggggcacgatggcctttaccagggtctcagtacagccaccaaggacacctacgacgcccttcacatgcaggccctgccccctcgcgg

SEQ ID NO: 784 - DNA, 1460 bp, synthetic construct
  misc_feature 1..1460: note = Synthetic
  source 1..1460: mol_type = other DNA
atggccttaccagtgaccgccttgctcctgccgctggccttgctgctccacgccgccaggccgcaggtgcagctggtggagtctgggggaggcgtggtccagcctgggaggtccctgagactctcctgtgcagcgtctggattcaccttcagtagttatggcatgcactgggtccgccaggctccaggcaaggggctggagtgggtggcagttatatggtatgatggaattaataaatactatgcagactccgtgaagggccgattcaccatctccagagacaattccaagaacacgctgtatctgcaaatgaacagcctgagagccgaagacacggctgtgtattactgtgcgagagaacggctggaacgaaggtactactactacatggacgtctggggcaaagggaccacggtcaccgtctcctcaggtggaggcggttcaggcggaggtggctctggcggtggcggatcgcagactgtggtgacccaggagccatcgttctcagtgtcccctggagggacagtcacactcacttgtggcttgagctctggctcagtctctactagttactaccccggctggtaccagcagaccccaggccaggctccacgcacgctcatctacagcacaaacactcgctcttctggggtccctgatcgcttctctggctccatccttgggaacaaagctgccctcaccatcacgggggcccaggcagatgatgaatctgattattactgtgtgctatatatgggtagtggcatgtttattttcggcagtggaaccaaggtcactgtcctaaccacgacgccagcgccgcggccaccaacaccggcgcccaccatcgcgtcgcagcccctgtccctgcgcccagaggcgtgccggccagcggcggggggcgcagtgcacacgagggggctggacttcgcctgtgatatctacatctgggcgcccttggccgggacttgtggggtccttctcctgtcactggttatcaccctttactgccggagggaccagaggctgccccccgatgcccacaagccccctgggggaggcagtttccggacccccatccaagaggagcaggccgacgcccactccaccctggccaagatcagagtgaagttcagcaggagcgcagacgcccccgcgtaccagcagggccagaaccagctctataacgagctcaatctaggacgaagagaggagtacgatgttttggacaagagacgtggccgggaccctgagatggggggaaagccgagaaggaagaaccctcaggaaggcctgtacaatgaactgcagaaagataagatggcggaggcctacagtgagattgggatgaaaggcgagcgccggaggggcaaggggcacgatggcctttaccagggtctcagtacagccaccaaggacacctacgacgcccttcacatgcaggccctgccccctcgcgg

SEQ ID NO: 785 - DNA, 1442 bp, synthetic construct
  misc_feature 1..1442: note = Synthetic
  source 1..1442: mol_type = other DNA
atggccttaccagtgaccgccttgctcctgccgctggccttgctgctccacgccgccaggccggaggtgcagttgttggagtctgggggaggcttggtacagcctggggggtccctgagactctcctgtgcagcctctggattcacctttagcagctttgccatgagctgggtccgccaggctccagggaaggggctggaatgggtctcagctgttagtggtagtggtgatgacacatactacgcagactccgtgaagggccggttcaccatctccagagacaattccaagaacacgctgtatctgcaaatgaacagcctgagagccgaggacacggccgtatattactgtgcgaaacacactagctactacctggacgtctggggcaaagggaccacggtcaccgtctcctcaggtggaggcggttcaggcggaggtggctctggcggtggcggatcgcagactgtggtgacccaggagccatcgttctcagtgtcccctggagggacagtcacactcacttgtgccttgagctctgactcagtctctactagttactttcccagctggtaccggcagaccccaggccaggctccacgcacgctcatctacaacacaaacactcgctcttctggggtccctgatcgcttctctggctccatccttgggaacaaagctgccctcaccatcacgggggcccaggcagatgatgaatctgattattactgtgtgctatatatgggtagtggcattattttcggcagtggaaccaaggtcactgtcctaaccacgacgccagcgccgcggccaccaacaccggcgcccaccatcgcgtcgcagcccctgtccctgcgcccagaggcgtgccggccagcggcggggggcgcagtgcacacgagggggctggacttcgcctgtgatatctacatctgggcgcccttggccgggacttgtggggtccttctcctgtcactggttatcaccctttactgccggagggaccagaggctgccccccgatgcccacaagccccctgggggaggcagtttccggacccccatccaagaggagcaggccgacgcccactccaccctggccaagatcagagtgaagttcagcaggagcgcagacgcccccgcgtaccagcagggccagaaccagctctataacgagctcaatctaggacgaagagaggagtacgatgttttggacaagagacgtggccgggaccctgagatggggggaaagccgagaaggaagaaccctcaggaaggcctgtacaatgaactgcagaaagataagatggcggaggcctacagtgagattgggatgaaaggcgagcgccggaggggcaaggggcacgatggcctttaccagggtctcagtacagccaccaaggacacctacgacgcccttcacatgcaggccctgccccctcgcgg

SEQ ID NO: 786 - DNA, 1460 bp, synthetic construct
  misc_feature 1..1460: note = Synthetic
  source 1..1460: mol_type = other DNA
atggccttaccagtgaccgccttgctcctgccgctggccttgctgctccacgccgccaggccgcaggtgcagctggtggagtctgggggaggcgtggtccagcctgggaggtccctgagactctcctgtgcagcgtctggattcaacttcagtacctttgacatacactgggtccgccaggctccaggcaaggggctggagtgggtggcacttatatggtatgatggaagttataaatactatgcagactccgtgaagggccgattcaccatttccagagacaattccaagaacacgctggatctgcgaatgaacagcctgagagccgaggacacggctgtgtattactgtgcgcgaaatgacaactggaacgacgaacactactaccactattacatggacgtctggggcaaagggaccacggtcaccgtctcctcaggtggaggcggttcaggcggaggtggctctggcggtggcggatcggaaattgtcctgactcagtctccagactttcagtctgtgactccaaaggagaaagtcaccatcacctgccgggccagtcagagtattggtagtagcttacactggtaccagcagaaaccagatcagtctccaaagctcctcatcaagtttgcttcccagtccttctcaggggtcccctcgaggttcagtggcagtggatctgggacagatttcaccctcaccatcaatagcctggaagctgaagatgctgcaacgtatttctgtcatcagagtagtagtttaccgtggacgttcggccaagggaccaaggtggaaatcaaaaccacgacgccagcgccgcggccaccaacaccggcgcccaccatcgcgtcgcagcccctgtccctgcgcccagaggcgtgccggccagcggcggggggcgcagtgcacacgagggggctggacttcgcctgtgatatctacatctgggcgcccttggccgggacttgtggggtccttctcctgtcactggttatcaccctttactgccggagggaccagaggctgccccccgatgcccacaagccccctgggggaggcagtttccggacccccatccaagaggagcaggccgacgcccactccaccctggccaagatcagagtgaagttcagcaggagcgcagacgcccccgcgtaccagcagggccagaaccagctctataacgagctcaatctaggacgaagagaggagtacgatgttttggacaagagacgtggccgggaccctgagatggggggaaagccgagaaggaagaaccctcaggaaggcctgtacaatgaactgcagaaagataagatggcggaggcctacagtgagattgggatgaaaggcgagcgccggaggggcaaggggcacgatggcctttaccagggtctcagtacagccaccaaggacacctacgacgcccttcacatgcaggccctgccccctcgcgg

SEQ ID NO: 787 - DNA, 1475 bp, synthetic construct
  misc_feature 1..1475: note = Synthetic
  source 1..1475: mol_type = other DNA
atggccttaccagtgaccgccttgctcctgccgctggccttgctgctccacgccgccaggccggaagtgcacctgttggagtctgggggaggcttggtccagcctggggggtccctgagactctcctgtgcggcctctggattcacctttagcagctatgccatgaactgggtccgccaggctccagggaaggggctggagtgggtctcttctattagtggtagtggtagtagctcatactacgcagactccgtgaagggccggttcaccatctccagagacaattccaagaacacgctgtatctgcaaatgaacagcctgagagccgaggacacggccgtatattactgtgcgtctcgtggattcaactcccagtatcctcccggatactactactactacatggacgtctggggcaaagggaccacggtcaccgtctcctcaggtggaggcggttcaggcggaggtggctctggcggtggcggatcgcagactgtggtgacccaggagccatcgttctcagtgtcccctggagggacagtcacactcacttgtggcttgagctctggctcagtctccactagttacttccccagctggtaccagcagacccccggccaggctccacgcacgctcatctacatcacaaacactcgctcttcaggggtccctgatcgcttctctggctccattattgggaacaaagctgccctcaccatcacgggggcccaggcagatgatgaatctgattatttctgtgtactatatatgggtagtggcacttgggtgttcggtggaggaaccaagctgactgtcctaaccacgacgccagcgccgcggccaccaacaccggcgcccaccatcgcgtcgcagcccctgtccctgcgcccagaggcgtgccggccagcggcggggggcgcagtgcacacgagggggctggacttcgcctgtgatatctacatctgggcgcccttggccgggacttgtggggtccttctcctgtcactggttatcaccctttactgccggagggaccagaggctgccccccgatgcccacaagccccctgggggaggcagtttccggacccccatccaagaggagcaggccgacgcccactccaccctggccaagatcagagtgaagttcagcaggagcgcagacgcccccgcgtaccagcagggccagaaccagctctataacgagctcaatctaggacgaagagaggagtacgatgttttggacaagagacgtggccgggaccctgagatggggggaaagccgagaaggaagaaccctcaggaaggcctgtacaatgaactgcagaaagataagatggcggaggcctacagtgagattgggatgaaaggcgagcgccggaggggcaaggggcacgatggcctttaccagggtctcagtacagccaccaaggacacctacgacgcccttcacatgcaggccctgccccctcgcgg

SEQ ID NO: 788 - DNA, 1436 bp, synthetic construct
  misc_feature 1..1436: note = Synthetic
  source 1..1436: mol_type = other DNA
atggccttaccagtgaccgccttgctcctgccgctggccttgctgctccacgccgccaggccggaggtgcagctgttggagtctgggggaggcttggtacagcctggggggtccctgagactctcctgtgcagcctctggattcaccttcagcaactatgccatgacctgggtccgccaggctccagggaaggggctggagtgggtctcagctattagtggtagtggtattggcacatactacgcagactccgtgcagggccggttcaccacctccagagacaattccaagaacacgctgtatctgcaaatgaacagcctgagagccgaggacacggccgtttattactgtgcgaaaggggggtacaactggaaggacgtctggggcaaagggaccacggtcaccgtctcctcaggtggaggcggttcaggcggaggtggctctggcggtggcggatcggaaattgtgctgactcagtctccagactttcagtctgtgactccaaaggagaaagtcaccatcacctgccgggccagtcagagcattggtagtagcttacactggtaccagcagaaaccagatcagtctccaaagctcctcatcaagtttgcttcccagtccttctcaggggtcccctcgaggttcagtggcagtggatctgggacagatttcaccctcaccatccatagcctggaagctgaagatgctgcaacgtattactgtcatcagagtagtagtttaccgtggacgttcggccaagggaccaaggtggaaatcaaaaccacgacgccagcgccgcggccaccaacaccggcgcccaccatcgcgtcgcagcccctgtccctgcgcccagaggcgtgccggccagcggcggggggcgcagtgcacacgagggggctggacttcgcctgtgatatctacatctgggcgcccttggccgggacttgtggggtccttctcctgtcactggttatcaccctttactgccggagggaccagaggctgccccccgatgcccacaagccccctgggggaggcagtttccggacccccatccaagaggagcaggccgacgcccactccaccctggccaagatcagagtgaagttcagcaggagcgcagacgcccccgcgtaccagcagggccagaaccagctctataacgagctcaatctaggacgaagagaggagtacgatgttttggacaagagacgtggccgggaccctgagatggggggaaagccgagaaggaagaaccctcaggaaggcctgtacaatgaactgcagaaagataagatggcggaggcctacagtgagattgggatgaaaggcgagcgccggaggggcaaggggcacgatggcctttaccagggtctcagtacagccaccaaggacacctacgacgcccttcacatgcaggccctgccccctcgcgg

SEQ ID NO: 789 - DNA, 1460 bp, synthetic construct
  misc_feature 1..1460: note = Synthetic
  source 1..1460: mol_type = other DNA
atggccttaccagtgaccgccttgctcctgccgctggccttgctgctccacgccgccaggccgcaggtgcagctggtggagtctgggggaggcgtggtccagcctgggaggtccctgagactctcctgtgcagcgtctgggttcaccttcactaactatgacatgcactgggtccgccaggccccaggcaaggggctggagtgggtgacaattatatggcatgatggaagtaataaatattatttagactccgtgaggggccgattcaccatctccagagacaattccaagaacacgctgtatctgcaaatgaacagcctgagagccgaggacacggctgtgtattactgtgcgagaggtgacaactggaacgacgaacaccactacttctactacatggacgtctggggcaaagggaccacggtcaccgtctcctcaggtggaggcggttcaggcggaggtggctctggcggtggcggatcggaaattgtgctgactcagtctccagactttcagtctgtgactccaaaggagaaagtcaccatcacctgccgggccagtcagagcattggtagtagcttacactggtaccagcagaaaccagatcagtctccaaagctcctcatcaagtttgcttcccagtccttctcaggggtcccctcgaggttcagtggcagtggatctgggacagatttcaccctcaccatccatagcctggaagctgaagatgctgcaacgtattactgtcatcagagtagtagtttaccgtggacgttcggccaagggaccaaggtggaaatcaaaaccacgacgccagcgccgcggccaccaacaccggcgcccaccatcgcgtcgcagcccctgtccctgcgcccagaggcgtgccggccagcggcggggggcgcagtgcacacgagggggctggacttcgcctgtgatatctacatctgggcgcccttggccgggacttgtggggtccttctcctgtcactggttatcaccctttactgccggagggaccagaggctgccccccgatgcccacaagccccctgggggaggcagtttccggacccccatccaagaggagcaggccgacgcccactccaccctggccaagatcagagtgaagttcagcaggagcgcagacgcccccgcgtaccagcagggccagaaccagctctataacgagctcaatctaggacgaagagaggagtacgatgttttggacaagagacgtggccgggaccctgagatggggggaaagccgagaaggaagaaccctcaggaaggcctgtacaatgaactgcagaaagataagatggcggaggcctacagtgagattgggatgaaaggcgagcgccggaggggcaaggggcacgatggcctttaccagggtctcagtacagccaccaaggacacctacgacgcccttcacatgcaggccctgccccctcgcgg

SEQ ID NO: 790 - DNA, 1460 bp, synthetic construct
  misc_feature 1..1460: note = Synthetic
  source 1..1460: mol_type = other DNA
atggccttaccagtgaccgccttgctcctgccgctggccttgctgctccacgccgccaggccgcaggtgcagctggtggagtctgggggaggcgtggtccagcctgggaggtccctgagactctcctgtgcagcgtctgggttcaccttcagtaactatgacatgcactgggtccgccaggccccaggcaaggggctggagtgggtgacaattatatggcatgatggaagtaataaatattatttagactccgtgaagggccgattcaccatctccagagacaattccaagaacacgctgtatctgcaaatgaacagcctgagagccgaggacacggctgtgtattactgtgcgagaggtgacaactggaacgacgaacaccactacttctactacatggacgtctggggcaaagggaccacggtcaccgtctcctcaggtggaggcggttcaggcggaggtggctctggcggtggcggatcggaaattgtgttgacacagtctccagccaccctgtctttgtctccaggggaaagagccaccctctcctgcagggccagtcagagtgttagcagctccttagcctggtaccaacagaaacctggccaggctccccggctcctcatctatgatgcatccaacagggccactggcatcccagccaggttcagtggcagtgggtctgggacagacttcactctcaccatcagcagcctagagcctgaagattttgcagtttattactgtcagcagcgtagcaactggcctctcactttcggcggagggaccaaggtggagatcaaaaccacgacgccagcgccgcggccaccaacaccggcgcccaccatcgcgtcgcagcccctgtccctgcgcccagaggcgtgccggccagcggcggggggcgcagtgcacacgagggggctggacttcgcctgtgatatctacatctgggcgcccttggccgggacttgtggggtccttctcctgtcactggttatcaccctttactgccggagggaccagaggctgccccccgatgcccacaagccccctgggggaggcagtttccggacccccatccaagaggagcaggccgacgcccactccaccctggccaagatcagagtgaagttcagcaggagcgcagacgcccccgcgtaccagcagggccagaaccagctctataacgagctcaatctaggacgaagagaggagtacgatgttttggacaagagacgtggccgggaccctgagatggggggaaagccgagaaggaagaaccctcaggaaggcctgtacaatgaactgcagaaagataagatggcggaggcctacagtgagattgggatgaaaggcgagcgccggaggggcaaggggcacgatggcctttaccagggtctcagtacagccaccaaggacacctacgacgcccttcacatgcaggccctgccccctcgcgg

SEQ ID NO: 791 - DNA, 1448 bp, synthetic construct
  misc_feature 1..1448: note = Synthetic
  source 1..1448: mol_type = other DNA
atggccttaccagtgaccgccttgctcctgccgctggccttgctgctccacgccgccaggccggaggtgcagctggtggagtctgggggaggtgtggtacggcctggggggtccctgagactctcctgtgcagcctctggattcacctttgatgattatggcatgagctgggtccgccaagctccagggaaggggctggagtgggtctctggtattaattggaatggtggtagcacaggttatgtagactctgtgaagggccgattcaccatctccagagacaacgccaagaactccctgtatctgcaaatgaacagtctgagagccgaggacacggccttgtatcactgtgcgagaccagtaactacggactactactactacatggacgtctggggcaaagggaccacggtcaccgtctcctcaggtggaggcggttcaggcggaggtggctctggcggtggcggatcggaaattgtgttgacgcagtctccaggcaccctgtctttgtctccaggggaaagagccaccctctcctgcagggccagtcagagtgttagcagcagctacttagcctggtaccagcagaaacctggccaggctcccaggctcctcatctatggtgcatccagcagggccactggcatcccagacaggttcagtggcagtgggtctgggacagacttcactctcaccatcagcagactggagcctgaagattttgcagtgtattactgtcagcagtatggtagctcgtggacgttcggccaagggaccaaggtggaaatcaaaaccacgacgccagcgccgcggccaccaacaccggcgcccaccatcgcgtcgcagcccctgtccctgcgcccagaggcgtgccggccagcggcggggggcgcagtgcacacgagggggctggacttcgcctgtgatatctacatctgggcgcccttggccgggacttgtggggtccttctcctgtcactggttatcaccctttactgccggagggaccagaggctgccccccgatgcccacaagccccctgggggaggcagtttccggacccccatccaagaggagcaggccgacgcccactccaccctggccaagatcagagtgaagttcagcaggagcgcagacgcccccgcgtaccagcagggccagaaccagctctataacgagctcaatctaggacgaagagaggagtacgatgttttggacaagagacgtggccgggaccctgagatggggggaaagccgagaaggaagaaccctcaggaaggcctgtacaatgaactgcagaaagataagatggcggaggcctacagtgagattgggatgaaaggcgagcgccggaggggcaaggggcacgatggcctttaccagggtctcagtacagccaccaaggacacctacgacgcccttcacatgcaggccctgccccctcgcgg

SEQ ID NO: 792 - DNA, 1472 bp, synthetic construct
  misc_feature 1..1472: note = Synthetic
  source 1..1472: mol_type = other DNA
atggccttaccagtgaccgccttgctcctgccgctggccttgctgctccacgccgccaggccggaggtgcagctgttggagtctgggggaggcttggtacagcctggggggtccctgagactctcctgtgcagcctctggattcacctttagcagctatgccatgagctgggtccgccaggctccagggaaggggctggagtgggtctcagctattagtggtagtggtggtagcacatactacgcagactccgtgaagggccggttcaccatctccagagacaattccaagaacacgctgtatctgcaaatgaacagcctgagagccgaggacacggccgtatattactgtgcgaaaaaggggacgtcgtacaactggaacgacgtccattactactactactactacatggacgtctggggcaaagggaccacggtcaccgtctcctcaggtggaggcggttcaggcggaggtggctctggcggtggcggatcggaaattgtgttgacgcagtctccaggcaccctgtctttgtctccaggggaaagagccaccctctcctgcagggccagtcagagtgttagcagcagctacttagcctggtaccagcagaaacctggccaggctcccaggctcctcatctatggtgcatccagcagggccactggcatcccagacaggttcagtggcagtgggtctgggacagacttcactctcaccatcagcagactggagcctgaagattttgcagtgtattactgtcagcagtatggtagctcgtggacgttcggccaagggaccaaggtggaaatcaaaaccacgacgccagcgccgcggccaccaacaccggcgcccaccatcgcgtcgcagcccctgtccctgcgcccagaggcgtgccggccagcggcggggggcgcagtgcacacgagggggctggacttcgcctgtgatatctacatctgggcgcccttggccgggacttgtggggtccttctcctgtcactggttatcaccctttactgccggagggaccagaggctgccccccgatgcccacaagccccctgggggaggcagtttccggacccccatccaagaggagcaggccgacgcccactccaccctggccaagatcagagtgaagttcagcaggagcgcagacgcccccgcgtaccagcagggccagaaccagctctataacgagctcaatctaggacgaagagaggagtacgatgttttggacaagagacgtggccgggaccctgagatggggggaaagccgagaaggaagaaccctcaggaaggcctgtacaatgaactgcagaaagataagatggcggaggcctacagtgagattgggatgaaaggcgagcgccggaggggcaaggggcacgatggcctttaccagggtctcagtacagccaccaaggacacctacgacgcccttcacatgcaggccctgccccctcgcgg

SEQ ID NO: 793 - DNA, 1454 bp, synthetic construct
  misc_feature 1..1454: note = Synthetic
  source 1..1454: mol_type = other DNA
atggccttaccagtgaccgccttgctcctgccgctggccttgctgctccacgccgccaggccgcagctgcagctgcaggagtcgggcccaggactggtgaagccttcggagaccctgtccctcacctgcactgtctctggtggctccatcagcagtagtagttactactggggctggatccgccagcccccagggaaggggctggagtggattgggagtatctattatagtgggagcacctactacaacccgtccctcaagagtcgagtcaccatatccgtagacacgtccaagaaccagttctccctgaagctgagctctgtgaccgccgcagacacggctgtgtattactgcacaactggaacgacggcttactactactactactacatggacgtctggggcaaagggaccacggtcaccgtctcctcaggtggaggcggttcaggcggaggtggctctggcggtggcggatcggaaattgtgttgacgcagtctccaggcaccctgtctttgtctccaggggaaagagccaccctctcctgcagggccagtcagagtgttagcagcagctacttagcctggtaccagcagaaacctggccaggctcccaggctcctcatctatggtgcatccagcagggccactggcatcccagacaggttcagtggcagtgggtctgggacagacttcactctcaccatcagcagactggagcctgaagattttgcagtgtattactgtcagcagtatggtagctcgtggacgttcggccaagggaccaaggtggaaatcaaaaccacgacgccagcgccgcggccaccaacaccggcgcccaccatcgcgtcgcagcccctgtccctgcgcccagaggcgtgccggccagcggcggggggcgcagtgcacacgagggggctggacttcgcctgtgatatctacatctgggcgcccttggccgggacttgtggggtccttctcctgtcactggttatcaccctttactgccggagggaccagaggctgccccccgatgcccacaagccccctgggggaggcagtttccggacccccatccaagaggagcaggccgacgcccactccaccctggccaagatcagagtgaagttcagcaggagcgcagacgcccccgcgtaccagcagggccagaaccagctctataacgagctcaatctaggacgaagagaggagtacgatgttttggacaagagacgtggccgggaccctgagatggggggaaagccgagaaggaagaaccctcaggaaggcctgtacaatgaactgcagaaagataagatggcggaggcctacagtgagattgggatgaaaggcgagcgccggaggggcaaggggcacgatggcctttaccagggtctcagtacagccaccaaggacacctacgacgcccttcacatgcaggccctgccccctcgcgg

SEQ ID NO: 794 - DNA, 1451 bp, synthetic construct
  misc_feature 1..1451: note = Synthetic
  source 1..1451: mol_type = other DNA
atggccttaccagtgaccgccttgctcctgccgctggccttgctgctccacgccgccaggccggaggtgcagctgttggagtctgggggaggcttggtgcagcctggggggtccctgagactctcctgtgcagcctctggattcacctttagcagctatgccatgacctgggtccgccaggctccagggaaggggctggagtgggtctcagctattagtggtagtggtggtagcacatactacgcagactccgtgaagggccggttcaccatctccagagacaattccaagaacacgctgtatctgcaaatgaacagcctgagagccgaggacacggccgtatattactgtgcgagaggcgggtataactggcactactactactacatggacgtctggggcaaagggaccacggtcaccgtctcctcaggtggaggcggttcaggcggaggtggctctggcggtggcggatcggaaattgtgttgacgcagtctccaggcaccctgtctttgtctccaggggaaagagccaccctctcctgcagggccagtcagagtgttagcagcagctacttagcctggtaccagcagaaacctggccaggctcccaggctcctcatctatggtgcatccagcagggccactggcatcccagacaggttcagtggcagtgggtctgggacagacttcactctcaccatcagcagactggagcctgaagattttgcagtgtattactgtcagcagtatggtagctcgtggacgttcggccaagggaccaaggtggaaatcaaaaccacgacgccagcgccgcggccaccaacaccggcgcccaccatcgcgtcgcagcccctgtccctgcgcccagaggcgtgccggccagcggcggggggcgcagtgcacacgagggggctggacttcgcctgtgatatctacatctgggcgcccttggccgggacttgtggggtccttctcctgtcactggttatcaccctttactgccggagggaccagaggctgccccccgatgcccacaagccccctgggggaggcagtttccggacccccatccaagaggagcaggccgacgcccactccaccctggccaagatcagagtgaagttcagcaggagcgcagacgcccccgcgtaccagcagggccagaaccagctctataacgagctcaatctaggacgaagagaggagtacgatgttttggacaagagacgtggccgggaccctgagatggggggaaagccgagaaggaagaaccctcaggaaggcctgtacaatgaactgcagaaagataagatggcggaggcctacagtgagattgggatgaaaggcgagcgccggaggggcaaggggcacgatggcctttaccagggtctcagtacagccaccaaggacacctacgacgcccttcacatgcaggccctgccccctcgcgg

SEQ ID NO: 795 - DNA, 1463 bp, synthetic construct
  misc_feature 1..1463: note = Synthetic
  source 1..1463: mol_type = other DNA
atggccttaccagtgaccgccttgctcctgccgctggccttgctgctccacgccgccaggccgcaggtgcagctggtggagtctgggggaggcgtggtccagcctgggaggtccctgagactctcctgtgcagcgtctggattcaccttcagtagctatgacatgcactgggtccgccaggctccaggcaaggggctggagtgggtgtcagttatatggtatgatggaagtaataaaaagtatggagactccgcgaagggccgattcaccatctccagagacaattccaagaacacgctggatctgcaaatgaacagcctgagagccgaggacacggctgtgtattactgtgcgagaggcgacaactggaacgacgaaggtggctactactactactacatggacgtctggggcaaagggaccacggtcaccgtctcctcaggtggaggcggttcaggcggaggtggctctggcggtggcggatcggaaattgtgctgactcagtctccagactttcagtctgtgactccaaaggagaaagtcaccatcacctgccgggccagtcagaacattggtagtagcttacactggtaccagcagaaaccagatcagtctccaaagctcctcatcaagtttgcttcccagtccatctcaggggtcccctcgaggttcagtggcagtggatctgggacagatttcaccctcaccatcaatagcctggaagctgaagatgctgcagcgtattactgtcatcagagtagtagtttaccgtggacgttcggccaagggaccaaggtggaaatcaaaaccacgacgccagcgccgcggccaccaacaccggcgcccaccatcgcgtcgcagcccctgtccctgcgcccagaggcgtgccggccagcggcggggggcgcagtgcacacgagggggctggacttcgcctgtgatatctacatctgggcgcccttggccgggacttgtggggtccttctcctgtcactggttatcaccctttactgccggagggaccagaggctgccccccgatgcccacaagccccctgggggaggcagtttccggacccccatccaagaggagcaggccgacgcccactccaccctggccaagatcagagtgaagttcagcaggagcgcagacgcccccgcgtaccagcagggccagaaccagctctataacgagctcaatctaggacgaagagaggagtacgatgttttggacaagagacgtggccgggaccctgagatggggggaaagccgagaaggaagaaccctcaggaaggcctgtacaatgaactgcagaaagataagatggcggaggcctacagtgagattgggatgaaaggcgagcgccggaggggcaaggggcacgatggcctttaccagggtctcagtacagccaccaaggacacctacgacgcccttcacatgcaggccctgccccctcgcgg

SEQ ID NO: 796 - DNA, 1463 bp, synthetic construct
  misc_feature 1..1463: note = Synthetic
  source 1..1463: mol_type = other DNA
atggccttaccagtgaccgccttgctcctgccgctggccttgctgctccacgccgccaggccgcaggtgcagctggtggagtctgggggaggcgtggtccagcctgggaggtccctgagactctcctgtgcagcgtctggattcaccttcagtagctatgacatgcactgggtccgccaggctccaggcaaggggctggagtgggtgtcagttatatggtatgatggaagtaataaaaagtatggagactccgcgaagggccgattcaccatctccagagacaattccaagaacacgctggatctgcaaatgaacagcctgagagccgaggacacggctgtgtattactgtgcgagaggcgacaactggaacgacgaaggtggctactactactactacatggacgtctggggcaaagggaccacggtcaccgtctcctcaggtggaggcggttcaggcggaggtggctctggcggtggcggatcggacatccagatgacccagtctccatcctcactgtctacatctgtaggagacagagtcaccatcacttgtcgggcgagtcagggcattagcaattatttagcctggtttcagcagaaaccagggaaagcccctaagtccctgatctatgctgcatccagtttgcaaagtggggtcccatcaaagttcagcggcagtggatctgggacagatttctctctcaccattagcagcctgcagcctgaagattttgcaacttattactgccaacagtataatagttacccgatcaccttcggccaagggacacgactggagattaaaaccacgacgccagcgccgcggccaccaacaccggcgcccaccatcgcgtcgcagcccctgtccctgcgcccagaggcgtgccggccagcggcggggggcgcagtgcacacgagggggctggacttcgcctgtgatatctacatctgggcgcccttggccgggacttgtggggtccttctcctgtcactggttatcaccctttactgccggagggaccagaggctgccccccgatgcccacaagccccctgggggaggcagtttccggacccccatccaagaggagcaggccgacgcccactccaccctggccaagatcagagtgaagttcagcaggagcgcagacgcccccgcgtaccagcagggccagaaccagctctataacgagctcaatctaggacgaagagaggagtacgatgttttggacaagagacgtggccgggaccctgagatggggggaaagccgagaaggaagaaccctcaggaaggcctgtacaatgaactgcagaaagataagatggcggaggcctacagtgagattgggatgaaaggcgagcgccggaggggcaaggggcacgatggcctttaccagggtctcagtacagccaccaaggacacctacgacgcccttcacatgcaggccctgccccctcgcgg

SEQ ID NO: 797 - DNA, 1454 bp, synthetic construct
  misc_feature 1..1454: note = Synthetic
  source 1..1454: mol_type = other DNA
atggccttaccagtgaccgccttgctcctgccgctggccttgctgctccacgccgccaggccgcaggttcagctggtacagtctggagctgaggtgaagaagtctggggcctcagtgaaggtctcctgcaaggcttctggttacaccttaaccagctatggcatcagctgggtgcgacaggcccctggacaagggcttgagtggatgggatggatcagcgcttacaatggtaacataaactatgcacagaagttccagggcagagtcaccatgaccacagacacatccacgagcacagcctacatggagctgaggagcctgagatctgacgacacggccgtgtattactgtgtgagagatggggaccggtacaactggaaccacagctacatggacgtctggggcaaagggaccacggtcaccgtctcctcaggtggaggcggttcaggcggaggtggctctggcggtggcggatcggaaattgtgctgactcagtctccagactttcagtctgtgactccaaaggagaaagtcaccatcacctgccgggccagtcagaacattggtagtagcttacactggtaccagcagaaaccagatcagtctccaaagctcctcatcaagtttgcttcccagtccatctcaggggtcccctcgaggttcagtggcagtggatctgggacagatttcaccctcaccatcaatagcctggaagctgaagatgctgcagcgtattactgtcatcagagtagtagtttaccgtggacgttcggccaagggaccaaggtggaaatcaaaaccacgacgccagcgccgcggccaccaacaccggcgcccaccatcgcgtcgcagcccctgtccctgcgcccagaggcgtgccggccagcggcggggggcgcagtgcacacgagggggctggacttcgcctgtgatatctacatctgggcgcccttggccgggacttgtggggtccttctcctgtcactggttatcaccctttactgccggagggaccagaggctgccccccgatgcccacaagccccctgggggaggcagtttccggacccccatccaagaggagcaggccgacgcccactccaccctggccaagatcagagtgaagttcagcaggagcgcagacgcccccgcgtaccagcagggccagaaccagctctataacgagctcaatctaggacgaagagaggagtacgatgttttggacaagagacgtggccgggaccctgagatggggggaaagccgagaaggaagaaccctcaggaaggcctgtacaatgaactgcagaaagataagatggcggaggcctacagtgagattgggatgaaaggcgagcgccggaggggcaaggggcacgatggcctttaccagggtctcagtacagccaccaaggacacctacgacgcccttcacatgcaggccctgccccctcgcgg

SEQ ID NO: 798 - DNA, 1454 bp, synthetic construct
  misc_feature 1..1454: note = Synthetic
  source 1..1454: mol_type = other DNA
atggccttaccagtgaccgccttgctcctgccgctggccttgctgctccacgccgccaggccgcaggttcagctggtacagtctggagctgaggtgaagaagtctggggcctcagtgaaggtctcctgcaaggcttctggttacaccttaaccagctatggcatcagctgggtgcgacaggcccctggacaagggcttgagtggatgggatggatcagcgcttacaatggtaacataaactatgcacagaagttccagggcagagtcaccatgaccacagacacatccacgagcacagcctacatggagctgaggagcctgagatctgacgacacggccgtgtattactgtgtgagagatggggaccggtacaactggaaccacagctacatggacgtctggggcaaagggaccacggtcaccgtctcctcaggtggaggcggttcaggcggaggtggctctggcggtggcggatcggacatccagatgacccagtctccatcctcactgtctacatctgtaggagacagagtcaccatcacttgtcgggcgagtcagggcattagcaattatttagcctggtttcagcagaaaccagggaaagcccctaagtccctgatctatgctgcatccagtttgcaaagtggggtcccatcaaagttcagcggcagtggatctgggacagatttctctctcaccattagcagcctgcagcctgaagattttgcaacttattactgccaacagtataatagttacccgatcaccttcggccaagggacacgactggagattaaaaccacgacgccagcgccgcggccaccaacaccggcgcccaccatcgcgtcgcagcccctgtccctgcgcccagaggcgtgccggccagcggcggggggcgcagtgcacacgagggggctggacttcgcctgtgatatctacatctgggcgcccttggccgggacttgtggggtccttctcctgtcactggttatcaccctttactgccggagggaccagaggctgccccccgatgcccacaagccccctgggggaggcagtttccggacccccatccaagaggagcaggccgacgcccactccaccctggccaagatcagagtgaagttcagcaggagcgcagacgcccccgcgtaccagcagggccagaaccagctctataacgagctcaatctaggacgaagagaggagtacgatgttttggacaagagacgtggccgggaccctgagatggggggaaagccgagaaggaagaaccctcaggaaggcctgtacaatgaactgcagaaagataagatggcggaggcctacagtgagattgggatgaaaggcgagcgccggaggggcaaggggcacgatggcctttaccagggtctcagtacagccaccaaggacacctacgacgcccttcacatgcaggccctgccccctcgcgg

SEQ ID NO: 799 - DNA, 1451 bp, synthetic construct
  misc_feature 1..1451: note = Synthetic
  source 1..1451: mol_type = other DNA
atggccttaccagtgaccgccttgctcctgccgctggccttgctgctccacgccgccaggccggaggtgcagctgttggagtctgggggagacttggtacagcctggggggtccctgcgactctcctgtgcagcctctggattcacctttagcacctatgccatgacctgggtccgccaggctccagggaaggggctggagtgggtctcagctattagtggtactagtggtagcacatactacgcagactccgtgaagggccggttcaccatctccagagacaattccaagagcacgctgtatctgcacatgaacagcctgagaaccgaggacacggccgtatattactgtgcgagaggcggatataactggcactactactactacatggacgtctggggcaaagggaccacggtcaccgtctcctcaggtggaggcggttcaggcggaggtggctctggcggtggcggatcggaaattgtgctgactcagtctccagactttcagtctgtgactccaaaggagaaagtcaccatcacctgccgggccagtcagagcattggaagtagcttacactggtaccagcagaaaccagatcagtctccaaagctcctcatcaagtatgtttcccagtccatctcaggggtcccctcgaggttcagtggcagtggatctgggacagatttcaccctcaccatcaatagcctggaagctgaagatgctgcagcgtattactgtcatcagagtagtagtttaccgtggacgttcggccaagggaccaaggtggaaatcaaaaccacgacgccagcgccgcggccaccaacaccggcgcccaccatcgcgtcgcagcccctgtccctgcgcccagaggcgtgccggccagcggcggggggcgcagtgcacacgagggggctggacttcgcctgtgatatctacatctgggcgcccttggccgggacttgtggggtccttctcctgtcactggttatcaccctttactgccggagggaccagaggctgccccccgatgcccacaagccccctgggggaggcagtttccggacccccatccaagaggagcaggccgacgcccactccaccctggccaagatcagagtgaagttcagcaggagcgcagacgcccccgcgtaccagcagggccagaaccagctctataacgagctcaatctaggacgaagagaggagtacgatgttttggacaagagacgtggccgggaccctgagatggggggaaagccgagaaggaagaaccctcaggaaggcctgtacaatgaactgcagaaagataagatggcggaggcctacagtgagattgggatgaaaggcgagcgccggaggggcaaggggcacgatggcctttaccagggtctcagtacagccaccaaggacacctacgacgcccttcacatgcaggccctgccccctcgcgg

SEQ ID NO: 800 - DNA, 1454 bp, synthetic construct
  misc_feature 1..1454: note = Synthetic
  source 1..1454: mol_type = other DNA
atggccttaccagtgaccgccttgctcctgccgctggccttgctgctccacgccgccaggccggaggtgcagctgttggagtctgggggagacttggtacagcctggggggtccctgcgactctcctgtgcagcctctggattcacctttagcacctatgccatgacctgggtccgccaggctccagggaaggggctggagtgggtctcagctattagtggtactagtggtagcacatactacgcagactccgtgaagggccggttcaccatctccagagacaattccaagagcacgctgtatctgcacatgaacagcctgagaaccgaggacacggccgtatattactgtgcgagaggcggatataactggcactactactactacatggacgtctggggcaaagggaccacggtcaccgtctcctcaggtggaggcggttcaggcggaggtggctctggcggtggcggatcggaaattgtaatgacacagtctccagccaccctgtctttgtctccaggggaaagagccaccctctcctgcagggccagtcagagtgttagcagcagctacttatcctggtaccagcagaaacctgggctggctcccaggctcctcatctatggtgcatccaccagggccactggcatcccagccaggttcagtggcagtgggtctgggacagacttcactctcaccatcagcagcctgcagcctgaagattttgcagtttattactgtcagcaggattataacttacctccgacgttcggccaagggaccaaggtggaaatcaaaaccacgacgccagcgccgcggccaccaacaccggcgcccaccatcgcgtcgcagcccctgtccctgcgcccagaggcgtgccggccagcggcggggggcgcagtgcacacgagggggctggacttcgcctgtgatatctacatctgggcgcccttggccgggacttgtggggtccttctcctgtcactggttatcaccctttactgccggagggaccagaggctgccccccgatgcccacaagccccctgggggaggcagtttccggacccccatccaagaggagcaggccgacgcccactccaccctggccaagatcagagtgaagttcagcaggagcgcagacgcccccgcgtaccagcagggccagaaccagctctataacgagctcaatctaggacgaagagaggagtacgatgttttggacaagagacgtggccgggaccctgagatggggggaaagccgagaaggaagaaccctcaggaaggcctgtacaatgaactgcagaaagataagatggcggaggcctacagtgagattgggatgaaaggcgagcgccggaggggcaaggggcacgatggcctttaccagggtctcagtacagccaccaaggacacctacgacgcccttcacatgcaggccctgccccctcgcgg

SEQ ID NO: 801 - DNA, 1460 bp, synthetic construct
  misc_feature 1..1460: note = Synthetic
  source 1..1460: mol_type = other DNA
atggccttaccagtgaccgccttgctcctgccgctggccttgctgctccacgccgccaggccgcaagtgcagctggtggagagcggcggaggagtggtgcaacctggccggagcctgagactgagctgcgctgccagcggcttcaccttcaacaactacgacatgtactgggtgcggcaggcccctggcaagggcctggaatgggtcgccgtgacatggtatgacggctccaacaagtactacgccgacagcgtgaagggcagattcaccatcagcagagataatagcaagaacaccctgtacctgcagatgaacagcctgcgggccgaggacaccgccgtgtactactgcgctagaggcgacaattggaacgacgagcaccattacttctactacatggacgtgtggggcaaaggcaccaccgtgaccgtgtccagcggcggcggtggatctggaggcggaggctctggaggcggcggctccgagatcgtgctgacacagtctccagatttccagtctgtgacccctaaggaaaaggttacaattacatgcagagcctctcagagcatcggaagctctctgcactggtatcagcagaaacctgatcagagccccaagctgctgatcaaattcgccagccagtccttcagcggcgtccccagccgcttcagcggcagcggcagcggcactgattttacactgaccatccacagcctggaggccgaggacgccgccacctactattgtcaccagagcagctccctgccttggacctttggccagggcacaaaggtggaaatcaagaccacgacgccagcgccgcggccaccaacaccggcgcccaccatcgcgtcgcagcccctgtccctgcgcccagaggcgtgccggccagcggcggggggcgcagtgcacacgagggggctggacttcgcctgtgatatctacatctgggcgcccttggccgggacttgtggggtccttctcctgtcactggttatcaccctttactgccggagggaccagaggctgccccccgatgcccacaagccccctgggggaggcagtttccggacccccatccaagaggagcaggccgacgcccactccaccctggccaagatcagagtgaagttcagcaggagcgcagacgcccccgcgtaccagcagggccagaaccagctctataacgagctcaatctaggacgaagagaggagtacgatgttttggacaagagacgtggccgggaccctgagatggggggaaagccgagaaggaagaaccctcaggaaggcctgtacaatgaactgcagaaagataagatggcggaggcctacagtgagattgggatgaaaggcgagcgccggaggggcaaggggcacgatggcctttaccagggtctcagtacagccaccaaggacacctacgacgcccttcacatgcaggccctgccccctcgcgg

SEQ ID NO: 802 - DNA, 1460 bp, synthetic construct
  misc_feature 1..1460: note = Synthetic
  source 1..1460: mol_type = other DNA
atggccttaccagtgaccgccttgctcctgccgctggccttgctgctccacgccgccaggccgcaagtgcagctggtggagtctggcggcggagtggtgcaacctggaaggagcctgcggctgagctgcgctgccagcggcttcaccttcagcaattacgacatgcactgggtgcggcaggcccctggcaaaggcctggaatgggtcacaatcatctggcatgatgccagcaacaagtactacctggacagcgtcaagggcagattcacaatcagccgggacaacagcaagaacaccctgtacctgcagatgaacagcctgagagccgaggacaccgctgtgtactattgtgccagaggagataattggaacgacgagcaccactacttctactacatggacgtgtggggcaagggcaccaccgtgaccgtttctagcggcggaggcggctccggcggtggaggctccggaggcggcggctctgagatcgtgctgacacagagccctgattttcagagcgtgacacctaaagagaaggtgaccatcacctgcagagccagccagagcatcggctccagcctgcactggtatcagcagaagcccgaccagagcccaaagctgctgatcaagttcgcctcccagtctttttccggcgtgcccagcagattcagcgggagcggctctggcaccgacttcacactgaccatccactctctggaagccgaggatgccgccacctactattgccaccagagcagctctctcccttggaccttcggccagggcacaaaagtggaaattaagaccacgacgccagcgccgcggccaccaacaccggcgcccaccatcgcgtcgcagcccctgtccctgcgcccagaggcgtgccggccagcggcggggggcgcagtgcacacgagggggctggacttcgcctgtgatatctacatctgggcgcccttggccgggacttgtggggtccttctcctgtcactggttatcaccctttactgccggagggaccagaggctgccccccgatgcccacaagccccctgggggaggcagtttccggacccccatccaagaggagcaggccgacgcccactccaccctggccaagatcagagtgaagttcagcaggagcgcagacgcccccgcgtaccagcagggccagaaccagctctataacgagctcaatctaggacgaagagaggagtacgatgttttggacaagagacgtggccgggaccctgagatggggggaaagccgagaaggaagaaccctcaggaaggcctgtacaatgaactgcagaaagataagatggcggaggcctacagtgagattgggatgaaaggcgagcgccggaggggcaaggggcacgatggcctttaccagggtctcagtacagccaccaaggacacctacgacgcccttcacatgcaggccctgccccctcgcgg

SEQ ID NO: 803 - DNA, 1460 bp, synthetic construct
  misc_feature 1..1460: note = Synthetic
  source 1..1460: mol_type = other DNA
atggccttaccagtgaccgccttgctcctgccgctggccttgctgctccacgccgccaggccgcaagtgcagctggtcgaaagcggcggaggcgtggtgcaacctggaagaagcctgagactgagctgcgccgcctctggcttcaccttttctaattacgacatgcactgggtgcggcaggcccctggcaagggtcttgagtgggttaccatcatctggcacgacggcagcaacaagtactacctggacagcgtgaagggcagatttacaatcagcagagataatagcaagaacaccctgtacctgcagatgaacagcctgcgggccgaggacaccgccgtgtactattgtgccagaggcgacaactggaacgacgagcaccactacttctactacatggacgtgtggggcaaaggcaccacagtgaccgtgtccagcggcggcggcggcagcggcggaggaggctctggcggaggcggcagcgagatcgtgctgacccagagccctgacttccagagcgtgacccctaaggaaaaggtgacaattacatgcagggccagccagtccatcggctcttctctgcattggtatcagcagaagcccgatcagtctccaaagctgctgatcaaattcgccagccagagcttcagcggagtccccagccggttcagcggatctggctccggcactgatttcaccctgaccatccacagcctggaggccgaagatgccgctacatactattgccaccagtcctccagcctgccttggacattcggccagggcaccaaggtggagatcaaaaccacgacgccagcgccgcggccaccaacaccggcgcccaccatcgcgtcgcagcccctgtccctgcgcccagaggcgtgccggccagcggcggggggcgcagtgcacacgagggggctggacttcgcctgtgatatctacatctgggcgcccttggccgggacttgtggggtccttctcctgtcactggttatcaccctttactgccggagggaccagaggctgccccccgatgcccacaagccccctgggggaggcagtttccggacccccatccaagaggagcaggccgacgcccactccaccctggccaagatcagagtgaagttcagcaggagcgcagacgcccccgcgtaccagcagggccagaaccagctctataacgagctcaatctaggacgaagagaggagtacgatgttttggacaagagacgtggccgggaccctgagatggggggaaagccgagaaggaagaaccctcaggaaggcctgtacaatgaactgcagaaagataagatggcggaggcctacagtgagattgggatgaaaggcgagcgccggaggggcaaggggcacgatggcctttaccagggtctcagtacagccaccaaggacacctacgacgcccttcacatgcaggccctgccccctcgcgg

SEQ ID NO: 804 - DNA, 1442 bp, synthetic construct
  misc_feature 1..1442: note = Synthetic
  source 1..1442: mol_type = other DNA
atggccttaccagtgaccgccttgctcctgccgctggccttgctgctccacgccgccaggccggaggtgcagctgctggaaagcggcggcggactcgtgcaacctggcggctccctgcggctgtcttgcgccgcttctggcttcacattcagcatctacgccatgagctgggtcagacaggcccccggcaaaggcctggaatgggtgtccgccatcagcggcggcggagataccacctactacgccgacagcgtgaagggcagattcaccattagcagagataatagcaagaccacactggacctgcaaatgaacagcctgcgggccgaggacaccgccgtgtactactgtgctaagcacacctcttattacatggacgtgtggggaaaaggcacaaccgtgaccgtgtccagcggcggaggcggctctggcggcggcggcagcggcggtggcggaagccagaccgtggtgacacaggagccttctctgagcgtgagccccggcggcaccgtgaccctgacatgcggcctgagcagcggctccgtctccaccagctactatcctagctggtatcagcagacccctggccaggcccctagaaccctgatctacagcacaaacatccggagctctggagtgccagacagatttagcggaagcatcctgggcaacaaggccgccctgaccatcaccggcgcccaggctgacgacgagagtgattactactgcaagctgtacatgggctctggcatcatcttcggcagcggaacaaaggtgacagttctgaccacgacgccagcgccgcggccaccaacaccggcgcccaccatcgcgtcgcagcccctgtccctgcgcccagaggcgtgccggccagcggcggggggcgcagtgcacacgagggggctggacttcgcctgtgatatctacatctgggcgcccttggccgggacttgtggggtccttctcctgtcactggttatcaccctttactgccggagggaccagaggctgccccccgatgcccacaagccccctgggggaggcagtttccggacccccatccaagaggagcaggccgacgcccactccaccctggccaagatcagagtgaagttcagcaggagcgcagacgcccccgcgtaccagcagggccagaaccagctctataacgagctcaatctaggacgaagagaggagtacgatgttttggacaagagacgtggccgggaccctgagatggggggaaagccgagaaggaagaaccctcaggaaggcctgtacaatgaactgcagaaagataagatggcggaggcctacagtgagattgggatgaaaggcgagcgccggaggggcaaggggcacgatggcctttaccagggtctcagtacagccaccaaggacacctacgacgcccttcacatgcaggccctgccccctcgcgg

SEQ ID NO: 805 - DNA, 1460 bp, synthetic construct
  misc_feature 1..1460: note = Synthetic
  source 1..1460: mol_type = other DNA
atggccttaccagtgaccgccttgctcctgccgctggccttgctgctccacgccgccaggccgcaagtgcagctggtggaaagcggcggtggagtggtgcaacctggcagaagcctgcggctgagctgcgccgcttctggcttcacattttctaattacgacaagcactgggtgcggcaggcccctggcaaaggcctggagtgggtcgctgtgatctggtatgacggcagcaacaagtactacgccgacagcgtgaagggcagattcaccatcagcagagacaacagcaagaacaccctgtacctgcagatgaacagcctgcgggctgaagataccgccatgtactattgtgccaggggcgataattggaacgacgagcaccactacttctactacatggacgtgtggggaaagggcaccacagtgaccgtgtccagcggcggcggcggcagcggcggcggcggcagcggcggcggcggcagcgagatcgtgctgacacagtcccctgactttcagagcgtgacccctaaggaaaaggtcacaattacatgcagagcctctcagagcatcggcagctctctgcactggtatcagcagaaacctgatcagagccccaagctgctgatcaaattcgccagccagagcttctccggcgtgccaagcagattcagcggcagcggcagcggaaccgatttcaccctgaccatccattctctggaggccgaggacgccgccacctactactgccaccagtctagcagcctgccctggaccttcggccagggcacaaaggttgagatcaagaccacgacgccagcgccgcggccaccaacaccggcgcccaccatcgcgtcgcagcccctgtccctgcgcccagaggcgtgccggccagcggcggggggcgcagtgcacacgagggggctggacttcgcctgtgatatctacatctgggcgcccttggccgggacttgtggggtccttctcctgtcactggttatcaccctttactgccggagggaccagaggctgccccccgatgcccacaagccccctgggggaggcagtttccggacccccatccaagaggagcaggccgacgcccactccaccctggccaagatcagagtgaagttcagcaggagcgcagacgcccccgcgtaccagcagggccagaaccagctctataacgagctcaatctaggacgaagagaggagtacgatgttttggacaagagacgtggccgggaccctgagatggggggaaagccgagaaggaagaaccctcaggaaggcctgtacaatgaactgcagaaagataagatggcggaggcctacagtgagattgggatgaaaggcgagcgccggaggggcaaggggcacgatggcctttaccagggtctcagtacagccaccaaggacacctacgacgcccttcacatgcaggccctgccccctcgcgg

SEQ ID NO: 806 - DNA, 1454 bp, synthetic construct
  misc_feature 1..1454: note = Synthetic
  source 1..1454: mol_type = other DNA
atggccttaccagtgaccgccttgctcctgccgctggccttgctgctccacgccgccaggccgcaagtgcagctggtccagtctggagctgaggtgaagaagcccggcgccagcgtgaaggtgtcctgtaaagcctctggttatacattcacaaactatggcttcagctgggttagacaggcccctggacagggcctggactggatgggatggatcagcgcctacaacggctacaccaactacacccagaagctgcagggcagagtgacaatgaccacagataccagcaccaccacagcttacatggaactgaggtccctgcggagcgacgacaccgccgtgtactactgcgccagacggggcctgctgtactactactacagcatggacgtgtggggcaagggcaccaccgtgaccgtgtcttctggcggcggcggaagcggcggcggaggaagcggcggcggcggcagcgagatcgtgctgacccaatctcctgccacactgagcctctccccaggcgagcgggccaccctgagctgcggcgcttctcagagcgtgtacaatagctacctggcctggtatcagcagaaacccggcctggctcctagactgctgatctacgacgccagcctgagagccaccggcgtgcctgatagattcagcggcagcggcagcggaaccgacttcaccctgacaatcagcacactggaacccgaggattttgccgtgtactattgccagcagtacggcggcagccctatgtacacattcggccagggcaccaagctggaaatcaagaccacgacgccagcgccgcggccaccaacaccggcgcccaccatcgcgtcgcagcccctgtccctgcgcccagaggcgtgccggccagcggcggggggcgcagtgcacacgagggggctggacttcgcctgtgatatctacatctgggcgcccttggccgggacttgtggggtccttctcctgtcactggttatcaccctttactgccggagggaccagaggctgccccccgatgcccacaagccccctgggggaggcagtttccggacccccatccaagaggagcaggccgacgcccactccaccctggccaagatcagagtgaagttcagcaggagcgcagacgcccccgcgtaccagcagggccagaaccagctctataacgagctcaatctaggacgaagagaggagtacgatgttttggacaagagacgtggccgggaccctgagatggggggaaagccgagaaggaagaaccctcaggaaggcctgtacaatgaactgcagaaagataagatggcggaggcctacagtgagattgggatgaaaggcgagcgccggaggggcaaggggcacgatggcctttaccagggtctcagtacagccaccaaggacacctacgacgcccttcacatgcaggccctgccccctcgcgg

SEQ ID NO: 807 - DNA, 1442 bp, synthetic construct
  misc_feature 1..1442: note = Synthetic
  source 1..1442: mol_type = other DNA
atggccttaccagtgaccgccttgctcctgccgctggccttgctgctccacgccgccaggccggaggtgcagctgctggaaagcggcggcggactggtgcaacctggcggctctctgcggctgtcctgtaccgccagcggcttcaccttcagcagcttcgccatgagctgggtcagacaggctccaggaaaaggcctggaatgggtgtctgccatgagcggatctggcgacaccacatactacgccgattccgtgaagggcagatttaccatcagcagagataatagcaagacaacactgtatctgcagatgaacagcctgagggccgaggacacagccgtgtacagctgcgccaagcacaccacctactacatggacgtgtggggcaaaggcaccaccgtcacagtgtccagcggcggaggcggcagcggaggcggcggcagcggcggaggaggctctcagaccgtggtgacccaggagcctagcctgtccgtgtcccctggcggcaccgtgaccctcacatgcggcctgagcagcggctcagtttccacgagcgactaccccagctggtatcagcaaacccctggacaggctcctcggaccctgatctacagaaccaacacccggagcagcggcgtgcccgatagattctctggctctatcctgggcaacaaggccgctctgaccattacaggcgcccaggccgacgacgagagcgattattactgcgtgctgtacatggacagcggcatcatcttcggctctggaacaaaggtgacagtgctgaccacgacgccagcgccgcggccaccaacaccggcgcccaccatcgcgtcgcagcccctgtccctgcgcccagaggcgtgccggccagcggcggggggcgcagtgcacacgagggggctggacttcgcctgtgatatctacatctgggcgcccttggccgggacttgtggggtccttctcctgtcactggttatcaccctttactgccggagggaccagaggctgccccccgatgcccacaagccccctgggggaggcagtttccggacccccatccaagaggagcaggccgacgcccactccaccctggccaagatcagagtgaagttcagcaggagcgcagacgcccccgcgtaccagcagggccagaaccagctctataacgagctcaatctaggacgaagagaggagtacgatgttttggacaagagacgtggccgggaccctgagatggggggaaagccgagaaggaagaaccctcaggaaggcctgtacaatgaactgcagaaagataagatggcggaggcctacagtgagattgggatgaaaggcgagcgccggaggggcaaggggcacgatggcctttaccagggtctcagtacagccaccaaggacacctacgacgcccttcacatgcaggccctgccccctcgcgg

SEQ ID NO: 808 - DNA, 1442 bp, synthetic construct
  misc_feature 1..1442: note = Synthetic
  source 1..1442: mol_type = other DNA
atggccttaccagtgaccgccttgctcctgccgctggccttgctgctccacgccgccaggccggaggtgcagctgctggaaagcggcggcggcctggtgcaacctggcggaagtctgcggctgtcttgtgccgcttctggattcaccttcaacacctacgccatgagctgggtgcggcaggcccctggcaaaggcctggaatgggtctccgccatgagcggctctggcgacacaacctactatgccgacagcgtgaagggcagatttacaatcagcagggataacagcaagaccaccctgtacctgcagatgaacagcctccgggccgaggacaccgccgtgtacagctgcgccaagcacaccagctactacatggacgtgtggggcaaaggcaccaccgtgaccgtgtccagcggaggtggcggcagcggcggcggaggctccggcggcggaggctcacagaccgtcgtgacccaggagccttctctgagcgtgtctccaggaggcacagttactctgacatgcggcctgtctagcggcagcgtgtccaccagcgactaccccagctggtatcagcaaacacctggccaggctcctagaaccctgatctatagaacaaataccagaagcagcggcgtgcccgatagattcagcggaagcatcctgggcaacaaggccgccctgaccatcaccggcgcccaggctgacgacgagtctgattactactgcgtgctgtacatgggcagcggcatcattttcggcagcggaacaaaggtgacagtgctgaccacgacgccagcgccgcggccaccaacaccggcgcccaccatcgcgtcgcagcccctgtccctgcgcccagaggcgtgccggccagcggcggggggcgcagtgcacacgagggggctggacttcgcctgtgatatctacatctgggcgcccttggccgggacttgtggggtccttctcctgtcactggttatcaccctttactgccggagggaccagaggctgccccccgatgcccacaagccccctgggggaggcagtttccggacccccatccaagaggagcaggccgacgcccactccaccctggccaagatcagagtgaagttcagcaggagcgcagacgcccccgcgtaccagcagggccagaaccagctctataacgagctcaatctaggacgaagagaggagtacgatgttttggacaagagacgtggccgggaccctgagatggggggaaagccgagaaggaagaaccctcaggaaggcctgtacaatgaactgcagaaagataagatggcggaggcctacagtgagattgggatgaaaggcgagcgccggaggggcaaggggcacgatggcctttaccagggtctcagtacagccaccaaggacacctacgacgcccttcacatgcaggccctgccccctcgcgg

SEQ ID NO: 809 - DNA, 1442 bp, synthetic construct
  misc_feature 1..1442: note = Synthetic
  source 1..1442: mol_type = other DNA
atggccttaccagtgaccgccttgctcctgccgctggccttgctgctccacgccgccaggccggaagtgcagctgctggaaagcggcggcgacctggtgcaacctggcggctccctgagactgagctgcgccgcttctggctttaccttcagcacctacgccatgagctgggtgcggcaggcccctggcaaaggactggagtgggtctccgccatcagcggcagcggcgagaatatctactacgctgatagcgtgaagggcagattcaccattagcagagataattctaagaacaccctgttcctgcagatgaacagcctgcgggccgaagataccgccgtgtactactgcgccaagcacacatcttactacatggacgtgtggggcaaaggcaccaccgtcacagtgtccagcggaggcggcggcagcggcggaggcggcagcggaggaggcggctcacagaccgtggtgacccaagagcccagcttctctgtgtccccaggtggcaccgtgacactgacatgcggcctgtacagcgacagcgtgtctacaagctactatcctagctggtatcagcagacacctggccaggctcctagaaccctgatctacaacaccaacacaagaagcagcggcgtgcccgaccggtttagcggaagcatcctgggcaacaaggccgccctgaccatcaccggcgcccaggccgacgacgagagcgactactattgtgtgctgtacatggtgtccggcatcgtgttcggctctggaacaaaggtgaccgttctgaccacgacgccagcgccgcggccaccaacaccggcgcccaccatcgcgtcgcagcccctgtccctgcgcccagaggcgtgccggccagcggcggggggcgcagtgcacacgagggggctggacttcgcctgtgatatctacatctgggcgcccttggccgggacttgtggggtccttctcctgtcactggttatcaccctttactgccggagggaccagaggctgccccccgatgcccacaagccccctgggggaggcagtttccggacccccatccaagaggagcaggccgacgcccactccaccctggccaagatcagagtgaagttcagcaggagcgcagacgcccccgcgtaccagcagggccagaaccagctctataacgagctcaatctaggacgaagagaggagtacgatgttttggacaagagacgtggccgggaccctgagatggggggaaagccgagaaggaagaaccctcaggaaggcctgtacaatgaactgcagaaagataagatggcggaggcctacagtgagattgggatgaaaggcgagcgccggaggggcaaggggcacgatggcctttaccagggtctcagtacagccaccaaggacacctacgacgcccttcacatgcaggccctgccccctcgcgg

SEQ ID NO: 810 - DNA, 1460 bp, synthetic construct
  misc_feature 1..1460: note = Synthetic
  source 1..1460: mol_type = other DNA
atggccttaccagtgaccgccttgctcctgccgctggccttgctgctccacgccgccaggccgcaagtgcagctggtggaaagcggaggcggagttgtgcaacctggcagatctctgcgcctgtcatgcgccgccagcggctttacattctccagctacggcatgcactgggtgcggcaggcccctggcaaaggcctggaatgggtcgctgtgatctggtacgacggcatcaacaaatactacgccgacagcgtgaagggcagattcaccatcagcagagataatagcaagaacaccctgtacctgcagatgaacagcctgcgggccgaggacactgccgtgtactactgcgccagagagcggctggaacggagatactactactacatggacgtgtggggcaagggcaccaccgtgaccgtgtccagtggtggcggaggatctggcggaggcggctctggcggcggcggcagccagaccgtggtgacccaggagcctagcttcagcgtgtcccccggaggcacagtgaccctgacatgcggcctcagctctggctccgtcagcacctcttactatcctggatggtatcagcagacacctggccaggccccaagaaccctgatctacagcacaaacaccagaagcagcggcgtgcccgatagatttagcggcagcatcctgggcaacaaggccgccctgaccattacaggcgcccaggctgatgacgagagcgactactactgtgtgctgtacatgggcagcggcatgttcatcttcggctctggaaccaaggtgacagtgctgaccacgacgccagcgccgcggccaccaacaccggcgcccaccatcgcgtcgcagcccctgtccctgcgcccagaggcgtgccggccagcggcggggggcgcagtgcacacgagggggctggacttcgcctgtgatatctacatctgggcgcccttggccgggacttgtggggtccttctcctgtcactggttatcaccctttactgccggagggaccagaggctgccccccgatgcccacaagccccctgggggaggcagtttccggacccccatccaagaggagcaggccgacgcccactccaccctggccaagatcagagtgaagttcagcaggagcgcagacgcccccgcgtaccagcagggccagaaccagctctataacgagctcaatctaggacgaagagaggagtacgatgttttggacaagagacgtggccgggaccctgagatggggggaaagccgagaaggaagaaccctcaggaaggcctgtacaatgaactgcagaaagataagatggcggaggcctacagtgagattgggatgaaaggcgagcgccggaggggcaaggggcacgatggcctttaccagggtctcagtacagccaccaaggacacctacgacgcccttcacatgcaggccctgccccctcgcgg

SEQ ID NO: 811 - DNA, 1442 bp, synthetic construct
  misc_feature 1..1442: note = Synthetic
  source 1..1442: mol_type = other DNA
atggccttaccagtgaccgccttgctcctgccgctggccttgctgctccacgccgccaggccggaggtgcagctgctggaatctggaggcggcctcgtgcagcctggaggcagcctgaggctgagctgcgctgcttctggcttcaccttcagcagcttcgccatgagctgggtcagacaagctcccggcaaaggcctggaatgggtgtccgccgtgtctggcagcggcgacgatacctactacgccgatagcgtgaaaggaagatttacaatcagccgggacaacagcaagaataccctgtacctgcagatgaactctctgcgggccgaggacaccgccgtgtactattgcgccaagcacaccagctactacctggacgtgtggggcaagggcaccaccgtgaccgtttccagcggcggcggcggcagcggcggaggtggaagcggcggaggcggatctcagacagtggtgacacaggagcctagcttttctgtgtcccctggcggcaccgtgacactgacatgcgccctgagctccgatagcgtgtcaacatcttacttccccagctggtatcggcagacccctggacaggcccctagaaccctgatctacaacaccaacaccagaagcagcggcgtgccagatagattcagcggctccatcctgggcaacaaggccgccctgaccattacaggcgcccaggccgacgacgagagcgactactactgtgtgctgtacatgggcagcggcatcatcttcggctctggcacaaaggtgaccgtcctgaccacgacgccagcgccgcggccaccaacaccggcgcccaccatcgcgtcgcagcccctgtccctgcgcccagaggcgtgccggccagcggcggggggcgcagtgcacacgagggggctggacttcgcctgtgatatctacatctgggcgcccttggccgggacttgtggggtccttctcctgtcactggttatcaccctttactgccggagggaccagaggctgccccccgatgcccacaagccccctgggggaggcagtttccggacccccatccaagaggagcaggccgacgcccactccaccctggccaagatcagagtgaagttcagcaggagcgcagacgcccccgcgtaccagcagggccagaaccagctctataacgagctcaatctaggacgaagagaggagtacgatgttttggacaagagacgtggccgggaccctgagatggggggaaagccgagaaggaagaaccctcaggaaggcctgtacaatgaactgcagaaagataagatggcggaggcctacagtgagattgggatgaaaggcgagcgccggaggggcaaggggcacgatggcctttaccagggtctcagtacagccaccaaggacacctacgacgcccttcacatgcaggccctgccccctcgcgg

SEQ ID NO: 812 - DNA, 1460 bp, synthetic construct
  misc_feature 1..1460: note = Synthetic
  source 1..1460: mol_type = other DNA
atggccttaccagtgaccgccttgctcctgccgctggccttgctgctccacgccgccaggccgcaagtgcagctggtggaaagcggaggcggcgtcgtgcaacctggcagaagcctgagactgagctgcgccgccagcggctttaacttcagcaccttcgacatccactgggtgcggcaggcccctggaaaaggcctggagtgggtcgccctgatctggtatgacggcagctacaagtactacgccgatagcgttaagggcaggttcaccatcagcagagataattctaagaacaccctggacctgagaatgaacagcctccgggctgaggacaccgccgtgtactactgcgccagaaatgacaactggaacgacgagcattactatcactactacatggacgtgtggggcaagggcaccaccgtgacagtgtcctctggcggcggcggcagcggcggcggcggcagcggtggaggcggaagcgagatcgtgctgacccagtctcctgatttccagtccgtgacccctaaggaaaaggtgaccatcacctgtagagcttctcagagcatcggcagctctctgcactggtatcagcagaaacctgaccagagcccaaagctgctgatcaaattcgccagccagtccttcagcggcgtgccctcccggtttagcggctccggcagcggaacagacttcaccctgacaattaacagcctggaagccgaggatgccgccacatacttctgccaccagtcttctagcctgccctggacattcggccagggcacaaaggtggagatcaagaccacgacgccagcgccgcggccaccaacaccggcgcccaccatcgcgtcgcagcccctgtccctgcgcccagaggcgtgccggccagcggcggggggcgcagtgcacacgagggggctggacttcgcctgtgatatctacatctgggcgcccttggccgggacttgtggggtccttctcctgtcactggttatcaccctttactgccggagggaccagaggctgccccccgatgcccacaagccccctgggggaggcagtttccggacccccatccaagaggagcaggccgacgcccactccaccctggccaagatcagagtgaagttcagcaggagcgcagacgcccccgcgtaccagcagggccagaaccagctctataacgagctcaatctaggacgaagagaggagtacgatgttttggacaagagacgtggccgggaccctgagatggggggaaagccgagaaggaagaaccctcaggaaggcctgtacaatgaactgcagaaagataagatggcggaggcctacagtgagattgggatgaaaggcgagcgccggaggggcaaggggcacgatggcctttaccagggtctcagtacagccaccaaggacacctacgacgcccttcacatgcaggccctgccccctcgcgg

SEQ ID NO: 813 - DNA, 1475 bp, synthetic construct
  misc_feature 1..1475: note = Synthetic
  source 1..1475: mol_type = other DNA
atggccttaccagtgaccgccttgctcctgccgctggccttgctgctccacgccgccaggccggaggtgcacctgctggaaagcggcggcggcctggtgcagcctggaggctctctgcggctgagctgtgccgcctctggttttaccttcagcagctacgccatgaattgggttagacaggcccctggcaagggcctggaatgggtcagcagcatcagcggctccggcagcagctcttactatgctgatagcgtgaagggcagattcaccattagcagagacaatagcaagaacaccctgtacctgcagatgaacagcctgcgggccgaggacaccgccgtgtactactgcgccagccggggcttcaactcccaataccctcctggctactactactactacatggacgtgtggggaaaaggcacgaccgtgaccgtgtcctccggcggcggcggaagcggcggcggcggctctggcggaggcggcagccagaccgtggtgacacaggagcctagcttcagcgtgtctccaggaggaacagtgaccctgacatgcggcctcagcagcggctctgtgtccaccagctatttccccagctggtatcagcagacccctggccaggctcccaggaccctgatctacatcaccaacacaagaagcagcggcgtgcccgacagattttctggcagcatcatcggcaacaaggccgctctgaccatcacaggcgcccaggccgacgacgagagtgattacttctgcgtgctgtacatgggcagcggaacatgggtgttcggcggaggcacaaagctgaccgtcctgaccacgacgccagcgccgcggccaccaacaccggcgcccaccatcgcgtcgcagcccctgtccctgcgcccagaggcgtgccggccagcggcggggggcgcagtgcacacgagggggctggacttcgcctgtgatatctacatctgggcgcccttggccgggacttgtggggtccttctcctgtcactggttatcaccctttactgccggagggaccagaggctgccccccgatgcccacaagccccctgggggaggcagtttccggacccccatccaagaggagcaggccgacgcccactccaccctggccaagatcagagtgaagttcagcaggagcgcagacgcccccgcgtaccagcagggccagaaccagctctataacgagctcaatctaggacgaagagaggagtacgatgttttggacaagagacgtggccgggaccctgagatggggggaaagccgagaaggaagaaccctcaggaaggcctgtacaatgaactgcagaaagataagatggcggaggcctacagtgagattgggatgaaaggcgagcgccggaggggcaaggggcacgatggcctttaccagggtctcagtacagccaccaaggacacctacgacgcccttcacatgcaggccctgccccctcgcgg

SEQ ID NO: 814 - DNA, 1436 bp, synthetic construct
  misc_feature 1..1436: note = Synthetic
  source 1..1436: mol_type = other DNA
atggccttaccagtgaccgccttgctcctgccgctggccttgctgctccacgccgccaggccggaggtgcagctgctggaaagcggcggcggcctggtgcaacctggcggctccctgaggctgagctgcgccgccagcggcttcacctttagcaactacgctatgacctgggtcagacaggcccctggaaagggcctggagtgggtgtccgccatcagcggatctggtattggaacatactacgccgacagcgtgcaaggcagattcacaacaagcagagataattctaagaacaccctgtacctgcagatgaacagcctgcgggccgaggacaccgccgtgtactattgtgccaagggcggctacaactggaaggacgtgtggggcaagggaaccaccgtgaccgtttcttctggcggcggaggcagcggcggcggaggctccggaggcggaggcagcgagatcgtgctgacacagtctcccgactttcagagcgtgacccctaaagagaaggtgacaatcacctgcagagccagccagtcaatcggctctagcctgcactggtatcagcagaaacctgatcagagccctaagctgctgatcaagttcgcctctcagagcttcagcggcgtgccaagccggttcagcggctccggcagcggcaccgacttcaccctgaccatccacagcctggaggccgaagatgccgctacatactactgccaccagtccagcagcctcccctggaccttcggccagggcacaaaggtggaaatcaaaaccacgacgccagcgccgcggccaccaacaccggcgcccaccatcgcgtcgcagcccctgtccctgcgcccagaggcgtgccggccagcggcggggggcgcagtgcacacgagggggctggacttcgcctgtgatatctacatctgggcgcccttggccgggacttgtggggtccttctcctgtcactggttatcaccctttactgccggagggaccagaggctgccccccgatgcccacaagccccctgggggaggcagtttccggacccccatccaagaggagcaggccgacgcccactccaccctggccaagatcagagtgaagttcagcaggagcgcagacgcccccgcgtaccagcagggccagaaccagctctataacgagctcaatctaggacgaagagaggagtacgatgttttggacaagagacgtggccgggaccctgagatggggggaaagccgagaaggaagaaccctcaggaaggcctgtacaatgaactgcagaaagataagatggcggaggcctacagtgagattgggatgaaaggcgagcgccggaggggcaaggggcacgatggcctttaccagggtctcagtacagccaccaaggacacctacgacgcccttcacatgcaggccctgccccctcgcgg

SEQ ID NO: 815 - DNA, 1460 bp, synthetic construct
  misc_feature 1..1460: note = Synthetic
  source 1..1460: mol_type = other DNA
atggccttaccagtgaccgccttgctcctgccgctggccttgctgctccacgccgccaggccgcaagtgcagctggtggagagcggcggcggcgtcgtgcagcccggcagaagcctgcggctgtcttgcgctgccagcggcttcacctttacaaactacgacatgcactgggtcagacaggcccctggcaaaggcctggaatgggtgaccatcatctggcacgacggctccaataagtactacctggacagcgtgcggggcagattcacgatcagcagagataattccaagaacaccctgtacctgcagatgaacagcctgagagccgaggacaccgccgtgtactattgcgccagaggcgacaactggaacgacgagcaccactacttctactacatggacgtgtggggcaagggcaccaccgtgaccgtgtccagcggcggaggcggctccggaggaggcggctctggtggcggcggcagcgagatcgtgctgacccagagccctgacttccagtctgtgacacctaaggaaaaggtgacaatcacctgtagggccagccaaagcatcggcagcagcctgcattggtatcagcagaagcccgatcagtctccaaagctgctgatcaaattcgccagccagagcttcagcggagttcctagccggttcagcggctctggcagcggaacagatttcaccctgacaattcactctctggaggccgaggatgccgccacatattactgccaccagtctagcagcctgccttggacctttggacagggcaccaaggtggaaatcaagaccacgacgccagcgccgcggccaccaacaccggcgcccaccatcgcgtcgcagcccctgtccctgcgcccagaggcgtgccggccagcggcggggggcgcagtgcacacgagggggctggacttcgcctgtgatatctacatctgggcgcccttggccgggacttgtggggtccttctcctgtcactggttatcaccctttactgccggagggaccagaggctgccccccgatgcccacaagccccctgggggaggcagtttccggacccccatccaagaggagcaggccgacgcccactccaccctggccaagatcagagtgaagttcagcaggagcgcagacgcccccgcgtaccagcagggccagaaccagctctataacgagctcaatctaggacgaagagaggagtacgatgttttggacaagagacgtggccgggaccctgagatggggggaaagccgagaaggaagaaccctcaggaaggcctgtacaatgaactgcagaaagataagatggcggaggcctacagtgagattgggatgaaaggcgagcgccggaggggcaaggggcacgatggcctttaccagggtctcagtacagccaccaaggacacctacgacgcccttcacatgcaggccctgccccctcgcgg

SEQ ID NO: 816 - DNA, 1460 bp, synthetic construct
  misc_feature 1..1460: note = Synthetic
  source 1..1460: mol_type = other DNA
atggccttaccagtgaccgccttgctcctgccgctggccttgctgctccacgccgccaggccgcaggtgcagctggttgagagcggcggaggcgtggtgcaacctggaagatctctgcgcctgagctgcgccgccagcggcttcaccttcagcaactacgatatgcactgggtgcggcaggcccctggcaagggcctggaatgggtcaccattatctggcatgacggcagcaacaagtactacctggacagcgtgaaaggcagattcaccatcagcagagacaatagcaagaacaccctgtacctgcagatgaacagcctgcgggccgaggacaccgccgtgtactattgcgccagaggcgacaactggaacgacgagcaccactacttctactatatggacgtgtggggcaaaggcacaaccgtgaccgtcagcagcggcggcggaggcagcggaggcggaggctctggcggcggtggcagtgaaatcgtgctgacccagagccccgctacactgagcctctcccctggcgagcgggccacactgtcttgtagagcctctcagtccgtgtccagcagcctggcctggtatcagcagaagcccggccaggctccaagactgctgatctacgacgccagcaatagagccaccggcatccccgcccggttttccggcagcggatctggaacagattttaccctgaccatcagcagcctggaacctgaggatttcgccgtgtactactgccagcaaagaagcaactggcctctgacattcggcggcggcacaaaggtggaaatcaagaccacgacgccagcgccgcggccaccaacaccggcgcccaccatcgcgtcgcagcccctgtccctgcgcccagaggcgtgccggccagcggcggggggcgcagtgcacacgagggggctggacttcgcctgtgatatctacatctgggcgcccttggccgggacttgtggggtccttctcctgtcactggttatcaccctttactgccggagggaccagaggctgccccccgatgcccacaagccccctgggggaggcagtttccggacccccatccaagaggagcaggccgacgcccactccaccctggccaagatcagagtgaagttcagcaggagcgcagacgcccccgcgtaccagcagggccagaaccagctctataacgagctcaatctaggacgaagagaggagtacgatgttttggacaagagacgtggccgggaccctgagatggggggaaagccgagaaggaagaaccctcaggaaggcctgtacaatgaactgcagaaagataagatggcggaggcctacagtgagattgggatgaaaggcgagcgccggaggggcaaggggcacgatggcctttaccagggtctcagtacagccaccaaggacacctacgacgcccttcacatgcaggccctgccccctcgcgg

SEQ ID NO: 817 - DNA, 1448 bp, synthetic construct
  misc_feature 1..1448: note = Synthetic
  source 1..1448: mol_type = other DNA
atggccttaccagtgaccgccttgctcctgccgctggccttgctgctccacgccgccaggccggaagtgcagctggtcgagagcggcggcggcgtggtgcggcctggcgggtccctgagactgagctgcgccgcctctggcttcaccttcgacgactatggcatgagctgggtcagacaggcccctggaaaaggcctggaatgggtgtccggaatcaactggaatggcggcagtacaggctacgtggacagcgtgaagggcagattcaccatcagccgggacaacgccaagaacagcctgtatctgcagatgaacagcctgcgggccgaggacaccgccctgtaccactgtgccagacctgtgacaaccgactactactactacatggacgtgtggggcaagggcaccaccgtgaccgtgtcttccggcggaggaggcagcggcggcggcggcagcggcggaggcggcagcgagatcgtgctgacacagagccccggaacactgagcctgagccctggcgagcgggctacactgtcttgcagagcttctcagagcgtttcctccagctacctggcctggtatcagcaaaagcccggccaagctccaagactgctgatctacggcgccagctctagggccaccggcattcctgatagattcagcggctctggcagcggaacagattttaccctgaccatcagcagactggagcctgaggatttcgccgtgtactactgccagcagtacggatctagctggacctttggccagggcaccaaggtggaaatcaaaaccacgacgccagcgccgcggccaccaacaccggcgcccaccatcgcgtcgcagcccctgtccctgcgcccagaggcgtgccggccagcggcggggggcgcagtgcacacgagggggctggacttcgcctgtgatatctacatctgggcgcccttggccgggacttgtggggtccttctcctgtcactggttatcaccctttactgccggagggaccagaggctgccccccgatgcccacaagccccctgggggaggcagtttccggacccccatccaagaggagcaggccgacgcccactccaccctggccaagatcagagtgaagttcagcaggagcgcagacgcccccgcgtaccagcagggccagaaccagctctataacgagctcaatctaggacgaagagaggagtacgatgttttggacaagagacgtggccgggaccctgagatggggggaaagccgagaaggaagaaccctcaggaaggcctgtacaatgaactgcagaaagataagatggcggaggcctacagtgagattgggatgaaaggcgagcgccggaggggcaaggggcacgatggcctttaccagggtctcagtacagccaccaaggacacctacgacgcccttcacatgcaggccctgccccctcgcgg

SEQ ID NO: 818 - DNA, 1472 bp, synthetic construct
  misc_feature 1..1472: note = Synthetic
  source 1..1472: mol_type = other DNA
atggccttaccagtgaccgccttgctcctgccgctggccttgctgctccacgccgccaggccggaggtgcagctgctggagagcggaggaggcctggtgcaacctggcggcagcctgcggctgagctgcgccgcttccggcttcaccttcagcagctacgccatgagctgggtgcggcaggctcctggaaaaggcctggagtgggtcagcgccatcagcggcagcggaggctcaacatactacgccgacagcgtgaagggcagattcaccatcagccgcgacaactctaagaacaccctgtacctgcagatgaactctctgagagccgaggacaccgccgtgtactattgtgccaagaagggcacaagctacaactggaatgatgtgcactactactactactattatatggacgtgtggggcaaaggcacaaccgtgaccgtgtccagcggcggtggaggcagcggaggcggcggaagcggcggcggcggcagtgaaattgtgctgacccagagccccggcaccctgagcctgtctccaggcgagcgggctaccctgtcctgcagagccagccagtctgtttccagctcttacctggcctggtatcagcaaaagcctggacaggcccctagactgctgatctacggcgcctctagcagggctacaggcatccctgatagatttagcggcagcggctctggcaccgacttcaccctgaccatctccagactggaacccgaggatttcgccgtgtactactgccagcagtacggcagcagctggacatttggccagggcacaaaggtggaaatcaagaccacgacgccagcgccgcggccaccaacaccggcgcccaccatcgcgtcgcagcccctgtccctgcgcccagaggcgtgccggccagcggcggggggcgcagtgcacacgagggggctggacttcgcctgtgatatctacatctgggcgcccttggccgggacttgtggggtccttctcctgtcactggttatcaccctttactgccggagggaccagaggctgccccccgatgcccacaagccccctgggggaggcagtttccggacccccatccaagaggagcaggccgacgcccactccaccctggccaagatcagagtgaagttcagcaggagcgcagacgcccccgcgtaccagcagggccagaaccagctctataacgagctcaatctaggacgaagagaggagtacgatgttttggacaagagacgtggccgggaccctgagatggggggaaagccgagaaggaagaaccctcaggaaggcctgtacaatgaactgcagaaagataagatggcggaggcctacagtgagattgggatgaaaggcgagcgccggaggggcaaggggcacgatggcctttaccagggtctcagtacagccaccaaggacacctacgacgcccttcacatgcaggccctgccccctcgcgg

SEQ ID NO: 819 - DNA, 1454 bp, synthetic construct
  misc_feature 1..1454: note = Synthetic
  source 1..1454: mol_type = other DNA
atggccttaccagtgaccgccttgctcctgccgctggccttgctgctccacgccgccaggccgcagctgcaactgcaggagagcggtcctggactggtgaagccttctgagacactgagcctgacctgcaccgtgtccggcggctctatcagctcctccagctactactggggctggatcagacagccacctggcaagggcctggaatggatcggcagcatttactattctggctcaacatactacaaccccagccttaaaagcagagtgacaatcagcgtggacaccagcaagaaccagttcagcctgaagctgtcctctgtgaccgccgctgatactgccgtttactactgcaccaccggaacaacagcttattactactactactacatggacgtgtggggaaagggcaccacagtgaccgtgtccagcggcggaggcggcagcggcggaggaggatctggcggcggcggcagcgagatcgtgctgacccagtctccaggcaccctgagcctgagccccggcgagcgggccacactgagctgcagagcctctcagagcgtcagctctagctacctggcctggtatcagcaaaaacctggccaggcccctagactgctgatctacggcgccagcagccgggccaccggcatccctgatagattcagcggatctggcagcggcaccgactttaccctcaccatcagcagactggaacccgaggacttcgccgtgtactattgtcagcagtacggcagcagctggacattcggccagggcaccaaggtggaaatcaagaccacgacgccagcgccgcggccaccaacaccggcgcccaccatcgcgtcgcagcccctgtccctgcgcccagaggcgtgccggccagcggcggggggcgcagtgcacacgagggggctggacttcgcctgtgatatctacatctgggcgcccttggccgggacttgtggggtccttctcctgtcactggttatcaccctttactgccggagggaccagaggctgccccccgatgcccacaagccccctgggggaggcagtttccggacccccatccaagaggagcaggccgacgcccactccaccctggccaagatcagagtgaagttcagcaggagcgcagacgcccccgcgtaccagcagggccagaaccagctctataacgagctcaatctaggacgaagagaggagtacgatgttttggacaagagacgtggccgggaccctgagatggggggaaagccgagaaggaagaaccctcaggaaggcctgtacaatgaactgcagaaagataagatggcggaggcctacagtgagattgggatgaaaggcgagcgccggaggggcaaggggcacgatggcctttaccagggtctcagtacagccaccaaggacacctacgacgcccttcacatgcaggccctgccccctcgcgg

SEQ ID NO: 820 - DNA, 1451 bp, synthetic construct
  misc_feature 1..1451: note = Synthetic
  source 1..1451: mol_type = other DNA
atggccttaccagtgaccgccttgctcctgccgctggccttgctgctccacgccgccaggccggaggtgcagctgctggagagcggtggaggcctggtgcaacctggcggctccctgcggctgagctgcgccgccagcggcttcacctttagctcttacgccatgacctgggtcagacaggcccctggcaagggactggaatgggtgtctgccatcagcggcagcggaggatctacatactacgctgatagcgtgaagggcagatttacaatcagccgcgacaatagcaagaacaccctgtacctgcagatgaacagcctgagagccgaggacaccgccgtgtactactgcgctagaggcggctacaactggcactactactactacatggacgtgtggggcaaaggaaccaccgtgaccgtgtccagcggcggcggcggctctggcggaggcggctctggcggcggcggaagcgagatcgtgctgacccagtctcccggaacactctccctgtccccaggcgagcgggctacactgagctgccgggccagccagagcgtgtcctcgtcttatctggcctggtatcagcagaaacctggccaagcccctagactgctgatctacggcgccagcagccgggccacaggcatccccgatagattcagcggcagcggaagcggcaccgacttcaccctgacaatcagcagactggaacctgaggacttcgccgtgtactattgtcagcagtacggcagcagctggaccttcggccagggcaccaaggttgaaattaagaccacgacgccagcgccgcggccaccaacaccggcgcccaccatcgcgtcgcagcccctgtccctgcgcccagaggcgtgccggccagcggcggggggcgcagtgcacacgagggggctggacttcgcctgtgatatctacatctgggcgcccttggccgggacttgtggggtccttctcctgtcactggttatcaccctttactgccggagggaccagaggctgccccccgatgcccacaagccccctgggggaggcagtttccggacccccatccaagaggagcaggccgacgcccactccaccctggccaagatcagagtgaagttcagcaggagcgcagacgcccccgcgtaccagcagggccagaaccagctctataacgagctcaatctaggacgaagagaggagtacgatgttttggacaagagacgtggccgggaccctgagatggggggaaagccgagaaggaagaaccctcaggaaggcctgtacaatgaactgcagaaagataagatggcggaggcctacagtgagattgggatgaaaggcgagcgccggaggggcaaggggcacgatggcctttaccagggtctcagtacagccaccaaggacacctacgacgcccttcacatgcaggccctgccccctcgcgg

SEQ ID NO: 821 - DNA, 1463 bp, synthetic construct
  misc_feature 1..1463: note = Synthetic
  source 1..1463: mol_type = other DNA
atggccttaccagtgaccgccttgctcctgccgctggccttgctgctccacgccgccaggccgcaagtgcagctggtggagagcggaggcggagtcgtgcaacctggcagaagcctgagactgagctgcgccgcttctggcttcaccttttctagctacgacatgcactgggtgcggcaggcccctggaaaaggcctggaatgggtcagcgtgatctggtatgacggctccaacaagaagtacggcgacagcgccaagggcaggttcaccattagccgggacaattctaagaacaccctggacctgcagatgaacagcctgcgggctgaggacaccgccgtgtactattgtgccagaggcgataattggaacgacgagggcggctactactactactacatggacgtgtggggcaagggaacaaccgtgacagtgtccagcggcggcggcggaagcggcggcggcggatctggcggaggcggcagcgagatcgtgctgacccagagccccgacttccagtccgtgacccctaaggaaaaggtgaccatcacatgcagagccagccagaacatcggcagcagcctgcactggtatcagcagaaacctgatcagtctccaaagctgctgatcaaattcgcctctcagagcatcagcggtgttcctagcagattcagcggctccggcagcggcactgattttacactgaccatcaacagcctggaggccgaggatgccgctgcctactactgccaccagagctctagcctgccctggaccttcggccagggcacaaaggtggaaatcaagaccacgacgccagcgccgcggccaccaacaccggcgcccaccatcgcgtcgcagcccctgtccctgcgcccagaggcgtgccggccagcggcggggggcgcagtgcacacgagggggctggacttcgcctgtgatatctacatctgggcgcccttggccgggacttgtggggtccttctcctgtcactggttatcaccctttactgccggagggaccagaggctgccccccgatgcccacaagccccctgggggaggcagtttccggacccccatccaagaggagcaggccgacgcccactccaccctggccaagatcagagtgaagttcagcaggagcgcagacgcccccgcgtaccagcagggccagaaccagctctataacgagctcaatctaggacgaagagaggagtacgatgttttggacaagagacgtggccgggaccctgagatggggggaaagccgagaaggaagaaccctcaggaaggcctgtacaatgaactgcagaaagataagatggcggaggcctacagtgagattgggatgaaaggcgagcgccggaggggcaaggggcacgatggcctttaccagggtctcagtacagccaccaaggacacctacgacgcccttcacatgcaggccctgccccctcgcgg

SEQ ID NO: 822 - DNA, 1463 bp, synthetic construct
  misc_feature 1..1463: note = Synthetic
  source 1..1463: mol_type = other DNA
atggccttaccagtgaccgccttgctcctgccgctggccttgctgctccacgccgccaggccgcaagtgcagctggtggagagcggcggcggcgtggtgcagcccggacgctccctgcggctgagctgcgccgccagcggctttaccttctctagctacgatatgcactgggtcagacaggctcctggcaaaggcctggaatgggtgtccgtgatctggtacgacggctccaacaagaagtacggcgacagcgccaagggcagattcaccatctctcgggacaatagcaagaacacactggacctgcagatgaactctctgagagccgaggacaccgccgtgtactactgcgccagaggcgataattggaacgacgagggcggttattactactactatatggacgtgtggggaaaaggcacaaccgtgaccgtttccagcggcggaggcggcagcggcggcggcggatctggcggaggcggcagcgacattcagatgacacagagccccagcagcctctccacctctgtgggcgatagagtgaccatcacatgccgggccagccagggcatcagcaactacctggcctggttccagcagaagcctggaaaggcccctaagagcctgatctacgccgccagcagcctgcagagcggagtgccatctaagttcagcggcagcggatctggcaccgacttcagcctgaccatcagctctctgcagcctgaggattttgccacatactactgtcagcagtacaacagctaccctatcacattcggccagggcaccagactggaaatcaagaccacgacgccagcgccgcggccaccaacaccggcgcccaccatcgcgtcgcagcccctgtccctgcgcccagaggcgtgccggccagcggcggggggcgcagtgcacacgagggggctggacttcgcctgtgatatctacatctgggcgcccttggccgggacttgtggggtccttctcctgtcactggttatcaccctttactgccggagggaccagaggctgccccccgatgcccacaagccccctgggggaggcagtttccggacccccatccaagaggagcaggccgacgcccactccaccctggccaagatcagagtgaagttcagcaggagcgcagacgcccccgcgtaccagcagggccagaaccagctctataacgagctcaatctaggacgaagagaggagtacgatgttttggacaagagacgtggccgggaccctgagatggggggaaagccgagaaggaagaaccctcaggaaggcctgtacaatgaactgcagaaagataagatggcggaggcctacagtgagattgggatgaaaggcgagcgccggaggggcaaggggcacgatggcctttaccagggtctcagtacagccaccaaggacacctacgacgcccttcacatgcaggccctgccccctcgcgg

SEQ ID NO: 823 - DNA, 1454 bp, synthetic construct
  misc_feature 1..1454: note = Synthetic
  source 1..1454: mol_type = other DNA
atggccttaccagtgaccgccttgctcctgccgctggccttgctgctccacgccgccaggccgcaagtgcagctggtgcagtctggagccgaggtgaaaaagagcggcgcctcagtgaaggtgtcctgcaaggccagcggctacacactgaccagctacggcatctcttgggttagacaggcccctggacaaggcctggaatggatgggctggatcagcgcctacaacggcaacatcaactacgcccagaaattccagggcagagtgacaatgaccacagacaccagcacctccaccgcttacatggaactgcggagcctgagaagcgacgacaccgccgtgtactactgtgtgcgggacggcgatagatacaattggaaccacagctatatggacgtgtggggcaagggcacaacagtcaccgtgtcttctggaggcggaggcagcggaggcggcggcagcggcggcggcggcagcgagatcgtgctgacacagagccctgatttccaaagcgtgacccctaaggaaaaggtgaccatcacatgcagagcctctcagaacattggaagtagcctgcactggtatcagcagaaacccgatcagtccccaaagctgctgatcaagttcgccagccagagcatcagcggagtgcccagccggttcagcggctctggctctggcaccgacttcaccctgaccatcaatagcctggaggccgaggacgccgctgcttattactgccaccagagcagctccctgccttggacctttggccagggcaccaaggtcgagatcaagaccacgacgccagcgccgcggccaccaacaccggcgcccaccatcgcgtcgcagcccctgtccctgcgcccagaggcgtgccggccagcggcggggggcgcagtgcacacgagggggctggacttcgcctgtgatatctacatctgggcgcccttggccgggacttgtggggtccttctcctgtcactggttatcaccctttactgccggagggaccagaggctgccccccgatgcccacaagccccctgggggaggcagtttccggacccccatccaagaggagcaggccgacgcccactccaccctggccaagatcagagtgaagttcagcaggagcgcagacgcccccgcgtaccagcagggccagaaccagctctataacgagctcaatctaggacgaagagaggagtacgatgttttggacaagagacgtggccgggaccctgagatggggggaaagccgagaaggaagaaccctcaggaaggcctgtacaatgaactgcagaaagataagatggcggaggcctacagtgagattgggatgaaaggcgagcgccggaggggcaaggggcacgatggcctttaccagggtctcagtacagccaccaaggacacctacgacgcccttcacatgcaggccctgccccctcgcgg

SEQ ID NO: 824 - DNA, 1454 bp, synthetic construct
  misc_feature 1..1454: note = Synthetic
  source 1..1454: mol_type = other DNA
atggccttaccagtgaccgccttgctcctgccgctggccttgctgctccacgccgccaggccgcaagtgcagctggttcagagcggagccgaggtgaaaaagtccggcgccagcgtgaaggtgtcatgcaaggcctctggctacaccctgacctcctacggcatcagctgggtccggcaggcccctggccagggcctggagtggatgggctggatcagcgcttataatggcaacatcaattacgcccagaagttccaaggcagagtgacaatgaccacagataccagcaccagcacagcttacatggaactgagatccctgcggagcgacgacaccgccgtgtactattgtgtgcgggacggcgacagatacaactggaaccacagctacatggacgtgtggggcaagggcaccaccgtgaccgtgtccagcggcggcggcggctctggaggcggcggatctggcggaggaggttccgacatccagatgacacagagccccagcagcctgagcacctctgtgggcgatagagtgaccatcacctgcagagccagccagggcatcagcaactacctggcctggttccagcagaaacctggaaaggcccctaagagcctgatctacgccgcttcttctctgcaaagcggcgtgccaagcaagttcagcggcagcggcagcggaacagacttcagcctgacaatttctagcctccagcctgaggattttgccacatactactgccagcagtacaacagctaccccatcaccttcggccagggcacaagactggaaatcaagaccacgacgccagcgccgcggccaccaacaccggcgcccaccatcgcgtcgcagcccctgtccctgcgcccagaggcgtgccggccagcggcggggggcgcagtgcacacgagggggctggacttcgcctgtgatatctacatctgggcgcccttggccgggacttgtggggtccttctcctgtcactggttatcaccctttactgccggagggaccagaggctgccccccgatgcccacaagccccctgggggaggcagtttccggacccccatccaagaggagcaggccgacgcccactccaccctggccaagatcagagtgaagttcagcaggagcgcagacgcccccgcgtaccagcagggccagaaccagctctataacgagctcaatctaggacgaagagaggagtacgatgttttggacaagagacgtggccgggaccctgagatggggggaaagccgagaaggaagaaccctcaggaaggcctgtacaatgaactgcagaaagataagatggcggaggcctacagtgagattgggatgaaaggcgagcgccggaggggcaaggggcacgatggcctttaccagggtctcagtacagccaccaaggacacctacgacgcccttcacatgcaggccctgccccctcgcgg

SEQ ID NO: 825 - DNA, 1451 bp, synthetic construct
  misc_feature 1..1451: note = Synthetic
  source 1..1451: mol_type = other DNA
atggccttaccagtgaccgccttgctcctgccgctggccttgctgctccacgccgccaggccggaggtgcagctgctggaaagcggaggcgacctggtgcaacctggaggcagcctgcggctgagctgcgccgcttctggcttcacctttagcacctacgccatgacatgggttagacaggcccctggcaagggcctggagtgggtcagcgccatcagcggcaccagcggctctacctactacgccgacagcgtgaagggcagattcaccatctccagagataattcaaagagcaccctgtacctgcacatgaacagcctgagaaccgaggacaccgccgtgtactattgcgctagaggcggctacaactggcactactactactacatggacgtgtggggaaaaggcacaacagtgaccgtgtcttctggcggaggaggcagcggcggtggcggcagtggcggaggcggcagcgagatcgtgctgacacagtcccctgacttccagagcgtgacccctaaggaaaaggtgacaatcacctgccgggcctctcagagcatcggcagcagcctgcactggtatcagcagaagcccgatcagtccccaaagctgctgatcaaatacgtgtcccaatctatcagcggcgtgcccagccggttttctggcagcggcagcggaacagacttcaccctgaccattaactccctggaggccgaggatgccgctgcctactattgtcaccagagcagcagcctgccttggacattcggccagggcaccaaggtggaaatcaagaccacgacgccagcgccgcggccaccaacaccggcgcccaccatcgcgtcgcagcccctgtccctgcgcccagaggcgtgccggccagcggcggggggcgcagtgcacacgagggggctggacttcgcctgtgatatctacatctgggcgcccttggccgggacttgtggggtccttctcctgtcactggttatcaccctttactgccggagggaccagaggctgccccccgatgcccacaagccccctgggggaggcagtttccggacccccatccaagaggagcaggccgacgcccactccaccctggccaagatcagagtgaagttcagcaggagcgcagacgcccccgcgtaccagcagggccagaaccagctctataacgagctcaatctaggacgaagagaggagtacgatgttttggacaagagacgtggccgggaccctgagatggggggaaagccgagaaggaagaaccctcaggaaggcctgtacaatgaactgcagaaagataagatggcggaggcctacagtgagattgggatgaaaggcgagcgccggaggggcaaggggcacgatggcctttaccagggtctcagtacagccaccaaggacacctacgacgcccttcacatgcaggccctgccccctcgcgg

SEQ ID NO: 826 - DNA, 1454 bp, synthetic construct
  misc_feature 1..1454: note = Synthetic
  source 1..1454: mol_type = other DNA
atggccttaccagtgaccgccttgctcctgccgctggccttgctgctccacgccgccaggccggaggtgcaactgctggaaagcggaggagatctggtgcagcccggcggctccctgcgcctgtcttgcgccgccagcggctttacattcagcacctacgccatgacatgggttagacaggcccctggaaaaggcctggaatgggtgtccgccatcagcggaaccagcggcagcacatactacgccgacagcgtgaagggcagattcaccatcagccgggacaacagcaagtccaccctgtacctgcacatgaacagcctgcggaccgaggacaccgccgtgtactattgcgctagaggcggttataattggcactactactactacatggacgtgtggggcaagggcacgaccgtgacagtgtccagcggcggcggaggcagcggcggaggaggctctggcggcggcggcagcgagatcgtgatgacccagtctcctgctacactgagcctgagccccggcgagcgggccaccctgagttgtagagccagccagagcgtgtcttctagctacctgagctggtatcagcaaaaacctggccttgctccaagactgctgatctacggcgcctctacaagagccaccggcatccccgccagatttagcggctctggcagcggcaccgacttcaccctgaccatctccagcctccagcctgaggatttcgccgtctactactgccagcaggattacaacctgcctcctaccttcggccagggcacaaaggtggaaattaagaccacgacgccagcgccgcggccaccaacaccggcgcccaccatcgcgtcgcagcccctgtccctgcgcccagaggcgtgccggccagcggcggggggcgcagtgcacacgagggggctggacttcgcctgtgatatctacatctgggcgcccttggccgggacttgtggggtccttctcctgtcactggttatcaccctttactgccggagggaccagaggctgccccccgatgcccacaagccccctgggggaggcagtttccggacccccatccaagaggagcaggccgacgcccactccaccctggccaagatcagagtgaagttcagcaggagcgcagacgcccccgcgtaccagcagggccagaaccagctctataacgagctcaatctaggacgaagagaggagtacgatgttttggacaagagacgtggccgggaccctgagatggggggaaagccgagaaggaagaaccctcaggaaggcctgtacaatgaactgcagaaagataagatggcggaggcctacagtgagattgggatgaaaggcgagcgccggaggggcaaggggcacgatggcctttaccagggtctcagtacagccaccaaggacacctacgacgcccttcacatgcaggccctgccccctcgcgg

SEQ ID NO: 827 - protein, 711 aa, synthetic construct
  REGION 1..711: note = Synthetic
MALPVTALLLPLALLLHAARPQVQLVESGGGVVQPGRSLRLSCAASGFTFNNYDMYWVRQAPGKGLEWVAVTWYDGSNKYYADSVKGRFTISRDNSKNTLYLQMNSLRAEDTAVYYCARGDNWNDEHHYFYYMDVWGKGTTVTVSSGGGGSGGGGSGGGGSEIVLTQSPDFQSVTPKEKVTITCRASQSIGSSLHWYQQKPDQSPKLLIKFASQSFSGVPSRFSGSGSGTDFTLTIHSLEAEDAATYYCHQSSSLPWTFGQGTKVEIKTTTPAPRPPTPAPTIASQPLSLRPEACRPAAGGAVHTRGLDFACDIYIWAPLAGTCGVLLLSLVITLYCRRDQRLPPDAHKPPGGGSFRTPIQEEQADAHSTLAKIRVKFSRSADAPAYQQGQNQLYNELNLGRREEYDVLDKRRGRDPEMGGKPRRKNPQEGLYNELQKDKMAEAYSEIGMKGERRRGKGHDGLYQGLSTATKDTYDALHMQALPPRGSGEGRGSLLTCGDVEENPGPMALPVTALLLPLALLLHAARPNWVNVISDLKKIEDLIQSMHIDATLYTESDVHPSCKVTAMKCFLLELQVISLESGDASIHDTVENLIILANNSLSSNGNVTESGCKECEELEEKNIKEFLQSFVHIVQMFINTSTTTPAPRPPTPAPTIASQPLSLRPEACRPAAGGAVHTRGLDFACDIYIWAPLAGTCGVLLLSLVITLYC

SEQ ID NO: 828 - protein, 711 aa, synthetic construct
  REGION 1..711: note = Synthetic
MALPVTALLLPLALLLHAARPQVQLVESGGGVVQPGRSLRLSCAASGFTFSNYDMHWVRQAPGKGLEWVTIIWHDASNKYYLDSVKGRFTISRDNSKNTLYLQMNSLRAEDTAVYYCARGDNWNDEHHYFYYMDVWGKGTTVTVSSGGGGSGGGGSGGGGSEIVLTQSPDFQSVTPKEKVTITCRASQSIGSSLHWYQQKPDQSPKLLIKFASQSFSGVPSRFSGSGSGTDFTLTIHSLEAEDAATYYCHQSSSLPWTFGQGTKVEIKTTTPAPRPPTPAPTIASQPLSLRPEACRPAAGGAVHTRGLDFACDIYIWAPLAGTCGVLLLSLVITLYCRRDQRLPPDAHKPPGGGSFRTPIQEEQADAHSTLAKIRVKFSRSADAPAYQQGQNQLYNELNLGRREEYDVLDKRRGRDPEMGGKPRRKNPQEGLYNELQKDKMAEAYSEIGMKGERRRGKGHDGLYQGLSTATKDTYDALHMQALPPRGSGEGRGSLLTCGDVEENPGPMALPVTALLLPLALLLHAARPNWVNVISDLKKIEDLIQSMHIDATLYTESDVHPSCKVTAMKCFLLELQVISLESGDASIHDTVENLIILANNSLSSNGNVTESGCKECEELEEKNIKEFLQSFVHIVQMFINTSTTTPAPRPPTPAPTIASQPLSLRPEACRPAAGGAVHTRGLDFACDIYIWAPLAGTCGVLLLSLVITLYC

SEQ ID NO: 829 - protein, 711 aa, synthetic construct
  REGION 1..711: note = Synthetic
MALPVTALLLPLALLLHAARPQVQLVESGGGVVQPGRSLRLSCAASGFTFSNYDMHWVRQAPGKGLEWVTIIWHDGSNKYYLDSVKGRFTISRDNSKNTLYLQMNSLRAEDTAVYYCARGDNWNDEHHYFYYMDVWGKGTTVTVSSGGGGSGGGGSGGGGSEIVLTQSPDFQSVTPKEKVTITCRASQSIGSSLHWYQQKPDQSPKLLIKFASQSFSGVPSRFSGSGSGTDFTLTIHSLEAEDAATYYCHQSSSLPWTFGQGTKVEIKTTTPAPRPPTPAPTIASQPLSLRPEACRPAAGGAVHTRGLDFACDIYIWAPLAGTCGVLLLSLVITLYCRRDQRLPPDAHKPPGGGSFRTPIQEEQADAHSTLAKIRVKFSRSADAPAYQQGQNQLYNELNLGRREEYDVLDKRRGRDPEMGGKPRRKNPQEGLYNELQKDKMAEAYSEIGMKGERRRGKGHDGLYQGLSTATKDTYDALHMQALPPRGSGEGRGSLLTCGDVEENPGPMALPVTALLLPLALLLHAARPNWVNVISDLKKIEDLIQSMHIDATLYTESDVHPSCKVTAMKCFLLELQVISLESGDASIHDTVENLIILANNSLSSNGNVTESGCKECEELEEKNIKEFLQSFVHIVQMFINTSTTTPAPRPPTPAPTIASQPLSLRPEACRPAAGGAVHTRGLDFACDIYIWAPLAGTCGVLLLSLVITLYC

SEQ ID NO: 830 - protein, 705 aa, synthetic construct
  REGION 1..705: note = Synthetic
MALPVTALLLPLALLLHAARPEVQLLESGGGLVQPGGSLRLSCAASGFTFSIYAMSWVRQAPGKGLEWVSAISGGGDTTYYADSVKGRFTISRDNSKTTLDLQMNSLRAEDTAVYYCAKHTSYYMDVWGKGTTVTVSSGGGGSGGGGSGGGGSQTVVTQEPSLSVSPGGTVTLTCGLSSGSVSTSYYPSWYQQTPGQAPRTLIYSTNIRSSGVPDRFSGSILGNKAALTITGAQADDESDYYCKLYMGSGIIFGSGTKVTVLTTTPAPRPPTPAPTIASQPLSLRPEACRPAAGGAVHTRGLDFACDIYIWAPLAGTCGVLLLSLVITLYCRRDQRLPPDAHKPPGGGSFRTPIQEEQADAHSTLAKIRVKFSRSADAPAYQQGQNQLYNELNLGRREEYDVLDKRRGRDPEMGGKPRRKNPQEGLYNELQKDKMAEAYSEIGMKGERRRGKGHDGLYQGLSTATKDTYDALHMQALPPRGSGEGRGSLLTCGDVEENPGPMALPVTALLLPLALLLHAARPNWVNVISDLKKIEDLIQSMHIDATLYTESDVHPSCKVTAMKCFLLELQVISLESGDASIHDTVENLIILANNSLSSNGNVTESGCKECEELEEKNIKEFLQSFVHIVQMFINTSTTTPAPRPPTPAPTIASQPLSLRPEACRPAAGGAVHTRGLDFACDIYIWAPLAGTCGVLLLSLVITLYC

SEQ ID NO: 831 - protein, 711 aa, synthetic construct
  REGION 1..711: note = Synthetic
MALPVTALLLPLALLLHAARPQVQLVESGGGVVQPGRSLRLSCAASGFTFSNYDKHWVRQAPGKGLEWVAVIWYDGSNKYYADSVKGRFTISRDNSKNTLYLQMNSLRAEDTAMYYCARGDNWNDEHHYFYYMDVWGKGTTVTVSSGGGGSGGGGSGGGGSEIVLTQSPDFQSVTPKEKVTITCRASQSIGSSLHWYQQKPDQSPKLLIKFASQSFSGVPSRFSGSGSGTDFTLTIHSLEAEDAATYYCHQSSSLPWTFGQGTKVEIKTTTPAPRPPTPAPTIASQPLSLRPEACRPAAGGAVHTRGLDFACDIYIWAPLAGTCGVLLLSLVITLYCRRDQRLPPDAHKPPGGGSFRTPIQEEQADAHSTLAKIRVKFSRSADAPAYQQGQNQLYNELNLGRREEYDVLDKRRGRDPEMGGKPRRKNPQEGLYNELQKDKMAEAYSEIGMKGERRRGKGHDGLYQGLSTATKDTYDALHMQALPPRGSGEGRGSLLTCGDVEENPGPMALPVTALLLPLALLLHAARPNWVNVISDLKKIEDLIQSMHIDATLYTESDVHPSCKVTAMKCFLLELQVISLESGDASIHDTVENLIILANNSLSSNGNVTESGCKECEELEEKNIKEFLQSFVHIVQMFINTSTTTPAPRPPTPAPTIASQPLSLRPEACRPAAGGAVHTRGLDFACDIYIWAPLAGTCGVLLLSLVITLYC

SEQ ID NO: 832 - protein, 709 aa, synthetic construct
  REGION 1..709: note = Synthetic
MALPVTALLLPLALLLHAARPQVQLVQSGAEVKKPGASVKVSCKASGYTFTNYGFSWVRQAPGQGLDWMGWISAYNGYTNYTQKLQGRVTMTTDTSTTTAYMELRSLRSDDTAVYYCARRGLLYYYYSMDVWGKGTTVTVSSGGGGSGGGGSGGGGSEIVLTQSPATLSLSPGERATLSCGASQSVYNSYLAWYQQKPGLAPRLLIYDASLRATGVPDRFSGSGSGTDFTLTISTLEPEDFAVYYCQQYGGSPMYTFGQGTKLEIKTTTPAPRPPTPAPTIASQPLSLRPEACRPAAGGAVHTRGLDFACDIYIWAPLAGTCGVLLLSLVITLYCRRDQRLPPDAHKPPGGGSFRTPIQEEQADAHSTLAKIRVKFSRSADAPAYQQGQNQLYNELNLGRREEYDVLDKRRGRDPEMGGKPRRKNPQEGLYNELQKDKMAEAYSEIGMKGERRRGKGHDGLYQGLSTATKDTYDALHMQALPPRGSGEGRGSLLTCGDVEENPGPMALPVTALLLPLALLLHAARPNWVNVISDLKKIEDLIQSMHIDATLYTESDVHPSCKVTAMKCFLLELQVISLESGDASIHDTVENLIILANNSLSSNGNVTESGCKECEELEEKNIKEFLQSFVHIVQMFINTSTTTPAPRPPTPAPTIASQPLSLRPEACRPAAGGAVHTRGLDFACDIYIWAPLAGTCGVLLLSLVITLYC

SEQ ID NO: 833 - protein, 705 aa, synthetic construct
  REGION 1..705: note = Synthetic
MALPVTALLLPLALLLHAARPEVQLLESGGGLVQPGGSLRLSCTASGFTFSSFAMSWVRQAPGKGLEWVSAMSGSGDTTYYADSVKGRFTISRDNSKTTLYLQMNSLRAEDTAVYSCAKHTTYYMDVWGKGTTVTVSSGGGGSGGGGSGGGGSQTVVTQEPSLSVSPGGTVTLTCGLSSGSVSTSDYPSWYQQTPGQAPRTLIYRTNTRSSGVPDRFSGSILGNKAALTITGAQADDESDYYCVLYMDSGIIFGSGTKVTVLTTTPAPRPPTPAPTIASQPLSLRPEACRPAAGGAVHTRGLDFACDIYIWAPLAGTCGVLLLSLVITLYCRRDQRLPPDAHKPPGGGSFRTPIQEEQADAHSTLAKIRVKFSRSADAPAYQQGQNQLYNELNLGRREEYDVLDKRRGRDPEMGGKPRRKNPQEGLYNELQKDKMAEAYSEIGMKGERRRGKGHDGLYQGLSTATKDTYDALHMQALPPRGSGEGRGSLLTCGDVEENPGPMALPVTALLLPLALLLHAARPNWVNVISDLKKIEDLIQSMHIDATLYTESDVHPSCKVTAMKCFLLELQVISLESGDASIHDTVENLIILANNSLSSNGNVTESGCKECEELEEKNIKEFLQSFVHIVQMFINTSTTTPAPRPPTPAPTIASQPLSLRPEACRPAAGGAVHTRGLDFACDIYIWAPLAGTCGVLLLSLVITLYC

SEQ ID NO: 834 - protein, 705 aa, synthetic construct
  REGION 1..705: note = Synthetic
MALPVTALLLPLALLLHAARPEVQLLESGGGLVQPGGSLRLSCAASGFTFNTYAMSWVRQAPGKGLEWVSAMSGSGDTTYYADSVKGRFTISRDNSKTTLYLQMNSLRAEDTAVYSCAKHTSYYMDVWGKGTTVTVSSGGGGSGGGGSGGGGSQTVVTQEPSLSVSPGGTVTLTCGLSSGSVSTSDYPSWYQQTPGQAPRTLIYRTNTRSSGVPDRFSGSILGNKAALTITGAQADDESDYYCVLYMGSGIIFGSGTKVTVLTTTPAPRPPTPAPTIASQPLSLRPEACRPAAGGAVHTRGLDFACDIYIWAPLAGTCGVLLLSLVITLYCRRDQRLPPDAHKPPGGGSFRTPIQEEQADAHSTLAKIRVKFSRSADAPAYQQGQNQLYNELNLGRREEYDVLDKRRGRDPEMGGKPRRKNPQEGLYNELQKDKMAEAYSEIGMKGERRRGKGHDGLYQGLSTATKDTYDALHMQALPPRGSGEGRGSLLTCGDVEENPGPMALPVTALLLPLALLLHAARPNWVNVISDLKKIEDLIQSMHIDATLYTESDVHPSCKVTAMKCFLLELQVISLESGDASIHDTVENLIILANNSLSSNGNVTESGCKECEELEEKNIKEFLQSFVHIVQMFINTSTTTPAPRPPTPAPTIASQPLSLRPEACRPAAGGAVHTRGLDFACDIYIWAPLAGTCGVLLLSLVITLYC

SEQ ID NO: 835 - protein, 705 aa, synthetic construct
  REGION 1..705: note = Synthetic
MALPVTALLLPLALLLHAARPEVQLLESGGDLVQPGGSLRLSCAASGFTFSTYAMSWVRQAPGKGLEWVSAISGSGENIYYADSVKGRFTISRDNSKNTLFLQMNSLRAEDTAVYYCAKHTSYYMDVWGKGTTVTVSSGGGGSGGGGSGGGGSQTVVTQEPSFSVSPGGTVTLTCGLYSDSVSTSYYPSWYQQTPGQAPRTLIYNTNTRSSGVPDRFSGSILGNKAALTITGAQADDESDYYCVLYMVSGIVFGSGTKVTVLTTTPAPRPPTPAPTIASQPLSLRPEACRPAAGGAVHTRGLDFACDIYIWAPLAGTCGVLLLSLVITLYCRRDQRLPPDAHKPPGGGSFRTPIQEEQADAHSTLAKIRVKFSRSADAPAYQQGQNQLYNELNLGRREEYDVLDKRRGRDPEMGGKPRRKNPQEGLYNELQKDKMAEAYSEIGMKGERRRGKGHDGLYQGLSTATKDTYDALHMQALPPRGSGEGRGSLLTCGDVEENPGPMALPVTALLLPLALLLHAARPNWVNVISDLKKIEDLIQSMHIDATLYTESDVHPSCKVTAMKCFLLELQVISLESGDASIHDTVENLIILANNSLSSNGNVTESGCKECEELEEKNIKEFLQSFVHIVQMFINTSTTTPAPRPPTPAPTIASQPLSLRPEACRPAAGGAVHTRGLDFACDIYIWAPLAGTCGVLLLSLVITLYC

SEQ ID NO: 836 - protein, 711 aa, synthetic construct
  REGION 1..711: note = Synthetic
MALPVTALLLPLALLLHAARPQVQLVESGGGVVQPGRSLRLSCAASGFTFSSYGMHWVRQAPGKGLEWVAVIWYDGINKYYADSVKGRFTISRDNSKNTLYLQMNSLRAEDTAVYYCARERLERRYYYYMDVWGKGTTVTVSSGGGGSGGGGSGGGGSQTVVTQEPSFSVSPGGTVTLTCGLSSGSVSTSYYPGWYQQTPGQAPRTLIYSTNTRSSGVPDRFSGSILGNKAALTITGAQADDESDYYCVLYMGSGMFIFGSGTKVTVLTTTPAPRPPTPAPTIASQPLSLRPEACRPAAGGAVHTRGLDFACDIYIWAPLAGTCGVLLLSLVITLYCRRDQRLPPDAHKPPGGGSFRTPIQEEQADAHSTLAKIRVKFSRSADAPAYQQGQNQLYNELNLGRREEYDVLDKRRGRDPEMGGKPRRKNPQEGLYNELQKDKMAEAYSEIGMKGERRRGKGHDGLYQGLSTATKDTYDALHMQALPPRGSGEGRGSLLTCGDVEENPGPMALPVTALLLPLALLLHAARPNWVNVISDLKKIEDLIQSMHIDATLYTESDVHPSCKVTAMKCFLLELQVISLESGDASIHDTVENLIILANNSLSSNGNVTESGCKECEELEEKNIKEFLQSFVHIVQMFINTSTTTPAPRPPTPAPTIASQPLSLRPEACRPAAGGAVHTRGLDFACDIYIWAPLAGTCGVLLLSLVITLYC

SEQ ID NO: 837 - protein, 705 aa, synthetic construct
  REGION 1..705: note = Synthetic
MALPVTALLLPLALLLHAARPEVQLLESGGGLVQPGGSLRLSCAASGFTFSSFAMSWVRQAPGKGLEWVSAVSGSGDDTYYADSVKGRFTISRDNSKNTLYLQMNSLRAEDTAVYYCAKHTSYYLDVWGKGTTVTVSSGGGGSGGGGSGGGGSQTVVTQEPSFSVSPGGTVTLTCALSSDSVSTSYFPSWYRQTPGQAPRTLIYNTNTRSSGVPDRFSGSILGNKAALTITGAQADDESDYYCVLYMGSGIIFGSGTKVTVLTTTPAPRPPTPAPTIASQPLSLRPEACRPAAGGAVHTRGLDFACDIYIWAPLAGTCGVLLLSLVITLYCRRDQRLPPDAHKPPGGGSFRTPIQEEQADAHSTLAKIRVKFSRSADAPAYQQGQNQLYNELNLGRREEYDVLDKRRGRDPEMGGKPRRKNPQEGLYNELQKDKMAEAYSEIGMKGERRRGKGHDGLYQGLSTATKDTYDALHMQALPPRGSGEGRGSLLTCGDVEENPGPMALPVTALLLPLALLLHAARPNWVNVISDLKKIEDLIQSMHIDATLYTESDVHPSCKVTAMKCFLLELQVISLESGDASIHDTVENLIILANNSLSSNGNVTESGCKECEELEEKNIKEFLQSFVHIVQMFINTSTTTPAPRPPTPAPTIASQPLSLRPEACRPAAGGAVHTRGLDFACDIYIWAPLAGTCGVLLLSLVITLYC

SEQ ID NO: 838 - protein, 711 aa, synthetic construct
  REGION 1..711: note = Synthetic
MALPVTALLLPLALLLHAARPQVQLVESGGGVVQPGRSLRLSCAASGFNFSTFDIHWVRQAPGKGLEWVALIWYDGSYKYYADSVKGRFTISRDNSKNTLDLRMNSLRAEDTAVYYCARNDNWNDEHYYHYYMDVWGKGTTVTVSSGGGGSGGGGSGGGGSEIVLTQSPDFQSVTPKEKVTITCRASQSIGSSLHWYQQKPDQSPKLLIKFASQSFSGVPSRFSGSGSGTDFTLTINSLEAEDAATYFCHQSSSLPWTFGQGTKVEIKTTTPAPRPPTPAPTIASQPLSLRPEACRPAAGGAVHTRGLDFACDIYIWAPLAGTCGVLLLSLVITLYCRRDQRLPPDAHKPPGGGSFRTPIQEEQADAHSTLAKIRVKFSRSADAPAYQQGQNQLYNELNLGRREEYDVLDKRRGRDPEMGGKPRRKNPQEGLYNELQKDKMAEAYSEIGMKGERRRGKGHDGLYQGLSTATKDTYDALHMQALPPRGSGEGRGSLLTCGDVEENPGPMALPVTALLLPLALLLHAARPNWVNVISDLKKIEDLIQSMHIDATLYTESDVHPSCKVTAMKCFLLELQVISLESGDASIHDTVENLIILANNSLSSNGNVTESGCKECEELEEKNIKEFLQSFVHIVQMFINTSTTTPAPRPPTPAPTIASQPLSLRPEACRPAAGGAVHTRGLDFACDIYIWAPLAGTCGVLLLSLVITLYC

SEQ ID NO: 839 - protein, 716 aa, synthetic construct
  REGION 1..716: note = Synthetic
MALPVTALLLPLALLLHAARPEVHLLESGGGLVQPGGSLRLSCAASGFTFSSYAMNWVRQAPGKGLEWVSSISGSGSSSYYADSVKGRFTISRDNSKNTLYLQMNSLRAEDTAVYYCASRGFNSQYPPGYYYYYMDVWGKGTTVTVSSGGGGSGGGGSGGGGSQTVVTQEPSFSVSPGGTVTLTCGLSSGSVSTSYFPSWYQQTPGQAPRTLIYITNTRSSGVPDRFSGSIIGNKAALTITGAQADDESDYFCVLYMGSGTWVFGGGTKLTVLTTTPAPRPPTPAPTIASQPLSLRPEACRPAAGGAVHTRGLDFACDIYIWAPLAGTCGVLLLSLVITLYCRRDQRLPPDAHKPPGGGSFRTPIQEEQADAHSTLAKIRVKFSRSADAPAYQQGQNQLYNELNLGRREEYDVLDKRRGRDPEMGGKPRRKNPQEGLYNELQKDKMAEAYSEIGMKGERRRGKGHDGLYQGLSTATKDTYDALHMQALPPRGSGEGRGSLLTCGDVEENPGPMALPVTALLLPLALLLHAARPNWVNVISDLKKIEDLIQSMHIDATLYTESDVHPSCKVTAMKCFLLELQVISLESGDASIHDTVENLIILANNSLSSNGNVTESGCKECEELEEKNIKEFLQSFVHIVQMFINTSTTTPAPRPPTPAPTIASQPLSLRPEACRPAAGGAVHTRGLDFACDIYIWAPLAGTCGVLLLSLVITLYC

SEQ ID NO: 840 - protein, 703 aa, synthetic construct
  REGION 1..703: note = Synthetic
MALPVTALLLPLALLLHAARPEVQLLESGGGLVQPGGSLRLSCAASGFTFSNYAMTWVRQAPGKGLEWVSAISGSGIGTYYADSVQGRFTTSRDNSKNTLYLQMNSLRAEDTAVYYCAKGGYNWKDVWGKGTTVTVSSGGGGSGGGGSGGGGSEIVLTQSPDFQSVTPKEKVTITCRASQSIGSSLHWYQQKPDQSPKLLIKFASQSFSGVPSRFSGSGSGTDFTLTIHSLEAEDAATYYCHQSSSLPWTFGQGTKVEIKTTTPAPRPPTPAPTIASQPLSLRPEACRPAAGGAVHTRGLDFACDIYIWAPLAGTCGVLLLSLVITLYCRRDQRLPPDAHKPPGGGSFRTPIQEEQADAHSTLAKIRVKFSRSADAPAYQQGQNQLYNELNLGRREEYDVLDKRRGRDPEMGGKPRRKNPQEGLYNELQKDKMAEAYSEIGMKGERRRGKGHDGLYQGLSTATKDTYDALHMQALPPRGSGEGRGSLLTCGDVEENPGPMALPVTALLLPLALLLHAARPNWVNVISDLKKIEDLIQSMHIDATLYTESDVHPSCKVTAMKCFLLELQVISLESGDASIHDTVENLIILANNSLSSNGNVTESGCKECEELEEKNIKEFLQSFVHIVQMFINTSTTTPAPRPPTPAPTIASQPLSLRPEACRPAAGGAVHTRGLDFACDIYIWAPLAGTCGVLLLSLVITLYC

SEQ ID NO: 841 - protein, 711 aa, synthetic construct
  REGION 1..711: note = Synthetic
MALPVTALLLPLALLLHAARPQVQLVESGGGVVQPGRSLRLSCAASGFTFTNYDMHWVRQAPGKGLEWVTIIWHDGSNKYYLDSVRGRFTISRDNSKNTLYLQMNSLRAEDTAVYYCARGDNWNDEHHYFYYMDVWGKGTTVTVSSGGGGSGGGGSGGGGSEIVLTQSPDFQSVTPKEKVTITCRASQSIGSSLHWYQQKPDQSPKLLIKFASQSFSGVPSRFSGSGSGTDFTLTIHSLEAEDAATYYCHQSSSLPWTFGQGTKVEIKTTTPAPRPPTPAPTIASQPLSLRPEACRPAAGGAVHTRGLDFACDIYIWAPLAGTCGVLLLSLVITLYCRRDQRLPPDAHKPPGGGSFRTPIQEEQADAHSTLAKIRVKFSRSADAPAYQQGQNQLYNELNLGRREEYDVLDKRRGRDPEMGGKPRRKNPQEGLYNELQKDKMAEAYSEIGMKGERRRGKGHDGLYQGLSTATKDTYDALHMQALPPRGSGEGRGSLLTCGDVEENPGPMALPVTALLLPLALLLHAARPNWVNVISDLKKIEDLIQSMHIDATLYTESDVHPSCKVTAMKCFLLELQVISLESGDASIHDTVENLIILANNSLSSNGNVTESGCKECEELEEKNIKEFLQSFVHIVQMFINTSTTTPAPRPPTPAPTIASQPLSLRPEACRPAAGGAVHTRGLDFACDIYIWAPLAGTCGVLLLSLVITLYC

SEQ ID NO: 842 - protein, 711 aa, synthetic construct
  REGION 1..711: note = Synthetic
MALPVTALLLPLALLLHAARPQVQLVESGGGVVQPGRSLRLSCAASGFTFSNYDMHWVRQAPGKGLEWVTIIWHDGSNKYYLDSVKGRFTISRDNSKNTLYLQMNSLRAEDTAVYYCARGDNWNDEHHYFYYMDVWGKGTTVTVSSGGGGSGGGGSGGGGSEIVLTQSPATLSLSPGERATLSCRASQSVSSSLAWYQQKPGQAPRLLIYDASNRATGIPARFSGSGSGTDFTLTISSLEPEDFAVYYCQQRSNWPLTFGGGTKVEIKTTTPAPRPPTPAPTIASQPLSLRPEACRPAAGGAVHTRGLDFACDIYIWAPLAGTCGVLLLSLVITLYCRRDQRLPPDAHKPPGGGSFRTPIQEEQADAHSTLAKIRVKFSRSADAPAYQQGQNQLYNELNLGRREEYDVLDKRRGRDPEMGGKPRRKNPQEGLYNELQKDKMAEAYSEIGMKGERRRGKGHDGLYQGLSTATKDTYDALHMQALPPRGSGEGRGSLLTCGDVEENPGPMALPVTALLLPLALLLHAARPNWVNVISDLKKIEDLIQSMHIDATLYTESDVHPSCKVTAMKCFLLELQVISLESGDASIHDTVENLIILANNSLSSNGNVTESGCKECEELEEKNIKEFLQSFVHIVQMFINTSTTTPAPRPPTPAPTIASQPLSLRPEACRPAAGGAVHTRGLDFACDIYIWAPLAGTCGVLLLSLVITLYC

SEQ ID NO: 843 - protein, 707 aa, synthetic construct
  REGION 1..707: note = Synthetic
MALPVTALLLPLALLLHAARPEVQLVESGGGVVRPGGSLRLSCAASGFTFDDYGMSWVRQAPGKGLEWVSGINWNGGSTGYVDSVKGRFTISRDNAKNSLYLQMNSLRAEDTALYHCARPVTTDYYYYMDVWGKGTTVTVSSGGGGSGGGGSGGGGSEIVLTQSPGTLSLSPGERATLSCRASQSVSSSYLAWYQQKPGQAPRLLIYGASSRATGIPDRFSGSGSGTDFTLTISRLEPEDFAVYYCQQYGSSWTFGQGTKVEIKTTTPAPRPPTPAPTIASQPLSLRPEACRPAAGGAVHTRGLDFACDIYIWAPLAGTCGVLLLSLVITLYCRRDQRLPPDAHKPPGGGSFRTPIQEEQADAHSTLAKIRVKFSRSADAPAYQQGQNQLYNELNLGRREEYDVLDKRRGRDPEMGGKPRRKNPQEGLYNELQKDKMAEAYSEIGMKGERRRGKGHDGLYQGLSTATKDTYDALHMQALPPRGSGEGRGSLLTCGDVEENPGPMALPVTALLLPLALLLHAARPNWVNVISDLKKIEDLIQSMHIDATLYTESDVHPSCKVTAMKCFLLELQVISLESGDASIHDTVENLIILANNSLSSNGNVTESGCKECEELEEKNIKEFLQSFVHIVQMFINTSTTTPAPRPPTPAPTIASQPLSLRPEACRPAAGGAVHTRGLDFACDIYIWAPLAGTCGVLLLSLVITLYC

SEQ ID NO: 844 - protein, 715 aa, synthetic construct
  REGION 1..715: note = Synthetic
MALPVTALLLPLALLLHAARPEVQLLESGGGLVQPGGSLRLSCAASGFTFSSYAMSWVRQAPGKGLEWVSAISGSGGSTYYADSVKGRFTISRDNSKNTLYLQMNSLRAEDTAVYYCAKKGTSYNWNDVHYYYYYYMDVWGKGTTVTVSSGGGGSGGGGSGGGGSEIVLTQSPGTLSLSPGERATLSCRASQSVSSSYLAWYQQKPGQAPRLLIYGASSRATGIPDRFSGSGSGTDFTLTISRLEPEDFAVYYCQQYGSSWTFGQGTKVEIKTTTPAPRPPTPAPTIASQPLSLRPEACRPAAGGAVHTRGLDFACDIYIWAPLAGTCGVLLLSLVITLYCRRDQRLPPDAHKPPGGGSFRTPIQEEQADAHSTLAKIRVKFSRSADAPAYQQGQNQLYNELNLGRREEYDVLDKRRGRDPEMGGKPRRKNPQEGLYNELQKDKMAEAYSEIGMKGERRRGKGHDGLYQGLSTATKDTYDALHMQALPPRGSGEGRGSLLTCGDVEENPGPMALPVTALLLPLALLLHAARPNWVNVISDLKKIEDLIQSMHIDATLYTESDVHPSCKVTAMKCFLLELQVISLESGDASIHDTVENLIILANNSLSSNGNVTESGCKECEELEEKNIKEFLQSFVHIVQMFINTSTTTPAPRPPTPAPTIASQPLSLRPEACRPAAGGAVHTRGLDFACDIYIWAPLAGTCGVLLLSLVITLYC

SEQ ID NO: 845 - protein, 709 aa, synthetic construct
  REGION 1..709: note = Synthetic
MALPVTALLLPLALLLHAARPQLQLQESGPGLVKPSETLSLTCTVSGGSISSSSYYWGWIRQPPGKGLEWIGSIYYSGSTYYNPSLKSRVTISVDTSKNQFSLKLSSVTAADTAVYYCTTGTTAYYYYYYMDVWGKGTTVTVSSGGGGSGGGGSGGGGSEIVLTQSPGTLSLSPGERATLSCRASQSVSSSYLAWYQQKPGQAPRLLIYGASSRATGIPDRFSGSGSGTDFTLTISRLEPEDFAVYYCQQYGSSWTFGQGTKVEIKTTTPAPRPPTPAPTIASQPLSLRPEACRPAAGGAVHTRGLDFACDIYIWAPLAGTCGVLLLSLVITLYCRRDQRLPPDAHKPPGGGSFRTPIQEEQADAHSTLAKIRVKFSRSADAPAYQQGQNQLYNELNLGRREEYDVLDKRRGRDPEMGGKPRRKNPQEGLYNELQKDKMAEAYSEIGMKGERRRGKGHDGLYQGLSTATKDTYDALHMQALPPRGSGEGRGSLLTCGDVEENPGPMALPVTALLLPLALLLHAARPNWVNVISDLKKIEDLIQSMHIDATLYTESDVHPSCKVTAMKCFLLELQVISLESGDASIHDTVENLIILANNSLSSNGNVTESGCKECEELEEKNIKEFLQSFVHIVQMFINTSTTTPAPRPPTPAPTIASQPLSLRPEACRPAAGGAVHTRGLDFACDIYIWAPLAGTCGVLLLSLVITLYC

SEQ ID NO: 846 - protein, 708 aa, synthetic construct
  REGION 1..708: note = Synthetic
MALPVTALLLPLALLLHAARPEVQLLESGGGLVQPGGSLRLSCAASGFTFSSYAMTWVRQAPGKGLEWVSAISGSGGSTYYADSVKGRFTISRDNSKNTLYLQMNSLRAEDTAVYYCARGGYNWHYYYYMDVWGKGTTVTVSSGGGGSGGGGSGGGGSEIVLTQSPGTLSLSPGERATLSCRASQSVSSSYLAWYQQKPGQAPRLLIYGASSRATGIPDRFSGSGSGTDFTLTISRLEPEDFAVYYCQQYGSSWTFGQGTKVEIKTTTPAPRPPTPAPTIASQPLSLRPEACRPAAGGAVHTRGLDFACDIYIWAPLAGTCGVLLLSLVITLYCRRDQRLPPDAHKPPGGGSFRTPIQEEQADAHSTLAKIRVKFSRSADAPAYQQGQNQLYNELNLGRREEYDVLDKRRGRDPEMGGKPRRKNPQEGLYNELQKDKMAEAYSEIGMKGERRRGKGHDGLYQGLSTATKDTYDALHMQALPPRGSGEGRGSLLTCGDVEENPGPMALPVTALLLPLALLLHAARPNWVNVISDLKKIEDLIQSMHIDATLYTESDVHPSCKVTAMKCFLLELQVISLESGDASIHDTVENLIILANNSLSSNGNVTESGCKECEELEEKNIKEFLQSFVHIVQMFINTSTTTPAPRPPTPAPTIASQPLSLRPEACRPAAGGAVHTRGLDFACDIYIWAPLAGTCGVLLLSLVITLYC

SEQ ID NO: 847 - protein, 712 aa, synthetic construct
  REGION 1..712: note = Synthetic
MALPVTALLLPLALLLHAARPQVQLVESGGGVVQPGRSLRLSCAASGFTFSSYDMHWVRQAPGKGLEWVSVIWYDGSNKKYGDSAKGRFTISRDNSKNTLDLQMNSLRAEDTAVYYCARGDNWNDEGGYYYYYMDVWGKGTTVTVSSGGGGSGGGGSGGGGSEIVLTQSPDFQSVTPKEKVTITCRASQNIGSSLHWYQQKPDQSPKLLIKFASQSISGVPSRFSGSGSGTDFTLTINSLEAEDAAAYYCHQSSSLPWTFGQGTKVEIKTTTPAPRPPTPAPTIASQPLSLRPEACRPAAGGAVHTRGLDFACDIYIWAPLAGTCGVLLLSLVITLYCRRDQRLPPDAHKPPGGGSFRTPIQEEQADAHSTLAKIRVKFSRSADAPAYQQGQNQLYNELNLGRREEYDVLDKRRGRDPEMGGKPRRKNPQEGLYNELQKDKMAEAYSEIGMKGERRRGKGHDGLYQGLSTATKDTYDALHMQALPPRGSGEGRGSLLTCGDVEENPGPMALPVTALLLPLALLLHAARPNWVNVISDLKKIEDLIQSMHIDATLYTESDVHPSCKVTAMKCFLLELQVISLESGDASIHDTVENLIILANNSLSSNGNVTESGCKECEELEEKNIKEFLQSFVHIVQMFINTSTTTPAPRPPTPAPTIASQPLSLRPEACRPAAGGAVHTRGLDFACDIYIWAPLAGTCGVLLLSLVITLYC

SEQ ID NO: 848 - protein, 712 aa, synthetic construct
  REGION 1..712: note = Synthetic
MALPVTALLLPLALLLHAARPQVQLVESGGGVVQPGRSLRLSCAASGFTFSSYDMHWVRQAPGKGLEWVSVIWYDGSNKKYGDSAKGRFTISRDNSKNTLDLQMNSLRAEDTAVYYCARGDNWNDEGGYYYYYMDVWGKGTTVTVSSGGGGSGGGGSGGGGSDIQMTQSPSSLSTSVGDRVTITCRASQGISNYLAWFQQKPGKAPKSLIYAASSLQSGVPSKFSGSGSGTDFSLTISSLQPEDFATYYCQQYNSYPITFGQGTRLEIKTTTPAPRPPTPAPTIASQPLSLRPEACRPAAGGAVHTRGLDFACDIYIWAPLAGTCGVLLLSLVITLYCRRDQRLPPDAHKPPGGGSFRTPIQEEQADAHSTLAKIRVKFSRSADAPAYQQGQNQLYNELNLGRREEYDVLDKRRGRDPEMGGKPRRKNPQEGLYNELQKDKMAEAYSEIGMKGERRRGKGHDGLYQGLSTATKDTYDALHMQALPPRGSGEGRGSLLTCGDVEENPGPMALPVTALLLPLALLLHAARPNWVNVISDLKKIEDLIQSMHIDATLYTESDVHPSCKVTAMKCFLLELQVISLESGDASIHDTVENLIILANNSLSSNGNVTESGCKECEELEEKNIKEFLQSFVHIVQMFINTSTTTPAPRPPTPAPTIASQPLSLRPEACRPAAGGAVHTRGLDFACDIYIWAPLAGTCGVLLLSLVITLYC

SEQ ID NO: 849 - protein, 709 aa, synthetic construct
  REGION 1..709: note = Synthetic
MALPVTALLLPLALLLHAARPQVQLVQSGAEVKKSGASVKVSCKASGYTLTSYGISWVRQAPGQGLEWMGWISAYNGNINYAQKFQGRVTMTTDTSTSTAYMELRSLRSDDTAVYYCVRDGDRYNWNHSYMDVWGKGTTVTVSSGGGGSGGGGSGGGGSEIVLTQSPDFQSVTPKEKVTITCRASQNIGSSLHWYQQKPDQSPKLLIKFASQSISGVPSRFSGSGSGTDFTLTINSLEAEDAAAYYCHQSSSLPWTFGQGTKVEIKTTTPAPRPPTPAPTIASQPLSLRPEACRPAAGGAVHTRGLDFACDIYIWAPLAGTCGVLLLSLVITLYCRRDQRLPPDAHKPPGGGSFRTPIQEEQADAHSTLAKIRVKFSRSADAPAYQQGQNQLYNELNLGRREEYDVLDKRRGRDPEMGGKPRRKNPQEGLYNELQKDKMAEAYSEIGMKGERRRGKGHDGLYQGLSTATKDTYDALHMQALPPRGSGEGRGSLLTCGDVEENPGPMALPVTALLLPLALLLHAARPNWVNVISDLKKIEDLIQSMHIDATLYTESDVHPSCKVTAMKCFLLELQVISLESGDASIHDTVENLIILANNSLSSNGNVTESGCKECEELEEKNIKEFLQSFVHIVQMFINTSTTTPAPRPPTPAPTIASQPLSLRPEACRPAAGGAVHTRGLDFACDIYIWAPLAGTCGVLLLSLVITLYC

SEQ ID NO: 850 - protein, 709 aa, synthetic construct
  REGION 1..709: note = Synthetic
MALPVTALLLPLALLLHAARPQVQLVQSGAEVKKSGASVKVSCKASGYTLTSYGISWVRQAPGQGLEWMGWISAYNGNINYAQKFQGRVTMTTDTSTSTAYMELRSLRSDDTAVYYCVRDGDRYNWNHSYMDVWGKGTTVTVSSGGGGSGGGGSGGGGSDIQMTQSPSSLSTSVGDRVTITCRASQGISNYLAWFQQKPGKAPKSLIYAASSLQSGVPSKFSGSGSGTDFSLTISSLQPEDFATYYCQQYNSYPITFGQGTRLEIKTTTPAPRPPTPAPTIASQPLSLRPEACRPAAGGAVHTRGLDFACDIYIWAPLAGTCGVLLLSLVITLYCRRDQRLPPDAHKPPGGGSFRTPIQEEQADAHSTLAKIRVKFSRSADAPAYQQGQNQLYNELNLGRREEYDVLDKRRGRDPEMGGKPRRKNPQEGLYNELQKDKMAEAYSEIGMKGERRRGKGHDGLYQGLSTATKDTYDALHMQALPPRGSGEGRGSLLTCGDVEENPGPMALPVTALLLPLALLLHAARPNWVNVISDLKKIEDLIQSMHIDATLYTESDVHPSCKVTAMKCFLLELQVISLESGDASIHDTVENLIILANNSLSSNGNVTESGCKECEELEEKNIKEFLQSFVHIVQMFINTSTTTPAPRPPTPAPTIASQPLSLRPEACRPAAGGAVHTRGLDFACDIYIWAPLAGTCGVLLLSLVITLYC

SEQ ID NO: 851 - protein, 708 aa, synthetic construct
  REGION 1..708: note = Synthetic
MALPVTALLLPLALLLHAARPEVQLLESGGDLVQPGGSLRLSCAASGFTFSTYAMTWVRQAPGKGLEWVSAISGTSGSTYYADSVKGRFTISRDNSKSTLYLHMNSLRTEDTAVYYCARGGYNWHYYYYMDVWGKGTTVTVSSGGGGSGGGGSGGGGSEIVLTQSPDFQSVTPKEKVTITCRASQSIGSSLHWYQQKPDQSPKLLIKYVSQSISGVPSRFSGSGSGTDFTLTINSLEAEDAAAYYCHQSSSLPWTFGQGTKVEIKTTTPAPRPPTPAPTIASQPLSLRPEACRPAAGGAVHTRGLDFACDIYIWAPLAGTCGVLLLSLVITLYCRRDQRLPPDAHKPPGGGSFRTPIQEEQADAHSTLAKIRVKFSRSADAPAYQQGQNQLYNELNLGRREEYDVLDKRRGRDPEMGGKPRRKNPQEGLYNELQKDKMAEAYSEIGMKGERRRGKGHDGLYQGLSTATKDTYDALHMQALPPRGSGEGRGSLLTCGDVEENPGPMALPVTALLLPLALLLHAARPNWVNVISDLKKIEDLIQSMHIDATLYTESDVHPSCKVTAMKCFLLELQVISLESGDASIHDTVENLIILANNSLSSNGNVTESGCKECEELEEKNIKEFLQSFVHIVQMFINTSTTTPAPRPPTPAPTIASQPLSLRPEACRPAAGGAVHTRGLDFACDIYIWAPLAGTCGVLLLSLVITLYC

SEQ ID NO: 852 - protein, 709 aa, synthetic construct
  REGION 1..709: note = Synthetic
MALPVTALLLPLALLLHAARPEVQLLESGGDLVQPGGSLRLSCAASGFTFSTYAMTWVRQAPGKGLEWVSAISGTSGSTYYADSVKGRFTISRDNSKSTLYLHMNSLRTEDTAVYYCARGGYNWHYYYYMDVWGKGTTVTVSSGGGGSGGGGSGGGGSEIVMTQSPATLSLSPGERATLSCRASQSVSSSYLSWYQQKPGLAPRLLIYGASTRATGIPARFSGSGSGTDFTLTISSLQPEDFAVYYCQQDYNLPPTFGQGTKVEIKTTTPAPRPPTPAPTIASQPLSLRPEACRPAAGGAVHTRGLDFACDIYIWAPLAGTCGVLLLSLVITLYCRRDQRLPPDAHKPPGGGSFRTPIQEEQADAHSTLAKIRVKFSRSADAPAYQQGQNQLYNELNLGRREEYDVLDKRRGRDPEMGGKPRRKNPQEGLYNELQKDKMAEAYSEIGMKGERRRGKGHDGLYQGLSTATKDTYDALHMQALPPRGSGEGRGSLLTCGDVEENPGPMALPVTALLLPLALLLHAARPNWVNVISDLKKIEDLIQSMHIDATLYTESDVHPSCKVTAMKCFLLELQVISLESGDASIHDTVENLIILANNSLSSNGNVTESGCKECEELEEKNIKEFLQSFVHIVQMFINTSTTTPAPRPPTPAPTIASQPLSLRPEACRPAAGGAVHTRGLDFACDIYIWAPLAGTCGVLLLSLVITLYC

SEQ ID NO: 853 - DNA, 2136 bp, synthetic construct
  misc_feature 1..2136: note = Synthetic
  source 1..2136: mol_type = other DNA
atggccttaccagtgaccgccttgctcctgccgctggccttgctgctccacgccgccaggccgcaggtgcagctggtggagtctgggggaggcgtggtccagcctgggaggtccctgagactctcctgtgcagcgtctggattcaccttcaataattatgacatgtactgggtccgccaggccccaggcaaggggctggagtgggtggcagttacatggtatgatggaagtaataaatactatgcagactccgtgaagggccgattcaccatctccagagacaattccaagaacacgctgtatctgcaaatgaacagcctgagagccgaggacacggctgtgtattactgtgcgagaggtgacaactggaatgacgaacaccactatttttactacatggacgtctggggcaaagggaccacggtcaccgtctcctcaggtggaggcggttcaggcggaggtggctctggcggtggcggatcggaaattgtgctgactcagtctccagactttcagtctgtgactccaaaggagaaagtcaccatcacctgccgggccagtcagagcattggtagtagcttacactggtaccagcagaaaccagatcagtctccaaagctcctcatcaagtttgcttcccagtccttctcaggggtcccctcgaggttcagtggcagtggatctgggacagatttcaccctcaccatccatagcctggaagctgaagatgctgcaacgtattactgtcatcagagtagtagtttaccgtggacgttcggccaagggaccaaggtggaaatcaaaaccacgacgccagcgccgcggccaccaacaccggcgcccaccatcgcgtcgcagcccctgtccctgcgcccagaggcgtgccggccagcggcggggggcgcagtgcacacgagggggctggacttcgcctgtgatatctacatctgggcgcccttggccgggacttgtggggtccttctcctgtcactggttatcaccctttactgccggagggaccagaggctgccccccgatgcccacaagccccctgggggaggcagtttccggacccccatccaagaggagcaggccgacgcccactccaccctggccaagatcagagtgaagttcagcaggagcgcagacgcccccgcgtaccagcagggccagaaccagctctataacgagctcaatctaggacgaagagaggagtacgatgttttggacaagagacgtggccgggaccctgagatggggggaaagccgagaaggaagaaccctcaggaaggcctgtacaatgaactgcagaaagataagatggcggaggcctacagtgagattgggatgaaaggcgagcgccggaggggcaaggggcacgatggcctttaccagggtctcagtacagccaccaaggacacctacgacgcccttcacatgcaggccctgccccctcgcggctctggcgagggaaggggttccctgcttacttgcggcgacgtcgaagagaatcccggtccgatggccctcccagtaactgccctccttttgcccctcgcactccttcttcatgccgctcgccccaactgggtcaacgtgattagcgatttgaagaaaatcgaggaccttatacagtctatgcatattgacgctacactgtatactgagagtgatgtacacccgtcctgtaaggtaacggccatgaaatgctttcttctggagctccaggtcatcagcttggagtctggggacgcaagcatccacgatacggttgaaaacctcatcatccttgcgaacaactctctctcatctaatggaaacgttacagagagtgggtgtaaggagtgcgaagagttggaagaaaaaaacatcaaagaatttcttcaatccttcgttcacatagtgcaaatgttcattaacacgtccactaccacacccgccccgaggccacctacgccggcaccgactatcgccagtcaacccctctctctgcgccccgaggcttgccggcctgcggctggtggggcggtccacacccggggcctggattttgcgtgcgatatatacatctgggcacctcttgccggcacctgcggagtgctgcttctctcactcgttattacgctgtactgctaa

SEQ ID NO: 854 - DNA, 2136 bp, synthetic construct
  misc_feature 1..2136: note = Synthetic
  source 1..2136: mol_type = other DNA
atggccttaccagtgaccgccttgctcctgccgctggccttgctgctccacgccgccaggccgcaggtgcagctggtggagtctgggggaggcgtggtccagcctgggaggtccctgagactctcctgtgcagcgtctgggttcaccttcagtaactatgacatgcactgggtccgccaggccccaggcaaggggctggagtgggtgacaattatatggcatgatgcaagtaataaatattatttagactccgtgaagggccgattcaccatctccagagacaattccaagaacacgctgtatctgcaaatgaacagcctgagagccgaggacacggctgtgtattactgtgcgagaggtgacaactggaacgacgaacaccactacttctactacatggacgtctggggcaaagggaccacggtcaccgtctcctcaggtggaggcggttcaggcggaggtggctctggcggtggcggatcggaaattgtgctgactcagtctccagactttcagtctgtgactccaaaggagaaagtcaccatcacctgccgggccagtcagagcattggtagtagcttacactggtaccagcagaaaccagatcagtctccaaagctcctcatcaagtttgcttcccagtccttctcaggggtcccctcgaggttcagtggcagtggatctgggacagatttcaccctcaccatccatagcctggaagctgaagatgctgcaacgtattactgtcatcagagtagtagtttaccgtggacgttcggccaagggaccaaggtggaaatcaaaaccacgacgccagcgccgcggccaccaacaccggcgcccaccatcgcgtcgcagcccctgtccctgcgcccagaggcgtgccggccagcggcggggggcgcagtgcacacgagggggctggacttcgcctgtgatatctacatctgggcgcccttggccgggacttgtggggtccttctcctgtcactggttatcaccctttactgccggagggaccagaggctgccccccgatgcccacaagccccctgggggaggcagtttccggacccccatccaagaggagcaggccgacgcccactccaccctggccaagatcagagtgaagttcagcaggagcgcagacgcccccgcgtaccagcagggccagaaccagctctataacgagctcaatctaggacgaagagaggagtacgatgttttggacaagagacgtggccgggaccctgagatggggggaaagccgagaaggaagaaccctcaggaaggcctgtacaatgaactgcagaaagataagatggcggaggcctacagtgagattgggatgaaaggcgagcgccggaggggcaaggggcacgatggcctttaccagggtctcagtacagccaccaaggacacctacgacgcccttcacatgcaggccctgccccctcgcggctctggcgagggaaggggttccctgcttacttgcggcgacgtcgaagagaatcccggtccgatggccctcccagtaactgccctccttttgcccctcgcactccttcttcatgccgctcgccccaactgggtcaacgtgattagcgatttgaagaaaatcgaggaccttatacagtctatgcatattgacgctacactgtatactgagagtgatgtacacccgtcctgtaaggtaacggccatgaaatgctttcttctggagctccaggtcatcagcttggagtctggggacgcaagcatccacgatacggttgaaaacctcatcatccttgcgaacaactctctctcatctaatggaaacgttacagagagtgggtgtaaggagtgcgaagagttggaagaaaaaaacatcaaagaatttcttcaatccttcgttcacatagtgcaaatgttcattaacacgtccactaccacacccgccccgaggccacctacgccggcaccgactatcgccagtcaacccctctctctgcgccccgaggcttgccggcctgcggctggtggggcggtccacacccggggcctggattttgcgtgcgatatatacatctgggcacctcttgccggcacctgcggagtgctgcttctctcactcgttattacgctgtactgctaa

SEQ ID NO: 855 - DNA, 2136 bp, synthetic construct
  misc_feature 1..2136: note = Synthetic
  source 1..2136: mol_type = other DNA
atggccttaccagtgaccgccttgctcctgccgctggccttgctgctccacgccgccaggccgcaggtgcagctggtggagtctgggggaggcgtggtccagcctgggaggtccctgagactctcctgtgcagcgtctgggttcaccttcagtaactatgacatgcactgggtccgccaggccccaggcaaggggctggagtgggtgacaattatatggcatgatggaagtaataaatattatttagactccgtgaagggccgattcaccatctccagagacaattccaagaacacgctgtatctgcaaatgaacagcctgagagccgaggacacggctgtgtattactgtgcgagaggtgacaactggaacgacgaacaccactacttctactacatggacgtctggggcaaagggaccacggtcaccgtctcctcaggtggaggcggttcaggcggaggtggctctggcggtggcggatcggaaattgtgctgactcagtctccagactttcagtctgtgactccaaaggagaaagtcaccatcacctgccgggccagtcagagcattggtagtagcttacactggtaccagcagaaaccagatcagtctccaaagctcctcatcaagtttgcttcccagtccttctcaggggtcccctcgaggttcagtggcagtggatctgggacagatttcaccctcaccatccatagcctggaagctgaagatgctgcaacgtattactgtcatcagagtagtagtttaccgtggacgttcggccaagggaccaaggtggaaatcaaaaccacgacgccagcgccgcggccaccaacaccggcgcccaccatcgcgtcgcagcccctgtccctgcgcccagaggcgtgccggccagcggcggggggcgcagtgcacacgagggggctggacttcgcctgtgatatctacatctgggcgcccttggccgggacttgtggggtccttctcctgtcactggttatcaccctttactgccggagggaccagaggctgccccccgatgcccacaagccccctgggggaggcagtttccggacccccatccaagaggagcaggccgacgcccactccaccctggccaagatcagagtgaagttcagcaggagcgcagacgcccccgcgtaccagcagggccagaaccagctctataacgagctcaatctaggacgaagagaggagtacgatgttttggacaagagacgtggccgggaccctgagatggggggaaagccgagaaggaagaaccctcaggaaggcctgtacaatgaactgcagaaagataagatggcggaggcctacagtgagattgggatgaaaggcgagcgccggaggggcaaggggcacgatggcctttaccagggtctcagtacagccaccaaggacacctacgacgcccttcacatgcaggccctgccccctcgcggctctggcgagggaaggggttccctgcttacttgcggcgacgtcgaagagaatcccggtccgatggccctcccagtaactgccctccttttgcccctcgcactccttcttcatgccgctcgccccaactgggtcaacgtgattagcgatttgaagaaaatcgaggaccttatacagtctatgcatattgacgctacactgtatactgagagtgatgtacacccgtcctgtaaggtaacggccatgaaatgctttcttctggagctccaggtcatcagcttggagtctggggacgcaagcatccacgatacggttgaaaacctcatcatccttgcgaacaactctctctcatctaatggaaacgttacagagagtgggtgtaaggagtgcgaagagttggaagaaaaaaacatcaaagaatttcttcaatccttcgttcacatagtgcaaatgttcattaacacgtccactaccacacccgccccgaggccacctacgccggcaccgactatcgccagtcaacccctctctctgcgccccgaggcttgccggcctgcggctggtggggcggtccacacccggggcctggattttgcgtgcgatatatacatctgggcacctcttgccggcacctgcggagtgctgcttctctcactcgttattacgctgtactgctaa

SEQ ID NO: 856 - DNA, 2118 bp, synthetic construct
  misc_feature 1..2118: note = Synthetic
  source 1..2118: mol_type = other DNA
atggccttaccagtgaccgccttgctcctgccgctggccttgctgctccacgccgccaggccggaggtgcagctgctggagtctgggggaggcttggtacagcctggggggtccctgagactctcctgtgcagcctctggattcacctttagcatctatgccatgagctgggtccgccaggctccagggaaggggctggagtgggtctcagctattagtggtggtggtgataccacatactacgcagactccgtgaagggccggttcaccatctccagagacaattccaagaccacgctggatctgcaaatgaacagcctgagagccgaggacacggccgtatattactgtgcgaaacacactagctactacatggacgtctggggcaaagggaccacggtcaccgtctcctcaggtggaggcggttcaggcggaggtggctctggcggtggcggatcgcagactgtggtgacccaggagccatcgctctcagtgtcccctggagggacagtcacactcacttgtggcttgagctctggctcagtctctactagttactaccccagctggtaccagcagaccccaggccaggctccacgcacgctcatctacagcacaaatattcggtcttctggggtccctgatcgcttctctggctccatccttgggaacaaagctgccctcaccatcacgggggcccaggcagatgatgaatctgattattattgtaagctgtatatgggaagtggcattattttcggcagtggaaccaaggtcactgtcctaaccacgacgccagcgccgcggccaccaacaccggcgcccaccatcgcgtcgcagcccctgtccctgcgcccagaggcgtgccggccagcggcggggggcgcagtgcacacgagggggctggacttcgcctgtgatatctacatctgggcgcccttggccgggacttgtggggtccttctcctgtcactggttatcaccctttactgccggagggaccagaggctgccccccgatgcccacaagccccctgggggaggcagtttccggacccccatccaagaggagcaggccgacgcccactccaccctggccaagatcagagtgaagttcagcaggagcgcagacgcccccgcgtaccagcagggccagaaccagctctataacgagctcaatctaggacgaagagaggagtacgatgttttggacaagagacgtggccgggaccctgagatggggggaaagccgagaaggaagaaccctcaggaaggcctgtacaatgaactgcagaaagataagatggcggaggcctacagtgagattgggatgaaaggcgagcgccggaggggcaaggggcacgatggcctttaccagggtctcagtacagccaccaaggacacctacgacgcccttcacatgcaggccctgccccctcgcggctctggcgagggaaggggttccctgcttacttgcggcgacgtcgaagagaatcccggtccgatggccctcccagtaactgccctccttttgcccctcgcactccttcttcatgccgctcgccccaactgggtcaacgtgattagcgatttgaagaaaatcgaggaccttatacagtctatgcatattgacgctacactgtatactgagagtgatgtacacccgtcctgtaaggtaacggccatgaaatgctttcttctggagctccaggtcatcagcttggagtctggggacgcaagcatccacgatacggttgaaaacctcatcatccttgcgaacaactctctctcatctaatggaaacgttacagagagtgggtgtaaggagtgcgaagagttggaagaaaaaaacatcaaagaatttcttcaatccttcgttcacatagtgcaaatgttcattaacacgtccactaccacacccgccccgaggccacctacgccggcaccgactatcgccagtcaacccctctctctgcgccccgaggcttgccggcctgcggctggtggggcggtccacacccggggcctggattttgcgtgcgatatatacatctgggcacctcttgccggcacctgcggagtgctgcttctctcactcgttattacgctgtactgctaa

SEQ ID NO: 857 - DNA, 2136 bp, synthetic construct
  misc_feature 1..2136: note = Synthetic
  source 1..2136: mol_type = other DNA
atggccttaccagtgaccgccttgctcctgccgctggccttgctgctccacgccgccaggccgcaggtgcagctggtggagtctgggggaggcgtggtccagcctgggaggtccctgagactctcctgtgcagcgtctggattcaccttcagtaactatgacaagcactgggtccgccaggccccaggcaaggggctggagtgggtggcagttatatggtatgatggaagtaataagtactatgcagactccgtgaagggccgattcaccatttccagagacaattccaagaacacgctgtatctacaaatgaacagcctgagagccgaggacacggctatgtattactgtgcgagaggtgacaactggaacgacgaacaccactacttctactacatggacgtctggggcaaagggaccacggtcaccgtctcctcaggtggaggcggttcaggcggaggtggctctggcggtggcggatcggaaattgtgctgactcagtctccagactttcagtctgtgactccaaaggagaaagtcaccatcacctgccgggccagtcagagcattggtagtagcttacactggtaccagcagaaaccagatcagtctccaaagctcctcatcaagtttgcttcccagtccttctcaggggtcccctcgaggttcagtggcagtggatctgggacagatttcaccctcaccatccatagcctggaagctgaagatgctgcaacgtattactgtcatcagagtagtagtttaccgtggacgttcggccaagggaccaaggtggaaatcaaaaccacgacgccagcgccgcggccaccaacaccggcgcccaccatcgcgtcgcagcccctgtccctgcgcccagaggcgtgccggccagcggcggggggcgcagtgcacacgagggggctggacttcgcctgtgatatctacatctgggcgcccttggccgggacttgtggggtccttctcctgtcactggttatcaccctttactgccggagggaccagaggctgccccccgatgcccacaagccccctgggggaggcagtttccggacccccatccaagaggagcaggccgacgcccactccaccctggccaagatcagagtgaagttcagcaggagcgcagacgcccccgcgtaccagcagggccagaaccagctctataacgagctcaatctaggacgaagagaggagtacgatgttttggacaagagacgtggccgggaccctgagatggggggaaagccgagaaggaagaaccctcaggaaggcctgtacaatgaactgcagaaagataagatggcggaggcctacagtgagattgggatgaaaggcgagcgccggaggggcaaggggcacgatggcctttaccagggtctcagtacagccaccaaggacacctacgacgcccttcacatgcaggccctgccccctcgcggctctggcgagggaaggggttccctgcttacttgcggcgacgtcgaagagaatcccggtccgatggccctcccagtaactgccctccttttgcccctcgcactccttcttcatgccgctcgccccaactgggtcaacgtgattagcgatttgaagaaaatcgaggaccttatacagtctatgcatattgacgctacactgtatactgagagtgatgtacacccgtcctgtaaggtaacggccatgaaatgctttcttctggagctccaggtcatcagcttggagtctggggacgcaagcatccacgatacggttgaaaacctcatcatccttgcgaacaactctctctcatctaatggaaacgttacagagagtgggtgtaaggagtgcgaagagttggaagaaaaaaacatcaaagaatttcttcaatccttcgttcacatagtgcaaatgttcattaacacgtccactaccacacccgccccgaggccacctacgccggcaccgactatcgccagtcaacccctctctctgcgccccgaggcttgccggcctgcggctggtggggcggtccacacccggggcctggattttgcgtgcgatatatacatctgggcacctcttgccggcacctgcggagtgctgcttctctcactcgttattacgctgtactgctaa

SEQ ID NO: 858 - DNA, 2130 bp, synthetic construct
  misc_feature 1..2130: note = Synthetic
  source 1..2130: mol_type = other DNA
atggccttaccagtgaccgccttgctcctgccgctggccttgctgctccacgccgccaggccgcaggttcagttggtacagtctggagctgaggtgaagaagcctggggcctcagtgaaggtctcctgtaaggcttctggttacacctttaccaactatggtttcagctgggtgcgacaggcccctggacaagggcttgactggatgggatggatcagcgcttacaatggttacacaaattatacacagaaactccagggcagagtcaccatgaccactgacacatccacgaccacagcctacatggagctgaggagcctgagatctgacgacacggccgtctattactgtgcgagaagaggactactctactactactactccatggacgtctggggcaaagggaccacggtcaccgtctcctcaggtggaggcggttcaggcggaggtggctctggcggtggcggatcggaaattgtgttgacgcagtctccagccaccctgtctttgtctccaggggaaagagccaccctctcctgcggggccagtcagagtgtttacaacagttacttagcctggtaccagcagaaacctggcctggcgcccaggctcctcatctatgatgcatccctcagggccactggcgtcccagacaggttcagtggcagtgggtctgggacagacttcactctcaccatcagcacactggagcctgaagattttgcagtgtattactgtcagcagtatggtggctcacccatgtacacttttggccaggggaccaagctggagatcaaaaccacgacgccagcgccgcggccaccaacaccggcgcccaccatcgcgtcgcagcccctgtccctgcgcccagaggcgtgccggccagcggcggggggcgcagtgcacacgagggggctggacttcgcctgtgatatctacatctgggcgcccttggccgggacttgtggggtccttctcctgtcactggttatcaccctttactgccggagggaccagaggctgccccccgatgcccacaagccccctgggggaggcagtttccggacccccatccaagaggagcaggccgacgcccactccaccctggccaagatcagagtgaagttcagcaggagcgcagacgcccccgcgtaccagcagggccagaaccagctctataacgagctcaatctaggacgaagagaggagtacgatgttttggacaagagacgtggccgggaccctgagatggggggaaagccgagaaggaagaaccctcaggaaggcctgtacaatgaactgcagaaagataagatggcggaggcctacagtgagattgggatgaaaggcgagcgccggaggggcaaggggcacgatggcctttaccagggtctcagtacagccaccaaggacacctacgacgcccttcacatgcaggccctgccccctcgcggctctggcgagggaaggggttccctgcttacttgcggcgacgtcgaagagaatcccggtccgatggccctcccagtaactgccctccttttgcccctcgcactccttcttcatgccgctcgccccaactgggtcaacgtgattagcgatttgaagaaaatcgaggaccttatacagtctatgcatattgacgctacactgtatactgagagtgatgtacacccgtcctgtaaggtaacggccatgaaatgctttcttctggagctccaggtcatcagcttggagtctggggacgcaagcatccacgatacggttgaaaacctcatcatccttgcgaacaactctctctcatctaatggaaacgttacagagagtgggtgtaaggagtgcgaagagttggaagaaaaaaacatcaaagaatttcttcaatccttcgttcacatagtgcaaatgttcattaacacgtccactaccacacccgccccgaggccacctacgccggcaccgactatcgccagtcaacccctctctctgcgccccgaggcttgccggcctgcggctggtggggcggtccacacccggggcctggattttgcgtgcgatatatacatctgggcacctcttgccggcacctgcggagtgctgcttctctcactcgttattacgctgtactgctaa

SEQ ID NO: 859 - DNA, 2118 bp, synthetic construct
  misc_feature 1..2118: note = Synthetic
  source 1..2118: mol_type = other DNA
atggccttaccagtgaccgccttgctcctgccgctggccttgctgctccacgccgccaggccggaggtgcagctgctggagtctgggggaggcctggtacagcctggggggtccctgagactctcctgtacagcctctggattcacctttagcagctttgccatgagctgggtccgccaggctccagggaaggggctggagtgggtctcagctatgagtggtagtggtgataccacatactacgcagactccgtgaagggccggttcaccatctcccgagacaattccaagaccacgctgtatctgcaaatgaacagcctgagagccgaggacacggccgtatattcctgtgcgaagcacactacctactacatggacgtctggggcaaagggaccacggtcaccgtctcctcaggtggaggcggttcaggcggaggtggctctggcggtggcggatcgcagactgtggtgacccaggagccatcgctctcagtgtcccctggagggacagtcacactcacttgtggcttgagctctggctcagtctctactagtgactaccccagctggtaccagcagaccccaggccaggctccacgcacgctcatctacagaacaaacactcgctcttctggggtccctgatcgcttctctggctccatccttgggaacaaagctgccctcaccatcacgggggcccaggcagatgatgaatctgattattactgtgtgctgtatatggatagtggcattattttcggcagtggaaccaaggtcactgtcctaaccacgacgccagcgccgcggccaccaacaccggcgcccaccatcgcgtcgcagcccctgtccctgcgcccagaggcgtgccggccagcggcggggggcgcagtgcacacgagggggctggacttcgcctgtgatatctacatctgggcgcccttggccgggacttgtggggtccttctcctgtcactggttatcaccctttactgccggagggaccagaggctgccccccgatgcccacaagccccctgggggaggcagtttccggacccccatccaagaggagcaggccgacgcccactccaccctggccaagatcagagtgaagttcagcaggagcgcagacgcccccgcgtaccagcagggccagaaccagctctataacgagctcaatctaggacgaagagaggagtacgatgttttggacaagagacgtggccgggaccctgagatggggggaaagccgagaaggaagaaccctcaggaaggcctgtacaatgaactgcagaaagataagatggcggaggcctacagtgagattgggatgaaaggcgagcgccggaggggcaaggggcacgatggcctttaccagggtctcagtacagccaccaaggacacctacgacgcccttcacatgcaggccctgccccctcgcggctctggcgagggaaggggttccctgcttacttgcggcgacgtcgaagagaatcccggtccgatggccctcccagtaactgccctccttttgcccctcgcactccttcttcatgccgctcgccccaactgggtcaacgtgattagcgatttgaagaaaatcgaggaccttatacagtctatgcatattgacgctacactgtatactgagagtgatgtacacccgtcctgtaaggtaacggccatgaaatgctttcttctggagctccaggtcatcagcttggagtctggggacgcaagcatccacgatacggttgaaaacctcatcatccttgcgaacaactctctctcatctaatggaaacgttacagagagtgggtgtaaggagtgcgaagagttggaagaaaaaaacatcaaagaatttcttcaatccttcgttcacatagtgcaaatgttcattaacacgtccactaccacacccgccccgaggccacctacgccggcaccgactatcgccagtcaacccctctctctgcgccccgaggcttgccggcctgcggctggtggggcggtccacacccggggcctggattttgcgtgcgatatatacatctgggcacctcttgccggcacctgcggagtgctgcttctctcactcgttattacgctgtactgctaa

SEQ ID NO: 860 - DNA, 2118 bp, synthetic construct
  misc_feature 1..2118: note = Synthetic
  source 1..2118: mol_type = other DNA
atggccttaccagtgaccgccttgctcctgccgctggccttgctgctccacgccgccaggccggaggtgcagctgctggagtctgggggaggcttggtacagcctggggggtccctgagactctcctgtgcagcctctggattcacctttaacacctatgccatgagctgggtccgccaggctccagggaaggggctggagtgggtctcagctatgagtggtagtggtgataccacatactacgcagactccgtgaagggccggttcaccatctccagagacaattccaagaccactctgtatctgcaaatgaacagcctgagagccgaggacacggccgtatattcctgtgcgaaacacacttcctactacatggacgtctggggcaaagggaccacggtcaccgtctcctcaggtggaggcggttcaggcggaggtggctctggcggtggcggatcgcagactgtggtgacccaggagccatcgctctcagtgtcccctggagggacagtcacactcacttgtggcttgagctctggctcagtctctactagtgactaccccagttggtaccagcagaccccaggccaggctccacgcacgctcatctacagaacaaacactcgctcttctggggtccctgatcgcttctctggctccatccttgggaacaaagctgccctcaccatcacgggggcccaggcagatgatgaatctgattattactgtgtgctgtatatgggtagtggcattattttcggcagtggaaccaaggtcactgtcctaaccacgacgccagcgccgcggccaccaacaccggcgcccaccatcgcgtcgcagcccctgtccctgcgcccagaggcgtgccggccagcggcggggggcgcagtgcacacgagggggctggacttcgcctgtgatatctacatctgggcgcccttggccgggacttgtggggtccttctcctgtcactggttatcaccctttactgccggagggaccagaggctgccccccgatgcccacaagccccctgggggaggcagtttccggacccccatccaagaggagcaggccgacgcccactccaccctggccaagatcagagtgaagttcagcaggagcgcagacgcccccgcgtaccagcagggccagaaccagctctataacgagctcaatctaggacgaagagaggagtacgatgttttggacaagagacgtggccgggaccctgagatggggggaaagccgagaaggaagaaccctcaggaaggcctgtacaatgaactgcagaaagataagatggcggaggcctacagtgagattgggatgaaaggcgagcgccggaggggcaaggggcacgatggcctttaccagggtctcagtacagccaccaaggacacctacgacgcccttcacatgcaggccctgccccctcgcggctctggcgagggaaggggttccctgcttacttgcggcgacgtcgaagagaatcccggtccgatggccctcccagtaactgccctccttttgcccctcgcactccttcttcatgccgctcgccccaactgggtcaacgtgattagcgatttgaagaaaatcgaggaccttatacagtctatgcatattgacgctacactgtatactgagagtgatgtacacccgtcctgtaaggtaacggccatgaaatgctttcttctggagctccaggtcatcagcttggagtctggggacgcaagcatccacgatacggttgaaaacctcatcatccttgcgaacaactctctctcatctaatggaaacgttacagagagtgggtgtaaggagtgcgaagagttggaagaaaaaaacatcaaagaatttcttcaatccttcgttcacatagtgcaaatgttcattaacacgtccactaccacacccgccccgaggccacctacgccggcaccgactatcgccagtcaacccctctctctgcgccccgaggcttgccggcctgcggctggtggggcggtccacacccggggcctggattttgcgtgcgatatatacatctgggcacctcttgccggcacctgcggagtgctgcttctctcactcgttattacgctgtactgctaa

SEQ ID NO: 861 - DNA, 2118 bp, synthetic construct
  misc_feature 1..2118: note = Synthetic
  source 1..2118: mol_type = other DNA
atggccttaccagtgaccgccttgctcctgccgctggccttgctgctccacgccgccaggccggaggtccaattattggagtctgggggagacttggtacagcctggggggtccctgagactctcctgtgcagcctctggattcacctttagcacctatgccatgagctgggtccgccaggctccagggaaggggctggaatgggtctcagctattagtggtagtggtgaaaacatatactacgcagactccgtgaagggccggttcaccatctccagagacaattccaagaacacgctatttctacaaatgaacagcctgagagccgaggacacggccgtatattactgtgcgaaacacactagctattacatggacgtctggggcaaagggaccacggtcaccgtctcctcaggtggaggcggttcaggcggaggtggctctggcggtggcggatcgcagactgtggtgacccaggagccatcgttctcagtgtcccctggagggacagtcacactcacttgtggcttatactctgactcagtctctactagttactaccccagctggtaccagcagaccccaggccaggctccacgcacgctcatctacaacacaaacactcgctcttctggggtccctgatcgcttctctggctccatccttgggaacaaagctgccctcaccatcacgggggcccaggcagatgatgaatctgattattactgtgtactatatatggttagtggcattgttttcggcagtggaaccaaggtcactgtcctgaccacgacgccagcgccgcggccaccaacaccggcgcccaccatcgcgtcgcagcccctgtccctgcgcccagaggcgtgccggccagcggcggggggcgcagtgcacacgagggggctggacttcgcctgtgatatctacatctgggcgcccttggccgggacttgtggggtccttctcctgtcactggttatcaccctttactgccggagggaccagaggctgccccccgatgcccacaagccccctgggggaggcagtttccggacccccatccaagaggagcaggccgacgcccactccaccctggccaagatcagagtgaagttcagcaggagcgcagacgcccccgcgtaccagcagggccagaaccagctctataacgagctcaatctaggacgaagagaggagtacgatgttttggacaagagacgtggccgggaccctgagatggggggaaagccgagaaggaagaaccctcaggaaggcctgtacaatgaactgcagaaagataagatggcggaggcctacagtgagattgggatgaaaggcgagcgccggaggggcaaggggcacgatggcctttaccagggtctcagtacagccaccaaggacacctacgacgcccttcacatgcaggccctgccccctcgcggctctggcgagggaaggggttccctgcttacttgcggcgacgtcgaagagaatcccggtccgatggccctcccagtaactgccctccttttgcccctcgcactccttcttcatgccgctcgccccaactgggtcaacgtgattagcgatttgaagaaaatcgaggaccttatacagtctatgcatattgacgctacactgtatactgagagtgatgtacacccgtcctgtaaggtaacggccatgaaatgctttcttctggagctccaggtcatcagcttggagtctggggacgcaagcatccacgatacggttgaaaacctcatcatccttgcgaacaactctctctcatctaatggaaacgttacagagagtgggtgtaaggagtgcgaagagttggaagaaaaaaacatcaaagaatttcttcaatccttcgttcacatagtgcaaatgttcattaacacgtccactaccacacccgccccgaggccacctacgccggcaccgactatcgccagtcaacccctctctctgcgccccgaggcttgccggcctgcggctggtggggcggtccacacccggggcctggattttgcgtgcgatatatacatctgggcacctcttgccggcacctgcggagtgctgcttctctcactcgttattacgctgtactgctaa

SEQ ID NO: 862 - DNA, 2136 bp, synthetic construct
  misc_feature 1..2136: note = Synthetic
  source 1..2136: mol_type = other DNA
atggccttaccagtgaccgccttgctcctgccgctggccttgctgctccacgccgccaggccgcaggtgcagctggtggagtctgggggaggcgtggtccagcctgggaggtccctgagactctcctgtgcagcgtctggattcaccttcagtagttatggcatgcactgggtccgccaggctccaggcaaggggctggagtgggtggcagttatatggtatgatggaattaataaatactatgcagactccgtgaagggccgattcaccatctccagagacaattccaagaacacgctgtatctgcaaatgaacagcctgagagccgaagacacggctgtgtattactgtgcgagagaacggctggaacgaaggtactactactacatggacgtctggggcaaagggaccacggtcaccgtctcctcaggtggaggcggttcaggcggaggtggctctggcggtggcggatcgcagactgtggtgacccaggagccatcgttctcagtgtcccctggagggacagtcacactcacttgtggcttgagctctggctcagtctctactagttactaccccggctggtaccagcagaccccaggccaggctccacgcacgctcatctacagcacaaacactcgctcttctggggtccctgatcgcttctctggctccatccttgggaacaaagctgccctcaccatcacgggggcccaggcagatgatgaatctgattattactgtgtgctatatatgggtagtggcatgtttattttcggcagtggaaccaaggtcactgtcctaaccacgacgccagcgccgcggccaccaacaccggcgcccaccatcgcgtcgcagcccctgtccctgcgcccagaggcgtgccggccagcggcggggggcgcagtgcacacgagggggctggacttcgcctgtgatatctacatctgggcgcccttggccgggacttgtggggtccttctcctgtcactggttatcaccctttactgccggagggaccagaggctgccccccgatgcccacaagccccctgggggaggcagtttccggacccccatccaagaggagcaggccgacgcccactccaccctggccaagatcagagtgaagttcagcaggagcgcagacgcccccgcgtaccagcagggccagaaccagctctataacgagctcaatctaggacgaagagaggagtacgatgttttggacaagagacgtggccgggaccctgagatggggggaaagccgagaaggaagaaccctcaggaaggcctgtacaatgaactgcagaaagataagatggcggaggcctacagtgagattgggatgaaaggcgagcgccggaggggcaaggggcacgatggcctttaccagggtctcagtacagccaccaaggacacctacgacgcccttcacatgcaggccctgccccctcgcggctctggcgagggaaggggttccctgcttacttgcggcgacgtcgaagagaatcccggtccgatggccctcccagtaactgccctccttttgcccctcgcactccttcttcatgccgctcgccccaactgggtcaacgtgattagcgatttgaagaaaatcgaggaccttatacagtctatgcatattgacgctacactgtatactgagagtgatgtacacccgtcctgtaaggtaacggccatgaaatgctttcttctggagctccaggtcatcagcttggagtctggggacgcaagcatccacgatacggttgaaaacctcatcatccttgcgaacaactctctctcatctaatggaaacgttacagagagtgggtgtaaggagtgcgaagagttggaagaaaaaaacatcaaagaatttcttcaatccttcgttcacatagtgcaaatgttcattaacacgtccactaccacacccgccccgaggccacctacgccggcaccgactatcgccagtcaacccctctctctgcgccccgaggcttgccggcctgcggctggtggggcggtccacacccggggcctggattttgcgtgcgatatatacatctgggcacctcttgccggcacctgcggagtgctgcttctctcactcgttattacgctgtactgctaa

SEQ ID NO: 863 - DNA, 2118 bp, synthetic construct
  misc_feature 1..2118: note = Synthetic
  source 1..2118: mol_type = other DNA
atggccttaccagtgaccgccttgctcctgccgctggccttgctgctccacgccgccaggccggaggtgcagttgttggagtctgggggaggcttggtacagcctggggggtccctgagactctcctgtgcagcctctggattcacctttagcagctttgccatgagctgggtccgccaggctccagggaaggggctggaatgggtctcagctgttagtggtagtggtgatgacacatactacgcagactccgtgaagggccggttcaccatctccagagacaattccaagaacacgctgtatctgcaaatgaacagcctgagagccgaggacacggccgtatattactgtgcgaaacacactagctactacctggacgtctggggcaaagggaccacggtcaccgtctcctcaggtggaggcggttcaggcggaggtggctctggcggtggcggatcgcagactgtggtgacccaggagccatcgttctcagtgtcccctggagggacagtcacactcacttgtgccttgagctctgactcagtctctactagttactttcccagctggtaccggcagaccccaggccaggctccacgcacgctcatctacaacacaaacactcgctcttctggggtccctgatcgcttctctggctccatccttgggaacaaagctgccctcaccatcacgggggcccaggcagatgatgaatctgattattactgtgtgctatatatgggtagtggcattattttcggcagtggaaccaaggtcactgtcctaaccacgacgccagcgccgcggccaccaacaccggcgcccaccatcgcgtcgcagcccctgtccctgcgcccagaggcgtgccggccagcggcggggggcgcagtgcacacgagggggctggacttcgcctgtgatatctacatctgggcgcccttggccgggacttgtggggtccttctcctgtcactggttatcaccctttactgccggagggaccagaggctgccccccgatgcccacaagccccctgggggaggcagtttccggacccccatccaagaggagcaggccgacgcccactccaccctggccaagatcagagtgaagttcagcaggagcgcagacgcccccgcgtaccagcagggccagaaccagctctataacgagctcaatctaggacgaagagaggagtacgatgttttggacaagagacgtggccgggaccctgagatggggggaaagccgagaaggaagaaccctcaggaaggcctgtacaatgaactgcagaaagataagatggcggaggcctacagtgagattgggatgaaaggcgagcgccggaggggcaaggggcacgatggcctttaccagggtctcagtacagccaccaaggacacctacgacgcccttcacatgcaggccctgccccctcgcggctctggcgagggaaggggttccctgcttacttgcggcgacgtcgaagagaatcccggtccgatggccctcccagtaactgccctccttttgcccctcgcactccttcttcatgccgctcgccccaactgggtcaacgtgattagcgatttgaagaaaatcgaggaccttatacagtctatgcatattgacgctacactgtatactgagagtgatgtacacccgtcctgtaaggtaacggccatgaaatgctttcttctggagctccaggtcatcagcttggagtctggggacgcaagcatccacgatacggttgaaaacctcatcatccttgcgaacaactctctctcatctaatggaaacgttacagagagtgggtgtaaggagtgcgaagagttggaagaaaaaaacatcaaagaatttcttcaatccttcgttcacatagtgcaaatgttcattaacacgtccactaccacacccgccccgaggccacctacgccggcaccgactatcgccagtcaacccctctctctgcgccccgaggcttgccggcctgcggctggtggggcggtccacacccggggcctggattttgcgtgcgatatatacatctgggcacctcttgccggcacctgcggagtgctgcttctctcactcgttattacgctgtactgctaa

SEQ ID NO: 864 - DNA, 2136 bp, synthetic construct
  misc_feature 1..2136: note = Synthetic
  source 1..2136: mol_type = other DNA
atggccttaccagtgaccgccttgctcctgccgctggccttgctgctccacgccgccaggccgcaggtgcagctggtggagtctgggggaggcgtggtccagcctgggaggtccctgagactctcctgtgcagcgtctggattcaacttcagtacctttgacatacactgggtccgccaggctccaggcaaggggctggagtgggtggcacttatatggtatgatggaagttataaatactatgcagactccgtgaagggccgattcaccatttccagagacaattccaagaacacgctggatctgcgaatgaacagcctgagagccgaggacacggctgtgtattactgtgcgcgaaatgacaactggaacgacgaacactactaccactattacatggacgtctggggcaaagggaccacggtcaccgtctcctcaggtggaggcggttcaggcggaggtggctctggcggtggcggatcggaaattgtcctgactcagtctccagactttcagtctgtgactccaaaggagaaagtcaccatcacctgccgggccagtcagagtattggtagtagcttacactggtaccagcagaaaccagatcagtctccaaagctcctcatcaagtttgcttcccagtccttctcaggggtcccctcgaggttcagtggcagtggatctgggacagatttcaccctcaccatcaatagcctggaagctgaagatgctgcaacgtatttctgtcatcagagtagtagtttaccgtggacgttcggccaagggaccaaggtggaaatcaaaaccacgacgccagcgccgcggccaccaacaccggcgcccaccatcgcgtcgcagcccctgtccctgcgcccagaggcgtgccggccagcggcggggggcgcagtgcacacgagggggctggacttcgcctgtgatatctacatctgggcgcccttggccgggacttgtggggtccttctcctgtcactggttatcaccctttactgccggagggaccagaggctgccccccgatgcccacaagccccctgggggaggcagtttccggacccccatccaagaggagcaggccgacgcccactccaccctggccaagatcagagtgaagttcagcaggagcgcagacgcccccgcgtaccagcagggccagaaccagctctataacgagctcaatctaggacgaagagaggagtacgatgttttggacaagagacgtggccgggaccctgagatggggggaaagccgagaaggaagaaccctcaggaaggcctgtacaatgaactgcagaaagataagatggcggaggcctacagtgagattgggatgaaaggcgagcgccggaggggcaaggggcacgatggcctttaccagggtctcagtacagccaccaaggacacctacgacgcccttcacatgcaggccctgccccctcgcggctctggcgagggaaggggttccctgcttacttgcggcgacgtcgaagagaatcccggtccgatggccctcccagtaactgccctccttttgcccctcgcactccttcttcatgccgctcgccccaactgggtcaacgtgattagcgatttgaagaaaatcgaggaccttatacagtctatgcatattgacgctacactgtatactgagagtgatgtacacccgtcctgtaaggtaacggccatgaaatgctttcttctggagctccaggtcatcagcttggagtctggggacgcaagcatccacgatacggttgaaaacctcatcatccttgcgaacaactctctctcatctaatggaaacgttacagagagtgggtgtaaggagtgcgaagagttggaagaaaaaaacatcaaagaatttcttcaatccttcgttcacatagtgcaaatgttcattaacacgtccactaccacacccgccccgaggccacctacgccggcaccgactatcgccagtcaacccctctctctgcgccccgaggcttgccggcctgcggctggtggggcggtccacacccggggcctggattttgcgtgcgatatatacatctgggcacctcttgccggcacctgcggagtgctgcttctctcactcgttattacgctgtactgctaa

SEQ ID NO: 865 - DNA, 2151 bp, synthetic construct
  misc_feature 1..2151: note = Synthetic
  source 1..2151: mol_type = other DNA
atggccttaccagtgaccgccttgctcctgccgctggccttgctgctccacgccgccaggccggaagtgcacctgttggagtctgggggaggcttggtccagcctggggggtccctgagactctcctgtgcggcctctggattcacctttagcagctatgccatgaactgggtccgccaggctccagggaaggggctggagtgggtctcttctattagtggtagtggtagtagctcatactacgcagactccgtgaagggccggttcaccatctccagagacaattccaagaacacgctgtatctgcaaatgaacagcctgagagccgaggacacggccgtatattactgtgcgtctcgtggattcaactcccagtatcctcccggatactactactactacatggacgtctggggcaaagggaccacggtcaccgtctcctcaggtggaggcggttcaggcggaggtggctctggcggtggcggatcgcagactgtggtgacccaggagccatcgttctcagtgtcccctggagggacagtcacactcacttgtggcttgagctctggctcagtctccactagttacttccccagctggtaccagcagacccccggccaggctccacgcacgctcatctacatcacaaacactcgctcttcaggggtccctgatcgcttctctggctccattattgggaacaaagctgccctcaccatcacgggggcccaggcagatgatgaatctgattatttctgtgtactatatatgggtagtggcacttgggtgttcggtggaggaaccaagctgactgtcctaaccacgacgccagcgccgcggccaccaacaccggcgcccaccatcgcgtcgcagcccctgtccctgcgcccagaggcgtgccggccagcggcggggggcgcagtgcacacgagggggctggacttcgcctgtgatatctacatctgggcgcccttggccgggacttgtggggtccttctcctgtcactggttatcaccctttactgccggagggaccagaggctgccccccgatgcccacaagccccctgggggaggcagtttccggacccccatccaagaggagcaggccgacgcccactccaccctggccaagatcagagtgaagttcagcaggagcgcagacgcccccgcgtaccagcagggccagaaccagctctataacgagctcaatctaggacgaagagaggagtacgatgttttggacaagagacgtggccgggaccctgagatggggggaaagccgagaaggaagaaccctcaggaaggcctgtacaatgaactgcagaaagataagatggcggaggcctacagtgagattgggatgaaaggcgagcgccggaggggcaaggggcacgatggcctttaccagggtctcagtacagccaccaaggacacctacgacgcccttcacatgcaggccctgccccctcgcggctctggcgagggaaggggttccctgcttacttgcggcgacgtcgaagagaatcccggtccgatggccctcccagtaactgccctccttttgcccctcgcactccttcttcatgccgctcgccccaactgggtcaacgtgattagcgatttgaagaaaatcgaggaccttatacagtctatgcatattgacgctacactgtatactgagagtgatgtacacccgtcctgtaaggtaacggccatgaaatgctttcttctggagctccaggtcatcagcttggagtctggggacgcaagcatccacgatacggttgaaaacctcatcatccttgcgaacaactctctctcatctaatggaaacgttacagagagtgggtgtaaggagtgcgaagagttggaagaaaaaaacatcaaagaatttcttcaatccttcgttcacatagtgcaaatgttcattaacacgtccactaccacacccgccccgaggccacctacgccggcaccgactatcgccagtcaacccctctctctgcgccccgaggcttgccggcctgcggctggtggggcggtccacacccggggcctggattttgcgtgcgatatatacatctgggcacctcttgccggcacctgcggagtgctgcttctctcactcgttattacgctgtactgctaa

SEQ ID NO: 866 - DNA, 2112 bp, synthetic construct
  misc_feature 1..2112: note = Synthetic
  source 1..2112: mol_type = other DNA
atggccttaccagtgaccgccttgctcctgccgctggccttgctgctccacgccgccaggccggaggtgcagctgttggagtctgggggaggcttggtacagcctggggggtccctgagactctcctgtgcagcctctggattcaccttcagcaactatgccatgacctgggtccgccaggctccagggaaggggctggagtgggtctcagctattagtggtagtggtattggcacatactacgcagactccgtgcagggccggttcaccacctccagagacaattccaagaacacgctgtatctgcaaatgaacagcctgagagccgaggacacggccgtttattactgtgcgaaaggggggtacaactggaaggacgtctggggcaaagggaccacggtcaccgtctcctcaggtggaggcggttcaggcggaggtggctctggcggtggcggatcggaaattgtgctgactcagtctccagactttcagtctgtgactccaaaggagaaagtcaccatcacctgccgggccagtcagagcattggtagtagcttacactggtaccagcagaaaccagatcagtctccaaagctcctcatcaagtttgcttcccagtccttctcaggggtcccctcgaggttcagtggcagtggatctgggacagatttcaccctcaccatccatagcctggaagctgaagatgctgcaacgtattactgtcatcagagtagtagtttaccgtggacgttcggccaagggaccaaggtggaaatcaaaaccacgacgccagcgccgcggccaccaacaccggcgcccaccatcgcgtcgcagcccctgtccctgcgcccagaggcgtgccggccagcggcggggggcgcagtgcacacgagggggctggacttcgcctgtgatatctacatctgggcgcccttggccgggacttgtggggtccttctcctgtcactggttatcaccctttactgccggagggaccagaggctgccccccgatgcccacaagccccctgggggaggcagtttccggacccccatccaagaggagcaggccgacgcccactccaccctggccaagatcagagtgaagttcagcaggagcgcagacgcccccgcgtaccagcagggccagaaccagctctataacgagctcaatctaggacgaagagaggagtacgatgttttggacaagagacgtggccgggaccctgagatggggggaaagccgagaaggaagaaccctcaggaaggcctgtacaatgaactgcagaaagataagatggcggaggcctacagtgagattgggatgaaaggcgagcgccggaggggcaaggggcacgatggcctttaccagggtctcagtacagccaccaaggacacctacgacgcccttcacatgcaggccctgccccctcgcggctctggcgagggaaggggttccctgcttacttgcggcgacgtcgaagagaatcccggtccgatggccctcccagtaactgccctccttttgcccctcgcactccttcttcatgccgctcgccccaactgggtcaacgtgattagcgatttgaagaaaatcgaggaccttatacagtctatgcatattgacgctacactgtatactgagagtgatgtacacccgtcctgtaaggtaacggccatgaaatgctttcttctggagctccaggtcatcagcttggagtctggggacgcaagcatccacgatacggttgaaaacctcatcatccttgcgaacaactctctctcatctaatggaaacgttacagagagtgggtgtaaggagtgcgaagagttggaagaaaaaaacatcaaagaatttcttcaatccttcgttcacatagtgcaaatgttcattaacacgtccactaccacacccgccccgaggccacctacgccggcaccgactatcgccagtcaacccctctctctgcgccccgaggcttgccggcctgcggctggtggggcggtccacacccggggcctggattttgcgtgcgatatatacatctgggcacctcttgccggcacctgcggagtgctgcttctctcactcgttattacgctgtactgctaa

SEQ ID NO: 867 - DNA, 2136 bp, synthetic construct
  misc_feature 1..2136: note = Synthetic
  source 1..2136: mol_type = other DNA
atggccttaccagtgaccgccttgctcctgccgctggccttgctgctccacgccgccaggccgcaggtgcagctggtggagtctgggggaggcgtggtccagcctgggaggtccctgagactctcctgtgcagcgtctgggttcaccttcactaactatgacatgcactgggtccgccaggccccaggcaaggggctggagtgggtgacaattatatggcatgatggaagtaataaatattatttagactccgtgaggggccgattcaccatctccagagacaattccaagaacacgctgtatctgcaaatgaacagcctgagagccgaggacacggctgtgtattactgtgcgagaggtgacaactggaacgacgaacaccactacttctactacatggacgtctggggcaaagggaccacggtcaccgtctcctcaggtggaggcggttcaggcggaggtggctctggcggtggcggatcggaaattgtgctgactcagtctccagactttcagtctgtgactccaaaggagaaagtcaccatcacctgccgggccagtcagagcattggtagtagcttacactggtaccagcagaaaccagatcagtctccaaagctcctcatcaagtttgcttcccagtccttctcaggggtcccctcgaggttcagtggcagtggatctgggacagatttcaccctcaccatccatagcctggaagctgaagatgctgcaacgtattactgtcatcagagtagtagtttaccgtggacgttcggccaagggaccaaggtggaaatcaaaaccacgacgccagcgccgcggccaccaacaccggcgcccaccatcgcgtcgcagcccctgtccctgcgcccagaggcgtgccggccagcggcggggggcgcagtgcacacgagggggctggacttcgcctgtgatatctacatctgggcgcccttggccgggacttgtggggtccttctcctgtcactggttatcaccctttactgccggagggaccagaggctgccccccgatgcccacaagccccctgggggaggcagtttccggacccccatccaagaggagcaggccgacgcccactccaccctggccaagatcagagtgaagttcagcaggagcgcagacgcccccgcgtaccagcagggccagaaccagctctataacgagctcaatctaggacgaagagaggagtacgatgttttggacaagagacgtggccgggaccctgagatggggggaaagccgagaaggaagaaccctcaggaaggcctgtacaatgaactgcagaaagataagatggcggaggcctacagtgagattgggatgaaaggcgagcgccggaggggcaaggggcacgatggcctttaccagggtctcagtacagccaccaaggacacctacgacgcccttcacatgcaggccctgccccctcgcggctctggcgagggaaggggttccctgcttacttgcggcgacgtcgaagagaatcccggtccgatggccctcccagtaactgccctccttttgcccctcgcactccttcttcatgccgctcgccccaactgggtcaacgtgattagcgatttgaagaaaatcgaggaccttatacagtctatgcatattgacgctacactgtatactgagagtgatgtacacccgtcctgtaaggtaacggccatgaaatgctttcttctggagctccaggtcatcagcttggagtctggggacgcaagcatccacgatacggttgaaaacctcatcatccttgcgaacaactctctctcatctaatggaaacgttacagagagtgggtgtaaggagtgcgaagagttggaagaaaaaaacatcaaagaatttcttcaatccttcgttcacatagtgcaaatgttcattaacacgtccactaccacacccgccccgaggccacctacgccggcaccgactatcgccagtcaacccctctctctgcgccccgaggcttgccggcctgcggctggtggggcggtccacacccggggcctggattttgcgtgcgatatatacatctgggcacctcttgccggcacctgcggagtgctgcttctctcactcgttattacgctgtactgctaa

SEQ ID NO: 868 - DNA, 2136 bp, synthetic construct
  misc_feature 1..2136: note = Synthetic
  source 1..2136: mol_type = other DNA
atggccttaccagtgaccgccttgctcctgccgctggccttgctgctccacgccgccaggccgcaggtgcagctggtggagtctgggggaggcgtggtccagcctgggaggtccctgagactctcctgtgcagcgtctgggttcaccttcagtaactatgacatgcactgggtccgccaggccccaggcaaggggctggagtgggtgacaattatatggcatgatggaagtaataaatattatttagactccgtgaagggccgattcaccatctccagagacaattccaagaacacgctgtatctgcaaatgaacagcctgagagccgaggacacggctgtgtattactgtgcgagaggtgacaactggaacgacgaacaccactacttctactacatggacgtctggggcaaagggaccacggtcaccgtctcctcaggtggaggcggttcaggcggaggtggctctggcggtggcggatcggaaattgtgttgacacagtctccagccaccctgtctttgtctccaggggaaagagccaccctctcctgcagggccagtcagagtgttagcagctccttagcctggtaccaacagaaacctggccaggctccccggctcctcatctatgatgcatccaacagggccactggcatcccagccaggttcagtggcagtgggtctgggacagacttcactctcaccatcagcagcctagagcctgaagattttgcagtttattactgtcagcagcgtagcaactggcctctcactttcggcggagggaccaaggtggagatcaaaaccacgacgccagcgccgcggccaccaacaccggcgcccaccatcgcgtcgcagcccctgtccctgcgcccagaggcgtgccggccagcggcggggggcgcagtgcacacgagggggctggacttcgcctgtgatatctacatctgggcgcccttggccgggacttgtggggtccttctcctgtcactggttatcaccctttactgccggagggaccagaggctgccccccgatgcccacaagccccctgggggaggcagtttccggacccccatccaagaggagcaggccgacgcccactccaccctggccaagatcagagtgaagttcagcaggagcgcagacgcccccgcgtaccagcagggccagaaccagctctataacgagctcaatctaggacgaagagaggagtacgatgttttggacaagagacgtggccgggaccctgagatggggggaaagccgagaaggaagaaccctcaggaaggcctgtacaatgaactgcagaaagataagatggcggaggcctacagtgagattgggatgaaaggcgagcgccggaggggcaaggggcacgatggcctttaccagggtctcagtacagccaccaaggacacctacgacgcccttcacatgcaggccctgccccctcgcggctctggcgagggaaggggttccctgcttacttgcggcgacgtcgaagagaatcccggtccgatggccctcccagtaactgccctccttttgcccctcgcactccttcttcatgccgctcgccccaactgggtcaacgtgattagcgatttgaagaaaatcgaggaccttatacagtctatgcatattgacgctacactgtatactgagagtgatgtacacccgtcctgtaaggtaacggccatgaaatgctttcttctggagctccaggtcatcagcttggagtctggggacgcaagcatccacgatacggttgaaaacctcatcatccttgcgaacaactctctctcatctaatggaaacgttacagagagtgggtgtaaggagtgcgaagagttggaagaaaaaaacatcaaagaatttcttcaatccttcgttcacatagtgcaaatgttcattaacacgtccactaccacacccgccccgaggccacctacgccggcaccgactatcgccagtcaacccctctctctgcgccccgaggcttgccggcctgcggctggtggggcggtccacacccggggcctggattttgcgtgcgatatatacatctgggcacctcttgccggcacctgcggagtgctgcttctctcactcgttattacgctgtactgctaa

SEQ ID NO: 869 - DNA, 2124 bp, synthetic construct
  misc_feature 1..2124: note = Synthetic
  source 1..2124: mol_type = other DNA
atggccttaccagtgaccgccttgctcctgccgctggccttgctgctccacgccgccaggccggaggtgcagctggtggagtctgggggaggtgtggtacggcctggggggtccctgagactctcctgtgcagcctctggattcacctttgatgattatggcatgagctgggtccgccaagctccagggaaggggctggagtgggtctctggtattaattggaatggtggtagcacaggttatgtagactctgtgaagggccgattcaccatctccagagacaacgccaagaactccctgtatctgcaaatgaacagtctgagagccgaggacacggccttgtatcactgtgcgagaccagtaactacggactactactactacatggacgtctggggcaaagggaccacggtcaccgtctcctcaggtggaggcggttcaggcggaggtggctctggcggtggcggatcggaaattgtgttgacgcagtctccaggcaccctgtctttgtctccaggggaaagagccaccctctcctgcagggccagtcagagtgttagcagcagctacttagcctggtaccagcagaaacctggccaggctcccaggctcctcatctatggtgcatccagcagggccactggcatcccagacaggttcagtggcagtgggtctgggacagacttcactctcaccatcagcagactggagcctgaagattttgcagtgtattactgtcagcagtatggtagctcgtggacgttcggccaagggaccaaggtggaaatcaaaaccacgacgccagcgccgcggccaccaacaccggcgcccaccatcgcgtcgcagcccctgtccctgcgcccagaggcgtgccggccagcggcggggggcgcagtgcacacgagggggctggacttcgcctgtgatatctacatctgggcgcccttggccgggacttgtggggtccttctcctgtcactggttatcaccctttactgccggagggaccagaggctgccccccgatgcccacaagccccctgggggaggcagtttccggacccccatccaagaggagcaggccgacgcccactccaccctggccaagatcagagtgaagttcagcaggagcgcagacgcccccgcgtaccagcagggccagaaccagctctataacgagctcaatctaggacgaagagaggagtacgatgttttggacaagagacgtggccgggaccctgagatggggggaaagccgagaaggaagaaccctcaggaaggcctgtacaatgaactgcagaaagataagatggcggaggcctacagtgagattgggatgaaaggcgagcgccggaggggcaaggggcacgatggcctttaccagggtctcagtacagccaccaaggacacctacgacgcccttcacatgcaggccctgccccctcgcggctctggcgagggaaggggttccctgcttacttgcggcgacgtcgaagagaatcccggtccgatggccctcccagtaactgccctccttttgcccctcgcactccttcttcatgccgctcgccccaactgggtcaacgtgattagcgatttgaagaaaatcgaggaccttatacagtctatgcatattgacgctacactgtatactgagagtgatgtacacccgtcctgtaaggtaacggccatgaaatgctttcttctggagctccaggtcatcagcttggagtctggggacgcaagcatccacgatacggttgaaaacctcatcatccttgcgaacaactctctctcatctaatggaaacgttacagagagtgggtgtaaggagtgcgaagagttggaagaaaaaaacatcaaagaatttcttcaatccttcgttcacatagtgcaaatgttcattaacacgtccactaccacacccgccccgaggccacctacgccggcaccgactatcgccagtcaacccctctctctgcgccccgaggcttgccggcctgcggctggtggggcggtccacacccggggcctggattttgcgtgcgatatatacatctgggcacctcttgccggcacctgcggagtgctgcttctctcactcgttattacgctgtactgctaa

SEQ ID NO: 870 - DNA, 2148 bp, synthetic construct
  misc_feature 1..2148: note = Synthetic
  source 1..2148: mol_type = other DNA
atggccttaccagtgaccgccttgctcctgccgctggccttgctgctccacgccgccaggccggaggtgcagctgttggagtctgggggaggcttggtacagcctggggggtccctgagactctcctgtgcagcctctggattcacctttagcagctatgccatgagctgggtccgccaggctccagggaaggggctggagtgggtctcagctattagtggtagtggtggtagcacatactacgcagactccgtgaagggccggttcaccatctccagagacaattccaagaacacgctgtatctgcaaatgaacagcctgagagccgaggacacggccgtatattactgtgcgaaaaaggggacgtcgtacaactggaacgacgtccattactactactactactacatggacgtctggggcaaagggaccacggtcaccgtctcctcaggtggaggcggttcaggcggaggtggctctggcggtggcggatcggaaattgtgttgacgcagtctccaggcaccctgtctttgtctccaggggaaagagccaccctctcctgcagggccagtcagagtgttagcagcagctacttagcctggtaccagcagaaacctggccaggctcccaggctcctcatctatggtgcatccagcagggccactggcatcccagacaggttcagtggcagtgggtctgggacagacttcactctcaccatcagcagactggagcctgaagattttgcagtgtattactgtcagcagtatggtagctcgtggacgttcggccaagggaccaaggtggaaatcaaaaccacgacgccagcgccgcggccaccaacaccggcgcccaccatcgcgtcgcagcccctgtccctgcgcccagaggcgtgccggccagcggcggggggcgcagtgcacacgagggggctggacttcgcctgtgatatctacatctgggcgcccttggccgggacttgtggggtccttctcctgtcactggttatcaccctttactgccggagggaccagaggctgccccccgatgcccacaagccccctgggggaggcagtttccggacccccatccaagaggagcaggccgacgcccactccaccctggccaagatcagagtgaagttcagcaggagcgcagacgcccccgcgtaccagcagggccagaaccagctctataacgagctcaatctaggacgaagagaggagtacgatgttttggacaagagacgtggccgggaccctgagatggggggaaagccgagaaggaagaaccctcaggaaggcctgtacaatgaactgcagaaagataagatggcggaggcctacagtgagattgggatgaaaggcgagcgccggaggggcaaggggcacgatggcctttaccagggtctcagtacagccaccaaggacacctacgacgcccttcacatgcaggccctgccccctcgcggctctggcgagggaaggggttccctgcttacttgcggcgacgtcgaagagaatcccggtccgatggccctcccagtaactgccctccttttgcccctcgcactccttcttcatgccgctcgccccaactgggtcaacgtgattagcgatttgaagaaaatcgaggaccttatacagtctatgcatattgacgctacactgtatactgagagtgatgtacacccgtcctgtaaggtaacggccatgaaatgctttcttctggagctccaggtcatcagcttggagtctggggacgcaagcatccacgatacggttgaaaacctcatcatccttgcgaacaactctctctcatctaatggaaacgttacagagagtgggtgtaaggagtgcgaagagttggaagaaaaaaacatcaaagaatttcttcaatccttcgttcacatagtgcaaatgttcattaacacgtccactaccacacccgccccgaggccacctacgccggcaccgactatcgccagtcaacccctctctctgcgccccgaggcttgccggcctgcggctggtggggcggtccacacccggggcctggattttgcgtgcgatatatacatctgggcacctcttgccggcacctgcggagtgctgcttctctcactcgttattacgctgtactgctaa

SEQ ID NO: 871 - DNA, 2130 bp, synthetic construct
  misc_feature 1..2130: note = Synthetic
  source 1..2130: mol_type = other DNA
atggccttaccagtgaccgccttgctcctgccgctggccttgctgctccacgccgccaggccgcagctgcagctgcaggagtcgggcccaggactggtgaagccttcggagaccctgtccctcacctgcactgtctctggtggctccatcagcagtagtagttactactggggctggatccgccagcccccagggaaggggctggagtggattgggagtatctattatagtgggagcacctactacaacccgtccctcaagagtcgagtcaccatatccgtagacacgtccaagaaccagttctccctgaagctgagctctgtgaccgccgcagacacggctgtgtattactgcacaactggaacgacggcttactactactactactacatggacgtctggggcaaagggaccacggtcaccgtctcctcaggtggaggcggttcaggcggaggtggctctggcggtggcggatcggaaattgtgttgacgcagtctccaggcaccctgtctttgtctccaggggaaagagccaccctctcctgcagggccagtcagagtgttagcagcagctacttagcctggtaccagcagaaacctggccaggctcccaggctcctcatctatggtgcatccagcagggccactggcatcccagacaggttcagtggcagtgggtctgggacagacttcactctcaccatcagcagactggagcctgaagattttgcagtgtattactgtcagcagtatggtagctcgtggacgttcggccaagggaccaaggtggaaatcaaaaccacgacgccagcgccgcggccaccaacaccggcgcccaccatcgcgtcgcagcccctgtccctgcgcccagaggcgtgccggccagcggcggggggcgcagtgcacacgagggggctggacttcgcctgtgatatctacatctgggcgcccttggccgggacttgtggggtccttctcctgtcactggttatcaccctttactgccggagggaccagaggctgccccccgatgcccacaagccccctgggggaggcagtttccggacccccatccaagaggagcaggccgacgcccactccaccctggccaagatcagagtgaagttcagcaggagcgcagacgcccccgcgtaccagcagggccagaaccagctctataacgagctcaatctaggacgaagagaggagtacgatgttttggacaagagacgtggccgggaccctgagatggggggaaagccgagaaggaagaaccctcaggaaggcctgtacaatgaactgcagaaagataagatggcggaggcctacagtgagattgggatgaaaggcgagcgccggaggggcaaggggcacgatggcctttaccagggtctcagtacagccaccaaggacacctacgacgcccttcacatgcaggccctgccccctcgcggctctggcgagggaaggggttccctgcttacttgcggcgacgtcgaagagaatcccggtccgatggccctcccagtaactgccctccttttgcccctcgcactccttcttcatgccgctcgccccaactgggtcaacgtgattagcgatttgaagaaaatcgaggaccttatacagtctatgcatattgacgctacactgtatactgagagtgatgtacacccgtcctgtaaggtaacggccatgaaatgctttcttctggagctccaggtcatcagcttggagtctggggacgcaagcatccacgatacggttgaaaacctcatcatccttgcgaacaactctctctcatctaatggaaacgttacagagagtgggtgtaaggagtgcgaagagttggaagaaaaaaacatcaaagaatttcttcaatccttcgttcacatagtgcaaatgttcattaacacgtccactaccacacccgccccgaggccacctacgccggcaccgactatcgccagtcaacccctctctctgcgccccgaggcttgccggcctgcggctggtggggcggtccacacccggggcctggattttgcgtgcgatatatacatctgggcacctcttgccggcacctgcggagtgctgcttctctcactcgttattacgctgtactgctaa

SEQ ID NO: 872 - DNA, 2127 bp, synthetic construct
  misc_feature 1..2127: note = Synthetic
  source 1..2127: mol_type = other DNA
atggccttaccagtgaccgccttgctcctgccgctggccttgctgctccacgccgccaggccggaggtgcagctgttggagtctgggggaggcttggtgcagcctggggggtccctgagactctcctgtgcagcctctggattcacctttagcagctatgccatgacctgggtccgccaggctccagggaaggggctggagtgggtctcagctattagtggtagtggtggtagcacatactacgcagactccgtgaagggccggttcaccatctccagagacaattccaagaacacgctgtatctgcaaatgaacagcctgagagccgaggacacggccgtatattactgtgcgagaggcgggtataactggcactactactactacatggacgtctggggcaaagggaccacggtcaccgtctcctcaggtggaggcggttcaggcggaggtggctctggcggtggcggatcggaaattgtgttgacgcagtctccaggcaccctgtctttgtctccaggggaaagagccaccctctcctgcagggccagtcagagtgttagcagcagctacttagcctggtaccagcagaaacctggccaggctcccaggctcctcatctatggtgcatccagcagggccactggcatcccagacaggttcagtggcagtgggtctgggacagacttcactctcaccatcagcagactggagcctgaagattttgcagtgtattactgtcagcagtatggtagctcgtggacgttcggccaagggaccaaggtggaaatcaaaaccacgacgccagcgccgcggccaccaacaccggcgcccaccatcgcgtcgcagcccctgtccctgcgcccagaggcgtgccggccagcggcggggggcgcagtgcacacgagggggctggacttcgcctgtgatatctacatctgggcgcccttggccgggacttgtggggtccttctcctgtcactggttatcaccctttactgccggagggaccagaggctgccccccgatgcccacaagccccctgggggaggcagtttccggacccccatccaagaggagcaggccgacgcccactccaccctggccaagatcagagtgaagttcagcaggagcgcagacgcccccgcgtaccagcagggccagaaccagctctataacgagctcaatctaggacgaagagaggagtacgatgttttggacaagagacgtggccgggaccctgagatggggggaaagccgagaaggaagaaccctcaggaaggcctgtacaatgaactgcagaaagataagatggcggaggcctacagtgagattgggatgaaaggcgagcgccggaggggcaaggggcacgatggcctttaccagggtctcagtacagccaccaaggacacctacgacgcccttcacatgcaggccctgccccctcgcggctctggcgagggaaggggttccctgcttacttgcggcgacgtcgaagagaatcccggtccgatggccctcccagtaactgccctccttttgcccctcgcactccttcttcatgccgctcgccccaactgggtcaacgtgattagcgatttgaagaaaatcgaggaccttatacagtctatgcatattgacgctacactgtatactgagagtgatgtacacccgtcctgtaaggtaacggccatgaaatgctttcttctggagctccaggtcatcagcttggagtctggggacgcaagcatccacgatacggttgaaaacctcatcatccttgcgaacaactctctctcatctaatggaaacgttacagagagtgggtgtaaggagtgcgaagagttggaagaaaaaaacatcaaagaatttcttcaatccttcgttcacatagtgcaaatgttcattaacacgtccactaccacacccgccccgaggccacctacgccggcaccgactatcgccagtcaacccctctctctgcgccccgaggcttgccggcctgcggctggtggggcggtccacacccggggcctggattttgcgtgcgatatatacatctgggcacctcttgccggcacctgcggagtgctgcttctctcactcgttattacgctgtactgctaa

SEQ ID NO: 873 - DNA, 2139 bp, synthetic construct
  misc_feature 1..2139: note = Synthetic
  source 1..2139: mol_type = other DNA
atggccttaccagtgaccgccttgctcctgccgctggccttgctgctccacgccgccaggccgcaggtgcagctggtggagtctgggggaggcgtggtccagcctgggaggtccctgagactctcctgtgcagcgtctggattcaccttcagtagctatgacatgcactgggtccgccaggctccaggcaaggggctggagtgggtgtcagttatatggtatgatggaagtaataaaaagtatggagactccgcgaagggccgattcaccatctccagagacaattccaagaacacgctggatctgcaaatgaacagcctgagagccgaggacacggctgtgtattactgtgcgagaggcgacaactggaacgacgaaggtggctactactactactacatggacgtctggggcaaagggaccacggtcaccgtctcctcaggtggaggcggttcaggcggaggtggctctggcggtggcggatcggaaattgtgctgactcagtctccagactttcagtctgtgactccaaaggagaaagtcaccatcacctgccgggccagtcagaacattggtagtagcttacactggtaccagcagaaaccagatcagtctccaaagctcctcatcaagtttgcttcccagtccatctcaggggtcccctcgaggttcagtggcagtggatctgggacagatttcaccctcaccatcaatagcctggaagctgaagatgctgcagcgtattactgtcatcagagtagtagtttaccgtggacgttcggccaagggaccaaggtggaaatcaaaaccacgacgccagcgccgcggccaccaacaccggcgcccaccatcgcgtcgcagcccctgtccctgcgcccagaggcgtgccggccagcggcggggggcgcagtgcacacgagggggctggacttcgcctgtgatatctacatctgggcgcccttggccgggacttgtggggtccttctcctgtcactggttatcaccctttactgccggagggaccagaggctgccccccgatgcccacaagccccctgggggaggcagtttccggacccccatccaagaggagcaggccgacgcccactccaccctggccaagatcagagtgaagttcagcaggagcgcagacgcccccgcgtaccagcagggccagaaccagctctataacgagctcaatctaggacgaagagaggagtacgatgttttggacaagagacgtggccgggaccctgagatggggggaaagccgagaaggaagaaccctcaggaaggcctgtacaatgaactgcagaaagataagatggcggaggcctacagtgagattgggatgaaaggcgagcgccggaggggcaaggggcacgatggcctttaccagggtctcagtacagccaccaaggacacctacgacgcccttcacatgcaggccctgccccctcgcggctctggcgagggaaggggttccctgcttacttgcggcgacgtcgaagagaatcccggtccgatggccctcccagtaactgccctccttttgcccctcgcactccttcttcatgccgctcgccccaactgggtcaacgtgattagcgatttgaagaaaatcgaggaccttatacagtctatgcatattgacgctacactgtatactgagagtgatgtacacccgtcctgtaaggtaacggccatgaaatgctttcttctggagctccaggtcatcagcttggagtctggggacgcaagcatccacgatacggttgaaaacctcatcatccttgcgaacaactctctctcatctaatggaaacgttacagagagtgggtgtaaggagtgcgaagagttggaagaaaaaaacatcaaagaatttcttcaatccttcgttcacatagtgcaaatgttcattaacacgtccactaccacacccgccccgaggccacctacgccggcaccgactatcgccagtcaacccctctctctgcgccccgaggcttgccggcctgcggctggtggggcggtccacacccggggcctggattttgcgtgcgatatatacatctgggcacctcttgccggcacctgcggagtgctgcttctctcactcgttattacgctgtactgctaa

SEQ ID NO: 874 - DNA, 2139 bp, synthetic construct
  misc_feature 1..2139: note = Synthetic
  source 1..2139: mol_type = other DNA
atggccttaccagtgaccgccttgctcctgccgctggccttgctgctccacgccgccaggccgcaggtgcagctggtggagtctgggggaggcgtggtccagcctgggaggtccctgagactctcctgtgcagcgtctggattcaccttcagtagctatgacatgcactgggtccgccaggctccaggcaaggggctggagtgggtgtcagttatatggtatgatggaagtaataaaaagtatggagactccgcgaagggccgattcaccatctccagagacaattccaagaacacgctggatctgcaaatgaacagcctgagagccgaggacacggctgtgtattactgtgcgagaggcgacaactggaacgacgaaggtggctactactactactacatggacgtctggggcaaagggaccacggtcaccgtctcctcaggtggaggcggttcaggcggaggtggctctggcggtggcggatcggacatccagatgacccagtctccatcctcactgtctacatctgtaggagacagagtcaccatcacttgtcgggcgagtcagggcattagcaattatttagcctggtttcagcagaaaccagggaaagcccctaagtccctgatctatgctgcatccagtttgcaaagtggggtcccatcaaagttcagcggcagtggatctgggacagatttctctctcaccattagcagcctgcagcctgaagattttgcaacttattactgccaacagtataatagttacccgatcaccttcggccaagggacacgactggagattaaaaccacgacgccagcgccgcggccaccaacaccggcgcccaccatcgcgtcgcagcccctgtccctgcgcccagaggcgtgccggccagcggcggggggcgcagtgcacacgagggggctggacttcgcctgtgatatctacatctgggcgcccttggccgggacttgtggggtccttctcctgtcactggttatcaccctttactgccggagggaccagaggctgccccccgatgcccacaagccccctgggggaggcagtttccggacccccatccaagaggagcaggccgacgcccactccaccctggccaagatcagagtgaagttcagcaggagcgcagacgcccccgcgtaccagcagggccagaaccagctctataacgagctcaatctaggacgaagagaggagtacgatgttttggacaagagacgtggccgggaccctgagatggggggaaagccgagaaggaagaaccctcaggaaggcctgtacaatgaactgcagaaagataagatggcggaggcctacagtgagattgggatgaaaggcgagcgccggaggggcaaggggcacgatggcctttaccagggtctcagtacagccaccaaggacacctacgacgcccttcacatgcaggccctgccccctcgcggctctggcgagggaaggggttccctgcttacttgcggcgacgtcgaagagaatcccggtccgatggccctcccagtaactgccctccttttgcccctcgcactccttcttcatgccgctcgccccaactgggtcaacgtgattagcgatttgaagaaaatcgaggaccttatacagtctatgcatattgacgctacactgtatactgagagtgatgtacacccgtcctgtaaggtaacggccatgaaatgctttcttctggagctccaggtcatcagcttggagtctggggacgcaagcatccacgatacggttgaaaacctcatcatccttgcgaacaactctctctcatctaatggaaacgttacagagagtgggtgtaaggagtgcgaagagttggaagaaaaaaacatcaaagaatttcttcaatccttcgttcacatagtgcaaatgttcattaacacgtccactaccacacccgccccgaggccacctacgccggcaccgactatcgccagtcaacccctctctctgcgccccgaggcttgccggcctgcggctggtggggcggtccacacccggggcctggattttgcgtgcgatatatacatctgggcacctcttgccggcacctgcggagtgctgcttctctcactcgttattacgctgtactgctaa

SEQ ID NO: 875 - DNA, 2130 bp, synthetic construct
  misc_feature 1..2130: note = Synthetic
  source 1..2130: mol_type = other DNA
atggccttaccagtgaccgccttgctcctgccgctggccttgctgctccacgccgccaggccgcaggttcagctggtacagtctggagctgaggtgaagaagtctggggcctcagtgaaggtctcctgcaaggcttctggttacaccttaaccagctatggcatcagctgggtgcgacaggcccctggacaagggcttgagtggatgggatggatcagcgcttacaatggtaacataaactatgcacagaagttccagggcagagtcaccatgaccacagacacatccacgagcacagcctacatggagctgaggagcctgagatctgacgacacggccgtgtattactgtgtgagagatggggaccggtacaactggaaccacagctacatggacgtctggggcaaagggaccacggtcaccgtctcctcaggtggaggcggttcaggcggaggtggctctggcggtggcggatcggaaattgtgctgactcagtctccagactttcagtctgtgactccaaaggagaaagtcaccatcacctgccgggccagtcagaacattggtagtagcttacactggtaccagcagaaaccagatcagtctccaaagctcctcatcaagtttgcttcccagtccatctcaggggtcccctcgaggttcagtggcagtggatctgggacagatttcaccctcaccatcaatagcctggaagctgaagatgctgcagcgtattactgtcatcagagtagtagtttaccgtggacgttcggccaagggaccaaggtggaaatcaaaaccacgacgccagcgccgcggccaccaacaccggcgcccaccatcgcgtcgcagcccctgtccctgcgcccagaggcgtgccggccagcggcggggggcgcagtgcacacgagggggctggacttcgcctgtgatatctacatctgggcgcccttggccgggacttgtggggtccttctcctgtcactggttatcaccctttactgccggagggaccagaggctgccccccgatgcccacaagccccctgggggaggcagtttccggacccccatccaagaggagcaggccgacgcccactccaccctggccaagatcagagtgaagttcagcaggagcgcagacgcccccgcgtaccagcagggccagaaccagctctataacgagctcaatctaggacgaagagaggagtacgatgttttggacaagagacgtggccgggaccctgagatggggggaaagccgagaaggaagaaccctcaggaaggcctgtacaatgaactgcagaaagataagatggcggaggcctacagtgagattgggatgaaaggcgagcgccggaggggcaaggggcacgatggcctttaccagggtctcagtacagccaccaaggacacctacgacgcccttcacatgcaggccctgccccctcgcggctctggcgagggaaggggttccctgcttacttgcggcgacgtcgaagagaatcccggtccgatggccctcccagtaactgccctccttttgcccctcgcactccttcttcatgccgctcgccccaactgggtcaacgtgattagcgatttgaagaaaatcgaggaccttatacagtctatgcatattgacgctacactgtatactgagagtgatgtacacccgtcctgtaaggtaacggccatgaaatgctttcttctggagctccaggtcatcagcttggagtctggggacgcaagcatccacgatacggttgaaaacctcatcatccttgcgaacaactctctctcatctaatggaaacgttacagagagtgggtgtaaggagtgcgaagagttggaagaaaaaaacatcaaagaatttcttcaatccttcgttcacatagtgcaaatgttcattaacacgtccactaccacacccgccccgaggccacctacgccggcaccgactatcgccagtcaacccctctctctgcgccccgaggcttgccggcctgcggctggtggggcggtccacacccggggcctggattttgcgtgcgatatatacatctgggcacctcttgccggcacctgcggagtgctgcttctctcactcgttattacgctgtactgctaa

SEQ ID NO: 876 - DNA, 2130 bp, synthetic construct
  misc_feature 1..2130: note = Synthetic
  source 1..2130: mol_type = other DNA
atggccttaccagtgaccgccttgctcctgccgctggccttgctgctccacgccgccaggccgcaggttcagctggtacagtctggagctgaggtgaagaagtctggggcctcagtgaaggtctcctgcaaggcttctggttacaccttaaccagctatggcatcagctgggtgcgacaggcccctggacaagggcttgagtggatgggatggatcagcgcttacaatggtaacataaactatgcacagaagttccagggcagagtcaccatgaccacagacacatccacgagcacagcctacatggagctgaggagcctgagatctgacgacacggccgtgtattactgtgtgagagatggggaccggtacaactggaaccacagctacatggacgtctggggcaaagggaccacggtcaccgtctcctcaggtggaggcggttcaggcggaggtggctctggcggtggcggatcggacatccagatgacccagtctccatcctcactgtctacatctgtaggagacagagtcaccatcacttgtcgggcgagtcagggcattagcaattatttagcctggtttcagcagaaaccagggaaagcccctaagtccctgatctatgctgcatccagtttgcaaagtggggtcccatcaaagttcagcggcagtggatctgggacagatttctctctcaccattagcagcctgcagcctgaagattttgcaacttattactgccaacagtataatagttacccgatcaccttcggccaagggacacgactggagattaaaaccacgacgccagcgccgcggccaccaacaccggcgcccaccatcgcgtcgcagcccctgtccctgcgcccagaggcgtgccggccagcggcggggggcgcagtgcacacgagggggctggacttcgcctgtgatatctacatctgggcgcccttggccgggacttgtggggtccttctcctgtcactggttatcaccctttactgccggagggaccagaggctgccccccgatgcccacaagccccctgggggaggcagtttccggacccccatccaagaggagcaggccgacgcccactccaccctggccaagatcagagtgaagttcagcaggagcgcagacgcccccgcgtaccagcagggccagaaccagctctataacgagctcaatctaggacgaagagaggagtacgatgttttggacaagagacgtggccgggaccctgagatggggggaaagccgagaaggaagaaccctcaggaaggcctgtacaatgaactgcagaaagataagatggcggaggcctacagtgagattgggatgaaaggcgagcgccggaggggcaaggggcacgatggcctttaccagggtctcagtacagccaccaaggacacctacgacgcccttcacatgcaggccctgccccctcgcggctctggcgagggaaggggttccctgcttacttgcggcgacgtcgaagagaatcccggtccgatggccctcccagtaactgccctccttttgcccctcgcactccttcttcatgccgctcgccccaactgggtcaacgtgattagcgatttgaagaaaatcgaggaccttatacagtctatgcatattgacgctacactgtatactgagagtgatgtacacccgtcctgtaaggtaacggccatgaaatgctttcttctggagctccaggtcatcagcttggagtctggggacgcaagcatccacgatacggttgaaaacctcatcatccttgcgaacaactctctctcatctaatggaaacgttacagagagtgggtgtaaggagtgcgaagagttggaagaaaaaaacatcaaagaatttcttcaatccttcgttcacatagtgcaaatgttcattaacacgtccactaccacacccgccccgaggccacctacgccggcaccgactatcgccagtcaacccctctctctgcgccccgaggcttgccggcctgcggctggtggggcggtccacacccggggcctggattttgcgtgcgatatatacatctgggcacctcttgccggcacctgcggagtgctgcttctctcactcgttattacgctgtactgctaa

SEQ ID NO: 877 - DNA, 2127 bp, synthetic construct
  misc_feature 1..2127: note = Synthetic
  source 1..2127: mol_type = other DNA
atggccttaccagtgaccgccttgctcctgccgctggccttgctgctccacgccgccaggccggaggtgcagctgttggagtctgggggagacttggtacagcctggggggtccctgcgactctcctgtgcagcctctggattcacctttagcacctatgccatgacctgggtccgccaggctccagggaaggggctggagtgggtctcagctattagtggtactagtggtagcacatactacgcagactccgtgaagggccggttcaccatctccagagacaattccaagagcacgctgtatctgcacatgaacagcctgagaaccgaggacacggccgtatattactgtgcgagaggcggatataactggcactactactactacatggacgtctggggcaaagggaccacggtcaccgtctcctcaggtggaggcggttcaggcggaggtggctctggcggtggcggatcggaaattgtgctgactcagtctccagactttcagtctgtgactccaaaggagaaagtcaccatcacctgccgggccagtcagagcattggaagtagcttacactggtaccagcagaaaccagatcagtctccaaagctcctcatcaagtatgtttcccagtccatctcaggggtcccctcgaggttcagtggcagtggatctgggacagatttcaccctcaccatcaatagcctggaagctgaagatgctgcagcgtattactgtcatcagagtagtagtttaccgtggacgttcggccaagggaccaaggtggaaatcaaaaccacgacgccagcgccgcggccaccaacaccggcgcccaccatcgcgtcgcagcccctgtccctgcgcccagaggcgtgccggccagcggcggggggcgcagtgcacacgagggggctggacttcgcctgtgatatctacatctgggcgcccttggccgggacttgtggggtccttctcctgtcactggttatcaccctttactgccggagggaccagaggctgccccccgatgcccacaagccccctgggggaggcagtttccggacccccatccaagaggagcaggccgacgcccactccaccctggccaagatcagagtgaagttcagcaggagcgcagacgcccccgcgtaccagcagggccagaaccagctctataacgagctcaatctaggacgaagagaggagtacgatgttttggacaagagacgtggccgggaccctgagatggggggaaagccgagaaggaagaaccctcaggaaggcctgtacaatgaactgcagaaagataagatggcggaggcctacagtgagattgggatgaaaggcgagcgccggaggggcaaggggcacgatggcctttaccagggtctcagtacagccaccaaggacacctacgacgcccttcacatgcaggccctgccccctcgcggctctggcgagggaaggggttccctgcttacttgcggcgacgtcgaagagaatcccggtccgatggccctcccagtaactgccctccttttgcccctcgcactccttcttcatgccgctcgccccaactgggtcaacgtgattagcgatttgaagaaaatcgaggaccttatacagtctatgcatattgacgctacactgtatactgagagtgatgtacacccgtcctgtaaggtaacggccatgaaatgctttcttctggagctccaggtcatcagcttggagtctggggacgcaagcatccacgatacggttgaaaacctcatcatccttgcgaacaactctctctcatctaatggaaacgttacagagagtgggtgtaaggagtgcgaagagttggaagaaaaaaacatcaaagaatttcttcaatccttcgttcacatagtgcaaatgttcattaacacgtccactaccacacccgccccgaggccacctacgccggcaccgactatcgccagtcaacccctctctctgcgccccgaggcttgccggcctgcggctggtggggcggtccacacccggggcctggattttgcgtgcgatatatacatctgggcacctcttgccggcacctgcggagtgctgcttctctcactcgttattacgctgtactgctaa

SEQ ID NO: 878 - DNA, 2130 bp, synthetic construct
  misc_feature 1..2130: note = Synthetic
  source 1..2130: mol_type = other DNA
atggccttaccagtgaccgccttgctcctgccgctggccttgctgctccacgccgccaggccggaggtgcagctgttggagtctgggggagacttggtacagcctggggggtccctgcgactctcctgtgcagcctctggattcacctttagcacctatgccatgacctgggtccgccaggctccagggaaggggctggagtgggtctcagctattagtggtactagtggtagcacatactacgcagactccgtgaagggccggttcaccatctccagagacaattccaagagcacgctgtatctgcacatgaacagcctgagaaccgaggacacggccgtatattactgtgcgagaggcggatataactggcactactactactacatggacgtctggggcaaagggaccacggtcaccgtctcctcaggtggaggcggttcaggcggaggtggctctggcggtggcggatcggaaattgtaatgacacagtctccagccaccctgtctttgtctccaggggaaagagccaccctctcctgcagggccagtcagagtgttagcagcagctacttatcctggtaccagcagaaacctgggctggctcccaggctcctcatctatggtgcatccaccagggccactggcatcccagccaggttcagtggcagtgggtctgggacagacttcactctcaccatcagcagcctgcagcctgaagattttgcagtttattactgtcagcaggattataacttacctccgacgttcggccaagggaccaaggtggaaatcaaaaccacgacgccagcgccgcggccaccaacaccggcgcccaccatcgcgtcgcagcccctgtccctgcgcccagaggcgtgccggccagcggcggggggcgcagtgcacacgagggggctggacttcgcctgtgatatctacatctgggcgcccttggccgggacttgtggggtccttctcctgtcactggttatcaccctttactgccggagggaccagaggctgccccccgatgcccacaagccccctgggggaggcagtttccggacccccatccaagaggagcaggccgacgcccactccaccctggccaagatcagagtgaagttcagcaggagcgcagacgcccccgcgtaccagcagggccagaaccagctctataacgagctcaatctaggacgaagagaggagtacgatgttttggacaagagacgtggccgggaccctgagatggggggaaagccgagaaggaagaaccctcaggaaggcctgtacaatgaactgcagaaagataagatggcggaggcctacagtgagattgggatgaaaggcgagcgccggaggggcaaggggcacgatggcctttaccagggtctcagtacagccaccaaggacacctacgacgcccttcacatgcaggccctgccccctcgcggctctggcgagggaaggggttccctgcttacttgcggcgacgtcgaagagaatcccggtccgatggccctcccagtaactgccctccttttgcccctcgcactccttcttcatgccgctcgccccaactgggtcaacgtgattagcgatttgaagaaaatcgaggaccttatacagtctatgcatattgacgctacactgtatactgagagtgatgtacacccgtcctgtaaggtaacggccatgaaatgctttcttctggagctccaggtcatcagcttggagtctggggacgcaagcatccacgatacggttgaaaacctcatcatccttgcgaacaactctctctcatctaatggaaacgttacagagagtgggtgtaaggagtgcgaagagttggaagaaaaaaacatcaaagaatttcttcaatccttcgttcacatagtgcaaatgttcattaacacgtccactaccacacccgccccgaggccacctacgccggcaccgactatcgccagtcaacccctctctctgcgccccgaggcttgccggcctgcggctggtggggcggtccacacccggggcctggattttgcgtgcgatatatacatctgggcacctcttgccggcacctgcggagtgctgcttctctcactcgttattacgctgtactgctaa

SEQ ID NO: 879 - DNA, 2136 bp, synthetic construct
  misc_feature 1..2136: note = Synthetic
  source 1..2136: mol_type = other DNA
atggccttaccagtgaccgccttgctcctgccgctggccttgctgctccacgccgccaggccgcaagtgcagctggtggagagcggcggaggagtggtgcaacctggccggagcctgagactgagctgcgctgccagcggcttcaccttcaacaactacgacatgtactgggtgcggcaggcccctggcaagggcctggaatgggtcgccgtgacatggtatgacggctccaacaagtactacgccgacagcgtgaagggcagattcaccatcagcagagataatagcaagaacaccctgtacctgcagatgaacagcctgcgggccgaggacaccgccgtgtactactgcgctagaggcgacaattggaacgacgagcaccattacttctactacatggacgtgtggggcaaaggcaccaccgtgaccgtgtccagcggcggcggtggatctggaggcggaggctctggaggcggcggctccgagatcgtgctgacacagtctccagatttccagtctgtgacccctaaggaaaaggttacaattacatgcagagcctctcagagcatcggaagctctctgcactggtatcagcagaaacctgatcagagccccaagctgctgatcaaattcgccagccagtccttcagcggcgtccccagccgcttcagcggcagcggcagcggcactgattttacactgaccatccacagcctggaggccgaggacgccgccacctactattgtcaccagagcagctccctgccttggacctttggccagggcacaaaggtggaaatcaagaccacgacgccagcgccgcggccaccaacaccggcgcccaccatcgcgtcgcagcccctgtccctgcgcccagaggcgtgccggccagcggcggggggcgcagtgcacacgagggggctggacttcgcctgtgatatctacatctgggcgcccttggccgggacttgtggggtccttctcctgtcactggttatcaccctttactgccggagggaccagaggctgccccccgatgcccacaagccccctgggggaggcagtttccggacccccatccaagaggagcaggccgacgcccactccaccctggccaagatcagagtgaagttcagcaggagcgcagacgcccccgcgtaccagcagggccagaaccagctctataacgagctcaatctaggacgaagagaggagtacgatgttttggacaagagacgtggccgggaccctgagatggggggaaagccgagaaggaagaaccctcaggaaggcctgtacaatgaactgcagaaagataagatggcggaggcctacagtgagattgggatgaaaggcgagcgccggaggggcaaggggcacgatggcctttaccagggtctcagtacagccaccaaggacacctacgacgcccttcacatgcaggccctgccccctcgcggctctggcgagggaaggggttccctgcttacttgcggcgacgtcgaagagaatcccggtccgatggccctcccagtaactgccctccttttgcccctcgcactccttcttcatgccgctcgccccaactgggtcaacgtgattagcgatttgaagaaaatcgaggaccttatacagtctatgcatattgacgctacactgtatactgagagtgatgtacacccgtcctgtaaggtaacggccatgaaatgctttcttctggagctccaggtcatcagcttggagtctggggacgcaagcatccacgatacggttgaaaacctcatcatccttgcgaacaactctctctcatctaatggaaacgttacagagagtgggtgtaaggagtgcgaagagttggaagaaaaaaacatcaaagaatttcttcaatccttcgttcacatagtgcaaatgttcattaacacgtccactaccacacccgccccgaggccacctacgccggcaccgactatcgccagtcaacccctctctctgcgccccgaggcttgccggcctgcggctggtggggcggtccacacccggggcctggattttgcgtgcgatatatacatctgggcacctcttgccggcacctgcggagtgctgcttctctcactcgttattacgctgtactgctaa

SEQ ID NO: 880 - DNA, 2136 bp, synthetic construct
  misc_feature 1..2136: note = Synthetic
  source 1..2136: mol_type = other DNA
atggccttaccagtgaccgccttgctcctgccgctggccttgctgctccacgccgccaggccgcaagtgcagctggtggagtctggcggcggagtggtgcaacctggaaggagcctgcggctgagctgcgctgccagcggcttcaccttcagcaattacgacatgcactgggtgcggcaggcccctggcaaaggcctggaatgggtcacaatcatctggcatgatgccagcaacaagtactacctggacagcgtcaagggcagattcacaatcagccgggacaacagcaagaacaccctgtacctgcagatgaacagcctgagagccgaggacaccgctgtgtactattgtgccagaggagataattggaacgacgagcaccactacttctactacatggacgtgtggggcaagggcaccaccgtgaccgtttctagcggcggaggcggctccggcggtggaggctccggaggcggcggctctgagatcgtgctgacacagagccctgattttcagagcgtgacacctaaagagaaggtgaccatcacctgcagagccagccagagcatcggctccagcctgcactggtatcagcagaagcccgaccagagcccaaagctgctgatcaagttcgcctcccagtctttttccggcgtgcccagcagattcagcgggagcggctctggcaccgacttcacactgaccatccactctctggaagccgaggatgccgccacctactattgccaccagagcagctctctcccttggaccttcggccagggcacaaaagtggaaattaagaccacgacgccagcgccgcggccaccaacaccggcgcccaccatcgcgtcgcagcccctgtccctgcgcccagaggcgtgccggccagcggcggggggcgcagtgcacacgagggggctggacttcgcctgtgatatctacatctgggcgcccttggccgggacttgtggggtccttctcctgtcactggttatcaccctttactgccggagggaccagaggctgccccccgatgcccacaagccccctgggggaggcagtttccggacccccatccaagaggagcaggccgacgcccactccaccctggccaagatcagagtgaagttcagcaggagcgcagacgcccccgcgtaccagcagggccagaaccagctctataacgagctcaatctaggacgaagagaggagtacgatgttttggacaagagacgtggccgggaccctgagatggggggaaagccgagaaggaagaaccctcaggaaggcctgtacaatgaactgcagaaagataagatggcggaggcctacagtgagattgggatgaaaggcgagcgccggaggggcaaggggcacgatggcctttaccagggtctcagtacagccaccaaggacacctacgacgcccttcacatgcaggccctgccccctcgcggctctggcgagggaaggggttccctgcttacttgcggcgacgtcgaagagaatcccggtccgatggccctcccagtaactgccctccttttgcccctcgcactccttcttcatgccgctcgccccaactgggtcaacgtgattagcgatttgaagaaaatcgaggaccttatacagtctatgcatattgacgctacactgtatactgagagtgatgtacacccgtcctgtaaggtaacggccatgaaatgctttcttctggagctccaggtcatcagcttggagtctggggacgcaagcatccacgatacggttgaaaacctcatcatccttgcgaacaactctctctcatctaatggaaacgttacagagagtgggtgtaaggagtgcgaagagttggaagaaaaaaacatcaaagaatttcttcaatccttcgttcacatagtgcaaatgttcattaacacgtccactaccacacccgccccgaggccacctacgccggcaccgactatcgccagtcaacccctctctctgcgccccgaggcttgccggcctgcggctggtggggcggtccacacccggggcctggattttgcgtgcgatatatacatctgggcacctcttgccggcacctgcggagtgctgcttctctcactcgttattacgctgtactgctaa

SEQ ID NO: 881 - DNA, 2136 bp, synthetic construct
  misc_feature 1..2136: note = Synthetic
  source 1..2136: mol_type = other DNA
atggccttaccagtgaccgccttgctcctgccgctggccttgctgctccacgccgccaggccgcaagtgcagctggtcgaaagcggcggaggcgtggtgcaacctggaagaagcctgagactgagctgcgccgcctctggcttcaccttttctaattacgacatgcactgggtgcggcaggcccctggcaagggtcttgagtgggttaccatcatctggcacgacggcagcaacaagtactacctggacagcgtgaagggcagatttacaatcagcagagataatagcaagaacaccctgtacctgcagatgaacagcctgcgggccgaggacaccgccgtgtactattgtgccagaggcgacaactggaacgacgagcaccactacttctactacatggacgtgtggggcaaaggcaccacagtgaccgtgtccagcggcggcggcggcagcggcggaggaggctctggcggaggcggcagcgagatcgtgctgacccagagccctgacttccagagcgtgacccctaaggaaaaggtgacaattacatgcagggccagccagtccatcggctcttctctgcattggtatcagcagaagcccgatcagtctccaaagctgctgatcaaattcgccagccagagcttcagcggagtccccagccggttcagcggatctggctccggcactgatttcaccctgaccatccacagcctggaggccgaagatgccgctacatactattgccaccagtcctccagcctgccttggacattcggccagggcaccaaggtggagatcaaaaccacgacgccagcgccgcggccaccaacaccggcgcccaccatcgcgtcgcagcccctgtccctgcgcccagaggcgtgccggccagcggcggggggcgcagtgcacacgagggggctggacttcgcctgtgatatctacatctgggcgcccttggccgggacttgtggggtccttctcctgtcactggttatcaccctttactgccggagggaccagaggctgccccccgatgcccacaagccccctgggggaggcagtttccggacccccatccaagaggagcaggccgacgcccactccaccctggccaagatcagagtgaagttcagcaggagcgcagacgcccccgcgtaccagcagggccagaaccagctctataacgagctcaatctaggacgaagagaggagtacgatgttttggacaagagacgtggccgggaccctgagatggggggaaagccgagaaggaagaaccctcaggaaggcctgtacaatgaactgcagaaagataagatggcggaggcctacagtgagattgggatgaaaggcgagcgccggaggggcaaggggcacgatggcctttaccagggtctcagtacagccaccaaggacacctacgacgcccttcacatgcaggccctgccccctcgcggctctggcgagggaaggggttccctgcttacttgcggcgacgtcgaagagaatcccggtccgatggccctcccagtaactgccctccttttgcccctcgcactccttcttcatgccgctcgccccaactgggtcaacgtgattagcgatttgaagaaaatcgaggaccttatacagtctatgcatattgacgctacactgtatactgagagtgatgtacacccgtcctgtaaggtaacggccatgaaatgctttcttctggagctccaggtcatcagcttggagtctggggacgcaagcatccacgatacggttgaaaacctcatcatccttgcgaacaactctctctcatctaatggaaacgttacagagagtgggtgtaaggagtgcgaagagttggaagaaaaaaacatcaaagaatttcttcaatccttcgttcacatagtgcaaatgttcattaacacgtccactaccacacccgccccgaggccacctacgccggcaccgactatcgccagtcaacccctctctctgcgccccgaggcttgccggcctgcggctggtggggcggtccacacccggggcctggattttgcgtgcgatatatacatctgggcacctcttgccggcacctgcggagtgctgcttctctcactcgttattacgctgtactgctaa

SEQ ID NO: 882 - DNA, 2118 bp, synthetic construct
  misc_feature 1..2118: note = Synthetic
  source 1..2118: mol_type = other DNA
atggccttaccagtgaccgccttgctcctgccgctggccttgctgctccacgccgccaggccggaggtgcagctgctggaaagcggcggcggactcgtgcaacctggcggctccctgcggctgtcttgcgccgcttctggcttcacattcagcatctacgccatgagctgggtcagacaggcccccggcaaaggcctggaatgggtgtccgccatcagcggcggcggagataccacctactacgccgacagcgtgaagggcagattcaccattagcagagataatagcaagaccacactggacctgcaaatgaacagcctgcgggccgaggacaccgccgtgtactactgtgctaagcacacctcttattacatggacgtgtggggaaaaggcacaaccgtgaccgtgtccagcggcggaggcggctctggcggcggcggcagcggcggtggcggaagccagaccgtggtgacacaggagccttctctgagcgtgagccccggcggcaccgtgaccctgacatgcggcctgagcagcggctccgtctccaccagctactatcctagctggtatcagcagacccctggccaggcccctagaaccctgatctacagcacaaacatccggagctctggagtgccagacagatttagcggaagcatcctgggcaacaaggccgccctgaccatcaccggcgcccaggctgacgacgagagtgattactactgcaagctgtacatgggctctggcatcatcttcggcagcggaacaaaggtgacagttctgaccacgacgccagcgccgcggccaccaacaccggcgcccaccatcgcgtcgcagcccctgtccctgcgcccagaggcgtgccggccagcggcggggggcgcagtgcacacgagggggctggacttcgcctgtgatatctacatctgggcgcccttggccgggacttgtggggtccttctcctgtcactggttatcaccctttactgccggagggaccagaggctgccccccgatgcccacaagccccctgggggaggcagtttccggacccccatccaagaggagcaggccgacgcccactccaccctggccaagatcagagtgaagttcagcaggagcgcagacgcccccgcgtaccagcagggccagaaccagctctataacgagctcaatctaggacgaagagaggagtacgatgttttggacaagagacgtggccgggaccctgagatggggggaaagccgagaaggaagaaccctcaggaaggcctgtacaatgaactgcagaaagataagatggcggaggcctacagtgagattgggatgaaaggcgagcgccggaggggcaaggggcacgatggcctttaccagggtctcagtacagccaccaaggacacctacgacgcccttcacatgcaggccctgccccctcgcggctctggcgagggaaggggttccctgcttacttgcggcgacgtcgaagagaatcccggtccgatggccctcccagtaactgccctccttttgcccctcgcactccttcttcatgccgctcgccccaactgggtcaacgtgattagcgatttgaagaaaatcgaggaccttatacagtctatgcatattgacgctacactgtatactgagagtgatgtacacccgtcctgtaaggtaacggccatgaaatgctttcttctggagctccaggtcatcagcttggagtctggggacgcaagcatccacgatacggttgaaaacctcatcatccttgcgaacaactctctctcatctaatggaaacgttacagagagtgggtgtaaggagtgcgaagagttggaagaaaaaaacatcaaagaatttcttcaatccttcgttcacatagtgcaaatgttcattaacacgtccactaccacacccgccccgaggccacctacgccggcaccgactatcgccagtcaacccctctctctgcgccccgaggcttgccggcctgcggctggtggggcggtccacacccggggcctggattttgcgtgcgatatatacatctgggcacctcttgccggcacctgcggagtgctgcttctctcactcgttattacgctgtactgctaa

SEQ ID NO: 883 - DNA, 2136 bp, synthetic construct
  misc_feature 1..2136: note = Synthetic
  source 1..2136: mol_type = other DNA
atggccttaccagtgaccgccttgctcctgccgctggccttgctgctccacgccgccaggccgcaagtgcagctggtggaaagcggcggtggagtggtgcaacctggcagaagcctgcggctgagctgcgccgcttctggcttcacattttctaattacgacaagcactgggtgcggcaggcccctggcaaaggcctggagtgggtcgctgtgatctggtatgacggcagcaacaagtactacgccgacagcgtgaagggcagattcaccatcagcagagacaacagcaagaacaccctgtacctgcagatgaacagcctgcgggctgaagataccgccatgtactattgtgccaggggcgataattggaacgacgagcaccactacttctactacatggacgtgtggggaaagggcaccacagtgaccgtgtccagcggcggcggcggcagcggcggcggcggcagcggcggcggcggcagcgagatcgtgctgacacagtcccctgactttcagagcgtgacccctaaggaaaaggtcacaattacatgcagagcctctcagagcatcggcagctctctgcactggtatcagcagaaacctgatcagagccccaagctgctgatcaaattcgccagccagagcttctccggcgtgccaagcagattcagcggcagcggcagcggaaccgatttcaccctgaccatccattctctggaggccgaggacgccgccacctactactgccaccagtctagcagcctgccctggaccttcggccagggcacaaaggttgagatcaagaccacgacgccagcgccgcggccaccaacaccggcgcccaccatcgcgtcgcagcccctgtccctgcgcccagaggcgtgccggccagcggcggggggcgcagtgcacacgagggggctggacttcgcctgtgatatctacatctgggcgcccttggccgggacttgtggggtccttctcctgtcactggttatcaccctttactgccggagggaccagaggctgccccccgatgcccacaagccccctgggggaggcagtttccggacccccatccaagaggagcaggccgacgcccactccaccctggccaagatcagagtgaagttcagcaggagcgcagacgcccccgcgtaccagcagggccagaaccagctctataacgagctcaatctaggacgaagagaggagtacgatgttttggacaagagacgtggccgggaccctgagatggggggaaagccgagaaggaagaaccctcaggaaggcctgtacaatgaactgcagaaagataagatggcggaggcctacagtgagattgggatgaaaggcgagcgccggaggggcaaggggcacgatggcctttaccagggtctcagtacagccaccaaggacacctacgacgcccttcacatgcaggccctgccccctcgcggctctggcgagggaaggggttccctgcttacttgcggcgacgtcgaagagaatcccggtccgatggccctcccagtaactgccctccttttgcccctcgcactccttcttcatgccgctcgccccaactgggtcaacgtgattagcgatttgaagaaaatcgaggaccttatacagtctatgcatattgacgctacactgtatactgagagtgatgtacacccgtcctgtaaggtaacggccatgaaatgctttcttctggagctccaggtcatcagcttggagtctggggacgcaagcatccacgatacggttgaaaacctcatcatccttgcgaacaactctctctcatctaatggaaacgttacagagagtgggtgtaaggagtgcgaagagttggaagaaaaaaacatcaaagaatttcttcaatccttcgttcacatagtgcaaatgttcattaacacgtccactaccacacccgccccgaggccacctacgccggcaccgactatcgccagtcaacccctctctctgcgccccgaggcttgccggcctgcggctggtggggcggtccacacccggggcctggattttgcgtgcgatatatacatctgggcacctcttgccggcacctgcggagtgctgcttctctcactcgttattacgctgtactgctaa

SEQ ID NO: 884 - DNA, 2130 bp, synthetic construct
  misc_feature 1..2130: note = Synthetic
  source 1..2130: mol_type = other DNA
atggccttaccagtgaccgccttgctcctgccgctggccttgctgctccacgccgccaggccgcaagtgcagctggtccagtctggagctgaggtgaagaagcccggcgccagcgtgaaggtgtcctgtaaagcctctggttatacattcacaaactatggcttcagctgggttagacaggcccctggacagggcctggactggatgggatggatcagcgcctacaacggctacaccaactacacccagaagctgcagggcagagtgacaatgaccacagataccagcaccaccacagcttacatggaactgaggtccctgcggagcgacgacaccgccgtgtactactgcgccagacggggcctgctgtactactactacagcatggacgtgtggggcaagggcaccaccgtgaccgtgtcttctggcggcggcggaagcggcggcggaggaagcggcggcggcggcagcgagatcgtgctgacccaatctcctgccacactgagcctctccccaggcgagcgggccaccctgagctgcggcgcttctcagagcgtgtacaatagctacctggcctggtatcagcagaaacccggcctggctcctagactgctgatctacgacgccagcctgagagccaccggcgtgcctgatagattcagcggcagcggcagcggaaccgacttcaccctgacaatcagcacactggaacccgaggattttgccgtgtactattgccagcagtacggcggcagccctatgtacacattcggccagggcaccaagctggaaatcaagaccacgacgccagcgccgcggccaccaacaccggcgcccaccatcgcgtcgcagcccctgtccctgcgcccagaggcgtgccggccagcggcggggggcgcagtgcacacgagggggctggacttcgcctgtgatatctacatctgggcgcccttggccgggacttgtggggtccttctcctgtcactggttatcaccctttactgccggagggaccagaggctgccccccgatgcccacaagccccctgggggaggcagtttccggacccccatccaagaggagcaggccgacgcccactccaccctggccaagatcagagtgaagttcagcaggagcgcagacgcccccgcgtaccagcagggccagaaccagctctataacgagctcaatctaggacgaagagaggagtacgatgttttggacaagagacgtggccgggaccctgagatggggggaaagccgagaaggaagaaccctcaggaaggcctgtacaatgaactgcagaaagataagatggcggaggcctacagtgagattgggatgaaaggcgagcgccggaggggcaaggggcacgatggcctttaccagggtctcagtacagccaccaaggacacctacgacgcccttcacatgcaggccctgccccctcgcggctctggcgagggaaggggttccctgcttacttgcggcgacgtcgaagagaatcccggtccgatggccctcccagtaactgccctccttttgcccctcgcactccttcttcatgccgctcgccccaactgggtcaacgtgattagcgatttgaagaaaatcgaggaccttatacagtctatgcatattgacgctacactgtatactgagagtgatgtacacccgtcctgtaaggtaacggccatgaaatgctttcttctggagctccaggtcatcagcttggagtctggggacgcaagcatccacgatacggttgaaaacctcatcatccttgcgaacaactctctctcatctaatggaaacgttacagagagtgggtgtaaggagtgcgaagagttggaagaaaaaaacatcaaagaatttcttcaatccttcgttcacatagtgcaaatgttcattaacacgtccactaccacacccgccccgaggccacctacgccggcaccgactatcgccagtcaacccctctctctgcgccccgaggcttgccggcctgcggctggtggggcggtccacacccggggcctggattttgcgtgcgatatatacatctgggcacctcttgccggcacctgcggagtgctgcttctctcactcgttattacgctgtactgctaa

SEQ ID NO: 885 - DNA, 2118 bp, synthetic construct
  misc_feature 1..2118: note = Synthetic
  source 1..2118: mol_type = other DNA
atggccttaccagtgaccgccttgctcctgccgctggccttgctgctccacgccgccaggccggaggtgcagctgctggaaagcggcggcggactggtgcaacctggcggctctctgcggctgtcctgtaccgccagcggcttcaccttcagcagcttcgccatgagctgggtcagacaggctccaggaaaaggcctggaatgggtgtctgccatgagcggatctggcgacaccacatactacgccgattccgtgaagggcagatttaccatcagcagagataatagcaagacaacactgtatctgcagatgaacagcctgagggccgaggacacagccgtgtacagctgcgccaagcacaccacctactacatggacgtgtggggcaaaggcaccaccgtcacagtgtccagcggcggaggcggcagcggaggcggcggcagcggcggaggaggctctcagaccgtggtgacccaggagcctagcctgtccgtgtcccctggcggcaccgtgaccctcacatgcggcctgagcagcggctcagtttccacgagcgactaccccagctggtatcagcaaacccctggacaggctcctcggaccctgatctacagaaccaacacccggagcagcggcgtgcccgatagattctctggctctatcctgggcaacaaggccgctctgaccattacaggcgcccaggccgacgacgagagcgattattactgcgtgctgtacatggacagcggcatcatcttcggctctggaacaaaggtgacagtgctgaccacgacgccagcgccgcggccaccaacaccggcgcccaccatcgcgtcgcagcccctgtccctgcgcccagaggcgtgccggccagcggcggggggcgcagtgcacacgagggggctggacttcgcctgtgatatctacatctgggcgcccttggccgggacttgtggggtccttctcctgtcactggttatcaccctttactgccggagggaccagaggctgccccccgatgcccacaagccccctgggggaggcagtttccggacccccatccaagaggagcaggccgacgcccactccaccctggccaagatcagagtgaagttcagcaggagcgcagacgcccccgcgtaccagcagggccagaaccagctctataacgagctcaatctaggacgaagagaggagtacgatgttttggacaagagacgtggccgggaccctgagatggggggaaagccgagaaggaagaaccctcaggaaggcctgtacaatgaactgcagaaagataagatggcggaggcctacagtgagattgggatgaaaggcgagcgccggaggggcaaggggcacgatggcctttaccagggtctcagtacagccaccaaggacacctacgacgcccttcacatgcaggccctgccccctcgcggctctggcgagggaaggggttccctgcttacttgcggcgacgtcgaagagaatcccggtccgatggccctcccagtaactgccctccttttgcccctcgcactccttcttcatgccgctcgccccaactgggtcaacgtgattagcgatttgaagaaaatcgaggaccttatacagtctatgcatattgacgctacactgtatactgagagtgatgtacacccgtcctgtaaggtaacggccatgaaatgctttcttctggagctccaggtcatcagcttggagtctggggacgcaagcatccacgatacggttgaaaacctcatcatccttgcgaacaactctctctcatctaatggaaacgttacagagagtgggtgtaaggagtgcgaagagttggaagaaaaaaacatcaaagaatttcttcaatccttcgttcacatagtgcaaatgttcattaacacgtccactaccacacccgccccgaggccacctacgccggcaccgactatcgccagtcaacccctctctctgcgccccgaggcttgccggcctgcggctggtggggcggtccacacccggggcctggattttgcgtgcgatatatacatctgggcacctcttgccggcacctgcggagtgctgcttctctcactcgttattacgctgtactgctaa

SEQ ID NO: 886 - DNA, 2118 bp, synthetic construct
  misc_feature 1..2118: note = Synthetic
  source 1..2118: mol_type = other DNA
atggccttaccagtgaccgccttgctcctgccgctggccttgctgctccacgccgccaggccggaggtgcagctgctggaaagcggcggcggcctggtgcaacctggcggaagtctgcggctgtcttgtgccgcttctggattcaccttcaacacctacgccatgagctgggtgcggcaggcccctggcaaaggcctggaatgggtctccgccatgagcggctctggcgacacaacctactatgccgacagcgtgaagggcagatttacaatcagcagggataacagcaagaccaccctgtacctgcagatgaacagcctccgggccgaggacaccgccgtgtacagctgcgccaagcacaccagctactacatggacgtgtggggcaaaggcaccaccgtgaccgtgtccagcggaggtggcggcagcggcggcggaggctccggcggcggaggctcacagaccgtcgtgacccaggagccttctctgagcgtgtctccaggaggcacagttactctgacatgcggcctgtctagcggcagcgtgtccaccagcgactaccccagctggtatcagcaaacacctggccaggctcctagaaccctgatctatagaacaaataccagaagcagcggcgtgcccgatagattcagcggaagcatcctgggcaacaaggccgccctgaccatcaccggcgcccaggctgacgacgagtctgattactactgcgtgctgtacatgggcagcggcatcattttcggcagcggaacaaaggtgacagtgctgaccacgacgccagcgccgcggccaccaacaccggcgcccaccatcgcgtcgcagcccctgtccctgcgcccagaggcgtgccggccagcggcggggggcgcagtgcacacgagggggctggacttcgcctgtgatatctacatctgggcgcccttggccgggacttgtggggtccttctcctgtcactggttatcaccctttactgccggagggaccagaggctgccccccgatgcccacaagccccctgggggaggcagtttccggacccccatccaagaggagcaggccgacgcccactccaccctggccaagatcagagtgaagttcagcaggagcgcagacgcccccgcgtaccagcagggccagaaccagctctataacgagctcaatctaggacgaagagaggagtacgatgttttggacaagagacgtggccgggaccctgagatggggggaaagccgagaaggaagaaccctcaggaaggcctgtacaatgaactgcagaaagataagatggcggaggcctacagtgagattgggatgaaaggcgagcgccggaggggcaaggggcacgatggcctttaccagggtctcagtacagccaccaaggacacctacgacgcccttcacatgcaggccctgccccctcgcggctctggcgagggaaggggttccctgcttacttgcggcgacgtcgaagagaatcccggtccgatggccctcccagtaactgccctccttttgcccctcgcactccttcttcatgccgctcgccccaactgggtcaacgtgattagcgatttgaagaaaatcgaggaccttatacagtctatgcatattgacgctacactgtatactgagagtgatgtacacccgtcctgtaaggtaacggccatgaaatgctttcttctggagctccaggtcatcagcttggagtctggggacgcaagcatccacgatacggttgaaaacctcatcatccttgcgaacaactctctctcatctaatggaaacgttacagagagtgggtgtaaggagtgcgaagagttggaagaaaaaaacatcaaagaatttcttcaatccttcgttcacatagtgcaaatgttcattaacacgtccactaccacacccgccccgaggccacctacgccggcaccgactatcgccagtcaacccctctctctgcgccccgaggcttgccggcctgcggctggtggggcggtccacacccggggcctggattttgcgtgcgatatatacatctgggcacctcttgccggcacctgcggagtgctgcttctctcactcgttattacgctgtactgctaa

SEQ ID NO: 887 - DNA, 2118 bp, synthetic construct
  misc_feature 1..2118: note = Synthetic
  source 1..2118: mol_type = other DNA
atggccttaccagtgaccgccttgctcctgccgctggccttgctgctccacgccgccaggccggaagtgcagctgctggaaagcggcggcgacctggtgcaacctggcggctccctgagactgagctgcgccgcttctggctttaccttcagcacctacgccatgagctgggtgcggcaggcccctggcaaaggactggagtgggtctccgccatcagcggcagcggcgagaatatctactacgctgatagcgtgaagggcagattcaccattagcagagataattctaagaacaccctgttcctgcagatgaacagcctgcgggccgaagataccgccgtgtactactgcgccaagcacacatcttactacatggacgtgtggggcaaaggcaccaccgtcacagtgtccagcggaggcggcggcagcggcggaggcggcagcggaggaggcggctcacagaccgtggtgacccaagagcccagcttctctgtgtccccaggtggcaccgtgacactgacatgcggcctgtacagcgacagcgtgtctacaagctactatcctagctggtatcagcagacacctggccaggctcctagaaccctgatctacaacaccaacacaagaagcagcggcgtgcccgaccggtttagcggaagcatcctgggcaacaaggccgccctgaccatcaccggcgcccaggccgacgacgagagcgactactattgtgtgctgtacatggtgtccggcatcgtgttcggctctggaacaaaggtgaccgttctgaccacgacgccagcgccgcggccaccaacaccggcgcccaccatcgcgtcgcagcccctgtccctgcgcccagaggcgtgccggccagcggcggggggcgcagtgcacacgagggggctggacttcgcctgtgatatctacatctgggcgcccttggccgggacttgtggggtccttctcctgtcactggttatcaccctttactgccggagggaccagaggctgccccccgatgcccacaagccccctgggggaggcagtttccggacccccatccaagaggagcaggccgacgcccactccaccctggccaagatcagagtgaagttcagcaggagcgcagacgcccccgcgtaccagcagggccagaaccagctctataacgagctcaatctaggacgaagagaggagtacgatgttttggacaagagacgtggccgggaccctgagatggggggaaagccgagaaggaagaaccctcaggaaggcctgtacaatgaactgcagaaagataagatggcggaggcctacagtgagattgggatgaaaggcgagcgccggaggggcaaggggcacgatggcctttaccagggtctcagtacagccaccaaggacacctacgacgcccttcacatgcaggccctgccccctcgcggctctggcgagggaaggggttccctgcttacttgcggcgacgtcgaagagaatcccggtccgatggccctcccagtaactgccctccttttgcccctcgcactccttcttcatgccgctcgccccaactgggtcaacgtgattagcgatttgaagaaaatcgaggaccttatacagtctatgcatattgacgctacactgtatactgagagtgatgtacacccgtcctgtaaggtaacggccatgaaatgctttcttctggagctccaggtcatcagcttggagtctggggacgcaagcatccacgatacggttgaaaacctcatcatccttgcgaacaactctctctcatctaatggaaacgttacagagagtgggtgtaaggagtgcgaagagttggaagaaaaaaacatcaaagaatttcttcaatccttcgttcacatagtgcaaatgttcattaacacgtccactaccacacccgccccgaggccacctacgccggcaccgactatcgccagtcaacccctctctctgcgccccgaggcttgccggcctgcggctggtggggcggtccacacccggggcctggattttgcgtgcgatatatacatctgggcacctcttgccggcacctgcggagtgctgcttctctcactcgttattacgctgtactgctaa

SEQ ID NO: 888 - DNA, 2136 bp, synthetic construct
  misc_feature 1..2136: note = Synthetic
  source 1..2136: mol_type = other DNA
atggccttaccagtgaccgccttgctcctgccgctggccttgctgctccacgccgccaggccgcaagtgcagctggtggaaagcggaggcggagttgtgcaacctggcagatctctgcgcctgtcatgcgccgccagcggctttacattctccagctacggcatgcactgggtgcggcaggcccctggcaaaggcctggaatgggtcgctgtgatctggtacgacggcatcaacaaatactacgccgacagcgtgaagggcagattcaccatcagcagagataatagcaagaacaccctgtacctgcagatgaacagcctgcgggccgaggacactgccgtgtactactgcgccagagagcggctggaacggagatactactactacatggacgtgtggggcaagggcaccaccgtgaccgtgtccagtggtggcggaggatctggcggaggcggctctggcggcggcggcagccagaccgtggtgacccaggagcctagcttcagcgtgtcccccggaggcacagtgaccctgacatgcggcctcagctctggctccgtcagcacctcttactatcctggatggtatcagcagacacctggccaggccccaagaaccctgatctacagcacaaacaccagaagcagcggcgtgcccgatagatttagcggcagcatcctgggcaacaaggccgccctgaccattacaggcgcccaggctgatgacgagagcgactactactgtgtgctgtacatgggcagcggcatgttcatcttcggctctggaaccaaggtgacagtgctgaccacgacgccagcgccgcggccaccaacaccggcgcccaccatcgcgtcgcagcccctgtccctgcgcccagaggcgtgccggccagcggcggggggcgcagtgcacacgagggggctggacttcgcctgtgatatctacatctgggcgcccttggccgggacttgtggggtccttctcctgtcactggttatcaccctttactgccggagggaccagaggctgccccccgatgcccacaagccccctgggggaggcagtttccggacccccatccaagaggagcaggccgacgcccactccaccctggccaagatcagagtgaagttcagcaggagcgcagacgcccccgcgtaccagcagggccagaaccagctctataacgagctcaatctaggacgaagagaggagtacgatgttttggacaagagacgtggccgggaccctgagatggggggaaagccgagaaggaagaaccctcaggaaggcctgtacaatgaactgcagaaagataagatggcggaggcctacagtgagattgggatgaaaggcgagcgccggaggggcaaggggcacgatggcctttaccagggtctcagtacagccaccaaggacacctacgacgcccttcacatgcaggccctgccccctcgcggctctggcgagggaaggggttccctgcttacttgcggcgacgtcgaagagaatcccggtccgatggccctcccagtaactgccctccttttgcccctcgcactccttcttcatgccgctcgccccaactgggtcaacgtgattagcgatttgaagaaaatcgaggaccttatacagtctatgcatattgacgctacactgtatactgagagtgatgtacacccgtcctgtaaggtaacggccatgaaatgctttcttctggagctccaggtcatcagcttggagtctggggacgcaagcatccacgatacggttgaaaacctcatcatccttgcgaacaactctctctcatctaatggaaacgttacagagagtgggtgtaaggagtgcgaagagttggaagaaaaaaacatcaaagaatttcttcaatccttcgttcacatagtgcaaatgttcattaacacgtccactaccacacccgccccgaggccacctacgccggcaccgactatcgccagtcaacccctctctctgcgccccgaggcttgccggcctgcggctggtggggcggtccacacccggggcctggattttgcgtgcgatatatacatctgggcacctcttgccggcacctgcggagtgctgcttctctcactcgttattacgctgtactgctaa

SEQ ID NO: 889 - DNA, 2118 bp, synthetic construct
  misc_feature 1..2118: note = Synthetic
  source 1..2118: mol_type = other DNA
atggccttaccagtgaccgccttgctcctgccgctggccttgctgctccacgccgccaggccggaggtgcagctgctggaatctggaggcggcctcgtgcagcctggaggcagcctgaggctgagctgcgctgcttctggcttcaccttcagcagcttcgccatgagctgggtcagacaagctcccggcaaaggcctggaatgggtgtccgccgtgtctggcagcggcgacgatacctactacgccgatagcgtgaaaggaagatttacaatcagccgggacaacagcaagaataccctgtacctgcagatgaactctctgcgggccgaggacaccgccgtgtactattgcgccaagcacaccagctactacctggacgtgtggggcaagggcaccaccgtgaccgtttccagcggcggcggcggcagcggcggaggtggaagcggcggaggcggatctcagacagtggtgacacaggagcctagcttttctgtgtcccctggcggcaccgtgacactgacatgcgccctgagctccgatagcgtgtcaacatcttacttccccagctggtatcggcagacccctggacaggcccctagaaccctgatctacaacaccaacaccagaagcagcggcgtgccagatagattcagcggctccatcctgggcaacaaggccgccctgaccattacaggcgcccaggccgacgacgagagcgactactactgtgtgctgtacatgggcagcggcatcatcttcggctctggcacaaaggtgaccgtcctgaccacgacgccagcgccgcggccaccaacaccggcgcccaccatcgcgtcgcagcccctgtccctgcgcccagaggcgtgccggccagcggcggggggcgcagtgcacacgagggggctggacttcgcctgtgatatctacatctgggcgcccttggccgggacttgtggggtccttctcctgtcactggttatcaccctttactgccggagggaccagaggctgccccccgatgcccacaagccccctgggggaggcagtttccggacccccatccaagaggagcaggccgacgcccactccaccctggccaagatcagagtgaagttcagcaggagcgcagacgcccccgcgtaccagcagggccagaaccagctctataacgagctcaatctaggacgaagagaggagtacgatgttttggacaagagacgtggccgggaccctgagatggggggaaagccgagaaggaagaaccctcaggaaggcctgtacaatgaactgcagaaagataagatggcggaggcctacagtgagattgggatgaaaggcgagcgccggaggggcaaggggcacgatggcctttaccagggtctcagtacagccaccaaggacacctacgacgcccttcacatgcaggccctgccccctcgcggctctggcgagggaaggggttccctgcttacttgcggcgacgtcgaagagaatcccggtccgatggccctcccagtaactgccctccttttgcccctcgcactccttcttcatgccgctcgccccaactgggtcaacgtgattagcgatttgaagaaaatcgaggaccttatacagtctatgcatattgacgctacactgtatactgagagtgatgtacacccgtcctgtaaggtaacggccatgaaatgctttcttctggagctccaggtcatcagcttggagtctggggacgcaagcatccacgatacggttgaaaacctcatcatccttgcgaacaactctctctcatctaatggaaacgttacagagagtgggtgtaaggagtgcgaagagttggaagaaaaaaacatcaaagaatttcttcaatccttcgttcacatagtgcaaatgttcattaacacgtccactaccacacccgccccgaggccacctacgccggcaccgactatcgccagtcaacccctctctctgcgccccgaggcttgccggcctgcggctggtggggcggtccacacccggggcctggattttgcgtgcgatatatacatctgggcacctcttgccggcacctgcggagtgctgcttctctcactcgttattacgctgtactgctaa

SEQ ID NO: 890 - DNA, 2136 bp, synthetic construct
  misc_feature 1..2136: note = Synthetic
  source 1..2136: mol_type = other DNA
atggccttaccagtgaccgccttgctcctgccgctggccttgctgctccacgccgccaggccgcaagtgcagctggtggaaagcggaggcggcgtcgtgcaacctggcagaagcctgagactgagctgcgccgccagcggctttaacttcagcaccttcgacatccactgggtgcggcaggcccctggaaaaggcctggagtgggtcgccctgatctggtatgacggcagctacaagtactacgccgatagcgttaagggcaggttcaccatcagcagagataattctaagaacaccctggacctgagaatgaacagcctccgggctgaggacaccgccgtgtactactgcgccagaaatgacaactggaacgacgagcattactatcactactacatggacgtgtggggcaagggcaccaccgtgacagtgtcctctggcggcggcggcagcggcggcggcggcagcggtggaggcggaagcgagatcgtgctgacccagtctcctgatttccagtccgtgacccctaaggaaaaggtgaccatcacctgtagagcttctcagagcatcggcagctctctgcactggtatcagcagaaacctgaccagagcccaaagctgctgatcaaattcgccagccagtccttcagcggcgtgccctcccggtttagcggctccggcagcggaacagacttcaccctgacaattaacagcctggaagccgaggatgccgccacatacttctgccaccagtcttctagcctgccctggacattcggccagggcacaaaggtggagatcaagaccacgacgccagcgccgcggccaccaacaccggcgcccaccatcgcgtcgcagcccctgtccctgcgcccagaggcgtgccggccagcggcggggggcgcagtgcacacgagggggctggacttcgcctgtgatatctacatctgggcgcccttggccgggacttgtggggtccttctcctgtcactggttatcaccctttactgccggagggaccagaggctgccccccgatgcccacaagccccctgggggaggcagtttccggacccccatccaagaggagcaggccgacgcccactccaccctggccaagatcagagtgaagttcagcaggagcgcagacgcccccgcgtaccagcagggccagaaccagctctataacgagctcaatctaggacgaagagaggagtacgatgttttggacaagagacgtggccgggaccctgagatggggggaaagccgagaaggaagaaccctcaggaaggcctgtacaatgaactgcagaaagataagatggcggaggcctacagtgagattgggatgaaaggcgagcgccggaggggcaaggggcacgatggcctttaccagggtctcagtacagccaccaaggacacctacgacgcccttcacatgcaggccctgccccctcgcggctctggcgagggaaggggttccctgcttacttgcggcgacgtcgaagagaatcccggtccgatggccctcccagtaactgccctccttttgcccctcgcactccttcttcatgccgctcgccccaactgggtcaacgtgattagcgatttgaagaaaatcgaggaccttatacagtctatgcatattgacgctacactgtatactgagagtgatgtacacccgtcctgtaaggtaacggccatgaaatgctttcttctggagctccaggtcatcagcttggagtctggggacgcaagcatccacgatacggttgaaaacctcatcatccttgcgaacaactctctctcatctaatggaaacgttacagagagtgggtgtaaggagtgcgaagagttggaagaaaaaaacatcaaagaatttcttcaatccttcgttcacatagtgcaaatgttcattaacacgtccactaccacacccgccccgaggccacctacgccggcaccgactatcgccagtcaacccctctctctgcgccccgaggcttgccggcctgcggctggtggggcggtccacacccggggcctggattttgcgtgcgatatatacatctgggcacctcttgccggcacctgcggagtgctgcttctctcactcgttattacgctgtactgctaa

SEQ ID NO: 891 - DNA, 2151 bp, synthetic construct
  misc_feature 1..2151: note = Synthetic
  source 1..2151: mol_type = other DNA
atggccttaccagtgaccgccttgctcctgccgctggccttgctgctccacgccgccaggccggaggtgcacctgctggaaagcggcggcggcctggtgcagcctggaggctctctgcggctgagctgtgccgcctctggttttaccttcagcagctacgccatgaattgggttagacaggcccctggcaagggcctggaatgggtcagcagcatcagcggctccggcagcagctcttactatgctgatagcgtgaagggcagattcaccattagcagagacaatagcaagaacaccctgtacctgcagatgaacagcctgcgggccgaggacaccgccgtgtactactgcgccagccggggcttcaactcccaataccctcctggctactactactactacatggacgtgtggggaaaaggcacgaccgtgaccgtgtcctccggcggcggcggaagcggcggcggcggctctggcggaggcggcagccagaccgtggtgacacaggagcctagcttcagcgtgtctccaggaggaacagtgaccctgacatgcggcctcagcagcggctctgtgtccaccagctatttccccagctggtatcagcagacccctggccaggctcccaggaccctgatctacatcaccaacacaagaagcagcggcgtgcccgacagattttctggcagcatcatcggcaacaaggccgctctgaccatcacaggcgcccaggccgacgacgagagtgattacttctgcgtgctgtacatgggcagcggaacatgggtgttcggcggaggcacaaagctgaccgtcctgaccacgacgccagcgccgcggccaccaacaccggcgcccaccatcgcgtcgcagcccctgtccctgcgcccagaggcgtgccggccagcggcggggggcgcagtgcacacgagggggctggacttcgcctgtgatatctacatctgggcgcccttggccgggacttgtggggtccttctcctgtcactggttatcaccctttactgccggagggaccagaggctgccccccgatgcccacaagccccctgggggaggcagtttccggacccccatccaagaggagcaggccgacgcccactccaccctggccaagatcagagtgaagttcagcaggagcgcagacgcccccgcgtaccagcagggccagaaccagctctataacgagctcaatctaggacgaagagaggagtacgatgttttggacaagagacgtggccgggaccctgagatggggggaaagccgagaaggaagaaccctcaggaaggcctgtacaatgaactgcagaaagataagatggcggaggcctacagtgagattgggatgaaaggcgagcgccggaggggcaaggggcacgatggcctttaccagggtctcagtacagccaccaaggacacctacgacgcccttcacatgcaggccctgccccctcgcggctctggcgagggaaggggttccctgcttacttgcggcgacgtcgaagagaatcccggtccgatggccctcccagtaactgccctccttttgcccctcgcactccttcttcatgccgctcgccccaactgggtcaacgtgattagcgatttgaagaaaatcgaggaccttatacagtctatgcatattgacgctacactgtatactgagagtgatgtacacccgtcctgtaaggtaacggccatgaaatgctttcttctggagctccaggtcatcagcttggagtctggggacgcaagcatccacgatacggttgaaaacctcatcatccttgcgaacaactctctctcatctaatggaaacgttacagagagtgggtgtaaggagtgcgaagagttggaagaaaaaaacatcaaagaatttcttcaatccttcgttcacatagtgcaaatgttcattaacacgtccactaccacacccgccccgaggccacctacgccggcaccgactatcgccagtcaacccctctctctgcgccccgaggcttgccggcctgcggctggtggggcggtccacacccggggcctggattttgcgtgcgatatatacatctgggcacctcttgccggcacctgcggagtgctgcttctctcactcgttattacgctgtactgctaa

SEQ ID NO: 892 - DNA, 2112 bp, synthetic construct
  misc_feature 1..2112: note = Synthetic
  source 1..2112: mol_type = other DNA
atggccttaccagtgaccgccttgctcctgccgctggccttgctgctccacgccgccaggccggaggtgcagctgctggaaagcggcggcggcctggtgcaacctggcggctccctgaggctgagctgcgccgccagcggcttcacctttagcaactacgctatgacctgggtcagacaggcccctggaaagggcctggagtgggtgtccgccatcagcggatctggtattggaacatactacgccgacagcgtgcaaggcagattcacaacaagcagagataattctaagaacaccctgtacctgcagatgaacagcctgcgggccgaggacaccgccgtgtactattgtgccaagggcggctacaactggaaggacgtgtggggcaagggaaccaccgtgaccgtttcttctggcggcggaggcagcggcggcggaggctccggaggcggaggcagcgagatcgtgctgacacagtctcccgactttcagagcgtgacccctaaagagaaggtgacaatcacctgcagagccagccagtcaatcggctctagcctgcactggtatcagcagaaacctgatcagagccctaagctgctgatcaagttcgcctctcagagcttcagcggcgtgccaagccggttcagcggctccggcagcggcaccgacttcaccctgaccatccacagcctggaggccgaagatgccgctacatactactgccaccagtccagcagcctcccctggaccttcggccagggcacaaaggtggaaatcaaaaccacgacgccagcgccgcggccaccaacaccggcgcccaccatcgcgtcgcagcccctgtccctgcgcccagaggcgtgccggccagcggcggggggcgcagtgcacacgagggggctggacttcgcctgtgatatctacatctgggcgcccttggccgggacttgtggggtccttctcctgtcactggttatcaccctttactgccggagggaccagaggctgccccccgatgcccacaagccccctgggggaggcagtttccggacccccatccaagaggagcaggccgacgcccactccaccctggccaagatcagagtgaagttcagcaggagcgcagacgcccccgcgtaccagcagggccagaaccagctctataacgagctcaatctaggacgaagagaggagtacgatgttttggacaagagacgtggccgggaccctgagatggggggaaagccgagaaggaagaaccctcaggaaggcctgtacaatgaactgcagaaagataagatggcggaggcctacagtgagattgggatgaaaggcgagcgccggaggggcaaggggcacgatggcctttaccagggtctcagtacagccaccaaggacacctacgacgcccttcacatgcaggccctgccccctcgcggctctggcgagggaaggggttccctgcttacttgcggcgacgtcgaagagaatcccggtccgatggccctcccagtaactgccctccttttgcccctcgcactccttcttcatgccgctcgccccaactgggtcaacgtgattagcgatttgaagaaaatcgaggaccttatacagtctatgcatattgacgctacactgtatactgagagtgatgtacacccgtcctgtaaggtaacggccatgaaatgctttcttctggagctccaggtcatcagcttggagtctggggacgcaagcatccacgatacggttgaaaacctcatcatccttgcgaacaactctctctcatctaatggaaacgttacagagagtgggtgtaaggagtgcgaagagttggaagaaaaaaacatcaaagaatttcttcaatccttcgttcacatagtgcaaatgttcattaacacgtccactaccacacccgccccgaggccacctacgccggcaccgactatcgccagtcaacccctctctctgcgccccgaggcttgccggcctgcggctggtggggcggtccacacccggggcctggattttgcgtgcgatatatacatctgggcacctcttgccggcacctgcggagtgctgcttctctcactcgttattacgctgtactgctaa

SEQ ID NO: 893 - DNA, 2136 bp, synthetic construct
  misc_feature 1..2136: note = Synthetic
  source 1..2136: mol_type = other DNA
atggccttaccagtgaccgccttgctcctgccgctggccttgctgctccacgccgccaggccgcaagtgcagctggtggagagcggcggcggcgtcgtgcagcccggcagaagcctgcggctgtcttgcgctgccagcggcttcacctttacaaactacgacatgcactgggtcagacaggcccctggcaaaggcctggaatgggtgaccatcatctggcacgacggctccaataagtactacctggacagcgtgcggggcagattcacgatcagcagagataattccaagaacaccctgtacctgcagatgaacagcctgagagccgaggacaccgccgtgtactattgcgccagaggcgacaactggaacgacgagcaccactacttctactacatggacgtgtggggcaagggcaccaccgtgaccgtgtccagcggcggaggcggctccggaggaggcggctctggtggcggcggcagcgagatcgtgctgacccagagccctgacttccagtctgtgacacctaaggaaaaggtgacaatcacctgtagggccagccaaagcatcggcagcagcctgcattggtatcagcagaagcccgatcagtctccaaagctgctgatcaaattcgccagccagagcttcagcggagttcctagccggttcagcggctctggcagcggaacagatttcaccctgacaattcactctctggaggccgaggatgccgccacatattactgccaccagtctagcagcctgccttggacctttggacagggcaccaaggtggaaatcaagaccacgacgccagcgccgcggccaccaacaccggcgcccaccatcgcgtcgcagcccctgtccctgcgcccagaggcgtgccggccagcggcggggggcgcagtgcacacgagggggctggacttcgcctgtgatatctacatctgggcgcccttggccgggacttgtggggtccttctcctgtcactggttatcaccctttactgccggagggaccagaggctgccccccgatgcccacaagccccctgggggaggcagtttccggacccccatccaagaggagcaggccgacgcccactccaccctggccaagatcagagtgaagttcagcaggagcgcagacgcccccgcgtaccagcagggccagaaccagctctataacgagctcaatctaggacgaagagaggagtacgatgttttggacaagagacgtggccgggaccctgagatggggggaaagccgagaaggaagaaccctcaggaaggcctgtacaatgaactgcagaaagataagatggcggaggcctacagtgagattgggatgaaaggcgagcgccggaggggcaaggggcacgatggcctttaccagggtctcagtacagccaccaaggacacctacgacgcccttcacatgcaggccctgccccctcgcggctctggcgagggaaggggttccctgcttacttgcggcgacgtcgaagagaatcccggtccgatggccctcccagtaactgccctccttttgcccctcgcactccttcttcatgccgctcgccccaactgggtcaacgtgattagcgatttgaagaaaatcgaggaccttatacagtctatgcatattgacgctacactgtatactgagagtgatgtacacccgtcctgtaaggtaacggccatgaaatgctttcttctggagctccaggtcatcagcttggagtctggggacgcaagcatccacgatacggttgaaaacctcatcatccttgcgaacaactctctctcatctaatggaaacgttacagagagtgggtgtaaggagtgcgaagagttggaagaaaaaaacatcaaagaatttcttcaatccttcgttcacatagtgcaaatgttcattaacacgtccactaccacacccgccccgaggccacctacgccggcaccgactatcgccagtcaacccctctctctgcgccccgaggcttgccggcctgcggctggtggggcggtccacacccggggcctggattttgcgtgcgatatatacatctgggcacctcttgccggcacctgcggagtgctgcttctctcactcgttattacgctgtactgctaa

SEQ ID NO: 894 - DNA, 2136 bp, synthetic construct
  misc_feature 1..2136: note = Synthetic
  source 1..2136: mol_type = other DNA
atggccttaccagtgaccgccttgctcctgccgctggccttgctgctccacgccgccaggccgcaggtgcagctggttgagagcggcggaggcgtggtgcaacctggaagatctctgcgcctgagctgcgccgccagcggcttcaccttcagcaactacgatatgcactgggtgcggcaggcccctggcaagggcctggaatgggtcaccattatctggcatgacggcagcaacaagtactacctggacagcgtgaaaggcagattcaccatcagcagagacaatagcaagaacaccctgtacctgcagatgaacagcctgcgggccgaggacaccgccgtgtactattgcgccagaggcgacaactggaacgacgagcaccactacttctactatatggacgtgtggggcaaaggcacaaccgtgaccgtcagcagcggcggcggaggcagcggaggcggaggctctggcggcggtggcagtgaaatcgtgctgacccagagccccgctacactgagcctctcccctggcgagcgggccacactgtcttgtagagcctctcagtccgtgtccagcagcctggcctggtatcagcagaagcccggccaggctccaagactgctgatctacgacgccagcaatagagccaccggcatccccgcccggttttccggcagcggatctggaacagattttaccctgaccatcagcagcctggaacctgaggatttcgccgtgtactactgccagcaaagaagcaactggcctctgacattcggcggcggcacaaaggtggaaatcaagaccacgacgccagcgccgcggccaccaacaccggcgcccaccatcgcgtcgcagcccctgtccctgcgcccagaggcgtgccggccagcggcggggggcgcagtgcacacgagggggctggacttcgcctgtgatatctacatctgggcgcccttggccgggacttgtggggtccttctcctgtcactggttatcaccctttactgccggagggaccagaggctgccccccgatgcccacaagccccctgggggaggcagtttccggacccccatccaagaggagcaggccgacgcccactccaccctggccaagatcagagtgaagttcagcaggagcgcagacgcccccgcgtaccagcagggccagaaccagctctataacgagctcaatctaggacgaagagaggagtacgatgttttggacaagagacgtggccgggaccctgagatggggggaaagccgagaaggaagaaccctcaggaaggcctgtacaatgaactgcagaaagataagatggcggaggcctacagtgagattgggatgaaaggcgagcgccggaggggcaaggggcacgatggcctttaccagggtctcagtacagccaccaaggacacctacgacgcccttcacatgcaggccctgccccctcgcggctctggcgagggaaggggttccctgcttacttgcggcgacgtcgaagagaatcccggtccgatggccctcccagtaactgccctccttttgcccctcgcactccttcttcatgccgctcgccccaactgggtcaacgtgattagcgatttgaagaaaatcgaggaccttatacagtctatgcatattgacgctacactgtatactgagagtgatgtacacccgtcctgtaaggtaacggccatgaaatgctttcttctggagctccaggtcatcagcttggagtctggggacgcaagcatccacgatacggttgaaaacctcatcatccttgcgaacaactctctctcatctaatggaaacgttacagagagtgggtgtaaggagtgcgaagagttggaagaaaaaaacatcaaagaatttcttcaatccttcgttcacatagtgcaaatgttcattaacacgtccactaccacacccgccccgaggccacctacgccggcaccgactatcgccagtcaacccctctctctgcgccccgaggcttgccggcctgcggctggtggggcggtccacacccggggcctggattttgcgtgcgatatatacatctgggcacctcttgccggcacctgcggagtgctgcttctctcactcgttattacgctgtactgctaa

SEQ ID NO: 895 - DNA, 2124 bp, synthetic construct
  misc_feature 1..2124: note = Synthetic
  source 1..2124: mol_type = other DNA
atggccttaccagtgaccgccttgctcctgccgctggccttgctgctccacgccgccaggccggaagtgcagctggtcgagagcggcggcggcgtggtgcggcctggcgggtccctgagactgagctgcgccgcctctggcttcaccttcgacgactatggcatgagctgggtcagacaggcccctggaaaaggcctggaatgggtgtccggaatcaactggaatggcggcagtacaggctacgtggacagcgtgaagggcagattcaccatcagccgggacaacgccaagaacagcctgtatctgcagatgaacagcctgcgggccgaggacaccgccctgtaccactgtgccagacctgtgacaaccgactactactactacatggacgtgtggggcaagggcaccaccgtgaccgtgtcttccggcggaggaggcagcggcggcggcggcagcggcggaggcggcagcgagatcgtgctgacacagagccccggaacactgagcctgagccctggcgagcgggctacactgtcttgcagagcttctcagagcgtttcctccagctacctggcctggtatcagcaaaagcccggccaagctccaagactgctgatctacggcgccagctctagggccaccggcattcctgatagattcagcggctctggcagcggaacagattttaccctgaccatcagcagactggagcctgaggatttcgccgtgtactactgccagcagtacggatctagctggacctttggccagggcaccaaggtggaaatcaaaaccacgacgccagcgccgcggccaccaacaccggcgcccaccatcgcgtcgcagcccctgtccctgcgcccagaggcgtgccggccagcggcggggggcgcagtgcacacgagggggctggacttcgcctgtgatatctacatctgggcgcccttggccgggacttgtggggtccttctcctgtcactggttatcaccctttactgccggagggaccagaggctgccccccgatgcccacaagccccctgggggaggcagtttccggacccccatccaagaggagcaggccgacgcccactccaccctggccaagatcagagtgaagttcagcaggagcgcagacgcccccgcgtaccagcagggccagaaccagctctataacgagctcaatctaggacgaagagaggagtacgatgttttggacaagagacgtggccgggaccctgagatggggggaaagccgagaaggaagaaccctcaggaaggcctgtacaatgaactgcagaaagataagatggcggaggcctacagtgagattgggatgaaaggcgagcgccggaggggcaaggggcacgatggcctttaccagggtctcagtacagccaccaaggacacctacgacgcccttcacatgcaggccctgccccctcgcggctctggcgagggaaggggttccctgcttacttgcggcgacgtcgaagagaatcccggtccgatggccctcccagtaactgccctccttttgcccctcgcactccttcttcatgccgctcgccccaactgggtcaacgtgattagcgatttgaagaaaatcgaggaccttatacagtctatgcatattgacgctacactgtatactgagagtgatgtacacccgtcctgtaaggtaacggccatgaaatgctttcttctggagctccaggtcatcagcttggagtctggggacgcaagcatccacgatacggttgaaaacctcatcatccttgcgaacaactctctctcatctaatggaaacgttacagagagtgggtgtaaggagtgcgaagagttggaagaaaaaaacatcaaagaatttcttcaatccttcgttcacatagtgcaaatgttcattaacacgtccactaccacacccgccccgaggccacctacgccggcaccgactatcgccagtcaacccctctctctgcgccccgaggcttgccggcctgcggctggtggggcggtccacacccggggcctggattttgcgtgcgatatatacatctgggcacctcttgccggcacctgcggagtgctgcttctctcactcgttattacgctgtactgctaa

SEQ ID NO: 896 - DNA, 2148 bp, synthetic construct
  misc_feature 1..2148: note = Synthetic
  source 1..2148: mol_type = other DNA
atggccttaccagtgaccgccttgctcctgccgctggccttgctgctccacgccgccaggccggaggtgcagctgctggagagcggaggaggcctggtgcaacctggcggcagcctgcggctgagctgcgccgcttccggcttcaccttcagcagctacgccatgagctgggtgcggcaggctcctggaaaaggcctggagtgggtcagcgccatcagcggcagcggaggctcaacatactacgccgacagcgtgaagggcagattcaccatcagccgcgacaactctaagaacaccctgtacctgcagatgaactctctgagagccgaggacaccgccgtgtactattgtgccaagaagggcacaagctacaactggaatgatgtgcactactactactactattatatggacgtgtggggcaaaggcacaaccgtgaccgtgtccagcggcggtggaggcagcggaggcggcggaagcggcggcggcggcagtgaaattgtgctgacccagagccccggcaccctgagcctgtctccaggcgagcgggctaccctgtcctgcagagccagccagtctgtttccagctcttacctggcctggtatcagcaaaagcctggacaggcccctagactgctgatctacggcgcctctagcagggctacaggcatccctgatagatttagcggcagcggctctggcaccgacttcaccctgaccatctccagactggaacccgaggatttcgccgtgtactactgccagcagtacggcagcagctggacatttggccagggcacaaaggtggaaatcaagaccacgacgccagcgccgcggccaccaacaccggcgcccaccatcgcgtcgcagcccctgtccctgcgcccagaggcgtgccggccagcggcggggggcgcagtgcacacgagggggctggacttcgcctgtgatatctacatctgggcgcccttggccgggacttgtggggtccttctcctgtcactggttatcaccctttactgccggagggaccagaggctgccccccgatgcccacaagccccctgggggaggcagtttccggacccccatccaagaggagcaggccgacgcccactccaccctggccaagatcagagtgaagttcagcaggagcgcagacgcccccgcgtaccagcagggccagaaccagctctataacgagctcaatctaggacgaagagaggagtacgatgttttggacaagagacgtggccgggaccctgagatggggggaaagccgagaaggaagaaccctcaggaaggcctgtacaatgaactgcagaaagataagatggcggaggcctacagtgagattgggatgaaaggcgagcgccggaggggcaaggggcacgatggcctttaccagggtctcagtacagccaccaaggacacctacgacgcccttcacatgcaggccctgccccctcgcggctctggcgagggaaggggttccctgcttacttgcggcgacgtcgaagagaatcccggtccgatggccctcccagtaactgccctccttttgcccctcgcactccttcttcatgccgctcgccccaactgggtcaacgtgattagcgatttgaagaaaatcgaggaccttatacagtctatgcatattgacgctacactgtatactgagagtgatgtacacccgtcctgtaaggtaacggccatgaaatgctttcttctggagctccaggtcatcagcttggagtctggggacgcaagcatccacgatacggttgaaaacctcatcatccttgcgaacaactctctctcatctaatggaaacgttacagagagtgggtgtaaggagtgcgaagagttggaagaaaaaaacatcaaagaatttcttcaatccttcgttcacatagtgcaaatgttcattaacacgtccactaccacacccgccccgaggccacctacgccggcaccgactatcgccagtcaacccctctctctgcgccccgaggcttgccggcctgcggctggtggggcggtccacacccggggcctggattttgcgtgcgatatatacatctgggcacctcttgccggcacctgcggagtgctgcttctctcactcgttattacgctgtactgctaa

SEQ ID NO: 897 - DNA, 2130 bp, synthetic construct
  misc_feature 1..2130: note = Synthetic
  source 1..2130: mol_type = other DNA
atggccttaccagtgaccgccttgctcctgccgctggccttgctgctccacgccgccaggccgcagctgcaactgcaggagagcggtcctggactggtgaagccttctgagacactgagcctgacctgcaccgtgtccggcggctctatcagctcctccagctactactggggctggatcagacagccacctggcaagggcctggaatggatcggcagcatttactattctggctcaacatactacaaccccagccttaaaagcagagtgacaatcagcgtggacaccagcaagaaccagttcagcctgaagctgtcctctgtgaccgccgctgatactgccgtttactactgcaccaccggaacaacagcttattactactactactacatggacgtgtggggaaagggcaccacagtgaccgtgtccagcggcggaggcggcagcggcggaggaggatctggcggcggcggcagcgagatcgtgctgacccagtctccaggcaccctgagcctgagccccggcgagcgggccacactgagctgcagagcctctcagagcgtcagctctagctacctggcctggtatcagcaaaaacctggccaggcccctagactgctgatctacggcgccagcagccgggccaccggcatccctgatagattcagcggatctggcagcggcaccgactttaccctcaccatcagcagactggaacccgaggacttcgccgtgtactattgtcagcagtacggcagcagctggacattcggccagggcaccaaggtggaaatcaagaccacgacgccagcgccgcggccaccaacaccggcgcccaccatcgcgtcgcagcccctgtccctgcgcccagaggcgtgccggccagcggcggggggcgcagtgcacacgagggggctggacttcgcctgtgatatctacatctgggcgcccttggccgggacttgtggggtccttctcctgtcactggttatcaccctttactgccggagggaccagaggctgccccccgatgcccacaagccccctgggggaggcagtttccggacccccatccaagaggagcaggccgacgcccactccaccctggccaagatcagagtgaagttcagcaggagcgcagacgcccccgcgtaccagcagggccagaaccagctctataacgagctcaatctaggacgaagagaggagtacgatgttttggacaagagacgtggccgggaccctgagatggggggaaagccgagaaggaagaaccctcaggaaggcctgtacaatgaactgcagaaagataagatggcggaggcctacagtgagattgggatgaaaggcgagcgccggaggggcaaggggcacgatggcctttaccagggtctcagtacagccaccaaggacacctacgacgcccttcacatgcaggccctgccccctcgcggctctggcgagggaaggggttccctgcttacttgcggcgacgtcgaagagaatcccggtccgatggccctcccagtaactgccctccttttgcccctcgcactccttcttcatgccgctcgccccaactgggtcaacgtgattagcgatttgaagaaaatcgaggaccttatacagtctatgcatattgacgctacactgtatactgagagtgatgtacacccgtcctgtaaggtaacggccatgaaatgctttcttctggagctccaggtcatcagcttggagtctggggacgcaagcatccacgatacggttgaaaacctcatcatccttgcgaacaactctctctcatctaatggaaacgttacagagagtgggtgtaaggagtgcgaagagttggaagaaaaaaacatcaaagaatttcttcaatccttcgttcacatagtgcaaatgttcattaacacgtccactaccacacccgccccgaggccacctacgccggcaccgactatcgccagtcaacccctctctctgcgccccgaggcttgccggcctgcggctggtggggcggtccacacccggggcctggattttgcgtgcgatatatacatctgggcacctcttgccggcacctgcggagtgctgcttctctcactcgttattacgctgtactgctaa

SEQ ID NO: 898 - DNA, 2127 bp, synthetic construct
  misc_feature 1..2127: note = Synthetic
  source 1..2127: mol_type = other DNA
atggccttaccagtgaccgccttgctcctgccgctggccttgctgctccacgccgccaggccggaggtgcagctgctggagagcggtggaggcctggtgcaacctggcggctccctgcggctgagctgcgccgccagcggcttcacctttagctcttacgccatgacctgggtcagacaggcccctggcaagggactggaatgggtgtctgccatcagcggcagcggaggatctacatactacgctgatagcgtgaagggcagatttacaatcagccgcgacaatagcaagaacaccctgtacctgcagatgaacagcctgagagccgaggacaccgccgtgtactactgcgctagaggcggctacaactggcactactactactacatggacgtgtggggcaaaggaaccaccgtgaccgtgtccagcggcggcggcggctctggcggaggcggctctggcggcggcggaagcgagatcgtgctgacccagtctcccggaacactctccctgtccccaggcgagcgggctacactgagctgccgggccagccagagcgtgtcctcgtcttatctggcctggtatcagcagaaacctggccaagcccctagactgctgatctacggcgccagcagccgggccacaggcatccccgatagattcagcggcagcggaagcggcaccgacttcaccctgacaatcagcagactggaacctgaggacttcgccgtgtactattgtcagcagtacggcagcagctggaccttcggccagggcaccaaggttgaaattaagaccacgacgccagcgccgcggccaccaacaccggcgcccaccatcgcgtcgcagcccctgtccctgcgcccagaggcgtgccggccagcggcggggggcgcagtgcacacgagggggctggacttcgcctgtgatatctacatctgggcgcccttggccgggacttgtggggtccttctcctgtcactggttatcaccctttactgccggagggaccagaggctgccccccgatgcccacaagccccctgggggaggcagtttccggacccccatccaagaggagcaggccgacgcccactccaccctggccaagatcagagtgaagttcagcaggagcgcagacgcccccgcgtaccagcagggccagaaccagctctataacgagctcaatctaggacgaagagaggagtacgatgttttggacaagagacgtggccgggaccctgagatggggggaaagccgagaaggaagaaccctcaggaaggcctgtacaatgaactgcagaaagataagatggcggaggcctacagtgagattgggatgaaaggcgagcgccggaggggcaaggggcacgatggcctttaccagggtctcagtacagccaccaaggacacctacgacgcccttcacatgcaggccctgccccctcgcggctctggcgagggaaggggttccctgcttacttgcggcgacgtcgaagagaatcccggtccgatggccctcccagtaactgccctccttttgcccctcgcactccttcttcatgccgctcgccccaactgggtcaacgtgattagcgatttgaagaaaatcgaggaccttatacagtctatgcatattgacgctacactgtatactgagagtgatgtacacccgtcctgtaaggtaacggccatgaaatgctttcttctggagctccaggtcatcagcttggagtctggggacgcaagcatccacgatacggttgaaaacctcatcatccttgcgaacaactctctctcatctaatggaaacgttacagagagtgggtgtaaggagtgcgaagagttggaagaaaaaaacatcaaagaatttcttcaatccttcgttcacatagtgcaaatgttcattaacacgtccactaccacacccgccccgaggccacctacgccggcaccgactatcgccagtcaacccctctctctgcgccccgaggcttgccggcctgcggctggtggggcggtccacacccggggcctggattttgcgtgcgatatatacatctgggcacctcttgccggcacctgcggagtgctgcttctctcactcgttattacgctgtactgctaa

SEQ ID NO: 899 - DNA, 2139 bp, synthetic construct
  misc_feature 1..2139: note = Synthetic
  source 1..2139: mol_type = other DNA
atggccttaccagtgaccgccttgctcctgccgctggccttgctgctccacgccgccaggccgcaagtgcagctggtggagagcggaggcggagtcgtgcaacctggcagaagcctgagactgagctgcgccgcttctggcttcaccttttctagctacgacatgcactgggtgcggcaggcccctggaaaaggcctggaatgggtcagcgtgatctggtatgacggctccaacaagaagtacggcgacagcgccaagggcaggttcaccattagccgggacaattctaagaacaccctggacctgcagatgaacagcctgcgggctgaggacaccgccgtgtactattgtgccagaggcgataattggaacgacgagggcggctactactactactacatggacgtgtggggcaagggaacaaccgtgacagtgtccagcggcggcggcggaagcggcggcggcggatctggcggaggcggcagcgagatcgtgctgacccagagccccgacttccagtccgtgacccctaaggaaaaggtgaccatcacatgcagagccagccagaacatcggcagcagcctgcactggtatcagcagaaacctgatcagtctccaaagctgctgatcaaattcgcctctcagagcatcagcggtgttcctagcagattcagcggctccggcagcggcactgattttacactgaccatcaacagcctggaggccgaggatgccgctgcctactactgccaccagagctctagcctgccctggaccttcggccagggcacaaaggtggaaatcaagaccacgacgccagcgccgcggccaccaacaccggcgcccaccatcgcgtcgcagcccctgtccctgcgcccagaggcgtgccggccagcggcggggggcgcagtgcacacgagggggctggacttcgcctgtgatatctacatctgggcgcccttggccgggacttgtggggtccttctcctgtcactggttatcaccctttactgccggagggaccagaggctgccccccgatgcccacaagccccctgggggaggcagtttccggacccccatccaagaggagcaggccgacgcccactccaccctggccaagatcagagtgaagttcagcaggagcgcagacgcccccgcgtaccagcagggccagaaccagctctataacgagctcaatctaggacgaagagaggagtacgatgttttggacaagagacgtggccgggaccctgagatggggggaaagccgagaaggaagaaccctcaggaaggcctgtacaatgaactgcagaaagataagatggcggaggcctacagtgagattgggatgaaaggcgagcgccggaggggcaaggggcacgatggcctttaccagggtctcagtacagccaccaaggacacctacgacgcccttcacatgcaggccctgccccctcgcggctctggcgagggaaggggttccctgcttacttgcggcgacgtcgaagagaatcccggtccgatggccctcccagtaactgccctccttttgcccctcgcactccttcttcatgccgctcgccccaactgggtcaacgtgattagcgatttgaagaaaatcgaggaccttatacagtctatgcatattgacgctacactgtatactgagagtgatgtacacccgtcctgtaaggtaacggccatgaaatgctttcttctggagctccaggtcatcagcttggagtctggggacgcaagcatccacgatacggttgaaaacctcatcatccttgcgaacaactctctctcatctaatggaaacgttacagagagtgggtgtaaggagtgcgaagagttggaagaaaaaaacatcaaagaatttcttcaatccttcgttcacatagtgcaaatgttcattaacacgtccactaccacacccgccccgaggccacctacgccggcaccgactatcgccagtcaacccctctctctgcgccccgaggcttgccggcctgcggctggtggggcggtccacacccggggcctggattttgcgtgcgatatatacatctgggcacctcttgccggcacctgcggagtgctgcttctctcactcgttattacgctgtactgctaa

SEQ ID NO: 900 - DNA, 2139 bp, synthetic construct
  misc_feature 1..2139: note = Synthetic
  source 1..2139: mol_type = other DNA
atggccttaccagtgaccgccttgctcctgccgctggccttgctgctccacgccgccaggccgcaagtgcagctggtggagagcggcggcggcgtggtgcagcccggacgctccctgcggctgagctgcgccgccagcggctttaccttctctagctacgatatgcactgggtcagacaggctcctggcaaaggcctggaatgggtgtccgtgatctggtacgacggctccaacaagaagtacggcgacagcgccaagggcagattcaccatctctcgggacaatagcaagaacacactggacctgcagatgaactctctgagagccgaggacaccgccgtgtactactgcgccagaggcgataattggaacgacgagggcggttattactactactatatggacgtgtggggaaaaggcacaaccgtgaccgtttccagcggcggaggcggcagcggcggcggcggatctggcggaggcggcagcgacattcagatgacacagagccccagcagcctctccacctctgtgggcgatagagtgaccatcacatgccgggccagccagggcatcagcaactacctggcctggttccagcagaagcctggaaaggcccctaagagcctgatctacgccgccagcagcctgcagagcggagtgccatctaagttcagcggcagcggatctggcaccgacttcagcctgaccatcagctctctgcagcctgaggattttgccacatactactgtcagcagtacaacagctaccctatcacattcggccagggcaccagactggaaatcaagaccacgacgccagcgccgcggccaccaacaccggcgcccaccatcgcgtcgcagcccctgtccctgcgcccagaggcgtgccggccagcggcggggggcgcagtgcacacgagggggctggacttcgcctgtgatatctacatctgggcgcccttggccgggacttgtggggtccttctcctgtcactggttatcaccctttactgccggagggaccagaggctgccccccgatgcccacaagccccctgggggaggcagtttccggacccccatccaagaggagcaggccgacgcccactccaccctggccaagatcagagtgaagttcagcaggagcgcagacgcccccgcgtaccagcagggccagaaccagctctataacgagctcaatctaggacgaagagaggagtacgatgttttggacaagagacgtggccgggaccctgagatggggggaaagccgagaaggaagaaccctcaggaaggcctgtacaatgaactgcagaaagataagatggcggaggcctacagtgagattgggatgaaaggcgagcgccggaggggcaaggggcacgatggcctttaccagggtctcagtacagccaccaaggacacctacgacgcccttcacatgcaggccctgccccctcgcggctctggcgagggaaggggttccctgcttacttgcggcgacgtcgaagagaatcccggtccgatggccctcccagtaactgccctccttttgcccctcgcactccttcttcatgccgctcgccccaactgggtcaacgtgattagcgatttgaagaaaatcgaggaccttatacagtctatgcatattgacgctacactgtatactgagagtgatgtacacccgtcctgtaaggtaacggccatgaaatgctttcttctggagctccaggtcatcagcttggagtctggggacgcaagcatccacgatacggttgaaaacctcatcatccttgcgaacaactctctctcatctaatggaaacgttacagagagtgggtgtaaggagtgcgaagagttggaagaaaaaaacatcaaagaatttcttcaatccttcgttcacatagtgcaaatgttcattaacacgtccactaccacacccgccccgaggccacctacgccggcaccgactatcgccagtcaacccctctctctgcgccccgaggcttgccggcctgcggctggtggggcggtccacacccggggcctggattttgcgtgcgatatatacatctgggcacctcttgccggcacctgcggagtgctgcttctctcactcgttattacgctgtactgctaa

SEQ ID NO: 901 - DNA, 2130 bp, synthetic construct
  misc_feature 1..2130: note = Synthetic
  source 1..2130: mol_type = other DNA
atggccttaccagtgaccgccttgctcctgccgctggccttgctgctccacgccgccaggccgcaagtgcagctggtgcagtctggagccgaggtgaaaaagagcggcgcctcagtgaaggtgtcctgcaaggccagcggctacacactgaccagctacggcatctcttgggttagacaggcccctggacaaggcctggaatggatgggctggatcagcgcctacaacggcaacatcaactacgcccagaaattccagggcagagtgacaatgaccacagacaccagcacctccaccgcttacatggaactgcggagcctgagaagcgacgacaccgccgtgtactactgtgtgcgggacggcgatagatacaattggaaccacagctatatggacgtgtggggcaagggcacaacagtcaccgtgtcttctggaggcggaggcagcggaggcggcggcagcggcggcggcggcagcgagatcgtgctgacacagagccctgatttccaaagcgtgacccctaaggaaaaggtgaccatcacatgcagagcctctcagaacattggaagtagcctgcactggtatcagcagaaacccgatcagtccccaaagctgctgatcaagttcgccagccagagcatcagcggagtgcccagccggttcagcggctctggctctggcaccgacttcaccctgaccatcaatagcctggaggccgaggacgccgctgcttattactgccaccagagcagctccctgccttggacctttggccagggcaccaaggtcgagatcaagaccacgacgccagcgccgcggccaccaacaccggcgcccaccatcgcgtcgcagcccctgtccctgcgcccagaggcgtgccggccagcggcggggggcgcagtgcacacgagggggctggacttcgcctgtgatatctacatctgggcgcccttggccgggacttgtggggtccttctcctgtcactggttatcaccctttactgccggagggaccagaggctgccccccgatgcccacaagccccctgggggaggcagtttccggacccccatccaagaggagcaggccgacgcccactccaccctggccaagatcagagtgaagttcagcaggagcgcagacgcccccgcgtaccagcagggccagaaccagctctataacgagctcaatctaggacgaagagaggagtacgatgttttggacaagagacgtggccgggaccctgagatggggggaaagccgagaaggaagaaccctcaggaaggcctgtacaatgaactgcagaaagataagatggcggaggcctacagtgagattgggatgaaaggcgagcgccggaggggcaaggggcacgatggcctttaccagggtctcagtacagccaccaaggacacctacgacgcccttcacatgcaggccctgccccctcgcggctctggcgagggaaggggttccctgcttacttgcggcgacgtcgaagagaatcccggtccgatggccctcccagtaactgccctccttttgcccctcgcactccttcttcatgccgctcgccccaactgggtcaacgtgattagcgatttgaagaaaatcgaggaccttatacagtctatgcatattgacgctacactgtatactgagagtgatgtacacccgtcctgtaaggtaacggccatgaaatgctttcttctggagctccaggtcatcagcttggagtctggggacgcaagcatccacgatacggttgaaaacctcatcatccttgcgaacaactctctctcatctaatggaaacgttacagagagtgggtgtaaggagtgcgaagagttggaagaaaaaaacatcaaagaatttcttcaatccttcgttcacatagtgcaaatgttcattaacacgtccactaccacacccgccccgaggccacctacgccggcaccgactatcgccagtcaacccctctctctgcgccccgaggcttgccggcctgcggctggtggggcggtccacacccggggcctggattttgcgtgcgatatatacatctgggcacctcttgccggcacctgcggagtgctgcttctctcactcgttattacgctgtactgctaa

SEQ ID NO: 902 - DNA, 2130 bp, synthetic construct
  misc_feature 1..2130: note = Synthetic
  source 1..2130: mol_type = other DNA
atggccttaccagtgaccgccttgctcctgccgctggccttgctgctccacgccgccaggccgcaagtgcagctggttcagagcggagccgaggtgaaaaagtccggcgccagcgtgaaggtgtcatgcaaggcctctggctacaccctgacctcctacggcatcagctgggtccggcaggcccctggccagggcctggagtggatgggctggatcagcgcttataatggcaacatcaattacgcccagaagttccaaggcagagtgacaatgaccacagataccagcaccagcacagcttacatggaactgagatccctgcggagcgacgacaccgccgtgtactattgtgtgcgggacggcgacagatacaactggaaccacagctacatggacgtgtggggcaagggcaccaccgtgaccgtgtccagcggcggcggcggctctggaggcggcggatctggcggaggaggttccgacatccagatgacacagagccccagcagcctgagcacctctgtgggcgatagagtgaccatcacctgcagagccagccagggcatcagcaactacctggcctggttccagcagaaacctggaaaggcccctaagagcctgatctacgccgcttcttctctgcaaagcggcgtgccaagcaagttcagcggcagcggcagcggaacagacttcagcctgacaatttctagcctccagcctgaggattttgccacatactactgccagcagtacaacagctaccccatcaccttcggccagggcacaagactggaaatcaagaccacgacgccagcgccgcggccaccaacaccggcgcccaccatcgcgtcgcagcccctgtccctgcgcccagaggcgtgccggccagcggcggggggcgcagtgcacacgagggggctggacttcgcctgtgatatctacatctgggcgcccttggccgggacttgtggggtccttctcctgtcactggttatcaccctttactgccggagggaccagaggctgccccccgatgcccacaagccccctgggggaggcagtttccggacccccatccaagaggagcaggccgacgcccactccaccctggccaagatcagagtgaagttcagcaggagcgcagacgcccccgcgtaccagcagggccagaaccagctctataacgagctcaatctaggacgaagagaggagtacgatgttttggacaagagacgtggccgggaccctgagatggggggaaagccgagaaggaagaaccctcaggaaggcctgtacaatgaactgcagaaagataagatggcggaggcctacagtgagattgggatgaaaggcgagcgccggaggggcaaggggcacgatggcctttaccagggtctcagtacagccaccaaggacacctacgacgcccttcacatgcaggccctgccccctcgcggctctggcgagggaaggggttccctgcttacttgcggcgacgtcgaagagaatcccggtccgatggccctcccagtaactgccctccttttgcccctcgcactccttcttcatgccgctcgccccaactgggtcaacgtgattagcgatttgaagaaaatcgaggaccttatacagtctatgcatattgacgctacactgtatactgagagtgatgtacacccgtcctgtaaggtaacggccatgaaatgctttcttctggagctccaggtcatcagcttggagtctggggacgcaagcatccacgatacggttgaaaacctcatcatccttgcgaacaactctctctcatctaatggaaacgttacagagagtgggtgtaaggagtgcgaagagttggaagaaaaaaacatcaaagaatttcttcaatccttcgttcacatagtgcaaatgttcattaacacgtccactaccacacccgccccgaggccacctacgccggcaccgactatcgccagtcaacccctctctctgcgccccgaggcttgccggcctgcggctggtggggcggtccacacccggggcctggattttgcgtgcgatatatacatctgggcacctcttgccggcacctgcggagtgctgcttctctcactcgttattacgctgtactgctaa

SEQ ID NO: 903 - DNA, 2127 bp, synthetic construct
  misc_feature 1..2127: note = Synthetic
  source 1..2127: mol_type = other DNA
atggccttaccagtgaccgccttgctcctgccgctggccttgctgctccacgccgccaggccggaggtgcagctgctggaaagcggaggcgacctggtgcaacctggaggcagcctgcggctgagctgcgccgcttctggcttcacctttagcacctacgccatgacatgggttagacaggcccctggcaagggcctggagtgggtcagcgccatcagcggcaccagcggctctacctactacgccgacagcgtgaagggcagattcaccatctccagagataattcaaagagcaccctgtacctgcacatgaacagcctgagaaccgaggacaccgccgtgtactattgcgctagaggcggctacaactggcactactactactacatggacgtgtggggaaaaggcacaacagtgaccgtgtcttctggcggaggaggcagcggcggtggcggcagtggcggaggcggcagcgagatcgtgctgacacagtcccctgacttccagagcgtgacccctaaggaaaaggtgacaatcacctgccgggcctctcagagcatcggcagcagcctgcactggtatcagcagaagcccgatcagtccccaaagctgctgatcaaatacgtgtcccaatctatcagcggcgtgcccagccggttttctggcagcggcagcggaacagacttcaccctgaccattaactccctggaggccgaggatgccgctgcctactattgtcaccagagcagcagcctgccttggacattcggccagggcaccaaggtggaaatcaagaccacgacgccagcgccgcggccaccaacaccggcgcccaccatcgcgtcgcagcccctgtccctgcgcccagaggcgtgccggccagcggcggggggcgcagtgcacacgagggggctggacttcgcctgtgatatctacatctgggcgcccttggccgggacttgtggggtccttctcctgtcactggttatcaccctttactgccggagggaccagaggctgccccccgatgcccacaagccccctgggggaggcagtttccggacccccatccaagaggagcaggccgacgcccactccaccctggccaagatcagagtgaagttcagcaggagcgcagacgcccccgcgtaccagcagggccagaaccagctctataacgagctcaatctaggacgaagagaggagtacgatgttttggacaagagacgtggccgggaccctgagatggggggaaagccgagaaggaagaaccctcaggaaggcctgtacaatgaactgcagaaagataagatggcggaggcctacagtgagattgggatgaaaggcgagcgccggaggggcaaggggcacgatggcctttaccagggtctcagtacagccaccaaggacacctacgacgcccttcacatgcaggccctgccccctcgcggctctggcgagggaaggggttccctgcttacttgcggcgacgtcgaagagaatcccggtccgatggccctcccagtaactgccctccttttgcccctcgcactccttcttcatgccgctcgccccaactgggtcaacgtgattagcgatttgaagaaaatcgaggaccttatacagtctatgcatattgacgctacactgtatactgagagtgatgtacacccgtcctgtaaggtaacggccatgaaatgctttcttctggagctccaggtcatcagcttggagtctggggacgcaagcatccacgatacggttgaaaacctcatcatccttgcgaacaactctctctcatctaatggaaacgttacagagagtgggtgtaaggagtgcgaagagttggaagaaaaaaacatcaaagaatttcttcaatccttcgttcacatagtgcaaatgttcattaacacgtccactaccacacccgccccgaggccacctacgccggcaccgactatcgccagtcaacccctctctctgcgccccgaggcttgccggcctgcggctggtggggcggtccacacccggggcctggattttgcgtgcgatatatacatctgggcacctcttgccggcacctgcggagtgctgcttctctcactcgttattacgctgtactgctaa

SEQ ID NO: 904 - DNA, 2130 bp, synthetic construct
  misc_feature 1..2130: note = Synthetic
  source 1..2130: mol_type = other DNA
atggccttaccagtgaccgccttgctcctgccgctggccttgctgctccacgccgccaggccggaggtgcaactgctggaaagcggaggagatctggtgcagcccggcggctccctgcgcctgtcttgcgccgccagcggctttacattcagcacctacgccatgacatgggttagacaggcccctggaaaaggcctggaatgggtgtccgccatcagcggaaccagcggcagcacatactacgccgacagcgtgaagggcagattcaccatcagccgggacaacagcaagtccaccctgtacctgcacatgaacagcctgcggaccgaggacaccgccgtgtactattgcgctagaggcggttataattggcactactactactacatggacgtgtggggcaagggcacgaccgtgacagtgtccagcggcggcggaggcagcggcggaggaggctctggcggcggcggcagcgagatcgtgatgacccagtctcctgctacactgagcctgagccccggcgagcgggccaccctgagttgtagagccagccagagcgtgtcttctagctacctgagctggtatcagcaaaaacctggccttgctccaagactgctgatctacggcgcctctacaagagccaccggcatccccgccagatttagcggctctggcagcggcaccgacttcaccctgaccatctccagcctccagcctgaggatttcgccgtctactactgccagcaggattacaacctgcctcctaccttcggccagggcacaaaggtggaaattaagaccacgacgccagcgccgcggccaccaacaccggcgcccaccatcgcgtcgcagcccctgtccctgcgcccagaggcgtgccggccagcggcggggggcgcagtgcacacgagggggctggacttcgcctgtgatatctacatctgggcgcccttggccgggacttgtggggtccttctcctgtcactggttatcaccctttactgccggagggaccagaggctgccccccgatgcccacaagccccctgggggaggcagtttccggacccccatccaagaggagcaggccgacgcccactccaccctggccaagatcagagtgaagttcagcaggagcgcagacgcccccgcgtaccagcagggccagaaccagctctataacgagctcaatctaggacgaagagaggagtacgatgttttggacaagagacgtggccgggaccctgagatggggggaaagccgagaaggaagaaccctcaggaaggcctgtacaatgaactgcagaaagataagatggcggaggcctacagtgagattgggatgaaaggcgagcgccggaggggcaaggggcacgatggcctttaccagggtctcagtacagccaccaaggacacctacgacgcccttcacatgcaggccctgccccctcgcggctctggcgagggaaggggttccctgcttacttgcggcgacgtcgaagagaatcccggtccgatggccctcccagtaactgccctccttttgcccctcgcactccttcttcatgccgctcgccccaactgggtcaacgtgattagcgatttgaagaaaatcgaggaccttatacagtctatgcatattgacgctacactgtatactgagagtgatgtacacccgtcctgtaaggtaacggccatgaaatgctttcttctggagctccaggtcatcagcttggagtctggggacgcaagcatccacgatacggttgaaaacctcatcatccttgcgaacaactctctctcatctaatggaaacgttacagagagtgggtgtaaggagtgcgaagagttggaagaaaaaaacatcaaagaatttcttcaatccttcgttcacatagtgcaaatgttcattaacacgtccactaccacacccgccccgaggccacctacgccggcaccgactatcgccagtcaacccctctctctgcgccccgaggcttgccggcctgcggctggtggggcggtccacacccggggcctggattttgcgtgcgatatatacatctgggcacctcttgccggcacctgcggagtgctgcttctctcactcgttattacgctgtactgctaa

SEQ ID NO: 905 - protein, 486 aa, synthetic construct
  REGION 1..486: note = Synthetic
MALPVTALLLPLALLLHAARPEIVLTQSPDFQSVTPKEKVTITCRASQSIGSSLHWYQQKPDQSPKLLIKFASQSFSGVPSRFSGSGSGTDFTLTIHSLEAEDAATYYCHQSSSLPWTFGQGTKVEIKGGGGSGGGGSGGGGSQVQLVESGGGVVQPGRSLRLSCAASGFTFNNYDMYWVRQAPGKGLEWVAVTWYDGSNKYYADSVKGRFTISRDNSKNTLYLQMNSLRAEDTAVYYCARGDNWNDEHHYFYYMDVWGKGTTVTVSSTTTPAPRPPTPAPTIASQPLSLRPEACRPAAGGAVHTRGLDFACDIYIWAPLAGTCGVLLLSLVITLYCRRDQRLPPDAHKPPGGGSFRTPIQEEQADAHSTLAKIRVKFSRSADAPAYQQGQNQLYNELNLGRREEYDVLDKRRGRDPEMGGKPRRKNPQEGLYNELQKDKMAEAYSEIGMKGERRRGKGHDGLYQGLSTATKDTYDALHMQALPPR

SEQ ID NO: 906 - protein, 486 aa, synthetic construct
  REGION 1..486: note = Synthetic
MALPVTALLLPLALLLHAARPEIVLTQSPDFQSVTPKEKVTITCRASQSIGSSLHWYQQKPDQSPKLLIKFASQSFSGVPSRFSGSGSGTDFTLTIHSLEAEDAATYYCHQSSSLPWTFGQGTKVEIKGGGGSGGGGSGGGGSQVQLVESGGGVVQPGRSLRLSCAASGFTFSNYDMHWVRQAPGKGLEWVTIIWHDASNKYYLDSVKGRFTISRDNSKNTLYLQMNSLRAEDTAVYYCARGDNWNDEHHYFYYMDVWGKGTTVTVSSTTTPAPRPPTPAPTIASQPLSLRPEACRPAAGGAVHTRGLDFACDIYIWAPLAGTCGVLLLSLVITLYCRRDQRLPPDAHKPPGGGSFRTPIQEEQADAHSTLAKIRVKFSRSADAPAYQQGQNQLYNELNLGRREEYDVLDKRRGRDPEMGGKPRRKNPQEGLYNELQKDKMAEAYSEIGMKGERRRGKGHDGLYQGLSTATKDTYDALHMQALPPR

SEQ ID NO: 907 - protein, 486 aa, synthetic construct
  REGION 1..486: note = Synthetic
MALPVTALLLPLALLLHAARPEIVLTQSPDFQSVTPKEKVTITCRASQSIGSSLHWYQQKPDQSPKLLIKFASQSFSGVPSRFSGSGSGTDFTLTIHSLEAEDAATYYCHQSSSLPWTFGQGTKVEIKGGGGSGGGGSGGGGSQVQLVESGGGVVQPGRSLRLSCAASGFTFSNYDMHWVRQAPGKGLEWVTIIWHDGSNKYYLDSVKGRFTISRDNSKNTLYLQMNSLRAEDTAVYYCARGDNWNDEHHYFYYMDVWGKGTTVTVSSTTTPAPRPPTPAPTIASQPLSLRPEACRPAAGGAVHTRGLDFACDIYIWAPLAGTCGVLLLSLVITLYCRRDQRLPPDAHKPPGGGSFRTPIQEEQADAHSTLAKIRVKFSRSADAPAYQQGQNQLYNELNLGRREEYDVLDKRRGRDPEMGGKPRRKNPQEGLYNELQKDKMAEAYSEIGMKGERRRGKGHDGLYQGLSTATKDTYDALHMQALPPR

SEQ ID NO: 908 - protein, 480 aa, synthetic construct
  REGION 1..480: note = Synthetic
MALPVTALLLPLALLLHAARPQTVVTQEPSLSVSPGGTVTLTCGLSSGSVSTSYYPSWYQQTPGQAPRTLIYSTNIRSSGVPDRFSGSILGNKAALTITGAQADDESDYYCKLYMGSGIIFGSGTKVTVLGGGGSGGGGSGGGGSEVQLLESGGGLVQPGGSLRLSCAASGFTFSIYAMSWVRQAPGKGLEWVSAISGGGDTTYYADSVKGRFTISRDNSKTTLDLQMNSLRAEDTAVYYCAKHTSYYMDVWGKGTTVTVSSTTTPAPRPPTPAPTIASQPLSLRPEACRPAAGGAVHTRGLDFACDIYIWAPLAGTCGVLLLSLVITLYCRRDQRLPPDAHKPPGGGSFRTPIQEEQADAHSTLAKIRVKFSRSADAPAYQQGQNQLYNELNLGRREEYDVLDKRRGRDPEMGGKPRRKNPQEGLYNELQKDKMAEAYSEIGMKGERRRGKGHDGLYQGLSTATKDTYDALHMQALPPR

SEQ ID NO: 909 - protein, 486 aa, synthetic construct
  REGION 1..486: note = Synthetic
MALPVTALLLPLALLLHAARPEIVLTQSPDFQSVTPKEKVTITCRASQSIGSSLHWYQQKPDQSPKLLIKFASQSFSGVPSRFSGSGSGTDFTLTIHSLEAEDAATYYCHQSSSLPWTFGQGTKVEIKGGGGSGGGGSGGGGSQVQLVESGGGVVQPGRSLRLSCAASGFTFSNYDKHWVRQAPGKGLEWVAVIWYDGSNKYYADSVKGRFTISRDNSKNTLYLQMNSLRAEDTAMYYCARGDNWNDEHHYFYYMDVWGKGTTVTVSSTTTPAPRPPTPAPTIASQPLSLRPEACRPAAGGAVHTRGLDFACDIYIWAPLAGTCGVLLLSLVITLYCRRDQRLPPDAHKPPGGGSFRTPIQEEQADAHSTLAKIRVKFSRSADAPAYQQGQNQLYNELNLGRREEYDVLDKRRGRDPEMGGKPRRKNPQEGLYNELQKDKMAEAYSEIGMKGERRRGKGHDGLYQGLSTATKDTYDALHMQALPPR

SEQ ID NO: 910 - protein, 484 aa, synthetic construct
  REGION 1..484: note = Synthetic
MALPVTALLLPLALLLHAARPEIVLTQSPATLSLSPGERATLSCGASQSVYNSYLAWYQQKPGLAPRLLIYDASLRATGVPDRFSGSGSGTDFTLTISTLEPEDFAVYYCQQYGGSPMYTFGQGTKLEIKGGGGSGGGGSGGGGSQVQLVQSGAEVKKPGASVKVSCKASGYTFTNYGFSWVRQAPGQGLDWMGWISAYNGYTNYTQKLQGRVTMTTDTSTTTAYMELRSLRSDDTAVYYCARRGLLYYYYSMDVWGKGTTVTVSSTTTPAPRPPTPAPTIASQPLSLRPEACRPAAGGAVHTRGLDFACDIYIWAPLAGTCGVLLLSLVITLYCRRDQRLPPDAHKPPGGGSFRTPIQEEQADAHSTLAKIRVKFSRSADAPAYQQGQNQLYNELNLGRREEYDVLDKRRGRDPEMGGKPRRKNPQEGLYNELQKDKMAEAYSEIGMKGERRRGKGHDGLYQGLSTATKDTYDALHMQALPPR

SEQ ID NO: 911 - protein, 480 aa, synthetic construct
  REGION 1..480: note = Synthetic
MALPVTALLLPLALLLHAARPQTVVTQEPSLSVSPGGTVTLTCGLSSGSVSTSDYPSWYQQTPGQAPRTLIYRTNTRSSGVPDRFSGSILGNKAALTITGAQADDESDYYCVLYMDSGIIFGSGTKVTVLGGGGSGGGGSGGGGSEVQLLESGGGLVQPGGSLRLSCTASGFTFSSFAMSWVRQAPGKGLEWVSAMSGSGDTTYYADSVKGRFTISRDNSKTTLYLQMNSLRAEDTAVYSCAKHTTYYMDVWGKGTTVTVSSTTTPAPRPPTPAPTIASQPLSLRPEACRPAAGGAVHTRGLDFACDIYIWAPLAGTCGVLLLSLVITLYCRRDQRLPPDAHKPPGGGSFRTPIQEEQADAHSTLAKIRVKFSRSADAPAYQQGQNQLYNELNLGRREEYDVLDKRRGRDPEMGGKPRRKNPQEGLYNELQKDKMAEAYSEIGMKGERRRGKGHDGLYQGLSTATKDTYDALHMQALPPR

SEQ ID NO: 912 - protein, 480 aa, synthetic construct
  REGION 1..480: note = Synthetic
MALPVTALLLPLALLLHAARPQTVVTQEPSLSVSPGGTVTLTCGLSSGSVSTSDYPSWYQQTPGQAPRTLIYRTNTRSSGVPDRFSGSILGNKAALTITGAQADDESDYYCVLYMGSGIIFGSGTKVTVLGGGGSGGGGSGGGGSEVQLLESGGGLVQPGGSLRLSCAASGFTFNTYAMSWVRQAPGKGLEWVSAMSGSGDTTYYADSVKGRFTISRDNSKTTLYLQMNSLRAEDTAVYSCAKHTSYYMDVWGKGTTVTVSSTTTPAPRPPTPAPTIASQPLSLRPEACRPAAGGAVHTRGLDFACDIYIWAPLAGTCGVLLLSLVITLYCRRDQRLPPDAHKPPGGGSFRTPIQEEQADAHSTLAKIRVKFSRSADAPAYQQGQNQLYNELNLGRREEYDVLDKRRGRDPEMGGKPRRKNPQEGLYNELQKDKMAEAYSEIGMKGERRRGKGHDGLYQGLSTATKDTYDALHMQALPPR

SEQ ID NO: 913 - protein, 480 aa, synthetic construct
  REGION 1..480: note = Synthetic
MALPVTALLLPLALLLHAARPQTVVTQEPSFSVSPGGTVTLTCGLYSDSVSTSYYPSWYQQTPGQAPRTLIYNTNTRSSGVPDRFSGSILGNKAALTITGAQADDESDYYCVLYMVSGIVFGSGTKVTVLGGGGSGGGGSGGGGSEVQLLESGGDLVQPGGSLRLSCAASGFTFSTYAMSWVRQAPGKGLEWVSAISGSGENIYYADSVKGRFTISRDNSKNTLFLQMNSLRAEDTAVYYCAKHTSYYMDVWGKGTTVTVSSTTTPAPRPPTPAPTIASQPLSLRPEACRPAAGGAVHTRGLDFACDIYIWAPLAGTCGVLLLSLVITLYCRRDQRLPPDAHKPPGGGSFRTPIQEEQADAHSTLAKIRVKFSRSADAPAYQQGQNQLYNELNLGRREEYDVLDKRRGRDPEMGGKPRRKNPQEGLYNELQKDKMAEAYSEIGMKGERRRGKGHDGLYQGLSTATKDTYDALHMQALPPR

SEQ ID NO: 914 - protein, 486 aa, synthetic construct
  REGION 1..486: note = Synthetic
MALPVTALLLPLALLLHAARPQTVVTQEPSFSVSPGGTVTLTCGLSSGSVSTSYYPGWYQQTPGQAPRTLIYSTNTRSSGVPDRFSGSILGNKAALTITGAQADDESDYYCVLYMGSGMFIFGSGTKVTVLGGGGSGGGGSGGGGSQVQLVESGGGVVQPGRSLRLSCAASGFTFSSYGMHWVRQAPGKGLEWVAVIWYDGINKYYADSVKGRFTISRDNSKNTLYLQMNSLRAEDTAVYYCARERLERRYYYYMDVWGKGTTVTVSSTTTPAPRPPTPAPTIASQPLSLRPEACRPAAGGAVHTRGLDFACDIYIWAPLAGTCGVLLLSLVITLYCRRDQRLPPDAHKPPGGGSFRTPIQEEQADAHSTLAKIRVKFSRSADAPAYQQGQNQLYNELNLGRREEYDVLDKRRGRDPEMGGKPRRKNPQEGLYNELQKDKMAEAYSEIGMKGERRRGKGHDGLYQGLSTATKDTYDALHMQALPPR

SEQ ID NO: 915 - protein, 480 aa, synthetic construct
  REGION 1..480: note = Synthetic
MALPVTALLLPLALLLHAARPQTVVTQEPSFSVSPGGTVTLTCALSSDSVSTSYFPSWYRQTPGQAPRTLIYNTNTRSSGVPDRFSGSILGNKAALTITGAQADDESDYYCVLYMGSGIIFGSGTKVTVLGGGGSGGGGSGGGGSEVQLLESGGGLVQPGGSLRLSCAASGFTFSSFAMSWVRQAPGKGLEWVSAVSGSGDDTYYADSVKGRFTISRDNSKNTLYLQMNSLRAEDTAVYYCAKHTSYYLDVWGKGTTVTVSSTTTPAPRPPTPAPTIASQPLSLRPEACRPAAGGAVHTRGLDFACDIYIWAPLAGTCGVLLLSLVITLYCRRDQRLPPDAHKPPGGGSFRTPIQEEQADAHSTLAKIRVKFSRSADAPAYQQGQNQLYNELNLGRREEYDVLDKRRGRDPEMGGKPRRKNPQEGLYNELQKDKMAEAYSEIGMKGERRRGKGHDGLYQGLSTATKDTYDALHMQALPPR

SEQ ID NO: 916 - protein, 486 aa, synthetic construct
  REGION 1..486: note = Synthetic
MALPVTALLLPLALLLHAARPEIVLTQSPDFQSVTPKEKVTITCRASQSIGSSLHWYQQKPDQSPKLLIKFASQSFSGVPSRFSGSGSGTDFTLTINSLEAEDAATYFCHQSSSLPWTFGQGTKVEIKGGGGSGGGGSGGGGSQVQLVESGGGVVQPGRSLRLSCAASGFNFSTFDIHWVRQAPGKGLEWVALIWYDGSYKYYADSVKGRFTISRDNSKNTLDLRMNSLRAEDTAVYYCARNDNWNDEHYYHYYMDVWGKGTTVTVSSTTTPAPRPPTPAPTIASQPLSLRPEACRPAAGGAVHTRGLDFACDIYIWAPLAGTCGVLLLSLVITLYCRRDQRLPPDAHKPPGGGSFRTPIQEEQADAHSTLAKIRVKFSRSADAPAYQQGQNQLYNELNLGRREEYDVLDKRRGRDPEMGGKPRRKNPQEGLYNELQKDKMAEAYSEIGMKGERRRGKGHDGLYQGLSTATKDTYDALHMQALPPR

SEQ ID NO: 917 - protein, 491 aa, synthetic construct
  REGION 1..491: note = Synthetic
MALPVTALLLPLALLLHAARPQTVVTQEPSFSVSPGGTVTLTCGLSSGSVSTSYFPSWYQQTPGQAPRTLIYITNTRSSGVPDRFSGSIIGNKAALTITGAQADDESDYFCVLYMGSGTWVFGGGTKLTVLGGGGSGGGGSGGGGSEVHLLESGGGLVQPGGSLRLSCAASGFTFSSYAMNWVRQAPGKGLEWVSSISGSGSSSYYADSVKGRFTISRDNSKNTLYLQMNSLRAEDTAVYYCASRGFNSQYPPGYYYYYMDVWGKGTTVTVSSTTTPAPRPPTPAPTIASQPLSLRPEACRPAAGGAVHTRGLDFACDIYIWAPLAGTCGVLLLSLVITLYCRRDQRLPPDAHKPPGGGSFRTPIQEEQADAHSTLAKIRVKFSRSADAPAYQQGQNQLYNELNLGRREEYDVLDKRRGRDPEMGGKPRRKNPQEGLYNELQKDKMAEAYSEIGMKGERRRGKGHDGLYQGLSTATKDTYDALHMQALPPR

SEQ ID NO: 918 - protein, 478 aa, synthetic construct
  REGION 1..478: note = Synthetic
MALPVTALLLPLALLLHAARPEIVLTQSPDFQSVTPKEKVTITCRASQSIGSSLHWYQQKPDQSPKLLIKFASQSFSGVPSRFSGSGSGTDFTLTIHSLEAEDAATYYCHQSSSLPWTFGQGTKVEIKGGGGSGGGGSGGGGSEVQLLESGGGLVQPGGSLRLSCAASGFTFSNYAMTWVRQAPGKGLEWVSAISGSGIGTYYADSVQGRFTTSRDNSKNTLYLQMNSLRAEDTAVYYCAKGGYNWKDVWGKGTTVTVSSTTTPAPRPPTPAPTIASQPLSLRPEACRPAAGGAVHTRGLDFACDIYIWAPLAGTCGVLLLSLVITLYCRRDQRLPPDAHKPPGGGSFRTPIQEEQADAHSTLAKIRVKFSRSADAPAYQQGQNQLYNELNLGRREEYDVLDKRRGRDPEMGGKPRRKNPQEGLYNELQKDKMAEAYSEIGMKGERRRGKGHDGLYQGLSTATKDTYDALHMQALPPR

SEQ ID NO: 919 - protein, 486 aa, synthetic construct
  REGION 1..486: note = Synthetic
MALPVTALLLPLALLLHAARPEIVLTQSPDFQSVTPKEKVTITCRASQSIGSSLHWYQQKPDQSPKLLIKFASQSFSGVPSRFSGSGSGTDFTLTIHSLEAEDAATYYCHQSSSLPWTFGQGTKVEIKGGGGSGGGGSGGGGSQVQLVESGGGVVQPGRSLRLSCAASGFTFTNYDMHWVRQAPGKGLEWVTIIWHDGSNKYYLDSVRGRFTISRDNSKNTLYLQMNSLRAEDTAVYYCARGDNWNDEHHYFYYMDVWGKGTTVTVSSTTTPAPRPPTPAPTIASQPLSLRPEACRPAAGGAVHTRGLDFACDIYIWAPLAGTCGVLLLSLVITLYCRRDQRLPPDAHKPPGGGSFRTPIQEEQADAHSTLAKIRVKFSRSADAPAYQQGQNQLYNELNLGRREEYDVLDKRRGRDPEMGGKPRRKNPQEGLYNELQKDKMAEAYSEIGMKGERRRGKGHDGLYQGLSTATKDTYDALHMQALPPR

SEQ ID NO: 920 - protein, 486 aa, synthetic construct
  REGION 1..486: note = Synthetic
MALPVTALLLPLALLLHAARPEIVLTQSPATLSLSPGERATLSCRASQSVSSSLAWYQQKPGQAPRLLIYDASNRATGIPARFSGSGSGTDFTLTISSLEPEDFAVYYCQQRSNWPLTFGGGTKVEIKGGGGSGGGGSGGGGSQVQLVESGGGVVQPGRSLRLSCAASGFTFSNYDMHWVRQAPGKGLEWVTIIWHDGSNKYYLDSVKGRFTISRDNSKNTLYLQMNSLRAEDTAVYYCARGDNWNDEHHYFYYMDVWGKGTTVTVSSTTTPAPRPPTPAPTIASQPLSLRPEACRPAAGGAVHTRGLDFACDIYIWAPLAGTCGVLLLSLVITLYCRRDQRLPPDAHKPPGGGSFRTPIQEEQADAHSTLAKIRVKFSRSADAPAYQQGQNQLYNELNLGRREEYDVLDKRRGRDPEMGGKPRRKNPQEGLYNELQKDKMAEAYSEIGMKGERRRGKGHDGLYQGLSTATKDTYDALHMQALPPR

SEQ ID NO: 921 - protein, 482 aa, synthetic construct
  REGION 1..482: note = Synthetic
MALPVTALLLPLALLLHAARPEIVLTQSPGTLSLSPGERATLSCRASQSVSSSYLAWYQQKPGQAPRLLIYGASSRATGIPDRFSGSGSGTDFTLTISRLEPEDFAVYYCQQYGSSWTFGQGTKVEIKGGGGSGGGGSGGGGSEVQLVESGGGVVRPGGSLRLSCAASGFTFDDYGMSWVRQAPGKGLEWVSGINWNGGSTGYVDSVKGRFTISRDNAKNSLYLQMNSLRAEDTALYHCARPVTTDYYYYMDVWGKGTTVTVSSTTTPAPRPPTPAPTIASQPLSLRPEACRPAAGGAVHTRGLDFACDIYIWAPLAGTCGVLLLSLVITLYCRRDQRLPPDAHKPPGGGSFRTPIQEEQADAHSTLAKIRVKFSRSADAPAYQQGQNQLYNELNLGRREEYDVLDKRRGRDPEMGGKPRRKNPQEGLYNELQKDKMAEAYSEIGMKGERRRGKGHDGLYQGLSTATKDTYDALHMQALPPR

SEQ ID NO: 922 - protein, 490 aa, synthetic construct
  REGION 1..490: note = Synthetic
MALPVTALLLPLALLLHAARPEIVLTQSPGTLSLSPGERATLSCRASQSVSSSYLAWYQQKPGQAPRLLIYGASSRATGIPDRFSGSGSGTDFTLTISRLEPEDFAVYYCQQYGSSWTFGQGTKVEIKGGGGSGGGGSGGGGSEVQLLESGGGLVQPGGSLRLSCAASGFTFSSYAMSWVRQAPGKGLEWVSAISGSGGSTYYADSVKGRFTISRDNSKNTLYLQMNSLRAEDTAVYYCAKKGTSYNWNDVHYYYYYYMDVWGKGTTVTVSSTTTPAPRPPTPAPTIASQPLSLRPEACRPAAGGAVHTRGLDFACDIYIWAPLAGTCGVLLLSLVITLYCRRDQRLPPDAHKPPGGGSFRTPIQEEQADAHSTLAKIRVKFSRSADAPAYQQGQNQLYNELNLGRREEYDVLDKRRGRDPEMGGKPRRKNPQEGLYNELQKDKMAEAYSEIGMKGERRRGKGHDGLYQGLSTATKDTYDALHMQALPPR

SEQ ID NO: 923 - protein, 484 aa, synthetic construct
  REGION 1..484: note = Synthetic
MALPVTALLLPLALLLHAARPEIVLTQSPGTLSLSPGERATLSCRASQSVSSSYLAWYQQKPGQAPRLLIYGASSRATGIPDRFSGSGSGTDFTLTISRLEPEDFAVYYCQQYGSSWTFGQGTKVEIKGGGGSGGGGSGGGGSQLQLQESGPGLVKPSETLSLTCTVSGGSISSSSYYWGWIRQPPGKGLEWIGSIYYSGSTYYNPSLKSRVTISVDTSKNQFSLKLSSVTAADTAVYYCTTGTTAYYYYYYMDVWGKGTTVTVSSTTTPAPRPPTPAPTIASQPLSLRPEACRPAAGGAVHTRGLDFACDIYIWAPLAGTCGVLLLSLVITLYCRRDQRLPPDAHKPPGGGSFRTPIQEEQADAHSTLAKIRVKFSRSADAPAYQQGQNQLYNELNLGRREEYDVLDKRRGRDPEMGGKPRRKNPQEGLYNELQKDKMAEAYSEIGMKGERRRGKGHDGLYQGLSTATKDTYDALHMQALPPR

SEQ ID NO: 924 - protein, 483 aa, synthetic construct
  REGION 1..483: note = Synthetic
MALPVTALLLPLALLLHAARPEIVLTQSPGTLSLSPGERATLSCRASQSVSSSYLAWYQQKPGQAPRLLIYGASSRATGIPDRFSGSGSGTDFTLTISRLEPEDFAVYYCQQYGSSWTFGQGTKVEIKGGGGSGGGGSGGGGSEVQLLESGGGLVQPGGSLRLSCAASGFTFSSYAMTWVRQAPGKGLEWVSAISGSGGSTYYADSVKGRFTISRDNSKNTLYLQMNSLRAEDTAVYYCARGGYNWHYYYYMDVWGKGTTVTVSSTTTPAPRPPTPAPTIASQPLSLRPEACRPAAGGAVHTRGLDFACDIYIWAPLAGTCGVLLLSLVITLYCRRDQRLPPDAHKPPGGGSFRTPIQEEQADAHSTLAKIRVKFSRSADAPAYQQGQNQLYNELNLGRREEYDVLDKRRGRDPEMGGKPRRKNPQEGLYNELQKDKMAEAYSEIGMKGERRRGKGHDGLYQGLSTATKDTYDALHMQALPPR

SEQ ID NO: 925 - protein, 487 aa, synthetic construct
  REGION 1..487: note = Synthetic
MALPVTALLLPLALLLHAARPEIVLTQSPDFQSVTPKEKVTITCRASQNIGSSLHWYQQKPDQSPKLLIKFASQSISGVPSRFSGSGSGTDFTLTINSLEAEDAAAYYCHQSSSLPWTFGQGTKVEIKGGGGSGGGGSGGGGSQVQLVESGGGVVQPGRSLRLSCAASGFTFSSYDMHWVRQAPGKGLEWVSVIWYDGSNKKYGDSAKGRFTISRDNSKNTLDLQMNSLRAEDTAVYYCARGDNWNDEGGYYYYYMDVWGKGTTVTVSSTTTPAPRPPTPAPTIASQPLSLRPEACRPAAGGAVHTRGLDFACDIYIWAPLAGTCGVLLLSLVITLYCRRDQRLPPDAHKPPGGGSFRTPIQEEQADAHSTLAKIRVKFSRSADAPAYQQGQNQLYNELNLGRREEYDVLDKRRGRDPEMGGKPRRKNPQEGLYNELQKDKMAEAYSEIGMKGERRRGKGHDGLYQGLSTATKDTYDALHMQALPPR

SEQ ID NO: 926 - protein, 487 aa, synthetic construct
  REGION 1..487: note = Synthetic
MALPVTALLLPLALLLHAARPDIQMTQSPSSLSTSVGDRVTITCRASQGISNYLAWFQQKPGKAPKSLIYAASSLQSGVPSKFSGSGSGTDFSLTISSLQPEDFATYYCQQYNSYPITFGQGTRLEIKGGGGSGGGGSGGGGSQVQLVESGGGVVQPGRSLRLSCAASGFTFSSYDMHWVRQAPGKGLEWVSVIWYDGSNKKYGDSAKGRFTISRDNSKNTLDLQMNSLRAEDTAVYYCARGDNWNDEGGYYYYYMDVWGKGTTVTVSSTTTPAPRPPTPAPTIASQPLSLRPEACRPAAGGAVHTRGLDFACDIYIWAPLAGTCGVLLLSLVITLYCRRDQRLPPDAHKPPGGGSFRTPIQEEQADAHSTLAKIRVKFSRSADAPAYQQGQNQLYNELNLGRREEYDVLDKRRGRDPEMGGKPRRKNPQEGLYNELQKDKMAEAYSEIGMKGERRRGKGHDGLYQGLSTATKDTYDALHMQALPPR

SEQ ID NO: 927 - protein, 484 aa, synthetic construct
  REGION 1..484: note = Synthetic
MALPVTALLLPLALLLHAARPEIVLTQSPDFQSVTPKEKVTITCRASQNIGSSLHWYQQKPDQSPKLLIKFASQSISGVPSRFSGSGSGTDFTLTINSLEAEDAAAYYCHQSSSLPWTFGQGTKVEIKGGGGSGGGGSGGGGSQVQLVQSGAEVKKSGASVKVSCKASGYTLTSYGISWVRQAPGQGLEWMGWISAYNGNINYAQKFQGRVTMTTDTSTSTAYMELRSLRSDDTAVYYCVRDGDRYNWNHSYMDVWGKGTTVTVSSTTTPAPRPPTPAPTIASQPLSLRPEACRPAAGGAVHTRGLDFACDIYIWAPLAGTCGVLLLSLVITLYCRRDQRLPPDAHKPPGGGSFRTPIQEEQADAHSTLAKIRVKFSRSADAPAYQQGQNQLYNELNLGRREEYDVLDKRRGRDPEMGGKPRRKNPQEGLYNELQKDKMAEAYSEIGMKGERRRGKGHDGLYQGLSTATKDTYDALHMQALPPR

SEQ ID NO: 928 - protein, 484 aa, synthetic construct
  REGION 1..484: note = Synthetic
MALPVTALLLPLALLLHAARPDIQMTQSPSSLSTSVGDRVTITCRASQGISNYLAWFQQKPGKAPKSLIYAASSLQSGVPSKFSGSGSGTDFSLTISSLQPEDFATYYCQQYNSYPITFGQGTRLEIKGGGGSGGGGSGGGGSQVQLVQSGAEVKKSGASVKVSCKASGYTLTSYGISWVRQAPGQGLEWMGWISAYNGNINYAQKFQGRVTMTTDTSTSTAYMELRSLRSDDTAVYYCVRDGDRYNWNHSYMDVWGKGTTVTVSSTTTPAPRPPTPAPTIASQPLSLRPEACRPAAGGAVHTRGLDFACDIYIWAPLAGTCGVLLLSLVITLYCRRDQRLPPDAHKPPGGGSFRTPIQEEQADAHSTLAKIRVKFSRSADAPAYQQGQNQLYNELNLGRREEYDVLDKRRGRDPEMGGKPRRKNPQEGLYNELQKDKMAEAYSEIGMKGERRRGKGHDGLYQGLSTATKDTYDALHMQALPPR

SEQ ID NO: 929 - protein, 483 aa, synthetic construct
  REGION 1..483: note = Synthetic
MALPVTALLLPLALLLHAARPEIVLTQSPDFQSVTPKEKVTITCRASQSIGSSLHWYQQKPDQSPKLLIKYVSQSISGVPSRFSGSGSGTDFTLTINSLEAEDAAAYYCHQSSSLPWTFGQGTKVEIKGGGGSGGGGSGGGGSEVQLLESGGDLVQPGGSLRLSCAASGFTFSTYAMTWVRQAPGKGLEWVSAISGTSGSTYYADSVKGRFTISRDNSKSTLYLHMNSLRTEDTAVYYCARGGYNWHYYYYMDVWGKGTTVTVSSTTTPAPRPPTPAPTIASQPLSLRPEACRPAAGGAVHTRGLDFACDIYIWAPLAGTCGVLLLSLVITLYCRRDQRLPPDAHKPPGGGSFRTPIQEEQADAHSTLAKIRVKFSRSADAPAYQQGQNQLYNELNLGRREEYDVLDKRRGRDPEMGGKPRRKNPQEGLYNELQKDKMAEAYSEIGMKGERRRGKGHDGLYQGLSTATKDTYDALHMQALPPR

SEQ ID NO: 930 - protein, 484 aa, synthetic construct
  REGION 1..484: note = Synthetic
MALPVTALLLPLALLLHAARPEIVMTQSPATLSLSPGERATLSCRASQSVSSSYLSWYQQKPGLAPRLLIYGASTRATGIPARFSGSGSGTDFTLTISSLQPEDFAVYYCQQDYNLPPTFGQGTKVEIKGGGGSGGGGSGGGGSEVQLLESGGDLVQPGGSLRLSCAASGFTFSTYAMTWVRQAPGKGLEWVSAISGTSGSTYYADSVKGRFTISRDNSKSTLYLHMNSLRTEDTAVYYCARGGYNWHYYYYMDVWGKGTTVTVSSTTTPAPRPPTPAPTIASQPLSLRPEACRPAAGGAVHTRGLDFACDIYIWAPLAGTCGVLLLSLVITLYCRRDQRLPPDAHKPPGGGSFRTPIQEEQADAHSTLAKIRVKFSRSADAPAYQQGQNQLYNELNLGRREEYDVLDKRRGRDPEMGGKPRRKNPQEGLYNELQKDKMAEAYSEIGMKGERRRGKGHDGLYQGLSTATKDTYDALHMQALPPR

SEQ ID NO: 931 - DNA, 1460 bp, synthetic construct
  misc_feature 1..1460: note = Synthetic
  source 1..1460: mol_type = other DNA
atggccttaccagtgaccgccttgctcctgccgctggccttgctgctccacgccgccaggccggaaattgtgctgactcagtctccagactttcagtctgtgactccaaaggagaaagtcaccatcacctgccgggccagtcagagcattggtagtagcttacactggtaccagcagaaaccagatcagtctccaaagctcctcatcaagtttgcttcccagtccttctcaggggtcccctcgaggttcagtggcagtggatctgggacagatttcaccctcaccatccatagcctggaagctgaagatgctgcaacgtattactgtcatcagagtagtagtttaccgtggacgttcggccaagggaccaaggtggaaatcaaaggtggaggcggttcaggcggaggtggctctggcggtggcggatcgcaggtgcagctggtggagtctgggggaggcgtggtccagcctgggaggtccctgagactctcctgtgcagcgtctggattcaccttcaataattatgacatgtactgggtccgccaggccccaggcaaggggctggagtgggtggcagttacatggtatgatggaagtaataaatactatgcagactccgtgaagggccgattcaccatctccagagacaattccaagaacacgctgtatctgcaaatgaacagcctgagagccgaggacacggctgtgtattactgtgcgagaggtgacaactggaatgacgaacaccactatttttactacatggacgtctggggcaaagggaccacggtcaccgtctcctcaaccacgacgccagcgccgcggccaccaacaccggcgcccaccatcgcgtcgcagcccctgtccctgcgcccagaggcgtgccggccagcggcggggggcgcagtgcacacgagggggctggacttcgcctgtgatatctacatctgggcgcccttggccgggacttgtggggtccttctcctgtcactggttatcaccctttactgccggagggaccagaggctgccccccgatgcccacaagccccctgggggaggcagtttccggacccccatccaagaggagcaggccgacgcccactccaccctggccaagatcagagtgaagttcagcaggagcgcagacgcccccgcgtaccagcagggccagaaccagctctataacgagctcaatctaggacgaagagaggagtacgatgttttggacaagagacgtggccgggaccctgagatggggggaaagccgagaaggaagaaccctcaggaaggcctgtacaatgaactgcagaaagataagatggcggaggcctacagtgagattgggatgaaaggcgagcgccggaggggcaaggggcacgatggcctttaccagggtctcagtacagccaccaaggacacctacgacgcccttcacatgcaggccctgccccctcgcgg

SEQ ID NO: 932 - DNA, 1460 bp, synthetic construct
  misc_feature 1..1460: note = Synthetic
  source 1..1460: mol_type = other DNA
atggccttaccagtgaccgccttgctcctgccgctggccttgctgctccacgccgccaggccggaaattgtgctgactcagtctccagactttcagtctgtgactccaaaggagaaagtcaccatcacctgccgggccagtcagagcattggtagtagcttacactggtaccagcagaaaccagatcagtctccaaagctcctcatcaagtttgcttcccagtccttctcaggggtcccctcgaggttcagtggcagtggatctgggacagatttcaccctcaccatccatagcctggaagctgaagatgctgcaacgtattactgtcatcagagtagtagtttaccgtggacgttcggccaagggaccaaggtggaaatcaaaggtggaggcggttcaggcggaggtggctctggcggtggcggatcgcaggtgcagctggtggagtctgggggaggcgtggtccagcctgggaggtccctgagactctcctgtgcagcgtctgggttcaccttcagtaactatgacatgcactgggtccgccaggccccaggcaaggggctggagtgggtgacaattatatggcatgatgcaagtaataaatattatttagactccgtgaagggccgattcaccatctccagagacaattccaagaacacgctgtatctgcaaatgaacagcctgagagccgaggacacggctgtgtattactgtgcgagaggtgacaactggaacgacgaacaccactacttctactacatggacgtctggggcaaagggaccacggtcaccgtctcctcaaccacgacgccagcgccgcggccaccaacaccggcgcccaccatcgcgtcgcagcccctgtccctgcgcccagaggcgtgccggccagcggcggggggcgcagtgcacacgagggggctggacttcgcctgtgatatctacatctgggcgcccttggccgggacttgtggggtccttctcctgtcactggttatcaccctttactgccggagggaccagaggctgccccccgatgcccacaagccccctgggggaggcagtttccggacccccatccaagaggagcaggccgacgcccactccaccctggccaagatcagagtgaagttcagcaggagcgcagacgcccccgcgtaccagcagggccagaaccagctctataacgagctcaatctaggacgaagagaggagtacgatgttttggacaagagacgtggccgggaccctgagatggggggaaagccgagaaggaagaaccctcaggaaggcctgtacaatgaactgcagaaagataagatggcggaggcctacagtgagattgggatgaaaggcgagcgccggaggggcaaggggcacgatggcctttaccagggtctcagtacagccaccaaggacacctacgacgcccttcacatgcaggccctgccccctcgcgg

SEQ ID NO: 933 - DNA, 1460 bp, synthetic construct
  misc_feature 1..1460: note = Synthetic
  source 1..1460: mol_type = other DNA
atggccttaccagtgaccgccttgctcctgccgctggccttgctgctccacgccgccaggccggaaattgtgctgactcagtctccagactttcagtctgtgactccaaaggagaaagtcaccatcacctgccgggccagtcagagcattggtagtagcttacactggtaccagcagaaaccagatcagtctccaaagctcctcatcaagtttgcttcccagtccttctcaggggtcccctcgaggttcagtggcagtggatctgggacagatttcaccctcaccatccatagcctggaagctgaagatgctgcaacgtattactgtcatcagagtagtagtttaccgtggacgttcggccaagggaccaaggtggaaatcaaaggtggaggcggttcaggcggaggtggctctggcggtggcggatcgcaggtgcagctggtggagtctgggggaggcgtggtccagcctgggaggtccctgagactctcctgtgcagcgtctgggttcaccttcagtaactatgacatgcactgggtccgccaggccccaggcaaggggctggagtgggtgacaattatatggcatgatggaagtaataaatattatttagactccgtgaagggccgattcaccatctccagagacaattccaagaacacgctgtatctgcaaatgaacagcctgagagccgaggacacggctgtgtattactgtgcgagaggtgacaactggaacgacgaacaccactacttctactacatggacgtctggggcaaagggaccacggtcaccgtctcctcaaccacgacgccagcgccgcggccaccaacaccggcgcccaccatcgcgtcgcagcccctgtccctgcgcccagaggcgtgccggccagcggcggggggcgcagtgcacacgagggggctggacttcgcctgtgatatctacatctgggcgcccttggccgggacttgtggggtccttctcctgtcactggttatcaccctttactgccggagggaccagaggctgccccccgatgcccacaagccccctgggggaggcagtttccggacccccatccaagaggagcaggccgacgcccactccaccctggccaagatcagagtgaagttcagcaggagcgcagacgcccccgcgtaccagcagggccagaaccagctctataacgagctcaatctaggacgaagagaggagtacgatgttttggacaagagacgtggccgggaccctgagatggggggaaagccgagaaggaagaaccctcaggaaggcctgtacaatgaactgcagaaagataagatggcggaggcctacagtgagattgggatgaaaggcgagcgccggaggggcaaggggcacgatggcctttaccagggtctcagtacagccaccaaggacacctacgacgcccttcacatgcaggccctgccccctcgcgg

SEQ ID NO: 934 - DNA, 1442 bp, synthetic construct
  misc_feature 1..1442: note = Synthetic
  source 1..1442: mol_type = other DNA
atggccttaccagtgaccgccttgctcctgccgctggccttgctgctccacgccgccaggccgcagactgtggtgacccaggagccatcgctctcagtgtcccctggagggacagtcacactcacttgtggcttgagctctggctcagtctctactagttactaccccagctggtaccagcagaccccaggccaggctccacgcacgctcatctacagcacaaatattcggtcttctggggtccctgatcgcttctctggctccatccttgggaacaaagctgccctcaccatcacgggggcccaggcagatgatgaatctgattattattgtaagctgtatatgggaagtggcattattttcggcagtggaaccaaggtcactgtcctaggtggaggcggttcaggcggaggtggctctggcggtggcggatcggaggtgcagctgctggagtctgggggaggcttggtacagcctggggggtccctgagactctcctgtgcagcctctggattcacctttagcatctatgccatgagctgggtccgccaggctccagggaaggggctggagtgggtctcagctattagtggtggtggtgataccacatactacgcagactccgtgaagggccggttcaccatctccagagacaattccaagaccacgctggatctgcaaatgaacagcctgagagccgaggacacggccgtatattactgtgcgaaacacactagctactacatggacgtctggggcaaagggaccacggtcaccgtctcctcaaccacgacgccagcgccgcggccaccaacaccggcgcccaccatcgcgtcgcagcccctgtccctgcgcccagaggcgtgccggccagcggcggggggcgcagtgcacacgagggggctggacttcgcctgtgatatctacatctgggcgcccttggccgggacttgtggggtccttctcctgtcactggttatcaccctttactgccggagggaccagaggctgccccccgatgcccacaagccccctgggggaggcagtttccggacccccatccaagaggagcaggccgacgcccactccaccctggccaagatcagagtgaagttcagcaggagcgcagacgcccccgcgtaccagcagggccagaaccagctctataacgagctcaatctaggacgaagagaggagtacgatgttttggacaagagacgtggccgggaccctgagatggggggaaagccgagaaggaagaaccctcaggaaggcctgtacaatgaactgcagaaagataagatggcggaggcctacagtgagattgggatgaaaggcgagcgccggaggggcaaggggcacgatggcctttaccagggtctcagtacagccaccaaggacacctacgacgcccttcacatgcaggccctgccccctcgcgg

SEQ ID NO: 935 - DNA, 1460 bp, synthetic construct
  misc_feature 1..1460: note = Synthetic
  source 1..1460: mol_type = other DNA
atggccttaccagtgaccgccttgctcctgccgctggccttgctgctccacgccgccaggccggaaattgtgctgactcagtctccagactttcagtctgtgactccaaaggagaaagtcaccatcacctgccgggccagtcagagcattggtagtagcttacactggtaccagcagaaaccagatcagtctccaaagctcctcatcaagtttgcttcccagtccttctcaggggtcccctcgaggttcagtggcagtggatctgggacagatttcaccctcaccatccatagcctggaagctgaagatgctgcaacgtattactgtcatcagagtagtagtttaccgtggacgttcggccaagggaccaaggtggaaatcaaaggtggaggcggttcaggcggaggtggctctggcggtggcggatcgcaggtgcagctggtggagtctgggggaggcgtggtccagcctgggaggtccctgagactctcctgtgcagcgtctggattcaccttcagtaactatgacaagcactgggtccgccaggccccaggcaaggggctggagtgggtggcagttatatggtatgatggaagtaataagtactatgcagactccgtgaagggccgattcaccatttccagagacaattccaagaacacgctgtatctacaaatgaacagcctgagagccgaggacacggctatgtattactgtgcgagaggtgacaactggaacgacgaacaccactacttctactacatggacgtctggggcaaagggaccacggtcaccgtctcctcaaccacgacgccagcgccgcggccaccaacaccggcgcccaccatcgcgtcgcagcccctgtccctgcgcccagaggcgtgccggccagcggcggggggcgcagtgcacacgagggggctggacttcgcctgtgatatctacatctgggcgcccttggccgggacttgtggggtccttctcctgtcactggttatcaccctttactgccggagggaccagaggctgccccccgatgcccacaagccccctgggggaggcagtttccggacccccatccaagaggagcaggccgacgcccactccaccctggccaagatcagagtgaagttcagcaggagcgcagacgcccccgcgtaccagcagggccagaaccagctctataacgagctcaatctaggacgaagagaggagtacgatgttttggacaagagacgtggccgggaccctgagatggggggaaagccgagaaggaagaaccctcaggaaggcctgtacaatgaactgcagaaagataagatggcggaggcctacagtgagattgggatgaaaggcgagcgccggaggggcaaggggcacgatggcctttaccagggtctcagtacagccaccaaggacacctacgacgcccttcacatgcaggccctgccccctcgcgg

SEQ ID NO: 936 - DNA, 1454 bp, synthetic construct
  misc_feature 1..1454: note = Synthetic
  source 1..1454: mol_type = other DNA
atggccttaccagtgaccgccttgctcctgccgctggccttgctgctccacgccgccaggccggaaattgtgttgacgcagtctccagccaccctgtctttgtctccaggggaaagagccaccctctcctgcggggccagtcagagtgtttacaacagttacttagcctggtaccagcagaaacctggcctggcgcccaggctcctcatctatgatgcatccctcagggccactggcgtcccagacaggttcagtggcagtgggtctgggacagacttcactctcaccatcagcacactggagcctgaagattttgcagtgtattactgtcagcagtatggtggctcacccatgtacacttttggccaggggaccaagctggagatcaaaggtggaggcggttcaggcggaggtggctctggcggtggcggatcgcaggttcagttggtacagtctggagctgaggtgaagaagcctggggcctcagtgaaggtctcctgtaaggcttctggttacacctttaccaactatggtttcagctgggtgcgacaggcccctggacaagggcttgactggatgggatggatcagcgcttacaatggttacacaaattatacacagaaactccagggcagagtcaccatgaccactgacacatccacgaccacagcctacatggagctgaggagcctgagatctgacgacacggccgtctattactgtgcgagaagaggactactctactactactactccatggacgtctggggcaaagggaccacggtcaccgtctcctcaaccacgacgccagcgccgcggccaccaacaccggcgcccaccatcgcgtcgcagcccctgtccctgcgcccagaggcgtgccggccagcggcggggggcgcagtgcacacgagggggctggacttcgcctgtgatatctacatctgggcgcccttggccgggacttgtggggtccttctcctgtcactggttatcaccctttactgccggagggaccagaggctgccccccgatgcccacaagccccctgggggaggcagtttccggacccccatccaagaggagcaggccgacgcccactccaccctggccaagatcagagtgaagttcagcaggagcgcagacgcccccgcgtaccagcagggccagaaccagctctataacgagctcaatctaggacgaagagaggagtacgatgttttggacaagagacgtggccgggaccctgagatggggggaaagccgagaaggaagaaccctcaggaaggcctgtacaatgaactgcagaaagataagatggcggaggcctacagtgagattgggatgaaaggcgagcgccggaggggcaaggggcacgatggcctttaccagggtctcagtacagccaccaaggacacctacgacgcccttcacatgcaggccctgccccctcgcgg

SEQ ID NO: 937 - DNA, 1442 bp, synthetic construct
  misc_feature 1..1442: note = Synthetic
  source 1..1442: mol_type = other DNA
atggccttaccagtgaccgccttgctcctgccgctggccttgctgctccacgccgccaggccgcagactgtggtgacccaggagccatcgctctcagtgtcccctggagggacagtcacactcacttgtggcttgagctctggctcagtctctactagtgactaccccagctggtaccagcagaccccaggccaggctccacgcacgctcatctacagaacaaacactcgctcttctggggtccctgatcgcttctctggctccatccttgggaacaaagctgccctcaccatcacgggggcccaggcagatgatgaatctgattattactgtgtgctgtatatggatagtggcattattttcggcagtggaaccaaggtcactgtcctaggtggaggcggttcaggcggaggtggctctggcggtggcggatcggaggtgcagctgctggagtctgggggaggcctggtacagcctggggggtccctgagactctcctgtacagcctctggattcacctttagcagctttgccatgagctgggtccgccaggctccagggaaggggctggagtgggtctcagctatgagtggtagtggtgataccacatactacgcagactccgtgaagggccggttcaccatctcccgagacaattccaagaccacgctgtatctgcaaatgaacagcctgagagccgaggacacggccgtatattcctgtgcgaagcacactacctactacatggacgtctggggcaaagggaccacggtcaccgtctcctcaaccacgacgccagcgccgcggccaccaacaccggcgcccaccatcgcgtcgcagcccctgtccctgcgcccagaggcgtgccggccagcggcggggggcgcagtgcacacgagggggctggacttcgcctgtgatatctacatctgggcgcccttggccgggacttgtggggtccttctcctgtcactggttatcaccctttactgccggagggaccagaggctgccccccgatgcccacaagccccctgggggaggcagtttccggacccccatccaagaggagcaggccgacgcccactccaccctggccaagatcagagtgaagttcagcaggagcgcagacgcccccgcgtaccagcagggccagaaccagctctataacgagctcaatctaggacgaagagaggagtacgatgttttggacaagagacgtggccgggaccctgagatggggggaaagccgagaaggaagaaccctcaggaaggcctgtacaatgaactgcagaaagataagatggcggaggcctacagtgagattgggatgaaaggcgagcgccggaggggcaaggggcacgatggcctttaccagggtctcagtacagccaccaaggacacctacgacgcccttcacatgcaggccctgccccctcgcgg

SEQ ID NO: 938 - DNA, 1442 bp, synthetic construct
  misc_feature 1..1442: note = Synthetic
  source 1..1442: mol_type = other DNA
atggccttaccagtgaccgccttgctcctgccgctggccttgctgctccacgccgccaggccgcagactgtggtgacccaggagccatcgctctcagtgtcccctggagggacagtcacactcacttgtggcttgagctctggctcagtctctactagtgactaccccagttggtaccagcagaccccaggccaggctccacgcacgctcatctacagaacaaacactcgctcttctggggtccctgatcgcttctctggctccatccttgggaacaaagctgccctcaccatcacgggggcccaggcagatgatgaatctgattattactgtgtgctgtatatgggtagtggcattattttcggcagtggaaccaaggtcactgtcctaggtggaggcggttcaggcggaggtggctctggcggtggcggatcggaggtgcagctgctggagtctgggggaggcttggtacagcctggggggtccctgagactctcctgtgcagcctctggattcacctttaacacctatgccatgagctgggtccgccaggctccagggaaggggctggagtgggtctcagctatgagtggtagtggtgataccacatactacgcagactccgtgaagggccggttcaccatctccagagacaattccaagaccactctgtatctgcaaatgaacagcctgagagccgaggacacggccgtatattcctgtgcgaaacacacttcctactacatggacgtctggggcaaagggaccacggtcaccgtctcctcaaccacgacgccagcgccgcggccaccaacaccggcgcccaccatcgcgtcgcagcccctgtccctgcgcccagaggcgtgccggccagcggcggggggcgcagtgcacacgagggggctggacttcgcctgtgatatctacatctgggcgcccttggccgggacttgtggggtccttctcctgtcactggttatcaccctttactgccggagggaccagaggctgccccccgatgcccacaagccccctgggggaggcagtttccggacccccatccaagaggagcaggccgacgcccactccaccctggccaagatcagagtgaagttcagcaggagcgcagacgcccccgcgtaccagcagggccagaaccagctctataacgagctcaatctaggacgaagagaggagtacgatgttttggacaagagacgtggccgggaccctgagatggggggaaagccgagaaggaagaaccctcaggaaggcctgtacaatgaactgcagaaagataagatggcggaggcctacagtgagattgggatgaaaggcgagcgccggaggggcaaggggcacgatggcctttaccagggtctcagtacagccaccaaggacacctacgacgcccttcacatgcaggccctgccccctcgcgg

SEQ ID NO: 939 - DNA, 1442 bp, synthetic construct
  misc_feature 1..1442: note = Synthetic
  source 1..1442: mol_type = other DNA
atggccttaccagtgaccgccttgctcctgccgctggccttgctgctccacgccgccaggccgcagactgtggtgacccaggagccatcgttctcagtgtcccctggagggacagtcacactcacttgtggcttatactctgactcagtctctactagttactaccccagctggtaccagcagaccccaggccaggctccacgcacgctcatctacaacacaaacactcgctcttctggggtccctgatcgcttctctggctccatccttgggaacaaagctgccctcaccatcacgggggcccaggcagatgatgaatctgattattactgtgtactatatatggttagtggcattgttttcggcagtggaaccaaggtcactgtcctgggtggaggcggttcaggcggaggtggctctggcggtggcggatcggaggtccaattattggagtctgggggagacttggtacagcctggggggtccctgagactctcctgtgcagcctctggattcacctttagcacctatgccatgagctgggtccgccaggctccagggaaggggctggaatgggtctcagctattagtggtagtggtgaaaacatatactacgcagactccgtgaagggccggttcaccatctccagagacaattccaagaacacgctatttctacaaatgaacagcctgagagccgaggacacggccgtatattactgtgcgaaacacactagctattacatggacgtctggggcaaagggaccacggtcaccgtctcctcaaccacgacgccagcgccgcggccaccaacaccggcgcccaccatcgcgtcgcagcccctgtccctgcgcccagaggcgtgccggccagcggcggggggcgcagtgcacacgagggggctggacttcgcctgtgatatctacatctgggcgcccttggccgggacttgtggggtccttctcctgtcactggttatcaccctttactgccggagggaccagaggctgccccccgatgcccacaagccccctgggggaggcagtttccggacccccatccaagaggagcaggccgacgcccactccaccctggccaagatcagagtgaagttcagcaggagcgcagacgcccccgcgtaccagcagggccagaaccagctctataacgagctcaatctaggacgaagagaggagtacgatgttttggacaagagacgtggccgggaccctgagatggggggaaagccgagaaggaagaaccctcaggaaggcctgtacaatgaactgcagaaagataagatggcggaggcctacagtgagattgggatgaaaggcgagcgccggaggggcaaggggcacgatggcctttaccagggtctcagtacagccaccaaggacacctacgacgcccttcacatgcaggccctgccccctcgcgg

SEQ ID NO: 940 - DNA, 1460 bp, synthetic construct
  misc_feature 1..1460: note = Synthetic
  source 1..1460: mol_type = other DNA
atggccttaccagtgaccgccttgctcctgccgctggccttgctgctccacgccgccaggccgcagactgtggtgacccaggagccatcgttctcagtgtcccctggagggacagtcacactcacttgtggcttgagctctggctcagtctctactagttactaccccggctggtaccagcagaccccaggccaggctccacgcacgctcatctacagcacaaacactcgctcttctggggtccctgatcgcttctctggctccatccttgggaacaaagctgccctcaccatcacgggggcccaggcagatgatgaatctgattattactgtgtgctatatatgggtagtggcatgtttattttcggcagtggaaccaaggtcactgtcctaggtggaggcggttcaggcggaggtggctctggcggtggcggatcgcaggtgcagctggtggagtctgggggaggcgtggtccagcctgggaggtccctgagactctcctgtgcagcgtctggattcaccttcagtagttatggcatgcactgggtccgccaggctccaggcaaggggctggagtgggtggcagttatatggtatgatggaattaataaatactatgcagactccgtgaagggccgattcaccatctccagagacaattccaagaacacgctgtatctgcaaatgaacagcctgagagccgaagacacggctgtgtattactgtgcgagagaacggctggaacgaaggtactactactacatggacgtctggggcaaagggaccacggtcaccgtctcctcaaccacgacgccagcgccgcggccaccaacaccggcgcccaccatcgcgtcgcagcccctgtccctgcgcccagaggcgtgccggccagcggcggggggcgcagtgcacacgagggggctggacttcgcctgtgatatctacatctgggcgcccttggccgggacttgtggggtccttctcctgtcactggttatcaccctttactgccggagggaccagaggctgccccccgatgcccacaagccccctgggggaggcagtttccggacccccatccaagaggagcaggccgacgcccactccaccctggccaagatcagagtgaagttcagcaggagcgcagacgcccccgcgtaccagcagggccagaaccagctctataacgagctcaatctaggacgaagagaggagtacgatgttttggacaagagacgtggccgggaccctgagatggggggaaagccgagaaggaagaaccctcaggaaggcctgtacaatgaactgcagaaagataagatggcggaggcctacagtgagattgggatgaaaggcgagcgccggaggggcaaggggcacgatggcctttaccagggtctcagtacagccaccaaggacacctacgacgcccttcacatgcaggccctgccccctcgcgg

SEQ ID NO: 941 - DNA, 1442 bp, synthetic construct
  misc_feature 1..1442: note = Synthetic
  source 1..1442: mol_type = other DNA
atggccttaccagtgaccgccttgctcctgccgctggccttgctgctccacgccgccaggccgcagactgtggtgacccaggagccatcgttctcagtgtcccctggagggacagtcacactcacttgtgccttgagctctgactcagtctctactagttactttcccagctggtaccggcagaccccaggccaggctccacgcacgctcatctacaacacaaacactcgctcttctggggtccctgatcgcttctctggctccatccttgggaacaaagctgccctcaccatcacgggggcccaggcagatgatgaatctgattattactgtgtgctatatatgggtagtggcattattttcggcagtggaaccaaggtcactgtcctaggtggaggcggttcaggcggaggtggctctggcggtggcggatcggaggtgcagttgttggagtctgggggaggcttggtacagcctggggggtccctgagactctcctgtgcagcctctggattcacctttagcagctttgccatgagctgggtccgccaggctccagggaaggggctggaatgggtctcagctgttagtggtagtggtgatgacacatactacgcagactccgtgaagggccggttcaccatctccagagacaattccaagaacacgctgtatctgcaaatgaacagcctgagagccgaggacacggccgtatattactgtgcgaaacacactagctactacctggacgtctggggcaaagggaccacggtcaccgtctcctcaaccacgacgccagcgccgcggccaccaacaccggcgcccaccatcgcgtcgcagcccctgtccctgcgcccagaggcgtgccggccagcggcggggggcgcagtgcacacgagggggctggacttcgcctgtgatatctacatctgggcgcccttggccgggacttgtggggtccttctcctgtcactggttatcaccctttactgccggagggaccagaggctgccccccgatgcccacaagccccctgggggaggcagtttccggacccccatccaagaggagcaggccgacgcccactccaccctggccaagatcagagtgaagttcagcaggagcgcagacgcccccgcgtaccagcagggccagaaccagctctataacgagctcaatctaggacgaagagaggagtacgatgttttggacaagagacgtggccgggaccctgagatggggggaaagccgagaaggaagaaccctcaggaaggcctgtacaatgaactgcagaaagataagatggcggaggcctacagtgagattgggatgaaaggcgagcgccggaggggcaaggggcacgatggcctttaccagggtctcagtacagccaccaaggacacctacgacgcccttcacatgcaggccctgccccctcgcgg

SEQ ID NO: 942 - DNA, 1460 bp, synthetic construct
  misc_feature 1..1460: note = Synthetic
  source 1..1460: mol_type = other DNA
atggccttaccagtgaccgccttgctcctgccgctggccttgctgctccacgccgccaggccggaaattgtcctgactcagtctccagactttcagtctgtgactccaaaggagaaagtcaccatcacctgccgggccagtcagagtattggtagtagcttacactggtaccagcagaaaccagatcagtctccaaagctcctcatcaagtttgcttcccagtccttctcaggggtcccctcgaggttcagtggcagtggatctgggacagatttcaccctcaccatcaatagcctggaagctgaagatgctgcaacgtatttctgtcatcagagtagtagtttaccgtggacgttcggccaagggaccaaggtggaaatcaaaggtggaggcggttcaggcggaggtggctctggcggtggcggatcgcaggtgcagctggtggagtctgggggaggcgtggtccagcctgggaggtccctgagactctcctgtgcagcgtctggattcaacttcagtacctttgacatacactgggtccgccaggctccaggcaaggggctggagtgggtggcacttatatggtatgatggaagttataaatactatgcagactccgtgaagggccgattcaccatttccagagacaattccaagaacacgctggatctgcgaatgaacagcctgagagccgaggacacggctgtgtattactgtgcgcgaaatgacaactggaacgacgaacactactaccactattacatggacgtctggggcaaagggaccacggtcaccgtctcctcaaccacgacgccagcgccgcggccaccaacaccggcgcccaccatcgcgtcgcagcccctgtccctgcgcccagaggcgtgccggccagcggcggggggcgcagtgcacacgagggggctggacttcgcctgtgatatctacatctgggcgcccttggccgggacttgtggggtccttctcctgtcactggttatcaccctttactgccggagggaccagaggctgccccccgatgcccacaagccccctgggggaggcagtttccggacccccatccaagaggagcaggccgacgcccactccaccctggccaagatcagagtgaagttcagcaggagcgcagacgcccccgcgtaccagcagggccagaaccagctctataacgagctcaatctaggacgaagagaggagtacgatgttttggacaagagacgtggccgggaccctgagatggggggaaagccgagaaggaagaaccctcaggaaggcctgtacaatgaactgcagaaagataagatggcggaggcctacagtgagattgggatgaaaggcgagcgccggaggggcaaggggcacgatggcctttaccagggtctcagtacagccaccaaggacacctacgacgcccttcacatgcaggccctgccccctcgcgg

SEQ ID NO: 943 - DNA, 1475 bp, synthetic construct
  misc_feature 1..1475: note = Synthetic
  source 1..1475: mol_type = other DNA
atggccttaccagtgaccgccttgctcctgccgctggccttgctgctccacgccgccaggccgcagactgtggtgacccaggagccatcgttctcagtgtcccctggagggacagtcacactcacttgtggcttgagctctggctcagtctccactagttacttccccagctggtaccagcagacccccggccaggctccacgcacgctcatctacatcacaaacactcgctcttcaggggtccctgatcgcttctctggctccattattgggaacaaagctgccctcaccatcacgggggcccaggcagatgatgaatctgattatttctgtgtactatatatgggtagtggcacttgggtgttcggtggaggaaccaagctgactgtcctaggtggaggcggttcaggcggaggtggctctggcggtggcggatcggaagtgcacctgttggagtctgggggaggcttggtccagcctggggggtccctgagactctcctgtgcggcctctggattcacctttagcagctatgccatgaactgggtccgccaggctccagggaaggggctggagtgggtctcttctattagtggtagtggtagtagctcatactacgcagactccgtgaagggccggttcaccatctccagagacaattccaagaacacgctgtatctgcaaatgaacagcctgagagccgaggacacggccgtatattactgtgcgtctcgtggattcaactcccagtatcctcccggatactactactactacatggacgtctggggcaaagggaccacggtcaccgtctcctcaaccacgacgccagcgccgcggccaccaacaccggcgcccaccatcgcgtcgcagcccctgtccctgcgcccagaggcgtgccggccagcggcggggggcgcagtgcacacgagggggctggacttcgcctgtgatatctacatctgggcgcccttggccgggacttgtggggtccttctcctgtcactggttatcaccctttactgccggagggaccagaggctgccccccgatgcccacaagccccctgggggaggcagtttccggacccccatccaagaggagcaggccgacgcccactccaccctggccaagatcagagtgaagttcagcaggagcgcagacgcccccgcgtaccagcagggccagaaccagctctataacgagctcaatctaggacgaagagaggagtacgatgttttggacaagagacgtggccgggaccctgagatggggggaaagccgagaaggaagaaccctcaggaaggcctgtacaatgaactgcagaaagataagatggcggaggcctacagtgagattgggatgaaaggcgagcgccggaggggcaaggggcacgatggcctttaccagggtctcagtacagccaccaaggacacctacgacgcccttcacatgcaggccctgccccctcgcgg

SEQ ID NO: 944 - DNA, 1436 bp, synthetic construct
  misc_feature 1..1436: note = Synthetic
  source 1..1436: mol_type = other DNA
atggccttaccagtgaccgccttgctcctgccgctggccttgctgctccacgccgccaggccggaaattgtgctgactcagtctccagactttcagtctgtgactccaaaggagaaagtcaccatcacctgccgggccagtcagagcattggtagtagcttacactggtaccagcagaaaccagatcagtctccaaagctcctcatcaagtttgcttcccagtccttctcaggggtcccctcgaggttcagtggcagtggatctgggacagatttcaccctcaccatccatagcctggaagctgaagatgctgcaacgtattactgtcatcagagtagtagtttaccgtggacgttcggccaagggaccaaggtggaaatcaaaggtggaggcggttcaggcggaggtggctctggcggtggcggatcggaggtgcagctgttggagtctgggggaggcttggtacagcctggggggtccctgagactctcctgtgcagcctctggattcaccttcagcaactatgccatgacctgggtccgccaggctccagggaaggggctggagtgggtctcagctattagtggtagtggtattggcacatactacgcagactccgtgcagggccggttcaccacctccagagacaattccaagaacacgctgtatctgcaaatgaacagcctgagagccgaggacacggccgtttattactgtgcgaaaggggggtacaactggaaggacgtctggggcaaagggaccacggtcaccgtctcctcaaccacgacgccagcgccgcggccaccaacaccggcgcccaccatcgcgtcgcagcccctgtccctgcgcccagaggcgtgccggccagcggcggggggcgcagtgcacacgagggggctggacttcgcctgtgatatctacatctgggcgcccttggccgggacttgtggggtccttctcctgtcactggttatcaccctttactgccggagggaccagaggctgccccccgatgcccacaagccccctgggggaggcagtttccggacccccatccaagaggagcaggccgacgcccactccaccctggccaagatcagagtgaagttcagcaggagcgcagacgcccccgcgtaccagcagggccagaaccagctctataacgagctcaatctaggacgaagagaggagtacgatgttttggacaagagacgtggccgggaccctgagatggggggaaagccgagaaggaagaaccctcaggaaggcctgtacaatgaactgcagaaagataagatggcggaggcctacagtgagattgggatgaaaggcgagcgccggaggggcaaggggcacgatggcctttaccagggtctcagtacagccaccaaggacacctacgacgcccttcacatgcaggccctgccccctcgcgg

SEQ ID NO: 945 - DNA, 1460 bp, synthetic construct
  misc_feature 1..1460: note = Synthetic
  source 1..1460: mol_type = other DNA
atggccttaccagtgaccgccttgctcctgccgctggccttgctgctccacgccgccaggccggaaattgtgctgactcagtctccagactttcagtctgtgactccaaaggagaaagtcaccatcacctgccgggccagtcagagcattggtagtagcttacactggtaccagcagaaaccagatcagtctccaaagctcctcatcaagtttgcttcccagtccttctcaggggtcccctcgaggttcagtggcagtggatctgggacagatttcaccctcaccatccatagcctggaagctgaagatgctgcaacgtattactgtcatcagagtagtagtttaccgtggacgttcggccaagggaccaaggtggaaatcaaaggtggaggcggttcaggcggaggtggctctggcggtggcggatcgcaggtgcagctggtggagtctgggggaggcgtggtccagcctgggaggtccctgagactctcctgtgcagcgtctgggttcaccttcactaactatgacatgcactgggtccgccaggccccaggcaaggggctggagtgggtgacaattatatggcatgatggaagtaataaatattatttagactccgtgaggggccgattcaccatctccagagacaattccaagaacacgctgtatctgcaaatgaacagcctgagagccgaggacacggctgtgtattactgtgcgagaggtgacaactggaacgacgaacaccactacttctactacatggacgtctggggcaaagggaccacggtcaccgtctcctcaaccacgacgccagcgccgcggccaccaacaccggcgcccaccatcgcgtcgcagcccctgtccctgcgcccagaggcgtgccggccagcggcggggggcgcagtgcacacgagggggctggacttcgcctgtgatatctacatctgggcgcccttggccgggacttgtggggtccttctcctgtcactggttatcaccctttactgccggagggaccagaggctgccccccgatgcccacaagccccctgggggaggcagtttccggacccccatccaagaggagcaggccgacgcccactccaccctggccaagatcagagtgaagttcagcaggagcgcagacgcccccgcgtaccagcagggccagaaccagctctataacgagctcaatctaggacgaagagaggagtacgatgttttggacaagagacgtggccgggaccctgagatggggggaaagccgagaaggaagaaccctcaggaaggcctgtacaatgaactgcagaaagataagatggcggaggcctacagtgagattgggatgaaaggcgagcgccggaggggcaaggggcacgatggcctttaccagggtctcagtacagccaccaaggacacctacgacgcccttcacatgcaggccctgccccctcgcgg

SEQ ID NO: 946 - DNA, 1460 bp, synthetic construct
  misc_feature 1..1460: note = Synthetic
  source 1..1460: mol_type = other DNA
atggccttaccagtgaccgccttgctcctgccgctggccttgctgctccacgccgccaggccggaaattgtgttgacacagtctccagccaccctgtctttgtctccaggggaaagagccaccctctcctgcagggccagtcagagtgttagcagctccttagcctggtaccaacagaaacctggccaggctccccggctcctcatctatgatgcatccaacagggccactggcatcccagccaggttcagtggcagtgggtctgggacagacttcactctcaccatcagcagcctagagcctgaagattttgcagtttattactgtcagcagcgtagcaactggcctctcactttcggcggagggaccaaggtggagatcaaaggtggaggcggttcaggcggaggtggctctggcggtggcggatcgcaggtgcagctggtggagtctgggggaggcgtggtccagcctgggaggtccctgagactctcctgtgcagcgtctgggttcaccttcagtaactatgacatgcactgggtccgccaggccccaggcaaggggctggagtgggtgacaattatatggcatgatggaagtaataaatattatttagactccgtgaagggccgattcaccatctccagagacaattccaagaacacgctgtatctgcaaatgaacagcctgagagccgaggacacggctgtgtattactgtgcgagaggtgacaactggaacgacgaacaccactacttctactacatggacgtctggggcaaagggaccacggtcaccgtctcctcaaccacgacgccagcgccgcggccaccaacaccggcgcccaccatcgcgtcgcagcccctgtccctgcgcccagaggcgtgccggccagcggcggggggcgcagtgcacacgagggggctggacttcgcctgtgatatctacatctgggcgcccttggccgggacttgtggggtccttctcctgtcactggttatcaccctttactgccggagggaccagaggctgccccccgatgcccacaagccccctgggggaggcagtttccggacccccatccaagaggagcaggccgacgcccactccaccctggccaagatcagagtgaagttcagcaggagcgcagacgcccccgcgtaccagcagggccagaaccagctctataacgagctcaatctaggacgaagagaggagtacgatgttttggacaagagacgtggccgggaccctgagatggggggaaagccgagaaggaagaaccctcaggaaggcctgtacaatgaactgcagaaagataagatggcggaggcctacagtgagattgggatgaaaggcgagcgccggaggggcaaggggcacgatggcctttaccagggtctcagtacagccaccaaggacacctacgacgcccttcacatgcaggccctgccccctcgcgg

SEQ ID NO: 947 - DNA, 1448 bp, synthetic construct
  misc_feature 1..1448: note = Synthetic
  source 1..1448: mol_type = other DNA
atggccttaccagtgaccgccttgctcctgccgctggccttgctgctccacgccgccaggccggaaattgtgttgacgcagtctccaggcaccctgtctttgtctccaggggaaagagccaccctctcctgcagggccagtcagagtgttagcagcagctacttagcctggtaccagcagaaacctggccaggctcccaggctcctcatctatggtgcatccagcagggccactggcatcccagacaggttcagtggcagtgggtctgggacagacttcactctcaccatcagcagactggagcctgaagattttgcagtgtattactgtcagcagtatggtagctcgtggacgttcggccaagggaccaaggtggaaatcaaaggtggaggcggttcaggcggaggtggctctggcggtggcggatcggaggtgcagctggtggagtctgggggaggtgtggtacggcctggggggtccctgagactctcctgtgcagcctctggattcacctttgatgattatggcatgagctgggtccgccaagctccagggaaggggctggagtgggtctctggtattaattggaatggtggtagcacaggttatgtagactctgtgaagggccgattcaccatctccagagacaacgccaagaactccctgtatctgcaaatgaacagtctgagagccgaggacacggccttgtatcactgtgcgagaccagtaactacggactactactactacatggacgtctggggcaaagggaccacggtcaccgtctcctcaaccacgacgccagcgccgcggccaccaacaccggcgcccaccatcgcgtcgcagcccctgtccctgcgcccagaggcgtgccggccagcggcggggggcgcagtgcacacgagggggctggacttcgcctgtgatatctacatctgggcgcccttggccgggacttgtggggtccttctcctgtcactggttatcaccctttactgccggagggaccagaggctgccccccgatgcccacaagccccctgggggaggcagtttccggacccccatccaagaggagcaggccgacgcccactccaccctggccaagatcagagtgaagttcagcaggagcgcagacgcccccgcgtaccagcagggccagaaccagctctataacgagctcaatctaggacgaagagaggagtacgatgttttggacaagagacgtggccgggaccctgagatggggggaaagccgagaaggaagaaccctcaggaaggcctgtacaatgaactgcagaaagataagatggcggaggcctacagtgagattgggatgaaaggcgagcgccggaggggcaaggggcacgatggcctttaccagggtctcagtacagccaccaaggacacctacgacgcccttcacatgcaggccctgccccctcgcgg

SEQ ID NO: 948 - DNA, 1472 bp, synthetic construct
  misc_feature 1..1472: note = Synthetic
  source 1..1472: mol_type = other DNA
atggccttaccagtgaccgccttgctcctgccgctggccttgctgctccacgccgccaggccggaaattgtgttgacgcagtctccaggcaccctgtctttgtctccaggggaaagagccaccctctcctgcagggccagtcagagtgttagcagcagctacttagcctggtaccagcagaaacctggccaggctcccaggctcctcatctatggtgcatccagcagggccactggcatcccagacaggttcagtggcagtgggtctgggacagacttcactctcaccatcagcagactggagcctgaagattttgcagtgtattactgtcagcagtatggtagctcgtggacgttcggccaagggaccaaggtggaaatcaaaggtggaggcggttcaggcggaggtggctctggcggtggcggatcggaggtgcagctgttggagtctgggggaggcttggtacagcctggggggtccctgagactctcctgtgcagcctctggattcacctttagcagctatgccatgagctgggtccgccaggctccagggaaggggctggagtgggtctcagctattagtggtagtggtggtagcacatactacgcagactccgtgaagggccggttcaccatctccagagacaattccaagaacacgctgtatctgcaaatgaacagcctgagagccgaggacacggccgtatattactgtgcgaaaaaggggacgtcgtacaactggaacgacgtccattactactactactactacatggacgtctggggcaaagggaccacggtcaccgtctcctcaaccacgacgccagcgccgcggccaccaacaccggcgcccaccatcgcgtcgcagcccctgtccctgcgcccagaggcgtgccggccagcggcggggggcgcagtgcacacgagggggctggacttcgcctgtgatatctacatctgggcgcccttggccgggacttgtggggtccttctcctgtcactggttatcaccctttactgccggagggaccagaggctgccccccgatgcccacaagccccctgggggaggcagtttccggacccccatccaagaggagcaggccgacgcccactccaccctggccaagatcagagtgaagttcagcaggagcgcagacgcccccgcgtaccagcagggccagaaccagctctataacgagctcaatctaggacgaagagaggagtacgatgttttggacaagagacgtggccgggaccctgagatggggggaaagccgagaaggaagaaccctcaggaaggcctgtacaatgaactgcagaaagataagatggcggaggcctacagtgagattgggatgaaaggcgagcgccggaggggcaaggggcacgatggcctttaccagggtctcagtacagccaccaaggacacctacgacgcccttcacatgcaggccctgccccctcgcgg

SEQ ID NO: 949 - DNA, 1454 bp, synthetic construct
  misc_feature 1..1454: note = Synthetic
  source 1..1454: mol_type = other DNA
atggccttaccagtgaccgccttgctcctgccgctggccttgctgctccacgccgccaggccggaaattgtgttgacgcagtctccaggcaccctgtctttgtctccaggggaaagagccaccctctcctgcagggccagtcagagtgttagcagcagctacttagcctggtaccagcagaaacctggccaggctcccaggctcctcatctatggtgcatccagcagggccactggcatcccagacaggttcagtggcagtgggtctgggacagacttcactctcaccatcagcagactggagcctgaagattttgcagtgtattactgtcagcagtatggtagctcgtggacgttcggccaagggaccaaggtggaaatcaaaggtggaggcggttcaggcggaggtggctctggcggtggcggatcgcagctgcagctgcaggagtcgggcccaggactggtgaagccttcggagaccctgtccctcacctgcactgtctctggtggctccatcagcagtagtagttactactggggctggatccgccagcccccagggaaggggctggagtggattgggagtatctattatagtgggagcacctactacaacccgtccctcaagagtcgagtcaccatatccgtagacacgtccaagaaccagttctccctgaagctgagctctgtgaccgccgcagacacggctgtgtattactgcacaactggaacgacggcttactactactactactacatggacgtctggggcaaagggaccacggtcaccgtctcctcaaccacgacgccagcgccgcggccaccaacaccggcgcccaccatcgcgtcgcagcccctgtccctgcgcccagaggcgtgccggccagcggcggggggcgcagtgcacacgagggggctggacttcgcctgtgatatctacatctgggcgcccttggccgggacttgtggggtccttctcctgtcactggttatcaccctttactgccggagggaccagaggctgccccccgatgcccacaagccccctgggggaggcagtttccggacccccatccaagaggagcaggccgacgcccactccaccctggccaagatcagagtgaagttcagcaggagcgcagacgcccccgcgtaccagcagggccagaaccagctctataacgagctcaatctaggacgaagagaggagtacgatgttttggacaagagacgtggccgggaccctgagatggggggaaagccgagaaggaagaaccctcaggaaggcctgtacaatgaactgcagaaagataagatggcggaggcctacagtgagattgggatgaaaggcgagcgccggaggggcaaggggcacgatggcctttaccagggtctcagtacagccaccaaggacacctacgacgcccttcacatgcaggccctgccccctcgcgg

SEQ ID NO: 950 - DNA, 1451 bp, synthetic construct
  misc_feature 1..1451: note = Synthetic
  source 1..1451: mol_type = other DNA
atggccttaccagtgaccgccttgctcctgccgctggccttgctgctccacgccgccaggccggaaattgtgttgacgcagtctccaggcaccctgtctttgtctccaggggaaagagccaccctctcctgcagggccagtcagagtgttagcagcagctacttagcctggtaccagcagaaacctggccaggctcccaggctcctcatctatggtgcatccagcagggccactggcatcccagacaggttcagtggcagtgggtctgggacagacttcactctcaccatcagcagactggagcctgaagattttgcagtgtattactgtcagcagtatggtagctcgtggacgttcggccaagggaccaaggtggaaatcaaaggtggaggcggttcaggcggaggtggctctggcggtggcggatcggaggtgcagctgttggagtctgggggaggcttggtgcagcctggggggtccctgagactctcctgtgcagcctctggattcacctttagcagctatgccatgacctgggtccgccaggctccagggaaggggctggagtgggtctcagctattagtggtagtggtggtagcacatactacgcagactccgtgaagggccggttcaccatctccagagacaattccaagaacacgctgtatctgcaaatgaacagcctgagagccgaggacacggccgtatattactgtgcgagaggcgggtataactggcactactactactacatggacgtctggggcaaagggaccacggtcaccgtctcctcaaccacgacgccagcgccgcggccaccaacaccggcgcccaccatcgcgtcgcagcccctgtccctgcgcccagaggcgtgccggccagcggcggggggcgcagtgcacacgagggggctggacttcgcctgtgatatctacatctgggcgcccttggccgggacttgtggggtccttctcctgtcactggttatcaccctttactgccggagggaccagaggctgccccccgatgcccacaagccccctgggggaggcagtttccggacccccatccaagaggagcaggccgacgcccactccaccctggccaagatcagagtgaagttcagcaggagcgcagacgcccccgcgtaccagcagggccagaaccagctctataacgagctcaatctaggacgaagagaggagtacgatgttttggacaagagacgtggccgggaccctgagatggggggaaagccgagaaggaagaaccctcaggaaggcctgtacaatgaactgcagaaagataagatggcggaggcctacagtgagattgggatgaaaggcgagcgccggaggggcaaggggcacgatggcctttaccagggtctcagtacagccaccaaggacacctacgacgcccttcacatgcaggccctgccccctcgcgg

SEQ ID NO: 951 - DNA, 1463 bp, synthetic construct
  misc_feature 1..1463: note = Synthetic
  source 1..1463: mol_type = other DNA
atggccttaccagtgaccgccttgctcctgccgctggccttgctgctccacgccgccaggccggaaattgtgctgactcagtctccagactttcagtctgtgactccaaaggagaaagtcaccatcacctgccgggccagtcagaacattggtagtagcttacactggtaccagcagaaaccagatcagtctccaaagctcctcatcaagtttgcttcccagtccatctcaggggtcccctcgaggttcagtggcagtggatctgggacagatttcaccctcaccatcaatagcctggaagctgaagatgctgcagcgtattactgtcatcagagtagtagtttaccgtggacgttcggccaagggaccaaggtggaaatcaaaggtggaggcggttcaggcggaggtggctctggcggtggcggatcgcaggtgcagctggtggagtctgggggaggcgtggtccagcctgggaggtccctgagactctcctgtgcagcgtctggattcaccttcagtagctatgacatgcactgggtccgccaggctccaggcaaggggctggagtgggtgtcagttatatggtatgatggaagtaataaaaagtatggagactccgcgaagggccgattcaccatctccagagacaattccaagaacacgctggatctgcaaatgaacagcctgagagccgaggacacggctgtgtattactgtgcgagaggcgacaactggaacgacgaaggtggctactactactactacatggacgtctggggcaaagggaccacggtcaccgtctcctcaaccacgacgccagcgccgcggccaccaacaccggcgcccaccatcgcgtcgcagcccctgtccctgcgcccagaggcgtgccggccagcggcggggggcgcagtgcacacgagggggctggacttcgcctgtgatatctacatctgggcgcccttggccgggacttgtggggtccttctcctgtcactggttatcaccctttactgccggagggaccagaggctgccccccgatgcccacaagccccctgggggaggcagtttccggacccccatccaagaggagcaggccgacgcccactccaccctggccaagatcagagtgaagttcagcaggagcgcagacgcccccgcgtaccagcagggccagaaccagctctataacgagctcaatctaggacgaagagaggagtacgatgttttggacaagagacgtggccgggaccctgagatggggggaaagccgagaaggaagaaccctcaggaaggcctgtacaatgaactgcagaaagataagatggcggaggcctacagtgagattgggatgaaaggcgagcgccggaggggcaaggggcacgatggcctttaccagggtctcagtacagccaccaaggacacctacgacgcccttcacatgcaggccctgccccctcgcgg

SEQ ID NO: 952 - DNA, 1463 bp, synthetic construct
  misc_feature 1..1463: note = Synthetic
  source 1..1463: mol_type = other DNA
atggccttaccagtgaccgccttgctcctgccgctggccttgctgctccacgccgccaggccggacatccagatgacccagtctccatcctcactgtctacatctgtaggagacagagtcaccatcacttgtcgggcgagtcagggcattagcaattatttagcctggtttcagcagaaaccagggaaagcccctaagtccctgatctatgctgcatccagtttgcaaagtggggtcccatcaaagttcagcggcagtggatctgggacagatttctctctcaccattagcagcctgcagcctgaagattttgcaacttattactgccaacagtataatagttacccgatcaccttcggccaagggacacgactggagattaaaggtggaggcggttcaggcggaggtggctctggcggtggcggatcgcaggtgcagctggtggagtctgggggaggcgtggtccagcctgggaggtccctgagactctcctgtgcagcgtctggattcaccttcagtagctatgacatgcactgggtccgccaggctccaggcaaggggctggagtgggtgtcagttatatggtatgatggaagtaataaaaagtatggagactccgcgaagggccgattcaccatctccagagacaattccaagaacacgctggatctgcaaatgaacagcctgagagccgaggacacggctgtgtattactgtgcgagaggcgacaactggaacgacgaaggtggctactactactactacatggacgtctggggcaaagggaccacggtcaccgtctcctcaaccacgacgccagcgccgcggccaccaacaccggcgcccaccatcgcgtcgcagcccctgtccctgcgcccagaggcgtgccggccagcggcggggggcgcagtgcacacgagggggctggacttcgcctgtgatatctacatctgggcgcccttggccgggacttgtggggtccttctcctgtcactggttatcaccctttactgccggagggaccagaggctgccccccgatgcccacaagccccctgggggaggcagtttccggacccccatccaagaggagcaggccgacgcccactccaccctggccaagatcagagtgaagttcagcaggagcgcagacgcccccgcgtaccagcagggccagaaccagctctataacgagctcaatctaggacgaagagaggagtacgatgttttggacaagagacgtggccgggaccctgagatggggggaaagccgagaaggaagaaccctcaggaaggcctgtacaatgaactgcagaaagataagatggcggaggcctacagtgagattgggatgaaaggcgagcgccggaggggcaaggggcacgatggcctttaccagggtctcagtacagccaccaaggacacctacgacgcccttcacatgcaggccctgccccctcgcgg

SEQ ID NO: 953 - DNA, 1454 bp, synthetic construct
  misc_feature 1..1454: note = Synthetic
  source 1..1454: mol_type = other DNA
atggccttaccagtgaccgccttgctcctgccgctggccttgctgctccacgccgccaggccggaaattgtgctgactcagtctccagactttcagtctgtgactccaaaggagaaagtcaccatcacctgccgggccagtcagaacattggtagtagcttacactggtaccagcagaaaccagatcagtctccaaagctcctcatcaagtttgcttcccagtccatctcaggggtcccctcgaggttcagtggcagtggatctgggacagatttcaccctcaccatcaatagcctggaagctgaagatgctgcagcgtattactgtcatcagagtagtagtttaccgtggacgttcggccaagggaccaaggtggaaatcaaaggtggaggcggttcaggcggaggtggctctggcggtggcggatcgcaggttcagctggtacagtctggagctgaggtgaagaagtctggggcctcagtgaaggtctcctgcaaggcttctggttacaccttaaccagctatggcatcagctgggtgcgacaggcccctggacaagggcttgagtggatgggatggatcagcgcttacaatggtaacataaactatgcacagaagttccagggcagagtcaccatgaccacagacacatccacgagcacagcctacatggagctgaggagcctgagatctgacgacacggccgtgtattactgtgtgagagatggggaccggtacaactggaaccacagctacatggacgtctggggcaaagggaccacggtcaccgtctcctcaaccacgacgccagcgccgcggccaccaacaccggcgcccaccatcgcgtcgcagcccctgtccctgcgcccagaggcgtgccggccagcggcggggggcgcagtgcacacgagggggctggacttcgcctgtgatatctacatctgggcgcccttggccgggacttgtggggtccttctcctgtcactggttatcaccctttactgccggagggaccagaggctgccccccgatgcccacaagccccctgggggaggcagtttccggacccccatccaagaggagcaggccgacgcccactccaccctggccaagatcagagtgaagttcagcaggagcgcagacgcccccgcgtaccagcagggccagaaccagctctataacgagctcaatctaggacgaagagaggagtacgatgttttggacaagagacgtggccgggaccctgagatggggggaaagccgagaaggaagaaccctcaggaaggcctgtacaatgaactgcagaaagataagatggcggaggcctacagtgagattgggatgaaaggcgagcgccggaggggcaaggggcacgatggcctttaccagggtctcagtacagccaccaaggacacctacgacgcccttcacatgcaggccctgccccctcgcgg

SEQ ID NO: 954 - DNA, 1454 bp, synthetic construct
  misc_feature 1..1454: note = Synthetic
  source 1..1454: mol_type = other DNA
atggccttaccagtgaccgccttgctcctgccgctggccttgctgctccacgccgccaggccggacatccagatgacccagtctccatcctcactgtctacatctgtaggagacagagtcaccatcacttgtcgggcgagtcagggcattagcaattatttagcctggtttcagcagaaaccagggaaagcccctaagtccctgatctatgctgcatccagtttgcaaagtggggtcccatcaaagttcagcggcagtggatctgggacagatttctctctcaccattagcagcctgcagcctgaagattttgcaacttattactgccaacagtataatagttacccgatcaccttcggccaagggacacgactggagattaaaggtggaggcggttcaggcggaggtggctctggcggtggcggatcgcaggttcagctggtacagtctggagctgaggtgaagaagtctggggcctcagtgaaggtctcctgcaaggcttctggttacaccttaaccagctatggcatcagctgggtgcgacaggcccctggacaagggcttgagtggatgggatggatcagcgcttacaatggtaacataaactatgcacagaagttccagggcagagtcaccatgaccacagacacatccacgagcacagcctacatggagctgaggagcctgagatctgacgacacggccgtgtattactgtgtgagagatggggaccggtacaactggaaccacagctacatggacgtctggggcaaagggaccacggtcaccgtctcctcaaccacgacgccagcgccgcggccaccaacaccggcgcccaccatcgcgtcgcagcccctgtccctgcgcccagaggcgtgccggccagcggcggggggcgcagtgcacacgagggggctggacttcgcctgtgatatctacatctgggcgcccttggccgggacttgtggggtccttctcctgtcactggttatcaccctttactgccggagggaccagaggctgccccccgatgcccacaagccccctgggggaggcagtttccggacccccatccaagaggagcaggccgacgcccactccaccctggccaagatcagagtgaagttcagcaggagcgcagacgcccccgcgtaccagcagggccagaaccagctctataacgagctcaatctaggacgaagagaggagtacgatgttttggacaagagacgtggccgggaccctgagatggggggaaagccgagaaggaagaaccctcaggaaggcctgtacaatgaactgcagaaagataagatggcggaggcctacagtgagattgggatgaaaggcgagcgccggaggggcaaggggcacgatggcctttaccagggtctcagtacagccaccaaggacacctacgacgcccttcacatgcaggccctgccccctcgcgg

SEQ ID NO: 955 - DNA, 1451 bp, synthetic construct
  misc_feature 1..1451: note = Synthetic
  source 1..1451: mol_type = other DNA
atggccttaccagtgaccgccttgctcctgccgctggccttgctgctccacgccgccaggccggaaattgtgctgactcagtctccagactttcagtctgtgactccaaaggagaaagtcaccatcacctgccgggccagtcagagcattggaagtagcttacactggtaccagcagaaaccagatcagtctccaaagctcctcatcaagtatgtttcccagtccatctcaggggtcccctcgaggttcagtggcagtggatctgggacagatttcaccctcaccatcaatagcctggaagctgaagatgctgcagcgtattactgtcatcagagtagtagtttaccgtggacgttcggccaagggaccaaggtggaaatcaaaggtggaggcggttcaggcggaggtggctctggcggtggcggatcggaggtgcagctgttggagtctgggggagacttggtacagcctggggggtccctgcgactctcctgtgcagcctctggattcacctttagcacctatgccatgacctgggtccgccaggctccagggaaggggctggagtgggtctcagctattagtggtactagtggtagcacatactacgcagactccgtgaagggccggttcaccatctccagagacaattccaagagcacgctgtatctgcacatgaacagcctgagaaccgaggacacggccgtatattactgtgcgagaggcggatataactggcactactactactacatggacgtctggggcaaagggaccacggtcaccgtctcctcaaccacgacgccagcgccgcggccaccaacaccggcgcccaccatcgcgtcgcagcccctgtccctgcgcccagaggcgtgccggccagcggcggggggcgcagtgcacacgagggggctggacttcgcctgtgatatctacatctgggcgcccttggccgggacttgtggggtccttctcctgtcactggttatcaccctttactgccggagggaccagaggctgccccccgatgcccacaagccccctgggggaggcagtttccggacccccatccaagaggagcaggccgacgcccactccaccctggccaagatcagagtgaagttcagcaggagcgcagacgcccccgcgtaccagcagggccagaaccagctctataacgagctcaatctaggacgaagagaggagtacgatgttttggacaagagacgtggccgggaccctgagatggggggaaagccgagaaggaagaaccctcaggaaggcctgtacaatgaactgcagaaagataagatggcggaggcctacagtgagattgggatgaaaggcgagcgccggaggggcaaggggcacgatggcctttaccagggtctcagtacagccaccaaggacacctacgacgcccttcacatgcaggccctgccccctcgcgg

SEQ ID NO: 956 - DNA, 1454 bp, synthetic construct
  misc_feature 1..1454: note = Synthetic
  source 1..1454: mol_type = other DNA
atggccttaccagtgaccgccttgctcctgccgctggccttgctgctccacgccgccaggccggaaattgtaatgacacagtctccagccaccctgtctttgtctccaggggaaagagccaccctctcctgcagggccagtcagagtgttagcagcagctacttatcctggtaccagcagaaacctgggctggctcccaggctcctcatctatggtgcatccaccagggccactggcatcccagccaggttcagtggcagtgggtctgggacagacttcactctcaccatcagcagcctgcagcctgaagattttgcagtttattactgtcagcaggattataacttacctccgacgttcggccaagggaccaaggtggaaatcaaaggtggaggcggttcaggcggaggtggctctggcggtggcggatcggaggtgcagctgttggagtctgggggagacttggtacagcctggggggtccctgcgactctcctgtgcagcctctggattcacctttagcacctatgccatgacctgggtccgccaggctccagggaaggggctggagtgggtctcagctattagtggtactagtggtagcacatactacgcagactccgtgaagggccggttcaccatctccagagacaattccaagagcacgctgtatctgcacatgaacagcctgagaaccgaggacacggccgtatattactgtgcgagaggcggatataactggcactactactactacatggacgtctggggcaaagggaccacggtcaccgtctcctcaaccacgacgccagcgccgcggccaccaacaccggcgcccaccatcgcgtcgcagcccctgtccctgcgcccagaggcgtgccggccagcggcggggggcgcagtgcacacgagggggctggacttcgcctgtgatatctacatctgggcgcccttggccgggacttgtggggtccttctcctgtcactggttatcaccctttactgccggagggaccagaggctgccccccgatgcccacaagccccctgggggaggcagtttccggacccccatccaagaggagcaggccgacgcccactccaccctggccaagatcagagtgaagttcagcaggagcgcagacgcccccgcgtaccagcagggccagaaccagctctataacgagctcaatctaggacgaagagaggagtacgatgttttggacaagagacgtggccgggaccctgagatggggggaaagccgagaaggaagaaccctcaggaaggcctgtacaatgaactgcagaaagataagatggcggaggcctacagtgagattgggatgaaaggcgagcgccggaggggcaaggggcacgatggcctttaccagggtctcagtacagccaccaaggacacctacgacgcccttcacatgcaggccctgccccctcgcgg

SEQ ID NO: 957 - DNA, 1460 bp, synthetic construct
  misc_feature 1..1460: note = Synthetic
  source 1..1460: mol_type = other DNA
atggccttaccagtgaccgccttgctcctgccgctggccttgctgctccacgccgccaggccggagatcgtgctgacacagtctccagatttccagtctgtgacccctaaggaaaaggttacaattacatgcagagcctctcagagcatcggaagctctctgcactggtatcagcagaaacctgatcagagccccaagctgctgatcaaattcgccagccagtccttcagcggcgtccccagccgcttcagcggcagcggcagcggcactgattttacactgaccatccacagcctggaggccgaggacgccgccacctactattgtcaccagagcagctccctgccttggacctttggccagggcacaaaggtggaaatcaagggcggcggtggatctggaggcggaggctctggaggcggcggctcccaagtgcagctggtggagagcggcggaggagtggtgcaacctggccggagcctgagactgagctgcgctgccagcggcttcaccttcaacaactacgacatgtactgggtgcggcaggcccctggcaagggcctggaatgggtcgccgtgacatggtatgacggctccaacaagtactacgccgacagcgtgaagggcagattcaccatcagcagagataatagcaagaacaccctgtacctgcagatgaacagcctgcgggccgaggacaccgccgtgtactactgcgctagaggcgacaattggaacgacgagcaccattacttctactacatggacgtgtggggcaaaggcaccaccgtgaccgtgtccagcaccacgacgccagcgccgcggccaccaacaccggcgcccaccatcgcgtcgcagcccctgtccctgcgcccagaggcgtgccggccagcggcggggggcgcagtgcacacgagggggctggacttcgcctgtgatatctacatctgggcgcccttggccgggacttgtggggtccttctcctgtcactggttatcaccctttactgccggagggaccagaggctgccccccgatgcccacaagccccctgggggaggcagtttccggacccccatccaagaggagcaggccgacgcccactccaccctggccaagatcagagtgaagttcagcaggagcgcagacgcccccgcgtaccagcagggccagaaccagctctataacgagctcaatctaggacgaagagaggagtacgatgttttggacaagagacgtggccgggaccctgagatggggggaaagccgagaaggaagaaccctcaggaaggcctgtacaatgaactgcagaaagataagatggcggaggcctacagtgagattgggatgaaaggcgagcgccggaggggcaaggggcacgatggcctttaccagggtctcagtacagccaccaaggacacctacgacgcccttcacatgcaggccctgccccctcgcgg

SEQ ID NO: 958 - DNA, 1460 bp, synthetic construct
  misc_feature 1..1460: note = Synthetic
  source 1..1460: mol_type = other DNA
atggccttaccagtgaccgccttgctcctgccgctggccttgctgctccacgccgccaggccggagatcgtgctgacacagagccctgattttcagagcgtgacacctaaagagaaggtgaccatcacctgcagagccagccagagcatcggctccagcctgcactggtatcagcagaagcccgaccagagcccaaagctgctgatcaagttcgcctcccagtctttttccggcgtgcccagcagattcagcgggagcggctctggcaccgacttcacactgaccatccactctctggaagccgaggatgccgccacctactattgccaccagagcagctctctcccttggaccttcggccagggcacaaaagtggaaattaagggcggaggcggctccggcggtggaggctccggaggcggcggctctcaagtgcagctggtggagtctggcggcggagtggtgcaacctggaaggagcctgcggctgagctgcgctgccagcggcttcaccttcagcaattacgacatgcactgggtgcggcaggcccctggcaaaggcctggaatgggtcacaatcatctggcatgatgccagcaacaagtactacctggacagcgtcaagggcagattcacaatcagccgggacaacagcaagaacaccctgtacctgcagatgaacagcctgagagccgaggacaccgctgtgtactattgtgccagaggagataattggaacgacgagcaccactacttctactacatggacgtgtggggcaagggcaccaccgtgaccgtttctagcaccacgacgccagcgccgcggccaccaacaccggcgcccaccatcgcgtcgcagcccctgtccctgcgcccagaggcgtgccggccagcggcggggggcgcagtgcacacgagggggctggacttcgcctgtgatatctacatctgggcgcccttggccgggacttgtggggtccttctcctgtcactggttatcaccctttactgccggagggaccagaggctgccccccgatgcccacaagccccctgggggaggcagtttccggacccccatccaagaggagcaggccgacgcccactccaccctggccaagatcagagtgaagttcagcaggagcgcagacgcccccgcgtaccagcagggccagaaccagctctataacgagctcaatctaggacgaagagaggagtacgatgttttggacaagagacgtggccgggaccctgagatggggggaaagccgagaaggaagaaccctcaggaaggcctgtacaatgaactgcagaaagataagatggcggaggcctacagtgagattgggatgaaaggcgagcgccggaggggcaaggggcacgatggcctttaccagggtctcagtacagccaccaaggacacctacgacgcccttcacatgcaggccctgccccctcgcgg

SEQ ID NO: 959 - DNA, 1460 bp, synthetic construct
  misc_feature 1..1460: note = Synthetic
  source 1..1460: mol_type = other DNA
atggccttaccagtgaccgccttgctcctgccgctggccttgctgctccacgccgccaggccggagatcgtgctgacccagagccctgacttccagagcgtgacccctaaggaaaaggtgacaattacatgcagggccagccagtccatcggctcttctctgcattggtatcagcagaagcccgatcagtctccaaagctgctgatcaaattcgccagccagagcttcagcggagtccccagccggttcagcggatctggctccggcactgatttcaccctgaccatccacagcctggaggccgaagatgccgctacatactattgccaccagtcctccagcctgccttggacattcggccagggcaccaaggtggagatcaaaggcggcggcggcagcggcggaggaggctctggcggaggcggcagccaagtgcagctggtcgaaagcggcggaggcgtggtgcaacctggaagaagcctgagactgagctgcgccgcctctggcttcaccttttctaattacgacatgcactgggtgcggcaggcccctggcaagggtcttgagtgggttaccatcatctggcacgacggcagcaacaagtactacctggacagcgtgaagggcagatttacaatcagcagagataatagcaagaacaccctgtacctgcagatgaacagcctgcgggccgaggacaccgccgtgtactattgtgccagaggcgacaactggaacgacgagcaccactacttctactacatggacgtgtggggcaaaggcaccacagtgaccgtgtccagcaccacgacgccagcgccgcggccaccaacaccggcgcccaccatcgcgtcgcagcccctgtccctgcgcccagaggcgtgccggccagcggcggggggcgcagtgcacacgagggggctggacttcgcctgtgatatctacatctgggcgcccttggccgggacttgtggggtccttctcctgtcactggttatcaccctttactgccggagggaccagaggctgccccccgatgcccacaagccccctgggggaggcagtttccggacccccatccaagaggagcaggccgacgcccactccaccctggccaagatcagagtgaagttcagcaggagcgcagacgcccccgcgtaccagcagggccagaaccagctctataacgagctcaatctaggacgaagagaggagtacgatgttttggacaagagacgtggccgggaccctgagatggggggaaagccgagaaggaagaaccctcaggaaggcctgtacaatgaactgcagaaagataagatggcggaggcctacagtgagattgggatgaaaggcgagcgccggaggggcaaggggcacgatggcctttaccagggtctcagtacagccaccaaggacacctacgacgcccttcacatgcaggccctgccccctcgcgg

SEQ ID NO: 960 - DNA, 1442 bp, synthetic construct
  misc_feature 1..1442: note = Synthetic
  source 1..1442: mol_type = other DNA
atggccttaccagtgaccgccttgctcctgccgctggccttgctgctccacgccgccaggccgcagaccgtggtgacacaggagccttctctgagcgtgagccccggcggcaccgtgaccctgacatgcggcctgagcagcggctccgtctccaccagctactatcctagctggtatcagcagacccctggccaggcccctagaaccctgatctacagcacaaacatccggagctctggagtgccagacagatttagcggaagcatcctgggcaacaaggccgccctgaccatcaccggcgcccaggctgacgacgagagtgattactactgcaagctgtacatgggctctggcatcatcttcggcagcggaacaaaggtgacagttctgggcggaggcggctctggcggcggcggcagcggcggtggcggaagcgaggtgcagctgctggaaagcggcggcggactcgtgcaacctggcggctccctgcggctgtcttgcgccgcttctggcttcacattcagcatctacgccatgagctgggtcagacaggcccccggcaaaggcctggaatgggtgtccgccatcagcggcggcggagataccacctactacgccgacagcgtgaagggcagattcaccattagcagagataatagcaagaccacactggacctgcaaatgaacagcctgcgggccgaggacaccgccgtgtactactgtgctaagcacacctcttattacatggacgtgtggggaaaaggcacaaccgtgaccgtgtccagcaccacgacgccagcgccgcggccaccaacaccggcgcccaccatcgcgtcgcagcccctgtccctgcgcccagaggcgtgccggccagcggcggggggcgcagtgcacacgagggggctggacttcgcctgtgatatctacatctgggcgcccttggccgggacttgtggggtccttctcctgtcactggttatcaccctttactgccggagggaccagaggctgccccccgatgcccacaagccccctgggggaggcagtttccggacccccatccaagaggagcaggccgacgcccactccaccctggccaagatcagagtgaagttcagcaggagcgcagacgcccccgcgtaccagcagggccagaaccagctctataacgagctcaatctaggacgaagagaggagtacgatgttttggacaagagacgtggccgggaccctgagatggggggaaagccgagaaggaagaaccctcaggaaggcctgtacaatgaactgcagaaagataagatggcggaggcctacagtgagattgggatgaaaggcgagcgccggaggggcaaggggcacgatggcctttaccagggtctcagtacagccaccaaggacacctacgacgcccttcacatgcaggccctgccccctcgcgg

SEQ ID NO: 961 - DNA, 1460 bp, synthetic construct
  misc_feature 1..1460: note = Synthetic
  source 1..1460: mol_type = other DNA
atggccttaccagtgaccgccttgctcctgccgctggccttgctgctccacgccgccaggccggagatcgtgctgacacagtcccctgactttcagagcgtgacccctaaggaaaaggtcacaattacatgcagagcctctcagagcatcggcagctctctgcactggtatcagcagaaacctgatcagagccccaagctgctgatcaaattcgccagccagagcttctccggcgtgccaagcagattcagcggcagcggcagcggaaccgatttcaccctgaccatccattctctggaggccgaggacgccgccacctactactgccaccagtctagcagcctgccctggaccttcggccagggcacaaaggttgagatcaagggcggcggcggcagcggcggcggcggcagcggcggcggcggcagccaagtgcagctggtggaaagcggcggtggagtggtgcaacctggcagaagcctgcggctgagctgcgccgcttctggcttcacattttctaattacgacaagcactgggtgcggcaggcccctggcaaaggcctggagtgggtcgctgtgatctggtatgacggcagcaacaagtactacgccgacagcgtgaagggcagattcaccatcagcagagacaacagcaagaacaccctgtacctgcagatgaacagcctgcgggctgaagataccgccatgtactattgtgccaggggcgataattggaacgacgagcaccactacttctactacatggacgtgtggggaaagggcaccacagtgaccgtgtccagcaccacgacgccagcgccgcggccaccaacaccggcgcccaccatcgcgtcgcagcccctgtccctgcgcccagaggcgtgccggccagcggcggggggcgcagtgcacacgagggggctggacttcgcctgtgatatctacatctgggcgcccttggccgggacttgtggggtccttctcctgtcactggttatcaccctttactgccggagggaccagaggctgccccccgatgcccacaagccccctgggggaggcagtttccggacccccatccaagaggagcaggccgacgcccactccaccctggccaagatcagagtgaagttcagcaggagcgcagacgcccccgcgtaccagcagggccagaaccagctctataacgagctcaatctaggacgaagagaggagtacgatgttttggacaagagacgtggccgggaccctgagatggggggaaagccgagaaggaagaaccctcaggaaggcctgtacaatgaactgcagaaagataagatggcggaggcctacagtgagattgggatgaaaggcgagcgccggaggggcaaggggcacgatggcctttaccagggtctcagtacagccaccaaggacacctacgacgcccttcacatgcaggccctgccccctcgcgg

SEQ ID NO: 962 - DNA, 1454 bp, synthetic construct
  misc_feature 1..1454: note = Synthetic
  source 1..1454: mol_type = other DNA
atggccttaccagtgaccgccttgctcctgccgctggccttgctgctccacgccgccaggccggagatcgtgctgacccaatctcctgccacactgagcctctccccaggcgagcgggccaccctgagctgcggcgcttctcagagcgtgtacaatagctacctggcctggtatcagcagaaacccggcctggctcctagactgctgatctacgacgccagcctgagagccaccggcgtgcctgatagattcagcggcagcggcagcggaaccgacttcaccctgacaatcagcacactggaacccgaggattttgccgtgtactattgccagcagtacggcggcagccctatgtacacattcggccagggcaccaagctggaaatcaagggcggcggcggaagcggcggcggaggaagcggcggcggcggcagccaagtgcagctggtccagtctggagctgaggtgaagaagcccggcgccagcgtgaaggtgtcctgtaaagcctctggttatacattcacaaactatggcttcagctgggttagacaggcccctggacagggcctggactggatgggatggatcagcgcctacaacggctacaccaactacacccagaagctgcagggcagagtgacaatgaccacagataccagcaccaccacagcttacatggaactgaggtccctgcggagcgacgacaccgccgtgtactactgcgccagacggggcctgctgtactactactacagcatggacgtgtggggcaagggcaccaccgtgaccgtgtcttctaccacgacgccagcgccgcggccaccaacaccggcgcccaccatcgcgtcgcagcccctgtccctgcgcccagaggcgtgccggccagcggcggggggcgcagtgcacacgagggggctggacttcgcctgtgatatctacatctgggcgcccttggccgggacttgtggggtccttctcctgtcactggttatcaccctttactgccggagggaccagaggctgccccccgatgcccacaagccccctgggggaggcagtttccggacccccatccaagaggagcaggccgacgcccactccaccctggccaagatcagagtgaagttcagcaggagcgcagacgcccccgcgtaccagcagggccagaaccagctctataacgagctcaatctaggacgaagagaggagtacgatgttttggacaagagacgtggccgggaccctgagatggggggaaagccgagaaggaagaaccctcaggaaggcctgtacaatgaactgcagaaagataagatggcggaggcctacagtgagattgggatgaaaggcgagcgccggaggggcaaggggcacgatggcctttaccagggtctcagtacagccaccaaggacacctacgacgcccttcacatgcaggccctgccccctcgcgg

SEQ ID NO: 963 - DNA, 1442 bp, synthetic construct
  misc_feature 1..1442: note = Synthetic
  source 1..1442: mol_type = other DNA
atggccttaccagtgaccgccttgctcctgccgctggccttgctgctccacgccgccaggccgcagaccgtggtgacccaggagcctagcctgtccgtgtcccctggcggcaccgtgaccctcacatgcggcctgagcagcggctcagtttccacgagcgactaccccagctggtatcagcaaacccctggacaggctcctcggaccctgatctacagaaccaacacccggagcagcggcgtgcccgatagattctctggctctatcctgggcaacaaggccgctctgaccattacaggcgcccaggccgacgacgagagcgattattactgcgtgctgtacatggacagcggcatcatcttcggctctggaacaaaggtgacagtgctgggcggaggcggcagcggaggcggcggcagcggcggaggaggctctgaggtgcagctgctggaaagcggcggcggactggtgcaacctggcggctctctgcggctgtcctgtaccgccagcggcttcaccttcagcagcttcgccatgagctgggtcagacaggctccaggaaaaggcctggaatgggtgtctgccatgagcggatctggcgacaccacatactacgccgattccgtgaagggcagatttaccatcagcagagataatagcaagacaacactgtatctgcagatgaacagcctgagggccgaggacacagccgtgtacagctgcgccaagcacaccacctactacatggacgtgtggggcaaaggcaccaccgtcacagtgtccagcaccacgacgccagcgccgcggccaccaacaccggcgcccaccatcgcgtcgcagcccctgtccctgcgcccagaggcgtgccggccagcggcggggggcgcagtgcacacgagggggctggacttcgcctgtgatatctacatctgggcgcccttggccgggacttgtggggtccttctcctgtcactggttatcaccctttactgccggagggaccagaggctgccccccgatgcccacaagccccctgggggaggcagtttccggacccccatccaagaggagcaggccgacgcccactccaccctggccaagatcagagtgaagttcagcaggagcgcagacgcccccgcgtaccagcagggccagaaccagctctataacgagctcaatctaggacgaagagaggagtacgatgttttggacaagagacgtggccgggaccctgagatggggggaaagccgagaaggaagaaccctcaggaaggcctgtacaatgaactgcagaaagataagatggcggaggcctacagtgagattgggatgaaaggcgagcgccggaggggcaaggggcacgatggcctttaccagggtctcagtacagccaccaaggacacctacgacgcccttcacatgcaggccctgccccctcgcgg

SEQ ID NO: 964 - DNA, 1442 bp, synthetic construct
  misc_feature 1..1442: note = Synthetic
  source 1..1442: mol_type = other DNA
atggccttaccagtgaccgccttgctcctgccgctggccttgctgctccacgccgccaggccgcagaccgtcgtgacccaggagccttctctgagcgtgtctccaggaggcacagttactctgacatgcggcctgtctagcggcagcgtgtccaccagcgactaccccagctggtatcagcaaacacctggccaggctcctagaaccctgatctatagaacaaataccagaagcagcggcgtgcccgatagattcagcggaagcatcctgggcaacaaggccgccctgaccatcaccggcgcccaggctgacgacgagtctgattactactgcgtgctgtacatgggcagcggcatcattttcggcagcggaacaaaggtgacagtgctgggaggtggcggcagcggcggcggaggctccggcggcggaggctcagaggtgcagctgctggaaagcggcggcggcctggtgcaacctggcggaagtctgcggctgtcttgtgccgcttctggattcaccttcaacacctacgccatgagctgggtgcggcaggcccctggcaaaggcctggaatgggtctccgccatgagcggctctggcgacacaacctactatgccgacagcgtgaagggcagatttacaatcagcagggataacagcaagaccaccctgtacctgcagatgaacagcctccgggccgaggacaccgccgtgtacagctgcgccaagcacaccagctactacatggacgtgtggggcaaaggcaccaccgtgaccgtgtccagcaccacgacgccagcgccgcggccaccaacaccggcgcccaccatcgcgtcgcagcccctgtccctgcgcccagaggcgtgccggccagcggcggggggcgcagtgcacacgagggggctggacttcgcctgtgatatctacatctgggcgcccttggccgggacttgtggggtccttctcctgtcactggttatcaccctttactgccggagggaccagaggctgccccccgatgcccacaagccccctgggggaggcagtttccggacccccatccaagaggagcaggccgacgcccactccaccctggccaagatcagagtgaagttcagcaggagcgcagacgcccccgcgtaccagcagggccagaaccagctctataacgagctcaatctaggacgaagagaggagtacgatgttttggacaagagacgtggccgggaccctgagatggggggaaagccgagaaggaagaaccctcaggaaggcctgtacaatgaactgcagaaagataagatggcggaggcctacagtgagattgggatgaaaggcgagcgccggaggggcaaggggcacgatggcctttaccagggtctcagtacagccaccaaggacacctacgacgcccttcacatgcaggccctgccccctcgcgg

SEQ ID NO: 965 - DNA, 1442 bp, synthetic construct
  misc_feature 1..1442: note = Synthetic
  source 1..1442: mol_type = other DNA
atggccttaccagtgaccgccttgctcctgccgctggccttgctgctccacgccgccaggccgcagaccgtggtgacccaagagcccagcttctctgtgtccccaggtggcaccgtgacactgacatgcggcctgtacagcgacagcgtgtctacaagctactatcctagctggtatcagcagacacctggccaggctcctagaaccctgatctacaacaccaacacaagaagcagcggcgtgcccgaccggtttagcggaagcatcctgggcaacaaggccgccctgaccatcaccggcgcccaggccgacgacgagagcgactactattgtgtgctgtacatggtgtccggcatcgtgttcggctctggaacaaaggtgaccgttctgggaggcggcggcagcggcggaggcggcagcggaggaggcggctcagaagtgcagctgctggaaagcggcggcgacctggtgcaacctggcggctccctgagactgagctgcgccgcttctggctttaccttcagcacctacgccatgagctgggtgcggcaggcccctggcaaaggactggagtgggtctccgccatcagcggcagcggcgagaatatctactacgctgatagcgtgaagggcagattcaccattagcagagataattctaagaacaccctgttcctgcagatgaacagcctgcgggccgaagataccgccgtgtactactgcgccaagcacacatcttactacatggacgtgtggggcaaaggcaccaccgtcacagtgtccagcaccacgacgccagcgccgcggccaccaacaccggcgcccaccatcgcgtcgcagcccctgtccctgcgcccagaggcgtgccggccagcggcggggggcgcagtgcacacgagggggctggacttcgcctgtgatatctacatctgggcgcccttggccgggacttgtggggtccttctcctgtcactggttatcaccctttactgccggagggaccagaggctgccccccgatgcccacaagccccctgggggaggcagtttccggacccccatccaagaggagcaggccgacgcccactccaccctggccaagatcagagtgaagttcagcaggagcgcagacgcccccgcgtaccagcagggccagaaccagctctataacgagctcaatctaggacgaagagaggagtacgatgttttggacaagagacgtggccgggaccctgagatggggggaaagccgagaaggaagaaccctcaggaaggcctgtacaatgaactgcagaaagataagatggcggaggcctacagtgagattgggatgaaaggcgagcgccggaggggcaaggggcacgatggcctttaccagggtctcagtacagccaccaaggacacctacgacgcccttcacatgcaggccctgccccctcgcgg

SEQ ID NO: 966 - DNA, 1460 bp, synthetic construct
  misc_feature 1..1460: note = Synthetic
  source 1..1460: mol_type = other DNA
atggccttaccagtgaccgccttgctcctgccgctggccttgctgctccacgccgccaggccgcagaccgtggtgacccaggagcctagcttcagcgtgtcccccggaggcacagtgaccctgacatgcggcctcagctctggctccgtcagcacctcttactatcctggatggtatcagcagacacctggccaggccccaagaaccctgatctacagcacaaacaccagaagcagcggcgtgcccgatagatttagcggcagcatcctgggcaacaaggccgccctgaccattacaggcgcccaggctgatgacgagagcgactactactgtgtgctgtacatgggcagcggcatgttcatcttcggctctggaaccaaggtgacagtgctgggtggcggaggatctggcggaggcggctctggcggcggcggcagccaagtgcagctggtggaaagcggaggcggagttgtgcaacctggcagatctctgcgcctgtcatgcgccgccagcggctttacattctccagctacggcatgcactgggtgcggcaggcccctggcaaaggcctggaatgggtcgctgtgatctggtacgacggcatcaacaaatactacgccgacagcgtgaagggcagattcaccatcagcagagataatagcaagaacaccctgtacctgcagatgaacagcctgcgggccgaggacactgccgtgtactactgcgccagagagcggctggaacggagatactactactacatggacgtgtggggcaagggcaccaccgtgaccgtgtccagtaccacgacgccagcgccgcggccaccaacaccggcgcccaccatcgcgtcgcagcccctgtccctgcgcccagaggcgtgccggccagcggcggggggcgcagtgcacacgagggggctggacttcgcctgtgatatctacatctgggcgcccttggccgggacttgtggggtccttctcctgtcactggttatcaccctttactgccggagggaccagaggctgccccccgatgcccacaagccccctgggggaggcagtttccggacccccatccaagaggagcaggccgacgcccactccaccctggccaagatcagagtgaagttcagcaggagcgcagacgcccccgcgtaccagcagggccagaaccagctctataacgagctcaatctaggacgaagagaggagtacgatgttttggacaagagacgtggccgggaccctgagatggggggaaagccgagaaggaagaaccctcaggaaggcctgtacaatgaactgcagaaagataagatggcggaggcctacagtgagattgggatgaaaggcgagcgccggaggggcaaggggcacgatggcctttaccagggtctcagtacagccaccaaggacacctacgacgcccttcacatgcaggccctgccccctcgcgg

SEQ ID NO: 967 - DNA, 1442 bp, synthetic construct
  misc_feature 1..1442: note = Synthetic
  source 1..1442: mol_type = other DNA
atggccttaccagtgaccgccttgctcctgccgctggccttgctgctccacgccgccaggccgcagacagtggtgacacaggagcctagcttttctgtgtcccctggcggcaccgtgacactgacatgcgccctgagctccgatagcgtgtcaacatcttacttccccagctggtatcggcagacccctggacaggcccctagaaccctgatctacaacaccaacaccagaagcagcggcgtgccagatagattcagcggctccatcctgggcaacaaggccgccctgaccattacaggcgcccaggccgacgacgagagcgactactactgtgtgctgtacatgggcagcggcatcatcttcggctctggcacaaaggtgaccgtcctgggcggcggcggcagcggcggaggtggaagcggcggaggcggatctgaggtgcagctgctggaatctggaggcggcctcgtgcagcctggaggcagcctgaggctgagctgcgctgcttctggcttcaccttcagcagcttcgccatgagctgggtcagacaagctcccggcaaaggcctggaatgggtgtccgccgtgtctggcagcggcgacgatacctactacgccgatagcgtgaaaggaagatttacaatcagccgggacaacagcaagaataccctgtacctgcagatgaactctctgcgggccgaggacaccgccgtgtactattgcgccaagcacaccagctactacctggacgtgtggggcaagggcaccaccgtgaccgtttccagcaccacgacgccagcgccgcggccaccaacaccggcgcccaccatcgcgtcgcagcccctgtccctgcgcccagaggcgtgccggccagcggcggggggcgcagtgcacacgagggggctggacttcgcctgtgatatctacatctgggcgcccttggccgggacttgtggggtccttctcctgtcactggttatcaccctttactgccggagggaccagaggctgccccccgatgcccacaagccccctgggggaggcagtttccggacccccatccaagaggagcaggccgacgcccactccaccctggccaagatcagagtgaagttcagcaggagcgcagacgcccccgcgtaccagcagggccagaaccagctctataacgagctcaatctaggacgaagagaggagtacgatgttttggacaagagacgtggccgggaccctgagatggggggaaagccgagaaggaagaaccctcaggaaggcctgtacaatgaactgcagaaagataagatggcggaggcctacagtgagattgggatgaaaggcgagcgccggaggggcaaggggcacgatggcctttaccagggtctcagtacagccaccaaggacacctacgacgcccttcacatgcaggccctgccccctcgcgg

SEQ ID NO: 968 - DNA, 1460 bp, synthetic construct
  misc_feature 1..1460: note = Synthetic
  source 1..1460: mol_type = other DNA
atggccttaccagtgaccgccttgctcctgccgctggccttgctgctccacgccgccaggccggagatcgtgctgacccagtctcctgatttccagtccgtgacccctaaggaaaaggtgaccatcacctgtagagcttctcagagcatcggcagctctctgcactggtatcagcagaaacctgaccagagcccaaagctgctgatcaaattcgccagccagtccttcagcggcgtgccctcccggtttagcggctccggcagcggaacagacttcaccctgacaattaacagcctggaagccgaggatgccgccacatacttctgccaccagtcttctagcctgccctggacattcggccagggcacaaaggtggagatcaagggcggcggcggcagcggcggcggcggcagcggtggaggcggaagccaagtgcagctggtggaaagcggaggcggcgtcgtgcaacctggcagaagcctgagactgagctgcgccgccagcggctttaacttcagcaccttcgacatccactgggtgcggcaggcccctggaaaaggcctggagtgggtcgccctgatctggtatgacggcagctacaagtactacgccgatagcgttaagggcaggttcaccatcagcagagataattctaagaacaccctggacctgagaatgaacagcctccgggctgaggacaccgccgtgtactactgcgccagaaatgacaactggaacgacgagcattactatcactactacatggacgtgtggggcaagggcaccaccgtgacagtgtcctctaccacgacgccagcgccgcggccaccaacaccggcgcccaccatcgcgtcgcagcccctgtccctgcgcccagaggcgtgccggccagcggcggggggcgcagtgcacacgagggggctggacttcgcctgtgatatctacatctgggcgcccttggccgggacttgtggggtccttctcctgtcactggttatcaccctttactgccggagggaccagaggctgccccccgatgcccacaagccccctgggggaggcagtttccggacccccatccaagaggagcaggccgacgcccactccaccctggccaagatcagagtgaagttcagcaggagcgcagacgcccccgcgtaccagcagggccagaaccagctctataacgagctcaatctaggacgaagagaggagtacgatgttttggacaagagacgtggccgggaccctgagatggggggaaagccgagaaggaagaaccctcaggaaggcctgtacaatgaactgcagaaagataagatggcggaggcctacagtgagattgggatgaaaggcgagcgccggaggggcaaggggcacgatggcctttaccagggtctcagtacagccaccaaggacacctacgacgcccttcacatgcaggccctgccccctcgcgg

SEQ ID NO: 969 - DNA, 1475 bp, synthetic construct
  misc_feature 1..1475: note = Synthetic
  source 1..1475: mol_type = other DNA
atggccttaccagtgaccgccttgctcctgccgctggccttgctgctccacgccgccaggccgcagaccgtggtgacacaggagcctagcttcagcgtgtctccaggaggaacagtgaccctgacatgcggcctcagcagcggctctgtgtccaccagctatttccccagctggtatcagcagacccctggccaggctcccaggaccctgatctacatcaccaacacaagaagcagcggcgtgcccgacagattttctggcagcatcatcggcaacaaggccgctctgaccatcacaggcgcccaggccgacgacgagagtgattacttctgcgtgctgtacatgggcagcggaacatgggtgttcggcggaggcacaaagctgaccgtcctgggcggcggcggaagcggcggcggcggctctggcggaggcggcagcgaggtgcacctgctggaaagcggcggcggcctggtgcagcctggaggctctctgcggctgagctgtgccgcctctggttttaccttcagcagctacgccatgaattgggttagacaggcccctggcaagggcctggaatgggtcagcagcatcagcggctccggcagcagctcttactatgctgatagcgtgaagggcagattcaccattagcagagacaatagcaagaacaccctgtacctgcagatgaacagcctgcgggccgaggacaccgccgtgtactactgcgccagccggggcttcaactcccaataccctcctggctactactactactacatggacgtgtggggaaaaggcacgaccgtgaccgtgtcctccaccacgacgccagcgccgcggccaccaacaccggcgcccaccatcgcgtcgcagcccctgtccctgcgcccagaggcgtgccggccagcggcggggggcgcagtgcacacgagggggctggacttcgcctgtgatatctacatctgggcgcccttggccgggacttgtggggtccttctcctgtcactggttatcaccctttactgccggagggaccagaggctgccccccgatgcccacaagccccctgggggaggcagtttccggacccccatccaagaggagcaggccgacgcccactccaccctggccaagatcagagtgaagttcagcaggagcgcagacgcccccgcgtaccagcagggccagaaccagctctataacgagctcaatctaggacgaagagaggagtacgatgttttggacaagagacgtggccgggaccctgagatggggggaaagccgagaaggaagaaccctcaggaaggcctgtacaatgaactgcagaaagataagatggcggaggcctacagtgagattgggatgaaaggcgagcgccggaggggcaaggggcacgatggcctttaccagggtctcagtacagccaccaaggacacctacgacgcccttcacatgcaggccctgccccctcgcgg

SEQ ID NO: 970 - DNA, 1436 bp, synthetic construct
  misc_feature 1..1436: note = Synthetic
  source 1..1436: mol_type = other DNA
atggccttaccagtgaccgccttgctcctgccgctggccttgctgctccacgccgccaggccggagatcgtgctgacacagtctcccgactttcagagcgtgacccctaaagagaaggtgacaatcacctgcagagccagccagtcaatcggctctagcctgcactggtatcagcagaaacctgatcagagccctaagctgctgatcaagttcgcctctcagagcttcagcggcgtgccaagccggttcagcggctccggcagcggcaccgacttcaccctgaccatccacagcctggaggccgaagatgccgctacatactactgccaccagtccagcagcctcccctggaccttcggccagggcacaaaggtggaaatcaaaggcggcggaggcagcggcggcggaggctccggaggcggaggcagcgaggtgcagctgctggaaagcggcggcggcctggtgcaacctggcggctccctgaggctgagctgcgccgccagcggcttcacctttagcaactacgctatgacctgggtcagacaggcccctggaaagggcctggagtgggtgtccgccatcagcggatctggtattggaacatactacgccgacagcgtgcaaggcagattcacaacaagcagagataattctaagaacaccctgtacctgcagatgaacagcctgcgggccgaggacaccgccgtgtactattgtgccaagggcggctacaactggaaggacgtgtggggcaagggaaccaccgtgaccgtttcttctaccacgacgccagcgccgcggccaccaacaccggcgcccaccatcgcgtcgcagcccctgtccctgcgcccagaggcgtgccggccagcggcggggggcgcagtgcacacgagggggctggacttcgcctgtgatatctacatctgggcgcccttggccgggacttgtggggtccttctcctgtcactggttatcaccctttactgccggagggaccagaggctgccccccgatgcccacaagccccctgggggaggcagtttccggacccccatccaagaggagcaggccgacgcccactccaccctggccaagatcagagtgaagttcagcaggagcgcagacgcccccgcgtaccagcagggccagaaccagctctataacgagctcaatctaggacgaagagaggagtacgatgttttggacaagagacgtggccgggaccctgagatggggggaaagccgagaaggaagaaccctcaggaaggcctgtacaatgaactgcagaaagataagatggcggaggcctacagtgagattgggatgaaaggcgagcgccggaggggcaaggggcacgatggcctttaccagggtctcagtacagccaccaaggacacctacgacgcccttcacatgcaggccctgccccctcgcgg

SEQ ID NO: 971 - DNA, 1460 bp, synthetic construct
  misc_feature 1..1460: note = Synthetic
  source 1..1460: mol_type = other DNA
atggccttaccagtgaccgccttgctcctgccgctggccttgctgctccacgccgccaggccggagatcgtgctgacccagagccctgacttccagtctgtgacacctaaggaaaaggtgacaatcacctgtagggccagccaaagcatcggcagcagcctgcattggtatcagcagaagcccgatcagtctccaaagctgctgatcaaattcgccagccagagcttcagcggagttcctagccggttcagcggctctggcagcggaacagatttcaccctgacaattcactctctggaggccgaggatgccgccacatattactgccaccagtctagcagcctgccttggacctttggacagggcaccaaggtggaaatcaagggcggaggcggctccggaggaggcggctctggtggcggcggcagccaagtgcagctggtggagagcggcggcggcgtcgtgcagcccggcagaagcctgcggctgtcttgcgctgccagcggcttcacctttacaaactacgacatgcactgggtcagacaggcccctggcaaaggcctggaatgggtgaccatcatctggcacgacggctccaataagtactacctggacagcgtgcggggcagattcacgatcagcagagataattccaagaacaccctgtacctgcagatgaacagcctgagagccgaggacaccgccgtgtactattgcgccagaggcgacaactggaacgacgagcaccactacttctactacatggacgtgtggggcaagggcaccaccgtgaccgtgtccagcaccacgacgccagcgccgcggccaccaacaccggcgcccaccatcgcgtcgcagcccctgtccctgcgcccagaggcgtgccggccagcggcggggggcgcagtgcacacgagggggctggacttcgcctgtgatatctacatctgggcgcccttggccgggacttgtggggtccttctcctgtcactggttatcaccctttactgccggagggaccagaggctgccccccgatgcccacaagccccctgggggaggcagtttccggacccccatccaagaggagcaggccgacgcccactccaccctggccaagatcagagtgaagttcagcaggagcgcagacgcccccgcgtaccagcagggccagaaccagctctataacgagctcaatctaggacgaagagaggagtacgatgttttggacaagagacgtggccgggaccctgagatggggggaaagccgagaaggaagaaccctcaggaaggcctgtacaatgaactgcagaaagataagatggcggaggcctacagtgagattgggatgaaaggcgagcgccggaggggcaaggggcacgatggcctttaccagggtctcagtacagccaccaaggacacctacgacgcccttcacatgcaggccctgccccctcgcgg

SEQ ID NO: 972 - DNA, 1460 bp, synthetic construct
  misc_feature 1..1460: note = Synthetic
  source 1..1460: mol_type = other DNA
atggccttaccagtgaccgccttgctcctgccgctggccttgctgctccacgccgccaggccggaaatcgtgctgacccagagccccgctacactgagcctctcccctggcgagcgggccacactgtcttgtagagcctctcagtccgtgtccagcagcctggcctggtatcagcagaagcccggccaggctccaagactgctgatctacgacgccagcaatagagccaccggcatccccgcccggttttccggcagcggatctggaacagattttaccctgaccatcagcagcctggaacctgaggatttcgccgtgtactactgccagcaaagaagcaactggcctctgacattcggcggcggcacaaaggtggaaatcaagggcggcggaggcagcggaggcggaggctctggcggcggtggcagtcaggtgcagctggttgagagcggcggaggcgtggtgcaacctggaagatctctgcgcctgagctgcgccgccagcggcttcaccttcagcaactacgatatgcactgggtgcggcaggcccctggcaagggcctggaatgggtcaccattatctggcatgacggcagcaacaagtactacctggacagcgtgaaaggcagattcaccatcagcagagacaatagcaagaacaccctgtacctgcagatgaacagcctgcgggccgaggacaccgccgtgtactattgcgccagaggcgacaactggaacgacgagcaccactacttctactatatggacgtgtggggcaaaggcacaaccgtgaccgtcagcagcaccacgacgccagcgccgcggccaccaacaccggcgcccaccatcgcgtcgcagcccctgtccctgcgcccagaggcgtgccggccagcggcggggggcgcagtgcacacgagggggctggacttcgcctgtgatatctacatctgggcgcccttggccgggacttgtggggtccttctcctgtcactggttatcaccctttactgccggagggaccagaggctgccccccgatgcccacaagccccctgggggaggcagtttccggacccccatccaagaggagcaggccgacgcccactccaccctggccaagatcagagtgaagttcagcaggagcgcagacgcccccgcgtaccagcagggccagaaccagctctataacgagctcaatctaggacgaagagaggagtacgatgttttggacaagagacgtggccgggaccctgagatggggggaaagccgagaaggaagaaccctcaggaaggcctgtacaatgaactgcagaaagataagatggcggaggcctacagtgagattgggatgaaaggcgagcgccggaggggcaaggggcacgatggcctttaccagggtctcagtacagccaccaaggacacctacgacgcccttcacatgcaggccctgccccctcgcgg

SEQ ID NO: 973 - DNA, 1448 bp, synthetic construct
  misc_feature 1..1448: note = Synthetic
  source 1..1448: mol_type = other DNA
atggccttaccagtgaccgccttgctcctgccgctggccttgctgctccacgccgccaggccggagatcgtgctgacacagagccccggaacactgagcctgagccctggcgagcgggctacactgtcttgcagagcttctcagagcgtttcctccagctacctggcctggtatcagcaaaagcccggccaagctccaagactgctgatctacggcgccagctctagggccaccggcattcctgatagattcagcggctctggcagcggaacagattttaccctgaccatcagcagactggagcctgaggatttcgccgtgtactactgccagcagtacggatctagctggacctttggccagggcaccaaggtggaaatcaaaggcggaggaggcagcggcggcggcggcagcggcggaggcggcagcgaagtgcagctggtcgagagcggcggcggcgtggtgcggcctggcgggtccctgagactgagctgcgccgcctctggcttcaccttcgacgactatggcatgagctgggtcagacaggcccctggaaaaggcctggaatgggtgtccggaatcaactggaatggcggcagtacaggctacgtggacagcgtgaagggcagattcaccatcagccgggacaacgccaagaacagcctgtatctgcagatgaacagcctgcgggccgaggacaccgccctgtaccactgtgccagacctgtgacaaccgactactactactacatggacgtgtggggcaagggcaccaccgtgaccgtgtcttccaccacgacgccagcgccgcggccaccaacaccggcgcccaccatcgcgtcgcagcccctgtccctgcgcccagaggcgtgccggccagcggcggggggcgcagtgcacacgagggggctggacttcgcctgtgatatctacatctgggcgcccttggccgggacttgtggggtccttctcctgtcactggttatcaccctttactgccggagggaccagaggctgccccccgatgcccacaagccccctgggggaggcagtttccggacccccatccaagaggagcaggccgacgcccactccaccctggccaagatcagagtgaagttcagcaggagcgcagacgcccccgcgtaccagcagggccagaaccagctctataacgagctcaatctaggacgaagagaggagtacgatgttttggacaagagacgtggccgggaccctgagatggggggaaagccgagaaggaagaaccctcaggaaggcctgtacaatgaactgcagaaagataagatggcggaggcctacagtgagattgggatgaaaggcgagcgccggaggggcaaggggcacgatggcctttaccagggtctcagtacagccaccaaggacacctacgacgcccttcacatgcaggccctgccccctcgcgg

SEQ ID NO: 974 - DNA, 1472 bp, synthetic construct
  misc_feature 1..1472: note = Synthetic
  source 1..1472: mol_type = other DNA
atggccttaccagtgaccgccttgctcctgccgctggccttgctgctccacgccgccaggccggaaattgtgctgacccagagccccggcaccctgagcctgtctccaggcgagcgggctaccctgtcctgcagagccagccagtctgtttccagctcttacctggcctggtatcagcaaaagcctggacaggcccctagactgctgatctacggcgcctctagcagggctacaggcatccctgatagatttagcggcagcggctctggcaccgacttcaccctgaccatctccagactggaacccgaggatttcgccgtgtactactgccagcagtacggcagcagctggacatttggccagggcacaaaggtggaaatcaagggcggtggaggcagcggaggcggcggaagcggcggcggcggcagtgaggtgcagctgctggagagcggaggaggcctggtgcaacctggcggcagcctgcggctgagctgcgccgcttccggcttcaccttcagcagctacgccatgagctgggtgcggcaggctcctggaaaaggcctggagtgggtcagcgccatcagcggcagcggaggctcaacatactacgccgacagcgtgaagggcagattcaccatcagccgcgacaactctaagaacaccctgtacctgcagatgaactctctgagagccgaggacaccgccgtgtactattgtgccaagaagggcacaagctacaactggaatgatgtgcactactactactactattatatggacgtgtggggcaaaggcacaaccgtgaccgtgtccagcaccacgacgccagcgccgcggccaccaacaccggcgcccaccatcgcgtcgcagcccctgtccctgcgcccagaggcgtgccggccagcggcggggggcgcagtgcacacgagggggctggacttcgcctgtgatatctacatctgggcgcccttggccgggacttgtggggtccttctcctgtcactggttatcaccctttactgccggagggaccagaggctgccccccgatgcccacaagccccctgggggaggcagtttccggacccccatccaagaggagcaggccgacgcccactccaccctggccaagatcagagtgaagttcagcaggagcgcagacgcccccgcgtaccagcagggccagaaccagctctataacgagctcaatctaggacgaagagaggagtacgatgttttggacaagagacgtggccgggaccctgagatggggggaaagccgagaaggaagaaccctcaggaaggcctgtacaatgaactgcagaaagataagatggcggaggcctacagtgagattgggatgaaaggcgagcgccggaggggcaaggggcacgatggcctttaccagggtctcagtacagccaccaaggacacctacgacgcccttcacatgcaggccctgccccctcgcgg

SEQ ID NO: 975 - DNA, 1454 bp, synthetic construct
  misc_feature 1..1454: note = Synthetic
  source 1..1454: mol_type = other DNA
atggccttaccagtgaccgccttgctcctgccgctggccttgctgctccacgccgccaggccggagatcgtgctgacccagtctccaggcaccctgagcctgagccccggcgagcgggccacactgagctgcagagcctctcagagcgtcagctctagctacctggcctggtatcagcaaaaacctggccaggcccctagactgctgatctacggcgccagcagccgggccaccggcatccctgatagattcagcggatctggcagcggcaccgactttaccctcaccatcagcagactggaacccgaggacttcgccgtgtactattgtcagcagtacggcagcagctggacattcggccagggcaccaaggtggaaatcaagggcggaggcggcagcggcggaggaggatctggcggcggcggcagccagctgcaactgcaggagagcggtcctggactggtgaagccttctgagacactgagcctgacctgcaccgtgtccggcggctctatcagctcctccagctactactggggctggatcagacagccacctggcaagggcctggaatggatcggcagcatttactattctggctcaacatactacaaccccagccttaaaagcagagtgacaatcagcgtggacaccagcaagaaccagttcagcctgaagctgtcctctgtgaccgccgctgatactgccgtttactactgcaccaccggaacaacagcttattactactactactacatggacgtgtggggaaagggcaccacagtgaccgtgtccagcaccacgacgccagcgccgcggccaccaacaccggcgcccaccatcgcgtcgcagcccctgtccctgcgcccagaggcgtgccggccagcggcggggggcgcagtgcacacgagggggctggacttcgcctgtgatatctacatctgggcgcccttggccgggacttgtggggtccttctcctgtcactggttatcaccctttactgccggagggaccagaggctgccccccgatgcccacaagccccctgggggaggcagtttccggacccccatccaagaggagcaggccgacgcccactccaccctggccaagatcagagtgaagttcagcaggagcgcagacgcccccgcgtaccagcagggccagaaccagctctataacgagctcaatctaggacgaagagaggagtacgatgttttggacaagagacgtggccgggaccctgagatggggggaaagccgagaaggaagaaccctcaggaaggcctgtacaatgaactgcagaaagataagatggcggaggcctacagtgagattgggatgaaaggcgagcgccggaggggcaaggggcacgatggcctttaccagggtctcagtacagccaccaaggacacctacgacgcccttcacatgcaggccctgccccctcgcgg

SEQ ID NO: 976 - DNA, 1451 bp, synthetic construct
  misc_feature 1..1451: note = Synthetic
  source 1..1451: mol_type = other DNA
atggccttaccagtgaccgccttgctcctgccgctggccttgctgctccacgccgccaggccggagatcgtgctgacccagtctcccggaacactctccctgtccccaggcgagcgggctacactgagctgccgggccagccagagcgtgtcctcgtcttatctggcctggtatcagcagaaacctggccaagcccctagactgctgatctacggcgccagcagccgggccacaggcatccccgatagattcagcggcagcggaagcggcaccgacttcaccctgacaatcagcagactggaacctgaggacttcgccgtgtactattgtcagcagtacggcagcagctggaccttcggccagggcaccaaggttgaaattaagggcggcggcggctctggcggaggcggctctggcggcggcggaagcgaggtgcagctgctggagagcggtggaggcctggtgcaacctggcggctccctgcggctgagctgcgccgccagcggcttcacctttagctcttacgccatgacctgggtcagacaggcccctggcaagggactggaatgggtgtctgccatcagcggcagcggaggatctacatactacgctgatagcgtgaagggcagatttacaatcagccgcgacaatagcaagaacaccctgtacctgcagatgaacagcctgagagccgaggacaccgccgtgtactactgcgctagaggcggctacaactggcactactactactacatggacgtgtggggcaaaggaaccaccgtgaccgtgtccagcaccacgacgccagcgccgcggccaccaacaccggcgcccaccatcgcgtcgcagcccctgtccctgcgcccagaggcgtgccggccagcggcggggggcgcagtgcacacgagggggctggacttcgcctgtgatatctacatctgggcgcccttggccgggacttgtggggtccttctcctgtcactggttatcaccctttactgccggagggaccagaggctgccccccgatgcccacaagccccctgggggaggcagtttccggacccccatccaagaggagcaggccgacgcccactccaccctggccaagatcagagtgaagttcagcaggagcgcagacgcccccgcgtaccagcagggccagaaccagctctataacgagctcaatctaggacgaagagaggagtacgatgttttggacaagagacgtggccgggaccctgagatggggggaaagccgagaaggaagaaccctcaggaaggcctgtacaatgaactgcagaaagataagatggcggaggcctacagtgagattgggatgaaaggcgagcgccggaggggcaaggggcacgatggcctttaccagggtctcagtacagccaccaaggacacctacgacgcccttcacatgcaggccctgccccctcgcgg

SEQ ID NO: 977 - DNA, 1463 bp, synthetic construct
  misc_feature 1..1463: note = Synthetic
  source 1..1463: mol_type = other DNA
atggccttaccagtgaccgccttgctcctgccgctggccttgctgctccacgccgccaggccggagatcgtgctgacccagagccccgacttccagtccgtgacccctaaggaaaaggtgaccatcacatgcagagccagccagaacatcggcagcagcctgcactggtatcagcagaaacctgatcagtctccaaagctgctgatcaaattcgcctctcagagcatcagcggtgttcctagcagattcagcggctccggcagcggcactgattttacactgaccatcaacagcctggaggccgaggatgccgctgcctactactgccaccagagctctagcctgccctggaccttcggccagggcacaaaggtggaaatcaagggcggcggcggaagcggcggcggcggatctggcggaggcggcagccaagtgcagctggtggagagcggaggcggagtcgtgcaacctggcagaagcctgagactgagctgcgccgcttctggcttcaccttttctagctacgacatgcactgggtgcggcaggcccctggaaaaggcctggaatgggtcagcgtgatctggtatgacggctccaacaagaagtacggcgacagcgccaagggcaggttcaccattagccgggacaattctaagaacaccctggacctgcagatgaacagcctgcgggctgaggacaccgccgtgtactattgtgccagaggcgataattggaacgacgagggcggctactactactactacatggacgtgtggggcaagggaacaaccgtgacagtgtccagcaccacgacgccagcgccgcggccaccaacaccggcgcccaccatcgcgtcgcagcccctgtccctgcgcccagaggcgtgccggccagcggcggggggcgcagtgcacacgagggggctggacttcgcctgtgatatctacatctgggcgcccttggccgggacttgtggggtccttctcctgtcactggttatcaccctttactgccggagggaccagaggctgccccccgatgcccacaagccccctgggggaggcagtttccggacccccatccaagaggagcaggccgacgcccactccaccctggccaagatcagagtgaagttcagcaggagcgcagacgcccccgcgtaccagcagggccagaaccagctctataacgagctcaatctaggacgaagagaggagtacgatgttttggacaagagacgtggccgggaccctgagatggggggaaagccgagaaggaagaaccctcaggaaggcctgtacaatgaactgcagaaagataagatggcggaggcctacagtgagattgggatgaaaggcgagcgccggaggggcaaggggcacgatggcctttaccagggtctcagtacagccaccaaggacacctacgacgcccttcacatgcaggccctgccccctcgcgg

SEQ ID NO: 978 - DNA, 1463 bp, synthetic construct
  misc_feature 1..1463: note = Synthetic
  source 1..1463: mol_type = other DNA
atggccttaccagtgaccgccttgctcctgccgctggccttgctgctccacgccgccaggccggacattcagatgacacagagccccagcagcctctccacctctgtgggcgatagagtgaccatcacatgccgggccagccagggcatcagcaactacctggcctggttccagcagaagcctggaaaggcccctaagagcctgatctacgccgccagcagcctgcagagcggagtgccatctaagttcagcggcagcggatctggcaccgacttcagcctgaccatcagctctctgcagcctgaggattttgccacatactactgtcagcagtacaacagctaccctatcacattcggccagggcaccagactggaaatcaagggcggaggcggcagcggcggcggcggatctggcggaggcggcagccaagtgcagctggtggagagcggcggcggcgtggtgcagcccggacgctccctgcggctgagctgcgccgccagcggctttaccttctctagctacgatatgcactgggtcagacaggctcctggcaaaggcctggaatgggtgtccgtgatctggtacgacggctccaacaagaagtacggcgacagcgccaagggcagattcaccatctctcgggacaatagcaagaacacactggacctgcagatgaactctctgagagccgaggacaccgccgtgtactactgcgccagaggcgataattggaacgacgagggcggttattactactactatatggacgtgtggggaaaaggcacaaccgtgaccgtttccagcaccacgacgccagcgccgcggccaccaacaccggcgcccaccatcgcgtcgcagcccctgtccctgcgcccagaggcgtgccggccagcggcggggggcgcagtgcacacgagggggctggacttcgcctgtgatatctacatctgggcgcccttggccgggacttgtggggtccttctcctgtcactggttatcaccctttactgccggagggaccagaggctgccccccgatgcccacaagccccctgggggaggcagtttccggacccccatccaagaggagcaggccgacgcccactccaccctggccaagatcagagtgaagttcagcaggagcgcagacgcccccgcgtaccagcagggccagaaccagctctataacgagctcaatctaggacgaagagaggagtacgatgttttggacaagagacgtggccgggaccctgagatggggggaaagccgagaaggaagaaccctcaggaaggcctgtacaatgaactgcagaaagataagatggcggaggcctacagtgagattgggatgaaaggcgagcgccggaggggcaaggggcacgatggcctttaccagggtctcagtacagccaccaaggacacctacgacgcccttcacatgcaggccctgccccctcgcgg

SEQ ID NO: 979 - DNA, 1454 bp, synthetic construct
  misc_feature 1..1454: note = Synthetic
  source 1..1454: mol_type = other DNA
atggccttaccagtgaccgccttgctcctgccgctggccttgctgctccacgccgccaggccggagatcgtgctgacacagagccctgatttccaaagcgtgacccctaaggaaaaggtgaccatcacatgcagagcctctcagaacattggaagtagcctgcactggtatcagcagaaacccgatcagtccccaaagctgctgatcaagttcgccagccagagcatcagcggagtgcccagccggttcagcggctctggctctggcaccgacttcaccctgaccatcaatagcctggaggccgaggacgccgctgcttattactgccaccagagcagctccctgccttggacctttggccagggcaccaaggtcgagatcaagggaggcggaggcagcggaggcggcggcagcggcggcggcggcagccaagtgcagctggtgcagtctggagccgaggtgaaaaagagcggcgcctcagtgaaggtgtcctgcaaggccagcggctacacactgaccagctacggcatctcttgggttagacaggcccctggacaaggcctggaatggatgggctggatcagcgcctacaacggcaacatcaactacgcccagaaattccagggcagagtgacaatgaccacagacaccagcacctccaccgcttacatggaactgcggagcctgagaagcgacgacaccgccgtgtactactgtgtgcgggacggcgatagatacaattggaaccacagctatatggacgtgtggggcaagggcacaacagtcaccgtgtcttctaccacgacgccagcgccgcggccaccaacaccggcgcccaccatcgcgtcgcagcccctgtccctgcgcccagaggcgtgccggccagcggcggggggcgcagtgcacacgagggggctggacttcgcctgtgatatctacatctgggcgcccttggccgggacttgtggggtccttctcctgtcactggttatcaccctttactgccggagggaccagaggctgccccccgatgcccacaagccccctgggggaggcagtttccggacccccatccaagaggagcaggccgacgcccactccaccctggccaagatcagagtgaagttcagcaggagcgcagacgcccccgcgtaccagcagggccagaaccagctctataacgagctcaatctaggacgaagagaggagtacgatgttttggacaagagacgtggccgggaccctgagatggggggaaagccgagaaggaagaaccctcaggaaggcctgtacaatgaactgcagaaagataagatggcggaggcctacagtgagattgggatgaaaggcgagcgccggaggggcaaggggcacgatggcctttaccagggtctcagtacagccaccaaggacacctacgacgcccttcacatgcaggccctgccccctcgcgg

SEQ ID NO: 980 - DNA, 1454 bp, synthetic construct
  misc_feature 1..1454: note = Synthetic
  source 1..1454: mol_type = other DNA
atggccttaccagtgaccgccttgctcctgccgctggccttgctgctccacgccgccaggccggacatccagatgacacagagccccagcagcctgagcacctctgtgggcgatagagtgaccatcacctgcagagccagccagggcatcagcaactacctggcctggttccagcagaaacctggaaaggcccctaagagcctgatctacgccgcttcttctctgcaaagcggcgtgccaagcaagttcagcggcagcggcagcggaacagacttcagcctgacaatttctagcctccagcctgaggattttgccacatactactgccagcagtacaacagctaccccatcaccttcggccagggcacaagactggaaatcaagggcggcggcggctctggaggcggcggatctggcggaggaggttcccaagtgcagctggttcagagcggagccgaggtgaaaaagtccggcgccagcgtgaaggtgtcatgcaaggcctctggctacaccctgacctcctacggcatcagctgggtccggcaggcccctggccagggcctggagtggatgggctggatcagcgcttataatggcaacatcaattacgcccagaagttccaaggcagagtgacaatgaccacagataccagcaccagcacagcttacatggaactgagatccctgcggagcgacgacaccgccgtgtactattgtgtgcgggacggcgacagatacaactggaaccacagctacatggacgtgtggggcaagggcaccaccgtgaccgtgtccagcaccacgacgccagcgccgcggccaccaacaccggcgcccaccatcgcgtcgcagcccctgtccctgcgcccagaggcgtgccggccagcggcggggggcgcagtgcacacgagggggctggacttcgcctgtgatatctacatctgggcgcccttggccgggacttgtggggtccttctcctgtcactggttatcaccctttactgccggagggaccagaggctgccccccgatgcccacaagccccctgggggaggcagtttccggacccccatccaagaggagcaggccgacgcccactccaccctggccaagatcagagtgaagttcagcaggagcgcagacgcccccgcgtaccagcagggccagaaccagctctataacgagctcaatctaggacgaagagaggagtacgatgttttggacaagagacgtggccgggaccctgagatggggggaaagccgagaaggaagaaccctcaggaaggcctgtacaatgaactgcagaaagataagatggcggaggcctacagtgagattgggatgaaaggcgagcgccggaggggcaaggggcacgatggcctttaccagggtctcagtacagccaccaaggacacctacgacgcccttcacatgcaggccctgccccctcgcgg

SEQ ID NO: 981 - DNA, 1451 bp, synthetic construct
  misc_feature 1..1451: note = Synthetic
  source 1..1451: mol_type = other DNA
atggccttaccagtgaccgccttgctcctgccgctggccttgctgctccacgccgccaggccggagatcgtgctgacacagtcccctgacttccagagcgtgacccctaaggaaaaggtgacaatcacctgccgggcctctcagagcatcggcagcagcctgcactggtatcagcagaagcccgatcagtccccaaagctgctgatcaaatacgtgtcccaatctatcagcggcgtgcccagccggttttctggcagcggcagcggaacagacttcaccctgaccattaactccctggaggccgaggatgccgctgcctactattgtcaccagagcagcagcctgccttggacattcggccagggcaccaaggtggaaatcaagggcggaggaggcagcggcggtggcggcagtggcggaggcggcagcgaggtgcagctgctggaaagcggaggcgacctggtgcaacctggaggcagcctgcggctgagctgcgccgcttctggcttcacctttagcacctacgccatgacatgggttagacaggcccctggcaagggcctggagtgggtcagcgccatcagcggcaccagcggctctacctactacgccgacagcgtgaagggcagattcaccatctccagagataattcaaagagcaccctgtacctgcacatgaacagcctgagaaccgaggacaccgccgtgtactattgcgctagaggcggctacaactggcactactactactacatggacgtgtggggaaaaggcacaacagtgaccgtgtcttctaccacgacgccagcgccgcggccaccaacaccggcgcccaccatcgcgtcgcagcccctgtccctgcgcccagaggcgtgccggccagcggcggggggcgcagtgcacacgagggggctggacttcgcctgtgatatctacatctgggcgcccttggccgggacttgtggggtccttctcctgtcactggttatcaccctttactgccggagggaccagaggctgccccccgatgcccacaagccccctgggggaggcagtttccggacccccatccaagaggagcaggccgacgcccactccaccctggccaagatcagagtgaagttcagcaggagcgcagacgcccccgcgtaccagcagggccagaaccagctctataacgagctcaatctaggacgaagagaggagtacgatgttttggacaagagacgtggccgggaccctgagatggggggaaagccgagaaggaagaaccctcaggaaggcctgtacaatgaactgcagaaagataagatggcggaggcctacagtgagattgggatgaaaggcgagcgccggaggggcaaggggcacgatggcctttaccagggtctcagtacagccaccaaggacacctacgacgcccttcacatgcaggccctgccccctcgcgg

SEQ ID NO: 982 - DNA, 1454 bp, synthetic construct
  misc_feature 1..1454: note = Synthetic
  source 1..1454: mol_type = other DNA
atggccttaccagtgaccgccttgctcctgccgctggccttgctgctccacgccgccaggccggagatcgtgatgacccagtctcctgctacactgagcctgagccccggcgagcgggccaccctgagttgtagagccagccagagcgtgtcttctagctacctgagctggtatcagcaaaaacctggccttgctccaagactgctgatctacggcgcctctacaagagccaccggcatccccgccagatttagcggctctggcagcggcaccgacttcaccctgaccatctccagcctccagcctgaggatttcgccgtctactactgccagcaggattacaacctgcctcctaccttcggccagggcacaaaggtggaaattaagggcggcggaggcagcggcggaggaggctctggcggcggcggcagcgaggtgcaactgctggaaagcggaggagatctggtgcagcccggcggctccctgcgcctgtcttgcgccgccagcggctttacattcagcacctacgccatgacatgggttagacaggcccctggaaaaggcctggaatgggtgtccgccatcagcggaaccagcggcagcacatactacgccgacagcgtgaagggcagattcaccatcagccgggacaacagcaagtccaccctgtacctgcacatgaacagcctgcggaccgaggacaccgccgtgtactattgcgctagaggcggttataattggcactactactactacatggacgtgtggggcaagggcacgaccgtgacagtgtccagcaccacgacgccagcgccgcggccaccaacaccggcgcccaccatcgcgtcgcagcccctgtccctgcgcccagaggcgtgccggccagcggcggggggcgcagtgcacacgagggggctggacttcgcctgtgatatctacatctgggcgcccttggccgggacttgtggggtccttctcctgtcactggttatcaccctttactgccggagggaccagaggctgccccccgatgcccacaagccccctgggggaggcagtttccggacccccatccaagaggagcaggccgacgcccactccaccctggccaagatcagagtgaagttcagcaggagcgcagacgcccccgcgtaccagcagggccagaaccagctctataacgagctcaatctaggacgaagagaggagtacgatgttttggacaagagacgtggccgggaccctgagatggggggaaagccgagaaggaagaaccctcaggaaggcctgtacaatgaactgcagaaagataagatggcggaggcctacagtgagattgggatgaaaggcgagcgccggaggggcaaggggcacgatggcctttaccagggtctcagtacagccaccaaggacacctacgacgcccttcacatgcaggccctgccccctcgcgg

SEQ ID NO: 983 - protein, 711 aa, synthetic construct
  REGION 1..711: note = Synthetic
MALPVTALLLPLALLLHAARPEIVLTQSPDFQSVTPKEKVTITCRASQSIGSSLHWYQQKPDQSPKLLIKFASQSFSGVPSRFSGSGSGTDFTLTIHSLEAEDAATYYCHQSSSLPWTFGQGTKVEIKGGGGSGGGGSGGGGSQVQLVESGGGVVQPGRSLRLSCAASGFTFNNYDMYWVRQAPGKGLEWVAVTWYDGSNKYYADSVKGRFTISRDNSKNTLYLQMNSLRAEDTAVYYCARGDNWNDEHHYFYYMDVWGKGTTVTVSSTTTPAPRPPTPAPTIASQPLSLRPEACRPAAGGAVHTRGLDFACDIYIWAPLAGTCGVLLLSLVITLYCRRDQRLPPDAHKPPGGGSFRTPIQEEQADAHSTLAKIRVKFSRSADAPAYQQGQNQLYNELNLGRREEYDVLDKRRGRDPEMGGKPRRKNPQEGLYNELQKDKMAEAYSEIGMKGERRRGKGHDGLYQGLSTATKDTYDALHMQALPPRGSGEGRGSLLTCGDVEENPGPMALPVTALLLPLALLLHAARPNWVNVISDLKKIEDLIQSMHIDATLYTESDVHPSCKVTAMKCFLLELQVISLESGDASIHDTVENLIILANNSLSSNGNVTESGCKECEELEEKNIKEFLQSFVHIVQMFINTSTTTPAPRPPTPAPTIASQPLSLRPEACRPAAGGAVHTRGLDFACDIYIWAPLAGTCGVLLLSLVITLYC

SEQ ID NO: 984 - protein, 711 aa, synthetic construct
  REGION 1..711: note = Synthetic
MALPVTALLLPLALLLHAARPEIVLTQSPDFQSVTPKEKVTITCRASQSIGSSLHWYQQKPDQSPKLLIKFASQSFSGVPSRFSGSGSGTDFTLTIHSLEAEDAATYYCHQSSSLPWTFGQGTKVEIKGGGGSGGGGSGGGGSQVQLVESGGGVVQPGRSLRLSCAASGFTFSNYDMHWVRQAPGKGLEWVTIIWHDASNKYYLDSVKGRFTISRDNSKNTLYLQMNSLRAEDTAVYYCARGDNWNDEHHYFYYMDVWGKGTTVTVSSTTTPAPRPPTPAPTIASQPLSLRPEACRPAAGGAVHTRGLDFACDIYIWAPLAGTCGVLLLSLVITLYCRRDQRLPPDAHKPPGGGSFRTPIQEEQADAHSTLAKIRVKFSRSADAPAYQQGQNQLYNELNLGRREEYDVLDKRRGRDPEMGGKPRRKNPQEGLYNELQKDKMAEAYSEIGMKGERRRGKGHDGLYQGLSTATKDTYDALHMQALPPRGSGEGRGSLLTCGDVEENPGPMALPVTALLLPLALLLHAARPNWVNVISDLKKIEDLIQSMHIDATLYTESDVHPSCKVTAMKCFLLELQVISLESGDASIHDTVENLIILANNSLSSNGNVTESGCKECEELEEKNIKEFLQSFVHIVQMFINTSTTTPAPRPPTPAPTIASQPLSLRPEACRPAAGGAVHTRGLDFACDIYIWAPLAGTCGVLLLSLVITLYC

SEQ ID NO: 985 - protein, 711 aa, synthetic construct
  REGION 1..711: note = Synthetic
MALPVTALLLPLALLLHAARPEIVLTQSPDFQSVTPKEKVTITCRASQSIGSSLHWYQQKPDQSPKLLIKFASQSFSGVPSRFSGSGSGTDFTLTIHSLEAEDAATYYCHQSSSLPWTFGQGTKVEIKGGGGSGGGGSGGGGSQVQLVESGGGVVQPGRSLRLSCAASGFTFSNYDMHWVRQAPGKGLEWVTIIWHDGSNKYYLDSVKGRFTISRDNSKNTLYLQMNSLRAEDTAVYYCARGDNWNDEHHYFYYMDVWGKGTTVTVSSTTTPAPRPPTPAPTIASQPLSLRPEACRPAAGGAVHTRGLDFACDIYIWAPLAGTCGVLLLSLVITLYCRRDQRLPPDAHKPPGGGSFRTPIQEEQADAHSTLAKIRVKFSRSADAPAYQQGQNQLYNELNLGRREEYDVLDKRRGRDPEMGGKPRRKNPQEGLYNELQKDKMAEAYSEIGMKGERRRGKGHDGLYQGLSTATKDTYDALHMQALPPRGSGEGRGSLLTCGDVEENPGPMALPVTALLLPLALLLHAARPNWVNVISDLKKIEDLIQSMHIDATLYTESDVHPSCKVTAMKCFLLELQVISLESGDASIHDTVENLIILANNSLSSNGNVTESGCKECEELEEKNIKEFLQSFVHIVQMFINTSTTTPAPRPPTPAPTIASQPLSLRPEACRPAAGGAVHTRGLDFACDIYIWAPLAGTCGVLLLSLVITLYC

SEQ ID NO: 986 - protein, 705 aa, synthetic construct
  REGION 1..705: note = Synthetic
MALPVTALLLPLALLLHAARPQTVVTQEPSLSVSPGGTVTLTCGLSSGSVSTSYYPSWYQQTPGQAPRTLIYSTNIRSSGVPDRFSGSILGNKAALTITGAQADDESDYYCKLYMGSGIIFGSGTKVTVLGGGGSGGGGSGGGGSEVQLLESGGGLVQPGGSLRLSCAASGFTFSIYAMSWVRQAPGKGLEWVSAISGGGDTTYYADSVKGRFTISRDNSKTTLDLQMNSLRAEDTAVYYCAKHTSYYMDVWGKGTTVTVSSTTTPAPRPPTPAPTIASQPLSLRPEACRPAAGGAVHTRGLDFACDIYIWAPLAGTCGVLLLSLVITLYCRRDQRLPPDAHKPPGGGSFRTPIQEEQADAHSTLAKIRVKFSRSADAPAYQQGQNQLYNELNLGRREEYDVLDKRRGRDPEMGGKPRRKNPQEGLYNELQKDKMAEAYSEIGMKGERRRGKGHDGLYQGLSTATKDTYDALHMQALPPRGSGEGRGSLLTCGDVEENPGPMALPVTALLLPLALLLHAARPNWVNVISDLKKIEDLIQSMHIDATLYTESDVHPSCKVTAMKCFLLELQVISLESGDASIHDTVENLIILANNSLSSNGNVTESGCKECEELEEKNIKEFLQSFVHIVQMFINTSTTTPAPRPPTPAPTIASQPLSLRPEACRPAAGGAVHTRGLDFACDIYIWAPLAGTCGVLLLSLVITLYC

SEQ ID NO: 987 - protein, 711 aa, synthetic construct
  REGION 1..711: note = Synthetic
MALPVTALLLPLALLLHAARPEIVLTQSPDFQSVTPKEKVTITCRASQSIGSSLHWYQQKPDQSPKLLIKFASQSFSGVPSRFSGSGSGTDFTLTIHSLEAEDAATYYCHQSSSLPWTFGQGTKVEIKGGGGSGGGGSGGGGSQVQLVESGGGVVQPGRSLRLSCAASGFTFSNYDKHWVRQAPGKGLEWVAVIWYDGSNKYYADSVKGRFTISRDNSKNTLYLQMNSLRAEDTAMYYCARGDNWNDEHHYFYYMDVWGKGTTVTVSSTTTPAPRPPTPAPTIASQPLSLRPEACRPAAGGAVHTRGLDFACDIYIWAPLAGTCGVLLLSLVITLYCRRDQRLPPDAHKPPGGGSFRTPIQEEQADAHSTLAKIRVKFSRSADAPAYQQGQNQLYNELNLGRREEYDVLDKRRGRDPEMGGKPRRKNPQEGLYNELQKDKMAEAYSEIGMKGERRRGKGHDGLYQGLSTATKDTYDALHMQALPPRGSGEGRGSLLTCGDVEENPGPMALPVTALLLPLALLLHAARPNWVNVISDLKKIEDLIQSMHIDATLYTESDVHPSCKVTAMKCFLLELQVISLESGDASIHDTVENLIILANNSLSSNGNVTESGCKECEELEEKNIKEFLQSFVHIVQMFINTSTTTPAPRPPTPAPTIASQPLSLRPEACRPAAGGAVHTRGLDFACDIYIWAPLAGTCGVLLLSLVITLYC

SEQ ID NO: 988 - protein, 709 aa, synthetic construct
  REGION 1..709: note = Synthetic
MALPVTALLLPLALLLHAARPEIVLTQSPATLSLSPGERATLSCGASQSVYNSYLAWYQQKPGLAPRLLIYDASLRATGVPDRFSGSGSGTDFTLTISTLEPEDFAVYYCQQYGGSPMYTFGQGTKLEIKGGGGSGGGGSGGGGSQVQLVQSGAEVKKPGASVKVSCKASGYTFTNYGFSWVRQAPGQGLDWMGWISAYNGYTNYTQKLQGRVTMTTDTSTTTAYMELRSLRSDDTAVYYCARRGLLYYYYSMDVWGKGTTVTVSSTTTPAPRPPTPAPTIASQPLSLRPEACRPAAGGAVHTRGLDFACDIYIWAPLAGTCGVLLLSLVITLYCRRDQRLPPDAHKPPGGGSFRTPIQEEQADAHSTLAKIRVKFSRSADAPAYQQGQNQLYNELNLGRREEYDVLDKRRGRDPEMGGKPRRKNPQEGLYNELQKDKMAEAYSEIGMKGERRRGKGHDGLYQGLSTATKDTYDALHMQALPPRGSGEGRGSLLTCGDVEENPGPMALPVTALLLPLALLLHAARPNWVNVISDLKKIEDLIQSMHIDATLYTESDVHPSCKVTAMKCFLLELQVISLESGDASIHDTVENLIILANNSLSSNGNVTESGCKECEELEEKNIKEFLQSFVHIVQMFINTSTTTPAPRPPTPAPTIASQPLSLRPEACRPAAGGAVHTRGLDFACDIYIWAPLAGTCGVLLLSLVITLYC

SEQ ID NO: 989 - protein, 705 aa, synthetic construct
  REGION 1..705: note = Synthetic
MALPVTALLLPLALLLHAARPQTVVTQEPSLSVSPGGTVTLTCGLSSGSVSTSDYPSWYQQTPGQAPRTLIYRTNTRSSGVPDRFSGSILGNKAALTITGAQADDESDYYCVLYMDSGIIFGSGTKVTVLGGGGSGGGGSGGGGSEVQLLESGGGLVQPGGSLRLSCTASGFTFSSFAMSWVRQAPGKGLEWVSAMSGSGDTTYYADSVKGRFTISRDNSKTTLYLQMNSLRAEDTAVYSCAKHTTYYMDVWGKGTTVTVSSTTTPAPRPPTPAPTIASQPLSLRPEACRPAAGGAVHTRGLDFACDIYIWAPLAGTCGVLLLSLVITLYCRRDQRLPPDAHKPPGGGSFRTPIQEEQADAHSTLAKIRVKFSRSADAPAYQQGQNQLYNELNLGRREEYDVLDKRRGRDPEMGGKPRRKNPQEGLYNELQKDKMAEAYSEIGMKGERRRGKGHDGLYQGLSTATKDTYDALHMQALPPRGSGEGRGSLLTCGDVEENPGPMALPVTALLLPLALLLHAARPNWVNVISDLKKIEDLIQSMHIDATLYTESDVHPSCKVTAMKCFLLELQVISLESGDASIHDTVENLIILANNSLSSNGNVTESGCKECEELEEKNIKEFLQSFVHIVQMFINTSTTTPAPRPPTPAPTIASQPLSLRPEACRPAAGGAVHTRGLDFACDIYIWAPLAGTCGVLLLSLVITLYC

SEQ ID NO: 990 - protein, 705 aa, synthetic construct
  REGION 1..705: note = Synthetic
MALPVTALLLPLALLLHAARPQTVVTQEPSLSVSPGGTVTLTCGLSSGSVSTSDYPSWYQQTPGQAPRTLIYRTNTRSSGVPDRFSGSILGNKAALTITGAQADDESDYYCVLYMGSGIIFGSGTKVTVLGGGGSGGGGSGGGGSEVQLLESGGGLVQPGGSLRLSCAASGFTFNTYAMSWVRQAPGKGLEWVSAMSGSGDTTYYADSVKGRFTISRDNSKTTLYLQMNSLRAEDTAVYSCAKHTSYYMDVWGKGTTVTVSSTTTPAPRPPTPAPTIASQPLSLRPEACRPAAGGAVHTRGLDFACDIYIWAPLAGTCGVLLLSLVITLYCRRDQRLPPDAHKPPGGGSFRTPIQEEQADAHSTLAKIRVKFSRSADAPAYQQGQNQLYNELNLGRREEYDVLDKRRGRDPEMGGKPRRKNPQEGLYNELQKDKMAEAYSEIGMKGERRRGKGHDGLYQGLSTATKDTYDALHMQALPPRGSGEGRGSLLTCGDVEENPGPMALPVTALLLPLALLLHAARPNWVNVISDLKKIEDLIQSMHIDATLYTESDVHPSCKVTAMKCFLLELQVISLESGDASIHDTVENLIILANNSLSSNGNVTESGCKECEELEEKNIKEFLQSFVHIVQMFINTSTTTPAPRPPTPAPTIASQPLSLRPEACRPAAGGAVHTRGLDFACDIYIWAPLAGTCGVLLLSLVITLYC

SEQ ID NO: 991 - protein, 705 aa, synthetic construct
  REGION 1..705: note = Synthetic
MALPVTALLLPLALLLHAARPQTVVTQEPSFSVSPGGTVTLTCGLYSDSVSTSYYPSWYQQTPGQAPRTLIYNTNTRSSGVPDRFSGSILGNKAALTITGAQADDESDYYCVLYMVSGIVFGSGTKVTVLGGGGSGGGGSGGGGSEVQLLESGGDLVQPGGSLRLSCAASGFTFSTYAMSWVRQAPGKGLEWVSAISGSGENIYYADSVKGRFTISRDNSKNTLFLQMNSLRAEDTAVYYCAKHTSYYMDVWGKGTTVTVSSTTTPAPRPPTPAPTIASQPLSLRPEACRPAAGGAVHTRGLDFACDIYIWAPLAGTCGVLLLSLVITLYCRRDQRLPPDAHKPPGGGSFRTPIQEEQADAHSTLAKIRVKFSRSADAPAYQQGQNQLYNELNLGRREEYDVLDKRRGRDPEMGGKPRRKNPQEGLYNELQKDKMAEAYSEIGMKGERRRGKGHDGLYQGLSTATKDTYDALHMQALPPRGSGEGRGSLLTCGDVEENPGPMALPVTALLLPLALLLHAARPNWVNVISDLKKIEDLIQSMHIDATLYTESDVHPSCKVTAMKCFLLELQVISLESGDASIHDTVENLIILANNSLSSNGNVTESGCKECEELEEKNIKEFLQSFVHIVQMFINTSTTTPAPRPPTPAPTIASQPLSLRPEACRPAAGGAVHTRGLDFACDIYIWAPLAGTCGVLLLSLVITLYC

SEQ ID NO: 992 - protein, 711 aa, synthetic construct
  REGION 1..711: note = Synthetic
MALPVTALLLPLALLLHAARPQTVVTQEPSFSVSPGGTVTLTCGLSSGSVSTSYYPGWYQQTPGQAPRTLIYSTNTRSSGVPDRFSGSILGNKAALTITGAQADDESDYYCVLYMGSGMFIFGSGTKVTVLGGGGSGGGGSGGGGSQVQLVESGGGVVQPGRSLRLSCAASGFTFSSYGMHWVRQAPGKGLEWVAVIWYDGINKYYADSVKGRFTISRDNSKNTLYLQMNSLRAEDTAVYYCARERLERRYYYYMDVWGKGTTVTVSSTTTPAPRPPTPAPTIASQPLSLRPEACRPAAGGAVHTRGLDFACDIYIWAPLAGTCGVLLLSLVITLYCRRDQRLPPDAHKPPGGGSFRTPIQEEQADAHSTLAKIRVKFSRSADAPAYQQGQNQLYNELNLGRREEYDVLDKRRGRDPEMGGKPRRKNPQEGLYNELQKDKMAEAYSEIGMKGERRRGKGHDGLYQGLSTATKDTYDALHMQALPPRGSGEGRGSLLTCGDVEENPGPMALPVTALLLPLALLLHAARPNWVNVISDLKKIEDLIQSMHIDATLYTESDVHPSCKVTAMKCFLLELQVISLESGDASIHDTVENLIILANNSLSSNGNVTESGCKECEELEEKNIKEFLQSFVHIVQMFINTSTTTPAPRPPTPAPTIASQPLSLRPEACRPAAGGAVHTRGLDFACDIYIWAPLAGTCGVLLLSLVITLYC

SEQ ID NO: 993 - protein, 705 aa, synthetic construct
  REGION 1..705: note = Synthetic
MALPVTALLLPLALLLHAARPQTVVTQEPSFSVSPGGTVTLTCALSSDSVSTSYFPSWYRQTPGQAPRTLIYNTNTRSSGVPDRFSGSILGNKAALTITGAQADDESDYYCVLYMGSGIIFGSGTKVTVLGGGGSGGGGSGGGGSEVQLLESGGGLVQPGGSLRLSCAASGFTFSSFAMSWVRQAPGKGLEWVSAVSGSGDDTYYADSVKGRFTISRDNSKNTLYLQMNSLRAEDTAVYYCAKHTSYYLDVWGKGTTVTVSSTTTPAPRPPTPAPTIASQPLSLRPEACRPAAGGAVHTRGLDFACDIYIWAPLAGTCGVLLLSLVITLYCRRDQRLPPDAHKPPGGGSFRTPIQEEQADAHSTLAKIRVKFSRSADAPAYQQGQNQLYNELNLGRREEYDVLDKRRGRDPEMGGKPRRKNPQEGLYNELQKDKMAEAYSEIGMKGERRRGKGHDGLYQGLSTATKDTYDALHMQALPPRGSGEGRGSLLTCGDVEENPGPMALPVTALLLPLALLLHAARPNWVNVISDLKKIEDLIQSMHIDATLYTESDVHPSCKVTAMKCFLLELQVISLESGDASIHDTVENLIILANNSLSSNGNVTESGCKECEELEEKNIKEFLQSFVHIVQMFINTSTTTPAPRPPTPAPTIASQPLSLRPEACRPAAGGAVHTRGLDFACDIYIWAPLAGTCGVLLLSLVITLYC

SEQ ID NO: 994 - protein, 711 aa, synthetic construct
  REGION 1..711: note = Synthetic
MALPVTALLLPLALLLHAARPEIVLTQSPDFQSVTPKEKVTITCRASQSIGSSLHWYQQKPDQSPKLLIKFASQSFSGVPSRFSGSGSGTDFTLTINSLEAEDAATYFCHQSSSLPWTFGQGTKVEIKGGGGSGGGGSGGGGSQVQLVESGGGVVQPGRSLRLSCAASGFNFSTFDIHWVRQAPGKGLEWVALIWYDGSYKYYADSVKGRFTISRDNSKNTLDLRMNSLRAEDTAVYYCARNDNWNDEHYYHYYMDVWGKGTTVTVSSTTTPAPRPPTPAPTIASQPLSLRPEACRPAAGGAVHTRGLDFACDIYIWAPLAGTCGVLLLSLVITLYCRRDQRLPPDAHKPPGGGSFRTPIQEEQADAHSTLAKIRVKFSRSADAPAYQQGQNQLYNELNLGRREEYDVLDKRRGRDPEMGGKPRRKNPQEGLYNELQKDKMAEAYSEIGMKGERRRGKGHDGLYQGLSTATKDTYDALHMQALPPRGSGEGRGSLLTCGDVEENPGPMALPVTALLLPLALLLHAARPNWVNVISDLKKIEDLIQSMHIDATLYTESDVHPSCKVTAMKCFLLELQVISLESGDASIHDTVENLIILANNSLSSNGNVTESGCKECEELEEKNIKEFLQSFVHIVQMFINTSTTTPAPRPPTPAPTIASQPLSLRPEACRPAAGGAVHTRGLDFACDIYIWAPLAGTCGVLLLSLVITLYC

SEQ ID NO: 995 - protein, 716 aa, synthetic construct
  REGION 1..716: note = Synthetic
MALPVTALLLPLALLLHAARPQTVVTQEPSFSVSPGGTVTLTCGLSSGSVSTSYFPSWYQQTPGQAPRTLIYITNTRSSGVPDRFSGSIIGNKAALTITGAQADDESDYFCVLYMGSGTWVFGGGTKLTVLGGGGSGGGGSGGGGSEVHLLESGGGLVQPGGSLRLSCAASGFTFSSYAMNWVRQAPGKGLEWVSSISGSGSSSYYADSVKGRFTISRDNSKNTLYLQMNSLRAEDTAVYYCASRGFNSQYPPGYYYYYMDVWGKGTTVTVSSTTTPAPRPPTPAPTIASQPLSLRPEACRPAAGGAVHTRGLDFACDIYIWAPLAGTCGVLLLSLVITLYCRRDQRLPPDAHKPPGGGSFRTPIQEEQADAHSTLAKIRVKFSRSADAPAYQQGQNQLYNELNLGRREEYDVLDKRRGRDPEMGGKPRRKNPQEGLYNELQKDKMAEAYSEIGMKGERRRGKGHDGLYQGLSTATKDTYDALHMQALPPRGSGEGRGSLLTCGDVEENPGPMALPVTALLLPLALLLHAARPNWVNVISDLKKIEDLIQSMHIDATLYTESDVHPSCKVTAMKCFLLELQVISLESGDASIHDTVENLIILANNSLSSNGNVTESGCKECEELEEKNIKEFLQSFVHIVQMFINTSTTTPAPRPPTPAPTIASQPLSLRPEACRPAAGGAVHTRGLDFACDIYIWAPLAGTCGVLLLSLVITLYC

SEQ ID NO: 996 - protein, 703 aa, synthetic construct
  REGION 1..703: note = Synthetic
MALPVTALLLPLALLLHAARPEIVLTQSPDFQSVTPKEKVTITCRASQSIGSSLHWYQQKPDQSPKLLIKFASQSFSGVPSRFSGSGSGTDFTLTIHSLEAEDAATYYCHQSSSLPWTFGQGTKVEIKGGGGSGGGGSGGGGSEVQLLESGGGLVQPGGSLRLSCAASGFTFSNYAMTWVRQAPGKGLEWVSAISGSGIGTYYADSVQGRFTTSRDNSKNTLYLQMNSLRAEDTAVYYCAKGGYNWKDVWGKGTTVTVSSTTTPAPRPPTPAPTIASQPLSLRPEACRPAAGGAVHTRGLDFACDIYIWAPLAGTCGVLLLSLVITLYCRRDQRLPPDAHKPPGGGSFRTPIQEEQADAHSTLAKIRVKFSRSADAPAYQQGQNQLYNELNLGRREEYDVLDKRRGRDPEMGGKPRRKNPQEGLYNELQKDKMAEAYSEIGMKGERRRGKGHDGLYQGLSTATKDTYDALHMQALPPRGSGEGRGSLLTCGDVEENPGPMALPVTALLLPLALLLHAARPNWVNVISDLKKIEDLIQSMHIDATLYTESDVHPSCKVTAMKCFLLELQVISLESGDASIHDTVENLIILANNSLSSNGNVTESGCKECEELEEKNIKEFLQSFVHIVQMFINTSTTTPAPRPPTPAPTIASQPLSLRPEACRPAAGGAVHTRGLDFACDIYIWAPLAGTCGVLLLSLVITLYC

SEQ ID NO: 997 - protein, 711 aa, synthetic construct
  REGION 1..711: note = Synthetic
MALPVTALLLPLALLLHAARPEIVLTQSPDFQSVTPKEKVTITCRASQSIGSSLHWYQQKPDQSPKLLIKFASQSFSGVPSRFSGSGSGTDFTLTIHSLEAEDAATYYCHQSSSLPWTFGQGTKVEIKGGGGSGGGGSGGGGSQVQLVESGGGVVQPGRSLRLSCAASGFTFTNYDMHWVRQAPGKGLEWVTIIWHDGSNKYYLDSVRGRFTISRDNSKNTLYLQMNSLRAEDTAVYYCARGDNWNDEHHYFYYMDVWGKGTTVTVSSTTTPAPRPPTPAPTIASQPLSLRPEACRPAAGGAVHTRGLDFACDIYIWAPLAGTCGVLLLSLVITLYCRRDQRLPPDAHKPPGGGSFRTPIQEEQADAHSTLAKIRVKFSRSADAPAYQQGQNQLYNELNLGRREEYDVLDKRRGRDPEMGGKPRRKNPQEGLYNELQKDKMAEAYSEIGMKGERRRGKGHDGLYQGLSTATKDTYDALHMQALPPRGSGEGRGSLLTCGDVEENPGPMALPVTALLLPLALLLHAARPNWVNVISDLKKIEDLIQSMHIDATLYTESDVHPSCKVTAMKCFLLELQVISLESGDASIHDTVENLIILANNSLSSNGNVTESGCKECEELEEKNIKEFLQSFVHIVQMFINTSTTTPAPRPPTPAPTIASQPLSLRPEACRPAAGGAVHTRGLDFACDIYIWAPLAGTCGVLLLSLVITLYC

SEQ ID NO: 998 - protein, 711 aa, synthetic construct
  REGION 1..711: note = Synthetic
MALPVTALLLPLALLLHAARPEIVLTQSPATLSLSPGERATLSCRASQSVSSSLAWYQQKPGQAPRLLIYDASNRATGIPARFSGSGSGTDFTLTISSLEPEDFAVYYCQQRSNWPLTFGGGTKVEIKGGGGSGGGGSGGGGSQVQLVESGGGVVQPGRSLRLSCAASGFTFSNYDMHWVRQAPGKGLEWVTIIWHDGSNKYYLDSVKGRFTISRDNSKNTLYLQMNSLRAEDTAVYYCARGDNWNDEHHYFYYMDVWGKGTTVTVSSTTTPAPRPPTPAPTIASQPLSLRPEACRPAAGGAVHTRGLDFACDIYIWAPLAGTCGVLLLSLVITLYCRRDQRLPPDAHKPPGGGSFRTPIQEEQADAHSTLAKIRVKFSRSADAPAYQQGQNQLYNELNLGRREEYDVLDKRRGRDPEMGGKPRRKNPQEGLYNELQKDKMAEAYSEIGMKGERRRGKGHDGLYQGLSTATKDTYDALHMQALPPRGSGEGRGSLLTCGDVEENPGPMALPVTALLLPLALLLHAARPNWVNVISDLKKIEDLIQSMHIDATLYTESDVHPSCKVTAMKCFLLELQVISLESGDASIHDTVENLIILANNSLSSNGNVTESGCKECEELEEKNIKEFLQSFVHIVQMFINTSTTTPAPRPPTPAPTIASQPLSLRPEACRPAAGGAVHTRGLDFACDIYIWAPLAGTCGVLLLSLVITLYC

SEQ ID NO: 999 - protein, 707 aa, synthetic construct
  REGION 1..707: note = Synthetic
MALPVTALLLPLALLLHAARPEIVLTQSPGTLSLSPGERATLSCRASQSVSSSYLAWYQQKPGQAPRLLIYGASSRATGIPDRFSGSGSGTDFTLTISRLEPEDFAVYYCQQYGSSWTFGQGTKVEIKGGGGSGGGGSGGGGSEVQLVESGGGVVRPGGSLRLSCAASGFTFDDYGMSWVRQAPGKGLEWVSGINWNGGSTGYVDSVKGRFTISRDNAKNSLYLQMNSLRAEDTALYHCARPVTTDYYYYMDVWGKGTTVTVSSTTTPAPRPPTPAPTIASQPLSLRPEACRPAAGGAVHTRGLDFACDIYIWAPLAGTCGVLLLSLVITLYCRRDQRLPPDAHKPPGGGSFRTPIQEEQADAHSTLAKIRVKFSRSADAPAYQQGQNQLYNELNLGRREEYDVLDKRRGRDPEMGGKPRRKNPQEGLYNELQKDKMAEAYSEIGMKGERRRGKGHDGLYQGLSTATKDTYDALHMQALPPRGSGEGRGSLLTCGDVEENPGPMALPVTALLLPLALLLHAARPNWVNVISDLKKIEDLIQSMHIDATLYTESDVHPSCKVTAMKCFLLELQVISLESGDASIHDTVENLIILANNSLSSNGNVTESGCKECEELEEKNIKEFLQSFVHIVQMFINTSTTTPAPRPPTPAPTIASQPLSLRPEACRPAAGGAVHTRGLDFACDIYIWAPLAGTCGVLLLSLVITLYC

SEQ ID NO: 1000 - protein, 715 aa, synthetic construct
  REGION 1..715: note = Synthetic
MALPVTALLLPLALLLHAARPEIVLTQSPGTLSLSPGERATLSCRASQSVSSSYLAWYQQKPGQAPRLLIYGASSRATGIPDRFSGSGSGTDFTLTISRLEPEDFAVYYCQQYGSSWTFGQGTKVEIKGGGGSGGGGSGGGGSEVQLLESGGGLVQPGGSLRLSCAASGFTFSSYAMSWVRQAPGKGLEWVSAISGSGGSTYYADSVKGRFTISRDNSKNTLYLQMNSLRAEDTAVYYCAKKGTSYNWNDVHYYYYYYMDVWGKGTTVTVSSTTTPAPRPPTPAPTIASQPLSLRPEACRPAAGGAVHTRGLDFACDIYIWAPLAGTCGVLLLSLVITLYCRRDQRLPPDAHKPPGGGSFRTPIQEEQADAHSTLAKIRVKFSRSADAPAYQQGQNQLYNELNLGRREEYDVLDKRRGRDPEMGGKPRRKNPQEGLYNELQKDKMAEAYSEIGMKGERRRGKGHDGLYQGLSTATKDTYDALHMQALPPRGSGEGRGSLLTCGDVEENPGPMALPVTALLLPLALLLHAARPNWVNVISDLKKIEDLIQSMHIDATLYTESDVHPSCKVTAMKCFLLELQVISLESGDASIHDTVENLIILANNSLSSNGNVTESGCKECEELEEKNIKEFLQSFVHIVQMFINTSTTTPAPRPPTPAPTIASQPLSLRPEACRPAAGGAVHTRGLDFACDIYIWAPLAGTCGVLLLSLVITLYC

SEQ ID NO: 1001 - protein, 709 aa, synthetic construct
  REGION 1..709: note = Synthetic
MALPVTALLLPLALLLHAARPEIVLTQSPGTLSLSPGERATLSCRASQSVSSSYLAWYQQKPGQAPRLLIYGASSRATGIPDRFSGSGSGTDFTLTISRLEPEDFAVYYCQQYGSSWTFGQGTKVEIKGGGGSGGGGSGGGGSQLQLQESGPGLVKPSETLSLTCTVSGGSISSSSYYWGWIRQPPGKGLEWIGSIYYSGSTYYNPSLKSRVTISVDTSKNQFSLKLSSVTAADTAVYYCTTGTTAYYYYYYMDVWGKGTTVTVSSTTTPAPRPPTPAPTIASQPLSLRPEACRPAAGGAVHTRGLDFACDIYIWAPLAGTCGVLLLSLVITLYCRRDQRLPPDAHKPPGGGSFRTPIQEEQADAHSTLAKIRVKFSRSADAPAYQQGQNQLYNELNLGRREEYDVLDKRRGRDPEMGGKPRRKNPQEGLYNELQKDKMAEAYSEIGMKGERRRGKGHDGLYQGLSTATKDTYDALHMQALPPRGSGEGRGSLLTCGDVEENPGPMALPVTALLLPLALLLHAARPNWVNVISDLKKIEDLIQSMHIDATLYTESDVHPSCKVTAMKCFLLELQVISLESGDASIHDTVENLIILANNSLSSNGNVTESGCKECEELEEKNIKEFLQSFVHIVQMFINTSTTTPAPRPPTPAPTIASQPLSLRPEACRPAAGGAVHTRGLDFACDIYIWAPLAGTCGVLLLSLVITLYC

SEQ ID NO: 1002 - protein, 708 aa, synthetic construct
  REGION 1..708: note = Synthetic
MALPVTALLLPLALLLHAARPEIVLTQSPGTLSLSPGERATLSCRASQSVSSSYLAWYQQKPGQAPRLLIYGASSRATGIPDRFSGSGSGTDFTLTISRLEPEDFAVYYCQQYGSSWTFGQGTKVEIKGGGGSGGGGSGGGGSEVQLLESGGGLVQPGGSLRLSCAASGFTFSSYAMTWVRQAPGKGLEWVSAISGSGGSTYYADSVKGRFTISRDNSKNTLYLQMNSLRAEDTAVYYCARGGYNWHYYYYMDVWGKGTTVTVSSTTTPAPRPPTPAPTIASQPLSLRPEACRPAAGGAVHTRGLDFACDIYIWAPLAGTCGVLLLSLVITLYCRRDQRLPPDAHKPPGGGSFRTPIQEEQADAHSTLAKIRVKFSRSADAPAYQQGQNQLYNELNLGRREEYDVLDKRRGRDPEMGGKPRRKNPQEGLYNELQKDKMAEAYSEIGMKGERRRGKGHDGLYQGLSTATKDTYDALHMQALPPRGSGEGRGSLLTCGDVEENPGPMALPVTALLLPLALLLHAARPNWVNVISDLKKIEDLIQSMHIDATLYTESDVHPSCKVTAMKCFLLELQVISLESGDASIHDTVENLIILANNSLSSNGNVTESGCKECEELEEKNIKEFLQSFVHIVQMFINTSTTTPAPRPPTPAPTIASQPLSLRPEACRPAAGGAVHTRGLDFACDIYIWAPLAGTCGVLLLSLVITLYC

SEQ ID NO: 1003 - protein, 712 aa, synthetic construct
  REGION 1..712: note = Synthetic
MALPVTALLLPLALLLHAARPEIVLTQSPDFQSVTPKEKVTITCRASQNIGSSLHWYQQKPDQSPKLLIKFASQSISGVPSRFSGSGSGTDFTLTINSLEAEDAAAYYCHQSSSLPWTFGQGTKVEIKGGGGSGGGGSGGGGSQVQLVESGGGVVQPGRSLRLSCAASGFTFSSYDMHWVRQAPGKGLEWVSVIWYDGSNKKYGDSAKGRFTISRDNSKNTLDLQMNSLRAEDTAVYYCARGDNWNDEGGYYYYYMDVWGKGTTVTVSSTTTPAPRPPTPAPTIASQPLSLRPEACRPAAGGAVHTRGLDFACDIYIWAPLAGTCGVLLLSLVITLYCRRDQRLPPDAHKPPGGGSFRTPIQEEQADAHSTLAKIRVKFSRSADAPAYQQGQNQLYNELNLGRREEYDVLDKRRGRDPEMGGKPRRKNPQEGLYNELQKDKMAEAYSEIGMKGERRRGKGHDGLYQGLSTATKDTYDALHMQALPPRGSGEGRGSLLTCGDVEENPGPMALPVTALLLPLALLLHAARPNWVNVISDLKKIEDLIQSMHIDATLYTESDVHPSCKVTAMKCFLLELQVISLESGDASIHDTVENLIILANNSLSSNGNVTESGCKECEELEEKNIKEFLQSFVHIVQMFINTSTTTPAPRPPTPAPTIASQPLSLRPEACRPAAGGAVHTRGLDFACDIYIWAPLAGTCGVLLLSLVITLYC

SEQ ID NO: 1004 - protein, 712 aa, synthetic construct
  REGION 1..712: note = Synthetic
MALPVTALLLPLALLLHAARPDIQMTQSPSSLSTSVGDRVTITCRASQGISNYLAWFQQKPGKAPKSLIYAASSLQSGVPSKFSGSGSGTDFSLTISSLQPEDFATYYCQQYNSYPITFGQGTRLEIKGGGGSGGGGSGGGGSQVQLVESGGGVVQPGRSLRLSCAASGFTFSSYDMHWVRQAPGKGLEWVSVIWYDGSNKKYGDSAKGRFTISRDNSKNTLDLQMNSLRAEDTAVYYCARGDNWNDEGGYYYYYMDVWGKGTTVTVSSTTTPAPRPPTPAPTIASQPLSLRPEACRPAAGGAVHTRGLDFACDIYIWAPLAGTCGVLLLSLVITLYCRRDQRLPPDAHKPPGGGSFRTPIQEEQADAHSTLAKIRVKFSRSADAPAYQQGQNQLYNELNLGRREEYDVLDKRRGRDPEMGGKPRRKNPQEGLYNELQKDKMAEAYSEIGMKGERRRGKGHDGLYQGLSTATKDTYDALHMQALPPRGSGEGRGSLLTCGDVEENPGPMALPVTALLLPLALLLHAARPNWVNVISDLKKIEDLIQSMHIDATLYTESDVHPSCKVTAMKCFLLELQVISLESGDASIHDTVENLIILANNSLSSNGNVTESGCKECEELEEKNIKEFLQSFVHIVQMFINTSTTTPAPRPPTPAPTIASQPLSLRPEACRPAAGGAVHTRGLDFACDIYIWAPLAGTCGVLLLSLVITLYC

SEQ ID NO: 1005 - protein, 709 aa, synthetic construct
  REGION 1..709: note = Synthetic
MALPVTALLLPLALLLHAARPEIVLTQSPDFQSVTPKEKVTITCRASQNIGSSLHWYQQKPDQSPKLLIKFASQSISGVPSRFSGSGSGTDFTLTINSLEAEDAAAYYCHQSSSLPWTFGQGTKVEIKGGGGSGGGGSGGGGSQVQLVQSGAEVKKSGASVKVSCKASGYTLTSYGISWVRQAPGQGLEWMGWISAYNGNINYAQKFQGRVTMTTDTSTSTAYMELRSLRSDDTAVYYCVRDGDRYNWNHSYMDVWGKGTTVTVSSTTTPAPRPPTPAPTIASQPLSLRPEACRPAAGGAVHTRGLDFACDIYIWAPLAGTCGVLLLSLVITLYCRRDQRLPPDAHKPPGGGSFRTPIQEEQADAHSTLAKIRVKFSRSADAPAYQQGQNQLYNELNLGRREEYDVLDKRRGRDPEMGGKPRRKNPQEGLYNELQKDKMAEAYSEIGMKGERRRGKGHDGLYQGLSTATKDTYDALHMQALPPRGSGEGRGSLLTCGDVEENPGPMALPVTALLLPLALLLHAARPNWVNVISDLKKIEDLIQSMHIDATLYTESDVHPSCKVTAMKCFLLELQVISLESGDASIHDTVENLIILANNSLSSNGNVTESGCKECEELEEKNIKEFLQSFVHIVQMFINTSTTTPAPRPPTPAPTIASQPLSLRPEACRPAAGGAVHTRGLDFACDIYIWAPLAGTCGVLLLSLVITLYC

SEQ ID NO: 1006 - protein, 709 aa, synthetic construct
  REGION 1..709: note = Synthetic
MALPVTALLLPLALLLHAARPDIQMTQSPSSLSTSVGDRVTITCRASQGISNYLAWFQQKPGKAPKSLIYAASSLQSGVPSKFSGSGSGTDFSLTISSLQPEDFATYYCQQYNSYPITFGQGTRLEIKGGGGSGGGGSGGGGSQVQLVQSGAEVKKSGASVKVSCKASGYTLTSYGISWVRQAPGQGLEWMGWISAYNGNINYAQKFQGRVTMTTDTSTSTAYMELRSLRSDDTAVYYCVRDGDRYNWNHSYMDVWGKGTTVTVSSTTTPAPRPPTPAPTIASQPLSLRPEACRPAAGGAVHTRGLDFACDIYIWAPLAGTCGVLLLSLVITLYCRRDQRLPPDAHKPPGGGSFRTPIQEEQADAHSTLAKIRVKFSRSADAPAYQQGQNQLYNELNLGRREEYDVLDKRRGRDPEMGGKPRRKNPQEGLYNELQKDKMAEAYSEIGMKGERRRGKGHDGLYQGLSTATKDTYDALHMQALPPRGSGEGRGSLLTCGDVEENPGPMALPVTALLLPLALLLHAARPNWVNVISDLKKIEDLIQSMHIDATLYTESDVHPSCKVTAMKCFLLELQVISLESGDASIHDTVENLIILANNSLSSNGNVTESGCKECEELEEKNIKEFLQSFVHIVQMFINTSTTTPAPRPPTPAPTIASQPLSLRPEACRPAAGGAVHTRGLDFACDIYIWAPLAGTCGVLLLSLVITLYC

SEQ ID NO: 1007 - protein, 708 aa, synthetic construct
  REGION 1..708: note = Synthetic
MALPVTALLLPLALLLHAARPEIVLTQSPDFQSVTPKEKVTITCRASQSIGSSLHWYQQKPDQSPKLLIKYVSQSISGVPSRFSGSGSGTDFTLTINSLEAEDAAAYYCHQSSSLPWTFGQGTKVEIKGGGGSGGGGSGGGGSEVQLLESGGDLVQPGGSLRLSCAASGFTFSTYAMTWVRQAPGKGLEWVSAISGTSGSTYYADSVKGRFTISRDNSKSTLYLHMNSLRTEDTAVYYCARGGYNWHYYYYMDVWGKGTTVTVSSTTTPAPRPPTPAPTIASQPLSLRPEACRPAAGGAVHTRGLDFACDIYIWAPLAGTCGVLLLSLVITLYCRRDQRLPPDAHKPPGGGSFRTPIQEEQADAHSTLAKIRVKFSRSADAPAYQQGQNQLYNELNLGRREEYDVLDKRRGRDPEMGGKPRRKNPQEGLYNELQKDKMAEAYSEIGMKGERRRGKGHDGLYQGLSTATKDTYDALHMQALPPRGSGEGRGSLLTCGDVEENPGPMALPVTALLLPLALLLHAARPNWVNVISDLKKIEDLIQSMHIDATLYTESDVHPSCKVTAMKCFLLELQVISLESGDASIHDTVENLIILANNSLSSNGNVTESGCKECEELEEKNIKEFLQSFVHIVQMFINTSTTTPAPRPPTPAPTIASQPLSLRPEACRPAAGGAVHTRGLDFACDIYIWAPLAGTCGVLLLSLVITLYC

SEQ ID NO: 1008 - protein, 709 aa, synthetic construct
  REGION 1..709: note = Synthetic
MALPVTALLLPLALLLHAARPEIVMTQSPATLSLSPGERATLSCRASQSVSSSYLSWYQQKPGLAPRLLIYGASTRATGIPARFSGSGSGTDFTLTISSLQPEDFAVYYCQQDYNLPPTFGQGTKVEIKGGGGSGGGGSGGGGSEVQLLESGGDLVQPGGSLRLSCAASGFTFSTYAMTWVRQAPGKGLEWVSAISGTSGSTYYADSVKGRFTISRDNSKSTLYLHMNSLRTEDTAVYYCARGGYNWHYYYYMDVWGKGTTVTVSSTTTPAPRPPTPAPTIASQPLSLRPEACRPAAGGAVHTRGLDFACDIYIWAPLAGTCGVLLLSLVITLYCRRDQRLPPDAHKPPGGGSFRTPIQEEQADAHSTLAKIRVKFSRSADAPAYQQGQNQLYNELNLGRREEYDVLDKRRGRDPEMGGKPRRKNPQEGLYNELQKDKMAEAYSEIGMKGERRRGKGHDGLYQGLSTATKDTYDALHMQALPPRGSGEGRGSLLTCGDVEENPGPMALPVTALLLPLALLLHAARPNWVNVISDLKKIEDLIQSMHIDATLYTESDVHPSCKVTAMKCFLLELQVISLESGDASIHDTVENLIILANNSLSSNGNVTESGCKECEELEEKNIKEFLQSFVHIVQMFINTSTTTPAPRPPTPAPTIASQPLSLRPEACRPAAGGAVHTRGLDFACDIYIWAPLAGTCGVLLLSLVITLYC

SEQ ID NO: 1009 - DNA, 2136 bp, synthetic construct
  misc_feature 1..2136: note = Synthetic
  source 1..2136: mol_type = other DNA
atggccttaccagtgaccgccttgctcctgccgctggccttgctgctccacgccgccaggccggaaattgtgctgactcagtctccagactttcagtctgtgactccaaaggagaaagtcaccatcacctgccgggccagtcagagcattggtagtagcttacactggtaccagcagaaaccagatcagtctccaaagctcctcatcaagtttgcttcccagtccttctcaggggtcccctcgaggttcagtggcagtggatctgggacagatttcaccctcaccatccatagcctggaagctgaagatgctgcaacgtattactgtcatcagagtagtagtttaccgtggacgttcggccaagggaccaaggtggaaatcaaaggtggaggcggttcaggcggaggtggctctggcggtggcggatcgcaggtgcagctggtggagtctgggggaggcgtggtccagcctgggaggtccctgagactctcctgtgcagcgtctggattcaccttcaataattatgacatgtactgggtccgccaggccccaggcaaggggctggagtgggtggcagttacatggtatgatggaagtaataaatactatgcagactccgtgaagggccgattcaccatctccagagacaattccaagaacacgctgtatctgcaaatgaacagcctgagagccgaggacacggctgtgtattactgtgcgagaggtgacaactggaatgacgaacaccactatttttactacatggacgtctggggcaaagggaccacggtcaccgtctcctcaaccacgacgccagcgccgcggccaccaacaccggcgcccaccatcgcgtcgcagcccctgtccctgcgcccagaggcgtgccggccagcggcggggggcgcagtgcacacgagggggctggacttcgcctgtgatatctacatctgggcgcccttggccgggacttgtggggtccttctcctgtcactggttatcaccctttactgccggagggaccagaggctgccccccgatgcccacaagccccctgggggaggcagtttccggacccccatccaagaggagcaggccgacgcccactccaccctggccaagatcagagtgaagttcagcaggagcgcagacgcccccgcgtaccagcagggccagaaccagctctataacgagctcaatctaggacgaagagaggagtacgatgttttggacaagagacgtggccgggaccctgagatggggggaaagccgagaaggaagaaccctcaggaaggcctgtacaatgaactgcagaaagataagatggcggaggcctacagtgagattgggatgaaaggcgagcgccggaggggcaaggggcacgatggcctttaccagggtctcagtacagccaccaaggacacctacgacgcccttcacatgcaggccctgccccctcgcggctctggcgagggaaggggttccctgcttacttgcggcgacgtcgaagagaatcccggtccgatggccctcccagtaactgccctccttttgcccctcgcactccttcttcatgccgctcgccccaactgggtcaacgtgattagcgatttgaagaaaatcgaggaccttatacagtctatgcatattgacgctacactgtatactgagagtgatgtacacccgtcctgtaaggtaacggccatgaaatgctttcttctggagctccaggtcatcagcttggagtctggggacgcaagcatccacgatacggttgaaaacctcatcatccttgcgaacaactctctctcatctaatggaaacgttacagagagtgggtgtaaggagtgcgaagagttggaagaaaaaaacatcaaagaatttcttcaatccttcgttcacatagtgcaaatgttcattaacacgtccactaccacacccgccccgaggccacctacgccggcaccgactatcgccagtcaacccctctctctgcgccccgaggcttgccggcctgcggctggtggggcggtccacacccggggcctggattttgcgtgcgatatatacatctgggcacctcttgccggcacctgcggagtgctgcttctctcactcgttattacgctgtactgctaa

SEQ ID NO: 1010 - DNA, 2136 bp, synthetic construct
  misc_feature 1..2136: note = Synthetic
  source 1..2136: mol_type = other DNA
atggccttaccagtgaccgccttgctcctgccgctggccttgctgctccacgccgccaggccggaaattgtgctgactcagtctccagactttcagtctgtgactccaaaggagaaagtcaccatcacctgccgggccagtcagagcattggtagtagcttacactggtaccagcagaaaccagatcagtctccaaagctcctcatcaagtttgcttcccagtccttctcaggggtcccctcgaggttcagtggcagtggatctgggacagatttcaccctcaccatccatagcctggaagctgaagatgctgcaacgtattactgtcatcagagtagtagtttaccgtggacgttcggccaagggaccaaggtggaaatcaaaggtggaggcggttcaggcggaggtggctctggcggtggcggatcgcaggtgcagctggtggagtctgggggaggcgtggtccagcctgggaggtccctgagactctcctgtgcagcgtctgggttcaccttcagtaactatgacatgcactgggtccgccaggccccaggcaaggggctggagtgggtgacaattatatggcatgatgcaagtaataaatattatttagactccgtgaagggccgattcaccatctccagagacaattccaagaacacgctgtatctgcaaatgaacagcctgagagccgaggacacggctgtgtattactgtgcgagaggtgacaactggaacgacgaacaccactacttctactacatggacgtctggggcaaagggaccacggtcaccgtctcctcaaccacgacgccagcgccgcggccaccaacaccggcgcccaccatcgcgtcgcagcccctgtccctgcgcccagaggcgtgccggccagcggcggggggcgcagtgcacacgagggggctggacttcgcctgtgatatctacatctgggcgcccttggccgggacttgtggggtccttctcctgtcactggttatcaccctttactgccggagggaccagaggctgccccccgatgcccacaagccccctgggggaggcagtttccggacccccatccaagaggagcaggccgacgcccactccaccctggccaagatcagagtgaagttcagcaggagcgcagacgcccccgcgtaccagcagggccagaaccagctctataacgagctcaatctaggacgaagagaggagtacgatgttttggacaagagacgtggccgggaccctgagatggggggaaagccgagaaggaagaaccctcaggaaggcctgtacaatgaactgcagaaagataagatggcggaggcctacagtgagattgggatgaaaggcgagcgccggaggggcaaggggcacgatggcctttaccagggtctcagtacagccaccaaggacacctacgacgcccttcacatgcaggccctgccccctcgcggctctggcgagggaaggggttccctgcttacttgcggcgacgtcgaagagaatcccggtccgatggccctcccagtaactgccctccttttgcccctcgcactccttcttcatgccgctcgccccaactgggtcaacgtgattagcgatttgaagaaaatcgaggaccttatacagtctatgcatattgacgctacactgtatactgagagtgatgtacacccgtcctgtaaggtaacggccatgaaatgctttcttctggagctccaggtcatcagcttggagtctggggacgcaagcatccacgatacggttgaaaacctcatcatccttgcgaacaactctctctcatctaatggaaacgttacagagagtgggtgtaaggagtgcgaagagttggaagaaaaaaacatcaaagaatttcttcaatccttcgttcacatagtgcaaatgttcattaacacgtccactaccacacccgccccgaggccacctacgccggcaccgactatcgccagtcaacccctctctctgcgccccgaggcttgccggcctgcggctggtggggcggtccacacccggggcctggattttgcgtgcgatatatacatctgggcacctcttgccggcacctgcggagtgctgcttctctcactcgttattacgctgtactgctaa

SEQ ID NO: 1011 - DNA, 2136 bp, synthetic construct
  misc_feature 1..2136: note = Synthetic
  source 1..2136: mol_type = other DNA
atggccttaccagtgaccgccttgctcctgccgctggccttgctgctccacgccgccaggccggaaattgtgctgactcagtctccagactttcagtctgtgactccaaaggagaaagtcaccatcacctgccgggccagtcagagcattggtagtagcttacactggtaccagcagaaaccagatcagtctccaaagctcctcatcaagtttgcttcccagtccttctcaggggtcccctcgaggttcagtggcagtggatctgggacagatttcaccctcaccatccatagcctggaagctgaagatgctgcaacgtattactgtcatcagagtagtagtttaccgtggacgttcggccaagggaccaaggtggaaatcaaaggtggaggcggttcaggcggaggtggctctggcggtggcggatcgcaggtgcagctggtggagtctgggggaggcgtggtccagcctgggaggtccctgagactctcctgtgcagcgtctgggttcaccttcagtaactatgacatgcactgggtccgccaggccccaggcaaggggctggagtgggtgacaattatatggcatgatggaagtaataaatattatttagactccgtgaagggccgattcaccatctccagagacaattccaagaacacgctgtatctgcaaatgaacagcctgagagccgaggacacggctgtgtattactgtgcgagaggtgacaactggaacgacgaacaccactacttctactacatggacgtctggggcaaagggaccacggtcaccgtctcctcaaccacgacgccagcgccgcggccaccaacaccggcgcccaccatcgcgtcgcagcccctgtccctgcgcccagaggcgtgccggccagcggcggggggcgcagtgcacacgagggggctggacttcgcctgtgatatctacatctgggcgcccttggccgggacttgtggggtccttctcctgtcactggttatcaccctttactgccggagggaccagaggctgccccccgatgcccacaagccccctgggggaggcagtttccggacccccatccaagaggagcaggccgacgcccactccaccctggccaagatcagagtgaagttcagcaggagcgcagacgcccccgcgtaccagcagggccagaaccagctctataacgagctcaatctaggacgaagagaggagtacgatgttttggacaagagacgtggccgggaccctgagatggggggaaagccgagaaggaagaaccctcaggaaggcctgtacaatgaactgcagaaagataagatggcggaggcctacagtgagattgggatgaaaggcgagcgccggaggggcaaggggcacgatggcctttaccagggtctcagtacagccaccaaggacacctacgacgcccttcacatgcaggccctgccccctcgcggctctggcgagggaaggggttccctgcttacttgcggcgacgtcgaagagaatcccggtccgatggccctcccagtaactgccctccttttgcccctcgcactccttcttcatgccgctcgccccaactgggtcaacgtgattagcgatttgaagaaaatcgaggaccttatacagtctatgcatattgacgctacactgtatactgagagtgatgtacacccgtcctgtaaggtaacggccatgaaatgctttcttctggagctccaggtcatcagcttggagtctggggacgcaagcatccacgatacggttgaaaacctcatcatccttgcgaacaactctctctcatctaatggaaacgttacagagagtgggtgtaaggagtgcgaagagttggaagaaaaaaacatcaaagaatttcttcaatccttcgttcacatagtgcaaatgttcattaacacgtccactaccacacccgccccgaggccacctacgccggcaccgactatcgccagtcaacccctctctctgcgccccgaggcttgccggcctgcggctggtggggcggtccacacccggggcctggattttgcgtgcgatatatacatctgggcacctcttgccggcacctgcggagtgctgcttctctcactcgttattacgctgtactgctaa

SEQ ID NO: 1012 - DNA, 2118 bp, synthetic construct
  misc_feature 1..2118: note = Synthetic
  source 1..2118: mol_type = other DNA
atggccttaccagtgaccgccttgctcctgccgctggccttgctgctccacgccgccaggccgcagactgtggtgacccaggagccatcgctctcagtgtcccctggagggacagtcacactcacttgtggcttgagctctggctcagtctctactagttactaccccagctggtaccagcagaccccaggccaggctccacgcacgctcatctacagcacaaatattcggtcttctggggtccctgatcgcttctctggctccatccttgggaacaaagctgccctcaccatcacgggggcccaggcagatgatgaatctgattattattgtaagctgtatatgggaagtggcattattttcggcagtggaaccaaggtcactgtcctaggtggaggcggttcaggcggaggtggctctggcggtggcggatcggaggtgcagctgctggagtctgggggaggcttggtacagcctggggggtccctgagactctcctgtgcagcctctggattcacctttagcatctatgccatgagctgggtccgccaggctccagggaaggggctggagtgggtctcagctattagtggtggtggtgataccacatactacgcagactccgtgaagggccggttcaccatctccagagacaattccaagaccacgctggatctgcaaatgaacagcctgagagccgaggacacggccgtatattactgtgcgaaacacactagctactacatggacgtctggggcaaagggaccacggtcaccgtctcctcaaccacgacgccagcgccgcggccaccaacaccggcgcccaccatcgcgtcgcagcccctgtccctgcgcccagaggcgtgccggccagcggcggggggcgcagtgcacacgagggggctggacttcgcctgtgatatctacatctgggcgcccttggccgggacttgtggggtccttctcctgtcactggttatcaccctttactgccggagggaccagaggctgccccccgatgcccacaagccccctgggggaggcagtttccggacccccatccaagaggagcaggccgacgcccactccaccctggccaagatcagagtgaagttcagcaggagcgcagacgcccccgcgtaccagcagggccagaaccagctctataacgagctcaatctaggacgaagagaggagtacgatgttttggacaagagacgtggccgggaccctgagatggggggaaagccgagaaggaagaaccctcaggaaggcctgtacaatgaactgcagaaagataagatggcggaggcctacagtgagattgggatgaaaggcgagcgccggaggggcaaggggcacgatggcctttaccagggtctcagtacagccaccaaggacacctacgacgcccttcacatgcaggccctgccccctcgcggctctggcgagggaaggggttccctgcttacttgcggcgacgtcgaagagaatcccggtccgatggccctcccagtaactgccctccttttgcccctcgcactccttcttcatgccgctcgccccaactgggtcaacgtgattagcgatttgaagaaaatcgaggaccttatacagtctatgcatattgacgctacactgtatactgagagtgatgtacacccgtcctgtaaggtaacggccatgaaatgctttcttctggagctccaggtcatcagcttggagtctggggacgcaagcatccacgatacggttgaaaacctcatcatccttgcgaacaactctctctcatctaatggaaacgttacagagagtgggtgtaaggagtgcgaagagttggaagaaaaaaacatcaaagaatttcttcaatccttcgttcacatagtgcaaatgttcattaacacgtccactaccacacccgccccgaggccacctacgccggcaccgactatcgccagtcaacccctctctctgcgccccgaggcttgccggcctgcggctggtggggcggtccacacccggggcctggattttgcgtgcgatatatacatctgggcacctcttgccggcacctgcggagtgctgcttctctcactcgttattacgctgtactgctaa

SEQ ID NO: 1013 - DNA, 2136 bp, synthetic construct
  misc_feature 1..2136: note = Synthetic
  source 1..2136: mol_type = other DNA
atggccttaccagtgaccgccttgctcctgccgctggccttgctgctccacgccgccaggccggaaattgtgctgactcagtctccagactttcagtctgtgactccaaaggagaaagtcaccatcacctgccgggccagtcagagcattggtagtagcttacactggtaccagcagaaaccagatcagtctccaaagctcctcatcaagtttgcttcccagtccttctcaggggtcccctcgaggttcagtggcagtggatctgggacagatttcaccctcaccatccatagcctggaagctgaagatgctgcaacgtattactgtcatcagagtagtagtttaccgtggacgttcggccaagggaccaaggtggaaatcaaaggtggaggcggttcaggcggaggtggctctggcggtggcggatcgcaggtgcagctggtggagtctgggggaggcgtggtccagcctgggaggtccctgagactctcctgtgcagcgtctggattcaccttcagtaactatgacaagcactgggtccgccaggccccaggcaaggggctggagtgggtggcagttatatggtatgatggaagtaataagtactatgcagactccgtgaagggccgattcaccatttccagagacaattccaagaacacgctgtatctacaaatgaacagcctgagagccgaggacacggctatgtattactgtgcgagaggtgacaactggaacgacgaacaccactacttctactacatggacgtctggggcaaagggaccacggtcaccgtctcctcaaccacgacgccagcgccgcggccaccaacaccggcgcccaccatcgcgtcgcagcccctgtccctgcgcccagaggcgtgccggccagcggcggggggcgcagtgcacacgagggggctggacttcgcctgtgatatctacatctgggcgcccttggccgggacttgtggggtccttctcctgtcactggttatcaccctttactgccggagggaccagaggctgccccccgatgcccacaagccccctgggggaggcagtttccggacccccatccaagaggagcaggccgacgcccactccaccctggccaagatcagagtgaagttcagcaggagcgcagacgcccccgcgtaccagcagggccagaaccagctctataacgagctcaatctaggacgaagagaggagtacgatgttttggacaagagacgtggccgggaccctgagatggggggaaagccgagaaggaagaaccctcaggaaggcctgtacaatgaactgcagaaagataagatggcggaggcctacagtgagattgggatgaaaggcgagcgccggaggggcaaggggcacgatggcctttaccagggtctcagtacagccaccaaggacacctacgacgcccttcacatgcaggccctgccccctcgcggctctggcgagggaaggggttccctgcttacttgcggcgacgtcgaagagaatcccggtccgatggccctcccagtaactgccctccttttgcccctcgcactccttcttcatgccgctcgccccaactgggtcaacgtgattagcgatttgaagaaaatcgaggaccttatacagtctatgcatattgacgctacactgtatactgagagtgatgtacacccgtcctgtaaggtaacggccatgaaatgctttcttctggagctccaggtcatcagcttggagtctggggacgcaagcatccacgatacggttgaaaacctcatcatccttgcgaacaactctctctcatctaatggaaacgttacagagagtgggtgtaaggagtgcgaagagttggaagaaaaaaacatcaaagaatttcttcaatccttcgttcacatagtgcaaatgttcattaacacgtccactaccacacccgccccgaggccacctacgccggcaccgactatcgccagtcaacccctctctctgcgccccgaggcttgccggcctgcggctggtggggcggtccacacccggggcctggattttgcgtgcgatatatacatctgggcacctcttgccggcacctgcggagtgctgcttctctcactcgttattacgctgtactgctaa

SEQ ID NO: 1014 - DNA, 2130 bp, synthetic construct
  misc_feature 1..2130: note = Synthetic
  source 1..2130: mol_type = other DNA
atggccttaccagtgaccgccttgctcctgccgctggccttgctgctccacgccgccaggccggaaattgtgttgacgcagtctccagccaccctgtctttgtctccaggggaaagagccaccctctcctgcggggccagtcagagtgtttacaacagttacttagcctggtaccagcagaaacctggcctggcgcccaggctcctcatctatgatgcatccctcagggccactggcgtcccagacaggttcagtggcagtgggtctgggacagacttcactctcaccatcagcacactggagcctgaagattttgcagtgtattactgtcagcagtatggtggctcacccatgtacacttttggccaggggaccaagctggagatcaaaggtggaggcggttcaggcggaggtggctctggcggtggcggatcgcaggttcagttggtacagtctggagctgaggtgaagaagcctggggcctcagtgaaggtctcctgtaaggcttctggttacacctttaccaactatggtttcagctgggtgcgacaggcccctggacaagggcttgactggatgggatggatcagcgcttacaatggttacacaaattatacacagaaactccagggcagagtcaccatgaccactgacacatccacgaccacagcctacatggagctgaggagcctgagatctgacgacacggccgtctattactgtgcgagaagaggactactctactactactactccatggacgtctggggcaaagggaccacggtcaccgtctcctcaaccacgacgccagcgccgcggccaccaacaccggcgcccaccatcgcgtcgcagcccctgtccctgcgcccagaggcgtgccggccagcggcggggggcgcagtgcacacgagggggctggacttcgcctgtgatatctacatctgggcgcccttggccgggacttgtggggtccttctcctgtcactggttatcaccctttactgccggagggaccagaggctgccccccgatgcccacaagccccctgggggaggcagtttccggacccccatccaagaggagcaggccgacgcccactccaccctggccaagatcagagtgaagttcagcaggagcgcagacgcccccgcgtaccagcagggccagaaccagctctataacgagctcaatctaggacgaagagaggagtacgatgttttggacaagagacgtggccgggaccctgagatggggggaaagccgagaaggaagaaccctcaggaaggcctgtacaatgaactgcagaaagataagatggcggaggcctacagtgagattgggatgaaaggcgagcgccggaggggcaaggggcacgatggcctttaccagggtctcagtacagccaccaaggacacctacgacgcccttcacatgcaggccctgccccctcgcggctctggcgagggaaggggttccctgcttacttgcggcgacgtcgaagagaatcccggtccgatggccctcccagtaactgccctccttttgcccctcgcactccttcttcatgccgctcgccccaactgggtcaacgtgattagcgatttgaagaaaatcgaggaccttatacagtctatgcatattgacgctacactgtatactgagagtgatgtacacccgtcctgtaaggtaacggccatgaaatgctttcttctggagctccaggtcatcagcttggagtctggggacgcaagcatccacgatacggttgaaaacctcatcatccttgcgaacaactctctctcatctaatggaaacgttacagagagtgggtgtaaggagtgcgaagagttggaagaaaaaaacatcaaagaatttcttcaatccttcgttcacatagtgcaaatgttcattaacacgtccactaccacacccgccccgaggccacctacgccggcaccgactatcgccagtcaacccctctctctgcgccccgaggcttgccggcctgcggctggtggggcggtccacacccggggcctggattttgcgtgcgatatatacatctgggcacctcttgccggcacctgcggagtgctgcttctctcactcgttattacgctgtactgctaa

SEQ ID NO: 1015 - DNA, 2118 bp, synthetic construct
  misc_feature 1..2118: note = Synthetic
  source 1..2118: mol_type = other DNA
atggccttaccagtgaccgccttgctcctgccgctggccttgctgctccacgccgccaggccgcagactgtggtgacccaggagccatcgctctcagtgtcccctggagggacagtcacactcacttgtggcttgagctctggctcagtctctactagtgactaccccagctggtaccagcagaccccaggccaggctccacgcacgctcatctacagaacaaacactcgctcttctggggtccctgatcgcttctctggctccatccttgggaacaaagctgccctcaccatcacgggggcccaggcagatgatgaatctgattattactgtgtgctgtatatggatagtggcattattttcggcagtggaaccaaggtcactgtcctaggtggaggcggttcaggcggaggtggctctggcggtggcggatcggaggtgcagctgctggagtctgggggaggcctggtacagcctggggggtccctgagactctcctgtacagcctctggattcacctttagcagctttgccatgagctgggtccgccaggctccagggaaggggctggagtgggtctcagctatgagtggtagtggtgataccacatactacgcagactccgtgaagggccggttcaccatctcccgagacaattccaagaccacgctgtatctgcaaatgaacagcctgagagccgaggacacggccgtatattcctgtgcgaagcacactacctactacatggacgtctggggcaaagggaccacggtcaccgtctcctcaaccacgacgccagcgccgcggccaccaacaccggcgcccaccatcgcgtcgcagcccctgtccctgcgcccagaggcgtgccggccagcggcggggggcgcagtgcacacgagggggctggacttcgcctgtgatatctacatctgggcgcccttggccgggacttgtggggtccttctcctgtcactggttatcaccctttactgccggagggaccagaggctgccccccgatgcccacaagccccctgggggaggcagtttccggacccccatccaagaggagcaggccgacgcccactccaccctggccaagatcagagtgaagttcagcaggagcgcagacgcccccgcgtaccagcagggccagaaccagctctataacgagctcaatctaggacgaagagaggagtacgatgttttggacaagagacgtggccgggaccctgagatggggggaaagccgagaaggaagaaccctcaggaaggcctgtacaatgaactgcagaaagataagatggcggaggcctacagtgagattgggatgaaaggcgagcgccggaggggcaaggggcacgatggcctttaccagggtctcagtacagccaccaaggacacctacgacgcccttcacatgcaggccctgccccctcgcggctctggcgagggaaggggttccctgcttacttgcggcgacgtcgaagagaatcccggtccgatggccctcccagtaactgccctccttttgcccctcgcactccttcttcatgccgctcgccccaactgggtcaacgtgattagcgatttgaagaaaatcgaggaccttatacagtctatgcatattgacgctacactgtatactgagagtgatgtacacccgtcctgtaaggtaacggccatgaaatgctttcttctggagctccaggtcatcagcttggagtctggggacgcaagcatccacgatacggttgaaaacctcatcatccttgcgaacaactctctctcatctaatggaaacgttacagagagtgggtgtaaggagtgcgaagagttggaagaaaaaaacatcaaagaatttcttcaatccttcgttcacatagtgcaaatgttcattaacacgtccactaccacacccgccccgaggccacctacgccggcaccgactatcgccagtcaacccctctctctgcgccccgaggcttgccggcctgcggctggtggggcggtccacacccggggcctggattttgcgtgcgatatatacatctgggcacctcttgccggcacctgcggagtgctgcttctctcactcgttattacgctgtactgctaa

SEQ ID NO: 1016 - DNA, 2118 bp, synthetic construct
  misc_feature 1..2118: note = Synthetic
  source 1..2118: mol_type = other DNA
atggccttaccagtgaccgccttgctcctgccgctggccttgctgctccacgccgccaggccgcagactgtggtgacccaggagccatcgctctcagtgtcccctggagggacagtcacactcacttgtggcttgagctctggctcagtctctactagtgactaccccagttggtaccagcagaccccaggccaggctccacgcacgctcatctacagaacaaacactcgctcttctggggtccctgatcgcttctctggctccatccttgggaacaaagctgccctcaccatcacgggggcccaggcagatgatgaatctgattattactgtgtgctgtatatgggtagtggcattattttcggcagtggaaccaaggtcactgtcctaggtggaggcggttcaggcggaggtggctctggcggtggcggatcggaggtgcagctgctggagtctgggggaggcttggtacagcctggggggtccctgagactctcctgtgcagcctctggattcacctttaacacctatgccatgagctgggtccgccaggctccagggaaggggctggagtgggtctcagctatgagtggtagtggtgataccacatactacgcagactccgtgaagggccggttcaccatctccagagacaattccaagaccactctgtatctgcaaatgaacagcctgagagccgaggacacggccgtatattcctgtgcgaaacacacttcctactacatggacgtctggggcaaagggaccacggtcaccgtctcctcaaccacgacgccagcgccgcggccaccaacaccggcgcccaccatcgcgtcgcagcccctgtccctgcgcccagaggcgtgccggccagcggcggggggcgcagtgcacacgagggggctggacttcgcctgtgatatctacatctgggcgcccttggccgggacttgtggggtccttctcctgtcactggttatcaccctttactgccggagggaccagaggctgccccccgatgcccacaagccccctgggggaggcagtttccggacccccatccaagaggagcaggccgacgcccactccaccctggccaagatcagagtgaagttcagcaggagcgcagacgcccccgcgtaccagcagggccagaaccagctctataacgagctcaatctaggacgaagagaggagtacgatgttttggacaagagacgtggccgggaccctgagatggggggaaagccgagaaggaagaaccctcaggaaggcctgtacaatgaactgcagaaagataagatggcggaggcctacagtgagattgggatgaaaggcgagcgccggaggggcaaggggcacgatggcctttaccagggtctcagtacagccaccaaggacacctacgacgcccttcacatgcaggccctgccccctcgcggctctggcgagggaaggggttccctgcttacttgcggcgacgtcgaagagaatcccggtccgatggccctcccagtaactgccctccttttgcccctcgcactccttcttcatgccgctcgccccaactgggtcaacgtgattagcgatttgaagaaaatcgaggaccttatacagtctatgcatattgacgctacactgtatactgagagtgatgtacacccgtcctgtaaggtaacggccatgaaatgctttcttctggagctccaggtcatcagcttggagtctggggacgcaagcatccacgatacggttgaaaacctcatcatccttgcgaacaactctctctcatctaatggaaacgttacagagagtgggtgtaaggagtgcgaagagttggaagaaaaaaacatcaaagaatttcttcaatccttcgttcacatagtgcaaatgttcattaacacgtccactaccacacccgccccgaggccacctacgccggcaccgactatcgccagtcaacccctctctctgcgccccgaggcttgccggcctgcggctggtggggcggtccacacccggggcctggattttgcgtgcgatatatacatctgggcacctcttgccggcacctgcggagtgctgcttctctcactcgttattacgctgtactgctaa

SEQ ID NO: 1017 - DNA, 2118 bp, synthetic construct
  misc_feature 1..2118: note = Synthetic
  source 1..2118: mol_type = other DNA
atggccttaccagtgaccgccttgctcctgccgctggccttgctgctccacgccgccaggccgcagactgtggtgacccaggagccatcgttctcagtgtcccctggagggacagtcacactcacttgtggcttatactctgactcagtctctactagttactaccccagctggtaccagcagaccccaggccaggctccacgcacgctcatctacaacacaaacactcgctcttctggggtccctgatcgcttctctggctccatccttgggaacaaagctgccctcaccatcacgggggcccaggcagatgatgaatctgattattactgtgtactatatatggttagtggcattgttttcggcagtggaaccaaggtcactgtcctgggtggaggcggttcaggcggaggtggctctggcggtggcggatcggaggtccaattattggagtctgggggagacttggtacagcctggggggtccctgagactctcctgtgcagcctctggattcacctttagcacctatgccatgagctgggtccgccaggctccagggaaggggctggaatgggtctcagctattagtggtagtggtgaaaacatatactacgcagactccgtgaagggccggttcaccatctccagagacaattccaagaacacgctatttctacaaatgaacagcctgagagccgaggacacggccgtatattactgtgcgaaacacactagctattacatggacgtctggggcaaagggaccacggtcaccgtctcctcaaccacgacgccagcgccgcggccaccaacaccggcgcccaccatcgcgtcgcagcccctgtccctgcgcccagaggcgtgccggccagcggcggggggcgcagtgcacacgagggggctggacttcgcctgtgatatctacatctgggcgcccttggccgggacttgtggggtccttctcctgtcactggttatcaccctttactgccggagggaccagaggctgccccccgatgcccacaagccccctgggggaggcagtttccggacccccatccaagaggagcaggccgacgcccactccaccctggccaagatcagagtgaagttcagcaggagcgcagacgcccccgcgtaccagcagggccagaaccagctctataacgagctcaatctaggacgaagagaggagtacgatgttttggacaagagacgtggccgggaccctgagatggggggaaagccgagaaggaagaaccctcaggaaggcctgtacaatgaactgcagaaagataagatggcggaggcctacagtgagattgggatgaaaggcgagcgccggaggggcaaggggcacgatggcctttaccagggtctcagtacagccaccaaggacacctacgacgcccttcacatgcaggccctgccccctcgcggctctggcgagggaaggggttccctgcttacttgcggcgacgtcgaagagaatcccggtccgatggccctcccagtaactgccctccttttgcccctcgcactccttcttcatgccgctcgccccaactgggtcaacgtgattagcgatttgaagaaaatcgaggaccttatacagtctatgcatattgacgctacactgtatactgagagtgatgtacacccgtcctgtaaggtaacggccatgaaatgctttcttctggagctccaggtcatcagcttggagtctggggacgcaagcatccacgatacggttgaaaacctcatcatccttgcgaacaactctctctcatctaatggaaacgttacagagagtgggtgtaaggagtgcgaagagttggaagaaaaaaacatcaaagaatttcttcaatccttcgttcacatagtgcaaatgttcattaacacgtccactaccacacccgccccgaggccacctacgccggcaccgactatcgccagtcaacccctctctctgcgccccgaggcttgccggcctgcggctggtggggcggtccacacccggggcctggattttgcgtgcgatatatacatctgggcacctcttgccggcacctgcggagtgctgcttctctcactcgttattacgctgtactgctaa

SEQ ID NO: 1018 - DNA, 2136 bp, synthetic construct
  misc_feature 1..2136: note = Synthetic
  source 1..2136: mol_type = other DNA
atggccttaccagtgaccgccttgctcctgccgctggccttgctgctccacgccgccaggccgcagactgtggtgacccaggagccatcgttctcagtgtcccctggagggacagtcacactcacttgtggcttgagctctggctcagtctctactagttactaccccggctggtaccagcagaccccaggccaggctccacgcacgctcatctacagcacaaacactcgctcttctggggtccctgatcgcttctctggctccatccttgggaacaaagctgccctcaccatcacgggggcccaggcagatgatgaatctgattattactgtgtgctatatatgggtagtggcatgtttattttcggcagtggaaccaaggtcactgtcctaggtggaggcggttcaggcggaggtggctctggcggtggcggatcgcaggtgcagctggtggagtctgggggaggcgtggtccagcctgggaggtccctgagactctcctgtgcagcgtctggattcaccttcagtagttatggcatgcactgggtccgccaggctccaggcaaggggctggagtgggtggcagttatatggtatgatggaattaataaatactatgcagactccgtgaagggccgattcaccatctccagagacaattccaagaacacgctgtatctgcaaatgaacagcctgagagccgaagacacggctgtgtattactgtgcgagagaacggctggaacgaaggtactactactacatggacgtctggggcaaagggaccacggtcaccgtctcctcaaccacgacgccagcgccgcggccaccaacaccggcgcccaccatcgcgtcgcagcccctgtccctgcgcccagaggcgtgccggccagcggcggggggcgcagtgcacacgagggggctggacttcgcctgtgatatctacatctgggcgcccttggccgggacttgtggggtccttctcctgtcactggttatcaccctttactgccggagggaccagaggctgccccccgatgcccacaagccccctgggggaggcagtttccggacccccatccaagaggagcaggccgacgcccactccaccctggccaagatcagagtgaagttcagcaggagcgcagacgcccccgcgtaccagcagggccagaaccagctctataacgagctcaatctaggacgaagagaggagtacgatgttttggacaagagacgtggccgggaccctgagatggggggaaagccgagaaggaagaaccctcaggaaggcctgtacaatgaactgcagaaagataagatggcggaggcctacagtgagattgggatgaaaggcgagcgccggaggggcaaggggcacgatggcctttaccagggtctcagtacagccaccaaggacacctacgacgcccttcacatgcaggccctgccccctcgcggctctggcgagggaaggggttccctgcttacttgcggcgacgtcgaagagaatcccggtccgatggccctcccagtaactgccctccttttgcccctcgcactccttcttcatgccgctcgccccaactgggtcaacgtgattagcgatttgaagaaaatcgaggaccttatacagtctatgcatattgacgctacactgtatactgagagtgatgtacacccgtcctgtaaggtaacggccatgaaatgctttcttctggagctccaggtcatcagcttggagtctggggacgcaagcatccacgatacggttgaaaacctcatcatccttgcgaacaactctctctcatctaatggaaacgttacagagagtgggtgtaaggagtgcgaagagttggaagaaaaaaacatcaaagaatttcttcaatccttcgttcacatagtgcaaatgttcattaacacgtccactaccacacccgccccgaggccacctacgccggcaccgactatcgccagtcaacccctctctctgcgccccgaggcttgccggcctgcggctggtggggcggtccacacccggggcctggattttgcgtgcgatatatacatctgggcacctcttgccggcacctgcggagtgctgcttctctcactcgttattacgctgtactgctaa

SEQ ID NO: 1019 - DNA, 2118 bp, synthetic construct
  misc_feature 1..2118: note = Synthetic
  source 1..2118: mol_type = other DNA
atggccttaccagtgaccgccttgctcctgccgctggccttgctgctccacgccgccaggccgcagactgtggtgacccaggagccatcgttctcagtgtcccctggagggacagtcacactcacttgtgccttgagctctgactcagtctctactagttactttcccagctggtaccggcagaccccaggccaggctccacgcacgctcatctacaacacaaacactcgctcttctggggtccctgatcgcttctctggctccatccttgggaacaaagctgccctcaccatcacgggggcccaggcagatgatgaatctgattattactgtgtgctatatatgggtagtggcattattttcggcagtggaaccaaggtcactgtcctaggtggaggcggttcaggcggaggtggctctggcggtggcggatcggaggtgcagttgttggagtctgggggaggcttggtacagcctggggggtccctgagactctcctgtgcagcctctggattcacctttagcagctttgccatgagctgggtccgccaggctccagggaaggggctggaatgggtctcagctgttagtggtagtggtgatgacacatactacgcagactccgtgaagggccggttcaccatctccagagacaattccaagaacacgctgtatctgcaaatgaacagcctgagagccgaggacacggccgtatattactgtgcgaaacacactagctactacctggacgtctggggcaaagggaccacggtcaccgtctcctcaaccacgacgccagcgccgcggccaccaacaccggcgcccaccatcgcgtcgcagcccctgtccctgcgcccagaggcgtgccggccagcggcggggggcgcagtgcacacgagggggctggacttcgcctgtgatatctacatctgggcgcccttggccgggacttgtggggtccttctcctgtcactggttatcaccctttactgccggagggaccagaggctgccccccgatgcccacaagccccctgggggaggcagtttccggacccccatccaagaggagcaggccgacgcccactccaccctggccaagatcagagtgaagttcagcaggagcgcagacgcccccgcgtaccagcagggccagaaccagctctataacgagctcaatctaggacgaagagaggagtacgatgttttggacaagagacgtggccgggaccctgagatggggggaaagccgagaaggaagaaccctcaggaaggcctgtacaatgaactgcagaaagataagatggcggaggcctacagtgagattgggatgaaaggcgagcgccggaggggcaaggggcacgatggcctttaccagggtctcagtacagccaccaaggacacctacgacgcccttcacatgcaggccctgccccctcgcggctctggcgagggaaggggttccctgcttacttgcggcgacgtcgaagagaatcccggtccgatggccctcccagtaactgccctccttttgcccctcgcactccttcttcatgccgctcgccccaactgggtcaacgtgattagcgatttgaagaaaatcgaggaccttatacagtctatgcatattgacgctacactgtatactgagagtgatgtacacccgtcctgtaaggtaacggccatgaaatgctttcttctggagctccaggtcatcagcttggagtctggggacgcaagcatccacgatacggttgaaaacctcatcatccttgcgaacaactctctctcatctaatggaaacgttacagagagtgggtgtaaggagtgcgaagagttggaagaaaaaaacatcaaagaatttcttcaatccttcgttcacatagtgcaaatgttcattaacacgtccactaccacacccgccccgaggccacctacgccggcaccgactatcgccagtcaacccctctctctgcgccccgaggcttgccggcctgcggctggtggggcggtccacacccggggcctggattttgcgtgcgatatatacatctgggcacctcttgccggcacctgcggagtgctgcttctctcactcgttattacgctgtactgctaa

SEQ ID NO: 1020 - DNA, 2136 bp, synthetic construct
  misc_feature 1..2136: note = Synthetic
  source 1..2136: mol_type = other DNA
atggccttaccagtgaccgccttgctcctgccgctggccttgctgctccacgccgccaggccggaaattgtcctgactcagtctccagactttcagtctgtgactccaaaggagaaagtcaccatcacctgccgggccagtcagagtattggtagtagcttacactggtaccagcagaaaccagatcagtctccaaagctcctcatcaagtttgcttcccagtccttctcaggggtcccctcgaggttcagtggcagtggatctgggacagatttcaccctcaccatcaatagcctggaagctgaagatgctgcaacgtatttctgtcatcagagtagtagtttaccgtggacgttcggccaagggaccaaggtggaaatcaaaggtggaggcggttcaggcggaggtggctctggcggtggcggatcgcaggtgcagctggtggagtctgggggaggcgtggtccagcctgggaggtccctgagactctcctgtgcagcgtctggattcaacttcagtacctttgacatacactgggtccgccaggctccaggcaaggggctggagtgggtggcacttatatggtatgatggaagttataaatactatgcagactccgtgaagggccgattcaccatttccagagacaattccaagaacacgctggatctgcgaatgaacagcctgagagccgaggacacggctgtgtattactgtgcgcgaaatgacaactggaacgacgaacactactaccactattacatggacgtctggggcaaagggaccacggtcaccgtctcctcaaccacgacgccagcgccgcggccaccaacaccggcgcccaccatcgcgtcgcagcccctgtccctgcgcccagaggcgtgccggccagcggcggggggcgcagtgcacacgagggggctggacttcgcctgtgatatctacatctgggcgcccttggccgggacttgtggggtccttctcctgtcactggttatcaccctttactgccggagggaccagaggctgccccccgatgcccacaagccccctgggggaggcagtttccggacccccatccaagaggagcaggccgacgcccactccaccctggccaagatcagagtgaagttcagcaggagcgcagacgcccccgcgtaccagcagggccagaaccagctctataacgagctcaatctaggacgaagagaggagtacgatgttttggacaagagacgtggccgggaccctgagatggggggaaagccgagaaggaagaaccctcaggaaggcctgtacaatgaactgcagaaagataagatggcggaggcctacagtgagattgggatgaaaggcgagcgccggaggggcaaggggcacgatggcctttaccagggtctcagtacagccaccaaggacacctacgacgcccttcacatgcaggccctgccccctcgcggctctggcgagggaaggggttccctgcttacttgcggcgacgtcgaagagaatcccggtccgatggccctcccagtaactgccctccttttgcccctcgcactccttcttcatgccgctcgccccaactgggtcaacgtgattagcgatttgaagaaaatcgaggaccttatacagtctatgcatattgacgctacactgtatactgagagtgatgtacacccgtcctgtaaggtaacggccatgaaatgctttcttctggagctccaggtcatcagcttggagtctggggacgcaagcatccacgatacggttgaaaacctcatcatccttgcgaacaactctctctcatctaatggaaacgttacagagagtgggtgtaaggagtgcgaagagttggaagaaaaaaacatcaaagaatttcttcaatccttcgttcacatagtgcaaatgttcattaacacgtccactaccacacccgccccgaggccacctacgccggcaccgactatcgccagtcaacccctctctctgcgccccgaggcttgccggcctgcggctggtggggcggtccacacccggggcctggattttgcgtgcgatatatacatctgggcacctcttgccggcacctgcggagtgctgcttctctcactcgttattacgctgtactgctaa

SEQ ID NO: 1021 - DNA, 2151 bp, synthetic construct
  misc_feature 1..2151: note = Synthetic
  source 1..2151: mol_type = other DNA
atggccttaccagtgaccgccttgctcctgccgctggccttgctgctccacgccgccaggccgcagactgtggtgacccaggagccatcgttctcagtgtcccctggagggacagtcacactcacttgtggcttgagctctggctcagtctccactagttacttccccagctggtaccagcagacccccggccaggctccacgcacgctcatctacatcacaaacactcgctcttcaggggtccctgatcgcttctctggctccattattgggaacaaagctgccctcaccatcacgggggcccaggcagatgatgaatctgattatttctgtgtactatatatgggtagtggcacttgggtgttcggtggaggaaccaagctgactgtcctaggtggaggcggttcaggcggaggtggctctggcggtggcggatcggaagtgcacctgttggagtctgggggaggcttggtccagcctggggggtccctgagactctcctgtgcggcctctggattcacctttagcagctatgccatgaactgggtccgccaggctccagggaaggggctggagtgggtctcttctattagtggtagtggtagtagctcatactacgcagactccgtgaagggccggttcaccatctccagagacaattccaagaacacgctgtatctgcaaatgaacagcctgagagccgaggacacggccgtatattactgtgcgtctcgtggattcaactcccagtatcctcccggatactactactactacatggacgtctggggcaaagggaccacggtcaccgtctcctcaaccacgacgccagcgccgcggccaccaacaccggcgcccaccatcgcgtcgcagcccctgtccctgcgcccagaggcgtgccggccagcggcggggggcgcagtgcacacgagggggctggacttcgcctgtgatatctacatctgggcgcccttggccgggacttgtggggtccttctcctgtcactggttatcaccctttactgccggagggaccagaggctgccccccgatgcccacaagccccctgggggaggcagtttccggacccccatccaagaggagcaggccgacgcccactccaccctggccaagatcagagtgaagttcagcaggagcgcagacgcccccgcgtaccagcagggccagaaccagctctataacgagctcaatctaggacgaagagaggagtacgatgttttggacaagagacgtggccgggaccctgagatggggggaaagccgagaaggaagaaccctcaggaaggcctgtacaatgaactgcagaaagataagatggcggaggcctacagtgagattgggatgaaaggcgagcgccggaggggcaaggggcacgatggcctttaccagggtctcagtacagccaccaaggacacctacgacgcccttcacatgcaggccctgccccctcgcggctctggcgagggaaggggttccctgcttacttgcggcgacgtcgaagagaatcccggtccgatggccctcccagtaactgccctccttttgcccctcgcactccttcttcatgccgctcgccccaactgggtcaacgtgattagcgatttgaagaaaatcgaggaccttatacagtctatgcatattgacgctacactgtatactgagagtgatgtacacccgtcctgtaaggtaacggccatgaaatgctttcttctggagctccaggtcatcagcttggagtctggggacgcaagcatccacgatacggttgaaaacctcatcatccttgcgaacaactctctctcatctaatggaaacgttacagagagtgggtgtaaggagtgcgaagagttggaagaaaaaaacatcaaagaatttcttcaatccttcgttcacatagtgcaaatgttcattaacacgtccactaccacacccgccccgaggccacctacgccggcaccgactatcgccagtcaacccctctctctgcgccccgaggcttgccggcctgcggctggtggggcggtccacacccggggcctggattttgcgtgcgatatatacatctgggcacctcttgccggcacctgcggagtgctgcttctctcactcgttattacgctgtactgctaa

SEQ ID NO: 1022 - DNA, 2112 bp, synthetic construct
  misc_feature 1..2112: note = Synthetic
  source 1..2112: mol_type = other DNA
atggccttaccagtgaccgccttgctcctgccgctggccttgctgctccacgccgccaggccggaaattgtgctgactcagtctccagactttcagtctgtgactccaaaggagaaagtcaccatcacctgccgggccagtcagagcattggtagtagcttacactggtaccagcagaaaccagatcagtctccaaagctcctcatcaagtttgcttcccagtccttctcaggggtcccctcgaggttcagtggcagtggatctgggacagatttcaccctcaccatccatagcctggaagctgaagatgctgcaacgtattactgtcatcagagtagtagtttaccgtggacgttcggccaagggaccaaggtggaaatcaaaggtggaggcggttcaggcggaggtggctctggcggtggcggatcggaggtgcagctgttggagtctgggggaggcttggtacagcctggggggtccctgagactctcctgtgcagcctctggattcaccttcagcaactatgccatgacctgggtccgccaggctccagggaaggggctggagtgggtctcagctattagtggtagtggtattggcacatactacgcagactccgtgcagggccggttcaccacctccagagacaattccaagaacacgctgtatctgcaaatgaacagcctgagagccgaggacacggccgtttattactgtgcgaaaggggggtacaactggaaggacgtctggggcaaagggaccacggtcaccgtctcctcaaccacgacgccagcgccgcggccaccaacaccggcgcccaccatcgcgtcgcagcccctgtccctgcgcccagaggcgtgccggccagcggcggggggcgcagtgcacacgagggggctggacttcgcctgtgatatctacatctgggcgcccttggccgggacttgtggggtccttctcctgtcactggttatcaccctttactgccggagggaccagaggctgccccccgatgcccacaagccccctgggggaggcagtttccggacccccatccaagaggagcaggccgacgcccactccaccctggccaagatcagagtgaagttcagcaggagcgcagacgcccccgcgtaccagcagggccagaaccagctctataacgagctcaatctaggacgaagagaggagtacgatgttttggacaagagacgtggccgggaccctgagatggggggaaagccgagaaggaagaaccctcaggaaggcctgtacaatgaactgcagaaagataagatggcggaggcctacagtgagattgggatgaaaggcgagcgccggaggggcaaggggcacgatggcctttaccagggtctcagtacagccaccaaggacacctacgacgcccttcacatgcaggccctgccccctcgcggctctggcgagggaaggggttccctgcttacttgcggcgacgtcgaagagaatcccggtccgatggccctcccagtaactgccctccttttgcccctcgcactccttcttcatgccgctcgccccaactgggtcaacgtgattagcgatttgaagaaaatcgaggaccttatacagtctatgcatattgacgctacactgtatactgagagtgatgtacacccgtcctgtaaggtaacggccatgaaatgctttcttctggagctccaggtcatcagcttggagtctggggacgcaagcatccacgatacggttgaaaacctcatcatccttgcgaacaactctctctcatctaatggaaacgttacagagagtgggtgtaaggagtgcgaagagttggaagaaaaaaacatcaaagaatttcttcaatccttcgttcacatagtgcaaatgttcattaacacgtccactaccacacccgccccgaggccacctacgccggcaccgactatcgccagtcaacccctctctctgcgccccgaggcttgccggcctgcggctggtggggcggtccacacccggggcctggattttgcgtgcgatatatacatctgggcacctcttgccggcacctgcggagtgctgcttctctcactcgttattacgctgtactgctaa

SEQ ID NO: 1023 - DNA, 2136 bp, synthetic construct
  misc_feature 1..2136: note = Synthetic
  source 1..2136: mol_type = other DNA
atggccttaccagtgaccgccttgctcctgccgctggccttgctgctccacgccgccaggccggaaattgtgctgactcagtctccagactttcagtctgtgactccaaaggagaaagtcaccatcacctgccgggccagtcagagcattggtagtagcttacactggtaccagcagaaaccagatcagtctccaaagctcctcatcaagtttgcttcccagtccttctcaggggtcccctcgaggttcagtggcagtggatctgggacagatttcaccctcaccatccatagcctggaagctgaagatgctgcaacgtattactgtcatcagagtagtagtttaccgtggacgttcggccaagggaccaaggtggaaatcaaaggtggaggcggttcaggcggaggtggctctggcggtggcggatcgcaggtgcagctggtggagtctgggggaggcgtggtccagcctgggaggtccctgagactctcctgtgcagcgtctgggttcaccttcactaactatgacatgcactgggtccgccaggccccaggcaaggggctggagtgggtgacaattatatggcatgatggaagtaataaatattatttagactccgtgaggggccgattcaccatctccagagacaattccaagaacacgctgtatctgcaaatgaacagcctgagagccgaggacacggctgtgtattactgtgcgagaggtgacaactggaacgacgaacaccactacttctactacatggacgtctggggcaaagggaccacggtcaccgtctcctcaaccacgacgccagcgccgcggccaccaacaccggcgcccaccatcgcgtcgcagcccctgtccctgcgcccagaggcgtgccggccagcggcggggggcgcagtgcacacgagggggctggacttcgcctgtgatatctacatctgggcgcccttggccgggacttgtggggtccttctcctgtcactggttatcaccctttactgccggagggaccagaggctgccccccgatgcccacaagccccctgggggaggcagtttccggacccccatccaagaggagcaggccgacgcccactccaccctggccaagatcagagtgaagttcagcaggagcgcagacgcccccgcgtaccagcagggccagaaccagctctataacgagctcaatctaggacgaagagaggagtacgatgttttggacaagagacgtggccgggaccctgagatggggggaaagccgagaaggaagaaccctcaggaaggcctgtacaatgaactgcagaaagataagatggcggaggcctacagtgagattgggatgaaaggcgagcgccggaggggcaaggggcacgatggcctttaccagggtctcagtacagccaccaaggacacctacgacgcccttcacatgcaggccctgccccctcgcggctctggcgagggaaggggttccctgcttacttgcggcgacgtcgaagagaatcccggtccgatggccctcccagtaactgccctccttttgcccctcgcactccttcttcatgccgctcgccccaactgggtcaacgtgattagcgatttgaagaaaatcgaggaccttatacagtctatgcatattgacgctacactgtatactgagagtgatgtacacccgtcctgtaaggtaacggccatgaaatgctttcttctggagctccaggtcatcagcttggagtctggggacgcaagcatccacgatacggttgaaaacctcatcatccttgcgaacaactctctctcatctaatggaaacgttacagagagtgggtgtaaggagtgcgaagagttggaagaaaaaaacatcaaagaatttcttcaatccttcgttcacatagtgcaaatgttcattaacacgtccactaccacacccgccccgaggccacctacgccggcaccgactatcgccagtcaacccctctctctgcgccccgaggcttgccggcctgcggctggtggggcggtccacacccggggcctggattttgcgtgcgatatatacatctgggcacctcttgccggcacctgcggagtgctgcttctctcactcgttattacgctgtactgctaa

SEQ ID NO: 1024 - DNA, 2136 bp, synthetic construct
  misc_feature 1..2136: note = Synthetic
  source 1..2136: mol_type = other DNA
atggccttaccagtgaccgccttgctcctgccgctggccttgctgctccacgccgccaggccggaaattgtgttgacacagtctccagccaccctgtctttgtctccaggggaaagagccaccctctcctgcagggccagtcagagtgttagcagctccttagcctggtaccaacagaaacctggccaggctccccggctcctcatctatgatgcatccaacagggccactggcatcccagccaggttcagtggcagtgggtctgggacagacttcactctcaccatcagcagcctagagcctgaagattttgcagtttattactgtcagcagcgtagcaactggcctctcactttcggcggagggaccaaggtggagatcaaaggtggaggcggttcaggcggaggtggctctggcggtggcggatcgcaggtgcagctggtggagtctgggggaggcgtggtccagcctgggaggtccctgagactctcctgtgcagcgtctgggttcaccttcagtaactatgacatgcactgggtccgccaggccccaggcaaggggctggagtgggtgacaattatatggcatgatggaagtaataaatattatttagactccgtgaagggccgattcaccatctccagagacaattccaagaacacgctgtatctgcaaatgaacagcctgagagccgaggacacggctgtgtattactgtgcgagaggtgacaactggaacgacgaacaccactacttctactacatggacgtctggggcaaagggaccacggtcaccgtctcctcaaccacgacgccagcgccgcggccaccaacaccggcgcccaccatcgcgtcgcagcccctgtccctgcgcccagaggcgtgccggccagcggcggggggcgcagtgcacacgagggggctggacttcgcctgtgatatctacatctgggcgcccttggccgggacttgtggggtccttctcctgtcactggttatcaccctttactgccggagggaccagaggctgccccccgatgcccacaagccccctgggggaggcagtttccggacccccatccaagaggagcaggccgacgcccactccaccctggccaagatcagagtgaagttcagcaggagcgcagacgcccccgcgtaccagcagggccagaaccagctctataacgagctcaatctaggacgaagagaggagtacgatgttttggacaagagacgtggccgggaccctgagatggggggaaagccgagaaggaagaaccctcaggaaggcctgtacaatgaactgcagaaagataagatggcggaggcctacagtgagattgggatgaaaggcgagcgccggaggggcaaggggcacgatggcctttaccagggtctcagtacagccaccaaggacacctacgacgcccttcacatgcaggccctgccccctcgcggctctggcgagggaaggggttccctgcttacttgcggcgacgtcgaagagaatcccggtccgatggccctcccagtaactgccctccttttgcccctcgcactccttcttcatgccgctcgccccaactgggtcaacgtgattagcgatttgaagaaaatcgaggaccttatacagtctatgcatattgacgctacactgtatactgagagtgatgtacacccgtcctgtaaggtaacggccatgaaatgctttcttctggagctccaggtcatcagcttggagtctggggacgcaagcatccacgatacggttgaaaacctcatcatccttgcgaacaactctctctcatctaatggaaacgttacagagagtgggtgtaaggagtgcgaagagttggaagaaaaaaacatcaaagaatttcttcaatccttcgttcacatagtgcaaatgttcattaacacgtccactaccacacccgccccgaggccacctacgccggcaccgactatcgccagtcaacccctctctctgcgccccgaggcttgccggcctgcggctggtggggcggtccacacccggggcctggattttgcgtgcgatatatacatctgggcacctcttgccggcacctgcggagtgctgcttctctcactcgttattacgctgtactgctaa

SEQ ID NO: 1025 - DNA, 2124 bp, synthetic construct
  misc_feature 1..2124: note = Synthetic
  source 1..2124: mol_type = other DNA
atggccttaccagtgaccgccttgctcctgccgctggccttgctgctccacgccgccaggccggaaattgtgttgacgcagtctccaggcaccctgtctttgtctccaggggaaagagccaccctctcctgcagggccagtcagagtgttagcagcagctacttagcctggtaccagcagaaacctggccaggctcccaggctcctcatctatggtgcatccagcagggccactggcatcccagacaggttcagtggcagtgggtctgggacagacttcactctcaccatcagcagactggagcctgaagattttgcagtgtattactgtcagcagtatggtagctcgtggacgttcggccaagggaccaaggtggaaatcaaaggtggaggcggttcaggcggaggtggctctggcggtggcggatcggaggtgcagctggtggagtctgggggaggtgtggtacggcctggggggtccctgagactctcctgtgcagcctctggattcacctttgatgattatggcatgagctgggtccgccaagctccagggaaggggctggagtgggtctctggtattaattggaatggtggtagcacaggttatgtagactctgtgaagggccgattcaccatctccagagacaacgccaagaactccctgtatctgcaaatgaacagtctgagagccgaggacacggccttgtatcactgtgcgagaccagtaactacggactactactactacatggacgtctggggcaaagggaccacggtcaccgtctcctcaaccacgacgccagcgccgcggccaccaacaccggcgcccaccatcgcgtcgcagcccctgtccctgcgcccagaggcgtgccggccagcggcggggggcgcagtgcacacgagggggctggacttcgcctgtgatatctacatctgggcgcccttggccgggacttgtggggtccttctcctgtcactggttatcaccctttactgccggagggaccagaggctgccccccgatgcccacaagccccctgggggaggcagtttccggacccccatccaagaggagcaggccgacgcccactccaccctggccaagatcagagtgaagttcagcaggagcgcagacgcccccgcgtaccagcagggccagaaccagctctataacgagctcaatctaggacgaagagaggagtacgatgttttggacaagagacgtggccgggaccctgagatggggggaaagccgagaaggaagaaccctcaggaaggcctgtacaatgaactgcagaaagataagatggcggaggcctacagtgagattgggatgaaaggcgagcgccggaggggcaaggggcacgatggcctttaccagggtctcagtacagccaccaaggacacctacgacgcccttcacatgcaggccctgccccctcgcggctctggcgagggaaggggttccctgcttacttgcggcgacgtcgaagagaatcccggtccgatggccctcccagtaactgccctccttttgcccctcgcactccttcttcatgccgctcgccccaactgggtcaacgtgattagcgatttgaagaaaatcgaggaccttatacagtctatgcatattgacgctacactgtatactgagagtgatgtacacccgtcctgtaaggtaacggccatgaaatgctttcttctggagctccaggtcatcagcttggagtctggggacgcaagcatccacgatacggttgaaaacctcatcatccttgcgaacaactctctctcatctaatggaaacgttacagagagtgggtgtaaggagtgcgaagagttggaagaaaaaaacatcaaagaatttcttcaatccttcgttcacatagtgcaaatgttcattaacacgtccactaccacacccgccccgaggccacctacgccggcaccgactatcgccagtcaacccctctctctgcgccccgaggcttgccggcctgcggctggtggggcggtccacacccggggcctggattttgcgtgcgatatatacatctgggcacctcttgccggcacctgcggagtgctgcttctctcactcgttattacgctgtactgctaa

SEQ ID NO: 1026 - DNA, 2148 bp, synthetic construct
  misc_feature 1..2148: note = Synthetic
  source 1..2148: mol_type = other DNA
atggccttaccagtgaccgccttgctcctgccgctggccttgctgctccacgccgccaggccggaaattgtgttgacgcagtctccaggcaccctgtctttgtctccaggggaaagagccaccctctcctgcagggccagtcagagtgttagcagcagctacttagcctggtaccagcagaaacctggccaggctcccaggctcctcatctatggtgcatccagcagggccactggcatcccagacaggttcagtggcagtgggtctgggacagacttcactctcaccatcagcagactggagcctgaagattttgcagtgtattactgtcagcagtatggtagctcgtggacgttcggccaagggaccaaggtggaaatcaaaggtggaggcggttcaggcggaggtggctctggcggtggcggatcggaggtgcagctgttggagtctgggggaggcttggtacagcctggggggtccctgagactctcctgtgcagcctctggattcacctttagcagctatgccatgagctgggtccgccaggctccagggaaggggctggagtgggtctcagctattagtggtagtggtggtagcacatactacgcagactccgtgaagggccggttcaccatctccagagacaattccaagaacacgctgtatctgcaaatgaacagcctgagagccgaggacacggccgtatattactgtgcgaaaaaggggacgtcgtacaactggaacgacgtccattactactactactactacatggacgtctggggcaaagggaccacggtcaccgtctcctcaaccacgacgccagcgccgcggccaccaacaccggcgcccaccatcgcgtcgcagcccctgtccctgcgcccagaggcgtgccggccagcggcggggggcgcagtgcacacgagggggctggacttcgcctgtgatatctacatctgggcgcccttggccgggacttgtggggtccttctcctgtcactggttatcaccctttactgccggagggaccagaggctgccccccgatgcccacaagccccctgggggaggcagtttccggacccccatccaagaggagcaggccgacgcccactccaccctggccaagatcagagtgaagttcagcaggagcgcagacgcccccgcgtaccagcagggccagaaccagctctataacgagctcaatctaggacgaagagaggagtacgatgttttggacaagagacgtggccgggaccctgagatggggggaaagccgagaaggaagaaccctcaggaaggcctgtacaatgaactgcagaaagataagatggcggaggcctacagtgagattgggatgaaaggcgagcgccggaggggcaaggggcacgatggcctttaccagggtctcagtacagccaccaaggacacctacgacgcccttcacatgcaggccctgccccctcgcggctctggcgagggaaggggttccctgcttacttgcggcgacgtcgaagagaatcccggtccgatggccctcccagtaactgccctccttttgcccctcgcactccttcttcatgccgctcgccccaactgggtcaacgtgattagcgatttgaagaaaatcgaggaccttatacagtctatgcatattgacgctacactgtatactgagagtgatgtacacccgtcctgtaaggtaacggccatgaaatgctttcttctggagctccaggtcatcagcttggagtctggggacgcaagcatccacgatacggttgaaaacctcatcatccttgcgaacaactctctctcatctaatggaaacgttacagagagtgggtgtaaggagtgcgaagagttggaagaaaaaaacatcaaagaatttcttcaatccttcgttcacatagtgcaaatgttcattaacacgtccactaccacacccgccccgaggccacctacgccggcaccgactatcgccagtcaacccctctctctgcgccccgaggcttgccggcctgcggctggtggggcggtccacacccggggcctggattttgcgtgcgatatatacatctgggcacctcttgccggcacctgcggagtgctgcttctctcactcgttattacgctgtactgctaa

SEQ ID NO: 1027 - DNA, 2130 bp, synthetic construct
  misc_feature 1..2130: note = Synthetic
  source 1..2130: mol_type = other DNA
atggccttaccagtgaccgccttgctcctgccgctggccttgctgctccacgccgccaggccggaaattgtgttgacgcagtctccaggcaccctgtctttgtctccaggggaaagagccaccctctcctgcagggccagtcagagtgttagcagcagctacttagcctggtaccagcagaaacctggccaggctcccaggctcctcatctatggtgcatccagcagggccactggcatcccagacaggttcagtggcagtgggtctgggacagacttcactctcaccatcagcagactggagcctgaagattttgcagtgtattactgtcagcagtatggtagctcgtggacgttcggccaagggaccaaggtggaaatcaaaggtggaggcggttcaggcggaggtggctctggcggtggcggatcgcagctgcagctgcaggagtcgggcccaggactggtgaagccttcggagaccctgtccctcacctgcactgtctctggtggctccatcagcagtagtagttactactggggctggatccgccagcccccagggaaggggctggagtggattgggagtatctattatagtgggagcacctactacaacccgtccctcaagagtcgagtcaccatatccgtagacacgtccaagaaccagttctccctgaagctgagctctgtgaccgccgcagacacggctgtgtattactgcacaactggaacgacggcttactactactactactacatggacgtctggggcaaagggaccacggtcaccgtctcctcaaccacgacgccagcgccgcggccaccaacaccggcgcccaccatcgcgtcgcagcccctgtccctgcgcccagaggcgtgccggccagcggcggggggcgcagtgcacacgagggggctggacttcgcctgtgatatctacatctgggcgcccttggccgggacttgtggggtccttctcctgtcactggttatcaccctttactgccggagggaccagaggctgccccccgatgcccacaagccccctgggggaggcagtttccggacccccatccaagaggagcaggccgacgcccactccaccctggccaagatcagagtgaagttcagcaggagcgcagacgcccccgcgtaccagcagggccagaaccagctctataacgagctcaatctaggacgaagagaggagtacgatgttttggacaagagacgtggccgggaccctgagatggggggaaagccgagaaggaagaaccctcaggaaggcctgtacaatgaactgcagaaagataagatggcggaggcctacagtgagattgggatgaaaggcgagcgccggaggggcaaggggcacgatggcctttaccagggtctcagtacagccaccaaggacacctacgacgcccttcacatgcaggccctgccccctcgcggctctggcgagggaaggggttccctgcttacttgcggcgacgtcgaagagaatcccggtccgatggccctcccagtaactgccctccttttgcccctcgcactccttcttcatgccgctcgccccaactgggtcaacgtgattagcgatttgaagaaaatcgaggaccttatacagtctatgcatattgacgctacactgtatactgagagtgatgtacacccgtcctgtaaggtaacggccatgaaatgctttcttctggagctccaggtcatcagcttggagtctggggacgcaagcatccacgatacggttgaaaacctcatcatccttgcgaacaactctctctcatctaatggaaacgttacagagagtgggtgtaaggagtgcgaagagttggaagaaaaaaacatcaaagaatttcttcaatccttcgttcacatagtgcaaatgttcattaacacgtccactaccacacccgccccgaggccacctacgccggcaccgactatcgccagtcaacccctctctctgcgccccgaggcttgccggcctgcggctggtggggcggtccacacccggggcctggattttgcgtgcgatatatacatctgggcacctcttgccggcacctgcggagtgctgcttctctcactcgttattacgctgtactgctaa

SEQ ID NO: 1028 - DNA, 2127 bp, synthetic construct
  misc_feature 1..2127: note = Synthetic
  source 1..2127: mol_type = other DNA
atggccttaccagtgaccgccttgctcctgccgctggccttgctgctccacgccgccaggccggaaattgtgttgacgcagtctccaggcaccctgtctttgtctccaggggaaagagccaccctctcctgcagggccagtcagagtgttagcagcagctacttagcctggtaccagcagaaacctggccaggctcccaggctcctcatctatggtgcatccagcagggccactggcatcccagacaggttcagtggcagtgggtctgggacagacttcactctcaccatcagcagactggagcctgaagattttgcagtgtattactgtcagcagtatggtagctcgtggacgttcggccaagggaccaaggtggaaatcaaaggtggaggcggttcaggcggaggtggctctggcggtggcggatcggaggtgcagctgttggagtctgggggaggcttggtgcagcctggggggtccctgagactctcctgtgcagcctctggattcacctttagcagctatgccatgacctgggtccgccaggctccagggaaggggctggagtgggtctcagctattagtggtagtggtggtagcacatactacgcagactccgtgaagggccggttcaccatctccagagacaattccaagaacacgctgtatctgcaaatgaacagcctgagagccgaggacacggccgtatattactgtgcgagaggcgggtataactggcactactactactacatggacgtctggggcaaagggaccacggtcaccgtctcctcaaccacgacgccagcgccgcggccaccaacaccggcgcccaccatcgcgtcgcagcccctgtccctgcgcccagaggcgtgccggccagcggcggggggcgcagtgcacacgagggggctggacttcgcctgtgatatctacatctgggcgcccttggccgggacttgtggggtccttctcctgtcactggttatcaccctttactgccggagggaccagaggctgccccccgatgcccacaagccccctgggggaggcagtttccggacccccatccaagaggagcaggccgacgcccactccaccctggccaagatcagagtgaagttcagcaggagcgcagacgcccccgcgtaccagcagggccagaaccagctctataacgagctcaatctaggacgaagagaggagtacgatgttttggacaagagacgtggccgggaccctgagatggggggaaagccgagaaggaagaaccctcaggaaggcctgtacaatgaactgcagaaagataagatggcggaggcctacagtgagattgggatgaaaggcgagcgccggaggggcaaggggcacgatggcctttaccagggtctcagtacagccaccaaggacacctacgacgcccttcacatgcaggccctgccccctcgcggctctggcgagggaaggggttccctgcttacttgcggcgacgtcgaagagaatcccggtccgatggccctcccagtaactgccctccttttgcccctcgcactccttcttcatgccgctcgccccaactgggtcaacgtgattagcgatttgaagaaaatcgaggaccttatacagtctatgcatattgacgctacactgtatactgagagtgatgtacacccgtcctgtaaggtaacggccatgaaatgctttcttctggagctccaggtcatcagcttggagtctggggacgcaagcatccacgatacggttgaaaacctcatcatccttgcgaacaactctctctcatctaatggaaacgttacagagagtgggtgtaaggagtgcgaagagttggaagaaaaaaacatcaaagaatttcttcaatccttcgttcacatagtgcaaatgttcattaacacgtccactaccacacccgccccgaggccacctacgccggcaccgactatcgccagtcaacccctctctctgcgccccgaggcttgccggcctgcggctggtggggcggtccacacccggggcctggattttgcgtgcgatatatacatctgggcacctcttgccggcacctgcggagtgctgcttctctcactcgttattacgctgtactgctaa

SEQ ID NO: 1029 - DNA, 2139 bp, synthetic construct
  misc_feature 1..2139: note = Synthetic
  source 1..2139: mol_type = other DNA
atggccttaccagtgaccgccttgctcctgccgctggccttgctgctccacgccgccaggccggaaattgtgctgactcagtctccagactttcagtctgtgactccaaaggagaaagtcaccatcacctgccgggccagtcagaacattggtagtagcttacactggtaccagcagaaaccagatcagtctccaaagctcctcatcaagtttgcttcccagtccatctcaggggtcccctcgaggttcagtggcagtggatctgggacagatttcaccctcaccatcaatagcctggaagctgaagatgctgcagcgtattactgtcatcagagtagtagtttaccgtggacgttcggccaagggaccaaggtggaaatcaaaggtggaggcggttcaggcggaggtggctctggcggtggcggatcgcaggtgcagctggtggagtctgggggaggcgtggtccagcctgggaggtccctgagactctcctgtgcagcgtctggattcaccttcagtagctatgacatgcactgggtccgccaggctccaggcaaggggctggagtgggtgtcagttatatggtatgatggaagtaataaaaagtatggagactccgcgaagggccgattcaccatctccagagacaattccaagaacacgctggatctgcaaatgaacagcctgagagccgaggacacggctgtgtattactgtgcgagaggcgacaactggaacgacgaaggtggctactactactactacatggacgtctggggcaaagggaccacggtcaccgtctcctcaaccacgacgccagcgccgcggccaccaacaccggcgcccaccatcgcgtcgcagcccctgtccctgcgcccagaggcgtgccggccagcggcggggggcgcagtgcacacgagggggctggacttcgcctgtgatatctacatctgggcgcccttggccgggacttgtggggtccttctcctgtcactggttatcaccctttactgccggagggaccagaggctgccccccgatgcccacaagccccctgggggaggcagtttccggacccccatccaagaggagcaggccgacgcccactccaccctggccaagatcagagtgaagttcagcaggagcgcagacgcccccgcgtaccagcagggccagaaccagctctataacgagctcaatctaggacgaagagaggagtacgatgttttggacaagagacgtggccgggaccctgagatggggggaaagccgagaaggaagaaccctcaggaaggcctgtacaatgaactgcagaaagataagatggcggaggcctacagtgagattgggatgaaaggcgagcgccggaggggcaaggggcacgatggcctttaccagggtctcagtacagccaccaaggacacctacgacgcccttcacatgcaggccctgccccctcgcggctctggcgagggaaggggttccctgcttacttgcggcgacgtcgaagagaatcccggtccgatggccctcccagtaactgccctccttttgcccctcgcactccttcttcatgccgctcgccccaactgggtcaacgtgattagcgatttgaagaaaatcgaggaccttatacagtctatgcatattgacgctacactgtatactgagagtgatgtacacccgtcctgtaaggtaacggccatgaaatgctttcttctggagctccaggtcatcagcttggagtctggggacgcaagcatccacgatacggttgaaaacctcatcatccttgcgaacaactctctctcatctaatggaaacgttacagagagtgggtgtaaggagtgcgaagagttggaagaaaaaaacatcaaagaatttcttcaatccttcgttcacatagtgcaaatgttcattaacacgtccactaccacacccgccccgaggccacctacgccggcaccgactatcgccagtcaacccctctctctgcgccccgaggcttgccggcctgcggctggtggggcggtccacacccggggcctggattttgcgtgcgatatatacatctgggcacctcttgccggcacctgcggagtgctgcttctctcactcgttattacgctgtactgctaa

SEQ ID NO: 1030 - DNA, 2139 bp, synthetic construct
  misc_feature 1..2139: note = Synthetic
  source 1..2139: mol_type = other DNA
atggccttaccagtgaccgccttgctcctgccgctggccttgctgctccacgccgccaggccggacatccagatgacccagtctccatcctcactgtctacatctgtaggagacagagtcaccatcacttgtcgggcgagtcagggcattagcaattatttagcctggtttcagcagaaaccagggaaagcccctaagtccctgatctatgctgcatccagtttgcaaagtggggtcccatcaaagttcagcggcagtggatctgggacagatttctctctcaccattagcagcctgcagcctgaagattttgcaacttattactgccaacagtataatagttacccgatcaccttcggccaagggacacgactggagattaaaggtggaggcggttcaggcggaggtggctctggcggtggcggatcgcaggtgcagctggtggagtctgggggaggcgtggtccagcctgggaggtccctgagactctcctgtgcagcgtctggattcaccttcagtagctatgacatgcactgggtccgccaggctccaggcaaggggctggagtgggtgtcagttatatggtatgatggaagtaataaaaagtatggagactccgcgaagggccgattcaccatctccagagacaattccaagaacacgctggatctgcaaatgaacagcctgagagccgaggacacggctgtgtattactgtgcgagaggcgacaactggaacgacgaaggtggctactactactactacatggacgtctggggcaaagggaccacggtcaccgtctcctcaaccacgacgccagcgccgcggccaccaacaccggcgcccaccatcgcgtcgcagcccctgtccctgcgcccagaggcgtgccggccagcggcggggggcgcagtgcacacgagggggctggacttcgcctgtgatatctacatctgggcgcccttggccgggacttgtggggtccttctcctgtcactggttatcaccctttactgccggagggaccagaggctgccccccgatgcccacaagccccctgggggaggcagtttccggacccccatccaagaggagcaggccgacgcccactccaccctggccaagatcagagtgaagttcagcaggagcgcagacgcccccgcgtaccagcagggccagaaccagctctataacgagctcaatctaggacgaagagaggagtacgatgttttggacaagagacgtggccgggaccctgagatggggggaaagccgagaaggaagaaccctcaggaaggcctgtacaatgaactgcagaaagataagatggcggaggcctacagtgagattgggatgaaaggcgagcgccggaggggcaaggggcacgatggcctttaccagggtctcagtacagccaccaaggacacctacgacgcccttcacatgcaggccctgccccctcgcggctctggcgagggaaggggttccctgcttacttgcggcgacgtcgaagagaatcccggtccgatggccctcccagtaactgccctccttttgcccctcgcactccttcttcatgccgctcgccccaactgggtcaacgtgattagcgatttgaagaaaatcgaggaccttatacagtctatgcatattgacgctacactgtatactgagagtgatgtacacccgtcctgtaaggtaacggccatgaaatgctttcttctggagctccaggtcatcagcttggagtctggggacgcaagcatccacgatacggttgaaaacctcatcatccttgcgaacaactctctctcatctaatggaaacgttacagagagtgggtgtaaggagtgcgaagagttggaagaaaaaaacatcaaagaatttcttcaatccttcgttcacatagtgcaaatgttcattaacacgtccactaccacacccgccccgaggccacctacgccggcaccgactatcgccagtcaacccctctctctgcgccccgaggcttgccggcctgcggctggtggggcggtccacacccggggcctggattttgcgtgcgatatatacatctgggcacctcttgccggcacctgcggagtgctgcttctctcactcgttattacgctgtactgctaa

SEQ ID NO: 1031 - DNA, 2130 bp, synthetic construct
  misc_feature 1..2130: note = Synthetic
  source 1..2130: mol_type = other DNA
atggccttaccagtgaccgccttgctcctgccgctggccttgctgctccacgccgccaggccggaaattgtgctgactcagtctccagactttcagtctgtgactccaaaggagaaagtcaccatcacctgccgggccagtcagaacattggtagtagcttacactggtaccagcagaaaccagatcagtctccaaagctcctcatcaagtttgcttcccagtccatctcaggggtcccctcgaggttcagtggcagtggatctgggacagatttcaccctcaccatcaatagcctggaagctgaagatgctgcagcgtattactgtcatcagagtagtagtttaccgtggacgttcggccaagggaccaaggtggaaatcaaaggtggaggcggttcaggcggaggtggctctggcggtggcggatcgcaggttcagctggtacagtctggagctgaggtgaagaagtctggggcctcagtgaaggtctcctgcaaggcttctggttacaccttaaccagctatggcatcagctgggtgcgacaggcccctggacaagggcttgagtggatgggatggatcagcgcttacaatggtaacataaactatgcacagaagttccagggcagagtcaccatgaccacagacacatccacgagcacagcctacatggagctgaggagcctgagatctgacgacacggccgtgtattactgtgtgagagatggggaccggtacaactggaaccacagctacatggacgtctggggcaaagggaccacggtcaccgtctcctcaaccacgacgccagcgccgcggccaccaacaccggcgcccaccatcgcgtcgcagcccctgtccctgcgcccagaggcgtgccggccagcggcggggggcgcagtgcacacgagggggctggacttcgcctgtgatatctacatctgggcgcccttggccgggacttgtggggtccttctcctgtcactggttatcaccctttactgccggagggaccagaggctgccccccgatgcccacaagccccctgggggaggcagtttccggacccccatccaagaggagcaggccgacgcccactccaccctggccaagatcagagtgaagttcagcaggagcgcagacgcccccgcgtaccagcagggccagaaccagctctataacgagctcaatctaggacgaagagaggagtacgatgttttggacaagagacgtggccgggaccctgagatggggggaaagccgagaaggaagaaccctcaggaaggcctgtacaatgaactgcagaaagataagatggcggaggcctacagtgagattgggatgaaaggcgagcgccggaggggcaaggggcacgatggcctttaccagggtctcagtacagccaccaaggacacctacgacgcccttcacatgcaggccctgccccctcgcggctctggcgagggaaggggttccctgcttacttgcggcgacgtcgaagagaatcccggtccgatggccctcccagtaactgccctccttttgcccctcgcactccttcttcatgccgctcgccccaactgggtcaacgtgattagcgatttgaagaaaatcgaggaccttatacagtctatgcatattgacgctacactgtatactgagagtgatgtacacccgtcctgtaaggtaacggccatgaaatgctttcttctggagctccaggtcatcagcttggagtctggggacgcaagcatccacgatacggttgaaaacctcatcatccttgcgaacaactctctctcatctaatggaaacgttacagagagtgggtgtaaggagtgcgaagagttggaagaaaaaaacatcaaagaatttcttcaatccttcgttcacatagtgcaaatgttcattaacacgtccactaccacacccgccccgaggccacctacgccggcaccgactatcgccagtcaacccctctctctgcgccccgaggcttgccggcctgcggctggtggggcggtccacacccggggcctggattttgcgtgcgatatatacatctgggcacctcttgccggcacctgcggagtgctgcttctctcactcgttattacgctgtactgctaa

SEQ ID NO: 1032 - DNA, 2130 bp, synthetic construct
  misc_feature 1..2130: note = Synthetic
  source 1..2130: mol_type = other DNA
atggccttaccagtgaccgccttgctcctgccgctggccttgctgctccacgccgccaggccggacatccagatgacccagtctccatcctcactgtctacatctgtaggagacagagtcaccatcacttgtcgggcgagtcagggcattagcaattatttagcctggtttcagcagaaaccagggaaagcccctaagtccctgatctatgctgcatccagtttgcaaagtggggtcccatcaaagttcagcggcagtggatctgggacagatttctctctcaccattagcagcctgcagcctgaagattttgcaacttattactgccaacagtataatagttacccgatcaccttcggccaagggacacgactggagattaaaggtggaggcggttcaggcggaggtggctctggcggtggcggatcgcaggttcagctggtacagtctggagctgaggtgaagaagtctggggcctcagtgaaggtctcctgcaaggcttctggttacaccttaaccagctatggcatcagctgggtgcgacaggcccctggacaagggcttgagtggatgggatggatcagcgcttacaatggtaacataaactatgcacagaagttccagggcagagtcaccatgaccacagacacatccacgagcacagcctacatggagctgaggagcctgagatctgacgacacggccgtgtattactgtgtgagagatggggaccggtacaactggaaccacagctacatggacgtctggggcaaagggaccacggtcaccgtctcctcaaccacgacgccagcgccgcggccaccaacaccggcgcccaccatcgcgtcgcagcccctgtccctgcgcccagaggcgtgccggccagcggcggggggcgcagtgcacacgagggggctggacttcgcctgtgatatctacatctgggcgcccttggccgggacttgtggggtccttctcctgtcactggttatcaccctttactgccggagggaccagaggctgccccccgatgcccacaagccccctgggggaggcagtttccggacccccatccaagaggagcaggccgacgcccactccaccctggccaagatcagagtgaagttcagcaggagcgcagacgcccccgcgtaccagcagggccagaaccagctctataacgagctcaatctaggacgaagagaggagtacgatgttttggacaagagacgtggccgggaccctgagatggggggaaagccgagaaggaagaaccctcaggaaggcctgtacaatgaactgcagaaagataagatggcggaggcctacagtgagattgggatgaaaggcgagcgccggaggggcaaggggcacgatggcctttaccagggtctcagtacagccaccaaggacacctacgacgcccttcacatgcaggccctgccccctcgcggctctggcgagggaaggggttccctgcttacttgcggcgacgtcgaagagaatcccggtccgatggccctcccagtaactgccctccttttgcccctcgcactccttcttcatgccgctcgccccaactgggtcaacgtgattagcgatttgaagaaaatcgaggaccttatacagtctatgcatattgacgctacactgtatactgagagtgatgtacacccgtcctgtaaggtaacggccatgaaatgctttcttctggagctccaggtcatcagcttggagtctggggacgcaagcatccacgatacggttgaaaacctcatcatccttgcgaacaactctctctcatctaatggaaacgttacagagagtgggtgtaaggagtgcgaagagttggaagaaaaaaacatcaaagaatttcttcaatccttcgttcacatagtgcaaatgttcattaacacgtccactaccacacccgccccgaggccacctacgccggcaccgactatcgccagtcaacccctctctctgcgccccgaggcttgccggcctgcggctggtggggcggtccacacccggggcctggattttgcgtgcgatatatacatctgggcacctcttgccggcacctgcggagtgctgcttctctcactcgttattacgctgtactgctaa

SEQ ID NO: 1033 - DNA, 2127 bp, synthetic construct
  misc_feature 1..2127: note = Synthetic
  source 1..2127: mol_type = other DNA
atggccttaccagtgaccgccttgctcctgccgctggccttgctgctccacgccgccaggccggaaattgtgctgactcagtctccagactttcagtctgtgactccaaaggagaaagtcaccatcacctgccgggccagtcagagcattggaagtagcttacactggtaccagcagaaaccagatcagtctccaaagctcctcatcaagtatgtttcccagtccatctcaggggtcccctcgaggttcagtggcagtggatctgggacagatttcaccctcaccatcaatagcctggaagctgaagatgctgcagcgtattactgtcatcagagtagtagtttaccgtggacgttcggccaagggaccaaggtggaaatcaaaggtggaggcggttcaggcggaggtggctctggcggtggcggatcggaggtgcagctgttggagtctgggggagacttggtacagcctggggggtccctgcgactctcctgtgcagcctctggattcacctttagcacctatgccatgacctgggtccgccaggctccagggaaggggctggagtgggtctcagctattagtggtactagtggtagcacatactacgcagactccgtgaagggccggttcaccatctccagagacaattccaagagcacgctgtatctgcacatgaacagcctgagaaccgaggacacggccgtatattactgtgcgagaggcggatataactggcactactactactacatggacgtctggggcaaagggaccacggtcaccgtctcctcaaccacgacgccagcgccgcggccaccaacaccggcgcccaccatcgcgtcgcagcccctgtccctgcgcccagaggcgtgccggccagcggcggggggcgcagtgcacacgagggggctggacttcgcctgtgatatctacatctgggcgcccttggccgggacttgtggggtccttctcctgtcactggttatcaccctttactgccggagggaccagaggctgccccccgatgcccacaagccccctgggggaggcagtttccggacccccatccaagaggagcaggccgacgcccactccaccctggccaagatcagagtgaagttcagcaggagcgcagacgcccccgcgtaccagcagggccagaaccagctctataacgagctcaatctaggacgaagagaggagtacgatgttttggacaagagacgtggccgggaccctgagatggggggaaagccgagaaggaagaaccctcaggaaggcctgtacaatgaactgcagaaagataagatggcggaggcctacagtgagattgggatgaaaggcgagcgccggaggggcaaggggcacgatggcctttaccagggtctcagtacagccaccaaggacacctacgacgcccttcacatgcaggccctgccccctcgcggctctggcgagggaaggggttccctgcttacttgcggcgacgtcgaagagaatcccggtccgatggccctcccagtaactgccctccttttgcccctcgcactccttcttcatgccgctcgccccaactgggtcaacgtgattagcgatttgaagaaaatcgaggaccttatacagtctatgcatattgacgctacactgtatactgagagtgatgtacacccgtcctgtaaggtaacggccatgaaatgctttcttctggagctccaggtcatcagcttggagtctggggacgcaagcatccacgatacggttgaaaacctcatcatccttgcgaacaactctctctcatctaatggaaacgttacagagagtgggtgtaaggagtgcgaagagttggaagaaaaaaacatcaaagaatttcttcaatccttcgttcacatagtgcaaatgttcattaacacgtccactaccacacccgccccgaggccacctacgccggcaccgactatcgccagtcaacccctctctctgcgccccgaggcttgccggcctgcggctggtggggcggtccacacccggggcctggattttgcgtgcgatatatacatctgggcacctcttgccggcacctgcggagtgctgcttctctcactcgttattacgctgtactgctaa

SEQ ID NO: 1034 - DNA, 2130 bp, synthetic construct
  misc_feature 1..2130: note = Synthetic
  source 1..2130: mol_type = other DNA
atggccttaccagtgaccgccttgctcctgccgctggccttgctgctccacgccgccaggccggaaattgtaatgacacagtctccagccaccctgtctttgtctccaggggaaagagccaccctctcctgcagggccagtcagagtgttagcagcagctacttatcctggtaccagcagaaacctgggctggctcccaggctcctcatctatggtgcatccaccagggccactggcatcccagccaggttcagtggcagtgggtctgggacagacttcactctcaccatcagcagcctgcagcctgaagattttgcagtttattactgtcagcaggattataacttacctccgacgttcggccaagggaccaaggtggaaatcaaaggtggaggcggttcaggcggaggtggctctggcggtggcggatcggaggtgcagctgttggagtctgggggagacttggtacagcctggggggtccctgcgactctcctgtgcagcctctggattcacctttagcacctatgccatgacctgggtccgccaggctccagggaaggggctggagtgggtctcagctattagtggtactagtggtagcacatactacgcagactccgtgaagggccggttcaccatctccagagacaattccaagagcacgctgtatctgcacatgaacagcctgagaaccgaggacacggccgtatattactgtgcgagaggcggatataactggcactactactactacatggacgtctggggcaaagggaccacggtcaccgtctcctcaaccacgacgccagcgccgcggccaccaacaccggcgcccaccatcgcgtcgcagcccctgtccctgcgcccagaggcgtgccggccagcggcggggggcgcagtgcacacgagggggctggacttcgcctgtgatatctacatctgggcgcccttggccgggacttgtggggtccttctcctgtcactggttatcaccctttactgccggagggaccagaggctgccccccgatgcccacaagccccctgggggaggcagtttccggacccccatccaagaggagcaggccgacgcccactccaccctggccaagatcagagtgaagttcagcaggagcgcagacgcccccgcgtaccagcagggccagaaccagctctataacgagctcaatctaggacgaagagaggagtacgatgttttggacaagagacgtggccgggaccctgagatggggggaaagccgagaaggaagaaccctcaggaaggcctgtacaatgaactgcagaaagataagatggcggaggcctacagtgagattgggatgaaaggcgagcgccggaggggcaaggggcacgatggcctttaccagggtctcagtacagccaccaaggacacctacgacgcccttcacatgcaggccctgccccctcgcggctctggcgagggaaggggttccctgcttacttgcggcgacgtcgaagagaatcccggtccgatggccctcccagtaactgccctccttttgcccctcgcactccttcttcatgccgctcgccccaactgggtcaacgtgattagcgatttgaagaaaatcgaggaccttatacagtctatgcatattgacgctacactgtatactgagagtgatgtacacccgtcctgtaaggtaacggccatgaaatgctttcttctggagctccaggtcatcagcttggagtctggggacgcaagcatccacgatacggttgaaaacctcatcatccttgcgaacaactctctctcatctaatggaaacgttacagagagtgggtgtaaggagtgcgaagagttggaagaaaaaaacatcaaagaatttcttcaatccttcgttcacatagtgcaaatgttcattaacacgtccactaccacacccgccccgaggccacctacgccggcaccgactatcgccagtcaacccctctctctgcgccccgaggcttgccggcctgcggctggtggggcggtccacacccggggcctggattttgcgtgcgatatatacatctgggcacctcttgccggcacctgcggagtgctgcttctctcactcgttattacgctgtactgctaa

SEQ ID NO: 1035 - DNA, 2136 bp, synthetic construct
  misc_feature 1..2136: note = Synthetic
  source 1..2136: mol_type = other DNA
atggccttaccagtgaccgccttgctcctgccgctggccttgctgctccacgccgccaggccggagatcgtgctgacacagtctccagatttccagtctgtgacccctaaggaaaaggttacaattacatgcagagcctctcagagcatcggaagctctctgcactggtatcagcagaaacctgatcagagccccaagctgctgatcaaattcgccagccagtccttcagcggcgtccccagccgcttcagcggcagcggcagcggcactgattttacactgaccatccacagcctggaggccgaggacgccgccacctactattgtcaccagagcagctccctgccttggacctttggccagggcacaaaggtggaaatcaagggcggcggtggatctggaggcggaggctctggaggcggcggctcccaagtgcagctggtggagagcggcggaggagtggtgcaacctggccggagcctgagactgagctgcgctgccagcggcttcaccttcaacaactacgacatgtactgggtgcggcaggcccctggcaagggcctggaatgggtcgccgtgacatggtatgacggctccaacaagtactacgccgacagcgtgaagggcagattcaccatcagcagagataatagcaagaacaccctgtacctgcagatgaacagcctgcgggccgaggacaccgccgtgtactactgcgctagaggcgacaattggaacgacgagcaccattacttctactacatggacgtgtggggcaaaggcaccaccgtgaccgtgtccagcaccacgacgccagcgccgcggccaccaacaccggcgcccaccatcgcgtcgcagcccctgtccctgcgcccagaggcgtgccggccagcggcggggggcgcagtgcacacgagggggctggacttcgcctgtgatatctacatctgggcgcccttggccgggacttgtggggtccttctcctgtcactggttatcaccctttactgccggagggaccagaggctgccccccgatgcccacaagccccctgggggaggcagtttccggacccccatccaagaggagcaggccgacgcccactccaccctggccaagatcagagtgaagttcagcaggagcgcagacgcccccgcgtaccagcagggccagaaccagctctataacgagctcaatctaggacgaagagaggagtacgatgttttggacaagagacgtggccgggaccctgagatggggggaaagccgagaaggaagaaccctcaggaaggcctgtacaatgaactgcagaaagataagatggcggaggcctacagtgagattgggatgaaaggcgagcgccggaggggcaaggggcacgatggcctttaccagggtctcagtacagccaccaaggacacctacgacgcccttcacatgcaggccctgccccctcgcggctctggcgagggaaggggttccctgcttacttgcggcgacgtcgaagagaatcccggtccgatggccctcccagtaactgccctccttttgcccctcgcactccttcttcatgccgctcgccccaactgggtcaacgtgattagcgatttgaagaaaatcgaggaccttatacagtctatgcatattgacgctacactgtatactgagagtgatgtacacccgtcctgtaaggtaacggccatgaaatgctttcttctggagctccaggtcatcagcttggagtctggggacgcaagcatccacgatacggttgaaaacctcatcatccttgcgaacaactctctctcatctaatggaaacgttacagagagtgggtgtaaggagtgcgaagagttggaagaaaaaaacatcaaagaatttcttcaatccttcgttcacatagtgcaaatgttcattaacacgtccactaccacacccgccccgaggccacctacgccggcaccgactatcgccagtcaacccctctctctgcgccccgaggcttgccggcctgcggctggtggggcggtccacacccggggcctggattttgcgtgcgatatatacatctgggcacctcttgccggcacctgcggagtgctgcttctctcactcgttattacgctgtactgctaa

SEQ ID NO: 1036 - DNA, 2136 bp, synthetic construct
  misc_feature 1..2136: note = Synthetic
  source 1..2136: mol_type = other DNA
atggccttaccagtgaccgccttgctcctgccgctggccttgctgctccacgccgccaggccggagatcgtgctgacacagagccctgattttcagagcgtgacacctaaagagaaggtgaccatcacctgcagagccagccagagcatcggctccagcctgcactggtatcagcagaagcccgaccagagcccaaagctgctgatcaagttcgcctcccagtctttttccggcgtgcccagcagattcagcgggagcggctctggcaccgacttcacactgaccatccactctctggaagccgaggatgccgccacctactattgccaccagagcagctctctcccttggaccttcggccagggcacaaaagtggaaattaagggcggaggcggctccggcggtggaggctccggaggcggcggctctcaagtgcagctggtggagtctggcggcggagtggtgcaacctggaaggagcctgcggctgagctgcgctgccagcggcttcaccttcagcaattacgacatgcactgggtgcggcaggcccctggcaaaggcctggaatgggtcacaatcatctggcatgatgccagcaacaagtactacctggacagcgtcaagggcagattcacaatcagccgggacaacagcaagaacaccctgtacctgcagatgaacagcctgagagccgaggacaccgctgtgtactattgtgccagaggagataattggaacgacgagcaccactacttctactacatggacgtgtggggcaagggcaccaccgtgaccgtttctagcaccacgacgccagcgccgcggccaccaacaccggcgcccaccatcgcgtcgcagcccctgtccctgcgcccagaggcgtgccggccagcggcggggggcgcagtgcacacgagggggctggacttcgcctgtgatatctacatctgggcgcccttggccgggacttgtggggtccttctcctgtcactggttatcaccctttactgccggagggaccagaggctgccccccgatgcccacaagccccctgggggaggcagtttccggacccccatccaagaggagcaggccgacgcccactccaccctggccaagatcagagtgaagttcagcaggagcgcagacgcccccgcgtaccagcagggccagaaccagctctataacgagctcaatctaggacgaagagaggagtacgatgttttggacaagagacgtggccgggaccctgagatggggggaaagccgagaaggaagaaccctcaggaaggcctgtacaatgaactgcagaaagataagatggcggaggcctacagtgagattgggatgaaaggcgagcgccggaggggcaaggggcacgatggcctttaccagggtctcagtacagccaccaaggacacctacgacgcccttcacatgcaggccctgccccctcgcggctctggcgagggaaggggttccctgcttacttgcggcgacgtcgaagagaatcccggtccgatggccctcccagtaactgccctccttttgcccctcgcactccttcttcatgccgctcgccccaactgggtcaacgtgattagcgatttgaagaaaatcgaggaccttatacagtctatgcatattgacgctacactgtatactgagagtgatgtacacccgtcctgtaaggtaacggccatgaaatgctttcttctggagctccaggtcatcagcttggagtctggggacgcaagcatccacgatacggttgaaaacctcatcatccttgcgaacaactctctctcatctaatggaaacgttacagagagtgggtgtaaggagtgcgaagagttggaagaaaaaaacatcaaagaatttcttcaatccttcgttcacatagtgcaaatgttcattaacacgtccactaccacacccgccccgaggccacctacgccggcaccgactatcgccagtcaacccctctctctgcgccccgaggcttgccggcctgcggctggtggggcggtccacacccggggcctggattttgcgtgcgatatatacatctgggcacctcttgccggcacctgcggagtgctgcttctctcactcgttattacgctgtactgctaa

SEQ ID NO: 1037 - DNA, 2136 bp, synthetic construct
  misc_feature 1..2136: note = Synthetic
  source 1..2136: mol_type = other DNA
atggccttaccagtgaccgccttgctcctgccgctggccttgctgctccacgccgccaggccggagatcgtgctgacccagagccctgacttccagagcgtgacccctaaggaaaaggtgacaattacatgcagggccagccagtccatcggctcttctctgcattggtatcagcagaagcccgatcagtctccaaagctgctgatcaaattcgccagccagagcttcagcggagtccccagccggttcagcggatctggctccggcactgatttcaccctgaccatccacagcctggaggccgaagatgccgctacatactattgccaccagtcctccagcctgccttggacattcggccagggcaccaaggtggagatcaaaggcggcggcggcagcggcggaggaggctctggcggaggcggcagccaagtgcagctggtcgaaagcggcggaggcgtggtgcaacctggaagaagcctgagactgagctgcgccgcctctggcttcaccttttctaattacgacatgcactgggtgcggcaggcccctggcaagggtcttgagtgggttaccatcatctggcacgacggcagcaacaagtactacctggacagcgtgaagggcagatttacaatcagcagagataatagcaagaacaccctgtacctgcagatgaacagcctgcgggccgaggacaccgccgtgtactattgtgccagaggcgacaactggaacgacgagcaccactacttctactacatggacgtgtggggcaaaggcaccacagtgaccgtgtccagcaccacgacgccagcgccgcggccaccaacaccggcgcccaccatcgcgtcgcagcccctgtccctgcgcccagaggcgtgccggccagcggcggggggcgcagtgcacacgagggggctggacttcgcctgtgatatctacatctgggcgcccttggccgggacttgtggggtccttctcctgtcactggttatcaccctttactgccggagggaccagaggctgccccccgatgcccacaagccccctgggggaggcagtttccggacccccatccaagaggagcaggccgacgcccactccaccctggccaagatcagagtgaagttcagcaggagcgcagacgcccccgcgtaccagcagggccagaaccagctctataacgagctcaatctaggacgaagagaggagtacgatgttttggacaagagacgtggccgggaccctgagatggggggaaagccgagaaggaagaaccctcaggaaggcctgtacaatgaactgcagaaagataagatggcggaggcctacagtgagattgggatgaaaggcgagcgccggaggggcaaggggcacgatggcctttaccagggtctcagtacagccaccaaggacacctacgacgcccttcacatgcaggccctgccccctcgcggctctggcgagggaaggggttccctgcttacttgcggcgacgtcgaagagaatcccggtccgatggccctcccagtaactgccctccttttgcccctcgcactccttcttcatgccgctcgccccaactgggtcaacgtgattagcgatttgaagaaaatcgaggaccttatacagtctatgcatattgacgctacactgtatactgagagtgatgtacacccgtcctgtaaggtaacggccatgaaatgctttcttctggagctccaggtcatcagcttggagtctggggacgcaagcatccacgatacggttgaaaacctcatcatccttgcgaacaactctctctcatctaatggaaacgttacagagagtgggtgtaaggagtgcgaagagttggaagaaaaaaacatcaaagaatttcttcaatccttcgttcacatagtgcaaatgttcattaacacgtccactaccacacccgccccgaggccacctacgccggcaccgactatcgccagtcaacccctctctctgcgccccgaggcttgccggcctgcggctggtggggcggtccacacccggggcctggattttgcgtgcgatatatacatctgggcacctcttgccggcacctgcggagtgctgcttctctcactcgttattacgctgtactgctaa

SEQ ID NO: 1038 - DNA, 2118 bp, synthetic construct
  misc_feature 1..2118: note = Synthetic
  source 1..2118: mol_type = other DNA
atggccttaccagtgaccgccttgctcctgccgctggccttgctgctccacgccgccaggccgcagaccgtggtgacacaggagccttctctgagcgtgagccccggcggcaccgtgaccctgacatgcggcctgagcagcggctccgtctccaccagctactatcctagctggtatcagcagacccctggccaggcccctagaaccctgatctacagcacaaacatccggagctctggagtgccagacagatttagcggaagcatcctgggcaacaaggccgccctgaccatcaccggcgcccaggctgacgacgagagtgattactactgcaagctgtacatgggctctggcatcatcttcggcagcggaacaaaggtgacagttctgggcggaggcggctctggcggcggcggcagcggcggtggcggaagcgaggtgcagctgctggaaagcggcggcggactcgtgcaacctggcggctccctgcggctgtcttgcgccgcttctggcttcacattcagcatctacgccatgagctgggtcagacaggcccccggcaaaggcctggaatgggtgtccgccatcagcggcggcggagataccacctactacgccgacagcgtgaagggcagattcaccattagcagagataatagcaagaccacactggacctgcaaatgaacagcctgcgggccgaggacaccgccgtgtactactgtgctaagcacacctcttattacatggacgtgtggggaaaaggcacaaccgtgaccgtgtccagcaccacgacgccagcgccgcggccaccaacaccggcgcccaccatcgcgtcgcagcccctgtccctgcgcccagaggcgtgccggccagcggcggggggcgcagtgcacacgagggggctggacttcgcctgtgatatctacatctgggcgcccttggccgggacttgtggggtccttctcctgtcactggttatcaccctttactgccggagggaccagaggctgccccccgatgcccacaagccccctgggggaggcagtttccggacccccatccaagaggagcaggccgacgcccactccaccctggccaagatcagagtgaagttcagcaggagcgcagacgcccccgcgtaccagcagggccagaaccagctctataacgagctcaatctaggacgaagagaggagtacgatgttttggacaagagacgtggccgggaccctgagatggggggaaagccgagaaggaagaaccctcaggaaggcctgtacaatgaactgcagaaagataagatggcggaggcctacagtgagattgggatgaaaggcgagcgccggaggggcaaggggcacgatggcctttaccagggtctcagtacagccaccaaggacacctacgacgcccttcacatgcaggccctgccccctcgcggctctggcgagggaaggggttccctgcttacttgcggcgacgtcgaagagaatcccggtccgatggccctcccagtaactgccctccttttgcccctcgcactccttcttcatgccgctcgccccaactgggtcaacgtgattagcgatttgaagaaaatcgaggaccttatacagtctatgcatattgacgctacactgtatactgagagtgatgtacacccgtcctgtaaggtaacggccatgaaatgctttcttctggagctccaggtcatcagcttggagtctggggacgcaagcatccacgatacggttgaaaacctcatcatccttgcgaacaactctctctcatctaatggaaacgttacagagagtgggtgtaaggagtgcgaagagttggaagaaaaaaacatcaaagaatttcttcaatccttcgttcacatagtgcaaatgttcattaacacgtccactaccacacccgccccgaggccacctacgccggcaccgactatcgccagtcaacccctctctctgcgccccgaggcttgccggcctgcggctggtggggcggtccacacccggggcctggattttgcgtgcgatatatacatctgggcacctcttgccggcacctgcggagtgctgcttctctcactcgttattacgctgtactgctaa

SEQ ID NO: 1039 - DNA, 2136 bp, synthetic construct
  misc_feature 1..2136: note = Synthetic
  source 1..2136: mol_type = other DNA
atggccttaccagtgaccgccttgctcctgccgctggccttgctgctccacgccgccaggccggagatcgtgctgacacagtcccctgactttcagagcgtgacccctaaggaaaaggtcacaattacatgcagagcctctcagagcatcggcagctctctgcactggtatcagcagaaacctgatcagagccccaagctgctgatcaaattcgccagccagagcttctccggcgtgccaagcagattcagcggcagcggcagcggaaccgatttcaccctgaccatccattctctggaggccgaggacgccgccacctactactgccaccagtctagcagcctgccctggaccttcggccagggcacaaaggttgagatcaagggcggcggcggcagcggcggcggcggcagcggcggcggcggcagccaagtgcagctggtggaaagcggcggtggagtggtgcaacctggcagaagcctgcggctgagctgcgccgcttctggcttcacattttctaattacgacaagcactgggtgcggcaggcccctggcaaaggcctggagtgggtcgctgtgatctggtatgacggcagcaacaagtactacgccgacagcgtgaagggcagattcaccatcagcagagacaacagcaagaacaccctgtacctgcagatgaacagcctgcgggctgaagataccgccatgtactattgtgccaggggcgataattggaacgacgagcaccactacttctactacatggacgtgtggggaaagggcaccacagtgaccgtgtccagcaccacgacgccagcgccgcggccaccaacaccggcgcccaccatcgcgtcgcagcccctgtccctgcgcccagaggcgtgccggccagcggcggggggcgcagtgcacacgagggggctggacttcgcctgtgatatctacatctgggcgcccttggccgggacttgtggggtccttctcctgtcactggttatcaccctttactgccggagggaccagaggctgccccccgatgcccacaagccccctgggggaggcagtttccggacccccatccaagaggagcaggccgacgcccactccaccctggccaagatcagagtgaagttcagcaggagcgcagacgcccccgcgtaccagcagggccagaaccagctctataacgagctcaatctaggacgaagagaggagtacgatgttttggacaagagacgtggccgggaccctgagatggggggaaagccgagaaggaagaaccctcaggaaggcctgtacaatgaactgcagaaagataagatggcggaggcctacagtgagattgggatgaaaggcgagcgccggaggggcaaggggcacgatggcctttaccagggtctcagtacagccaccaaggacacctacgacgcccttcacatgcaggccctgccccctcgcggctctggcgagggaaggggttccctgcttacttgcggcgacgtcgaagagaatcccggtccgatggccctcccagtaactgccctccttttgcccctcgcactccttcttcatgccgctcgccccaactgggtcaacgtgattagcgatttgaagaaaatcgaggaccttatacagtctatgcatattgacgctacactgtatactgagagtgatgtacacccgtcctgtaaggtaacggccatgaaatgctttcttctggagctccaggtcatcagcttggagtctggggacgcaagcatccacgatacggttgaaaacctcatcatccttgcgaacaactctctctcatctaatggaaacgttacagagagtgggtgtaaggagtgcgaagagttggaagaaaaaaacatcaaagaatttcttcaatccttcgttcacatagtgcaaatgttcattaacacgtccactaccacacccgccccgaggccacctacgccggcaccgactatcgccagtcaacccctctctctgcgccccgaggcttgccggcctgcggctggtggggcggtccacacccggggcctggattttgcgtgcgatatatacatctgggcacctcttgccggcacctgcggagtgctgcttctctcactcgttattacgctgtactgctaa

SEQ ID NO: 1040 - DNA, 2130 bp, synthetic construct
  misc_feature 1..2130: note = Synthetic
  source 1..2130: mol_type = other DNA
atggccttaccagtgaccgccttgctcctgccgctggccttgctgctccacgccgccaggccggagatcgtgctgacccaatctcctgccacactgagcctctccccaggcgagcgggccaccctgagctgcggcgcttctcagagcgtgtacaatagctacctggcctggtatcagcagaaacccggcctggctcctagactgctgatctacgacgccagcctgagagccaccggcgtgcctgatagattcagcggcagcggcagcggaaccgacttcaccctgacaatcagcacactggaacccgaggattttgccgtgtactattgccagcagtacggcggcagccctatgtacacattcggccagggcaccaagctggaaatcaagggcggcggcggaagcggcggcggaggaagcggcggcggcggcagccaagtgcagctggtccagtctggagctgaggtgaagaagcccggcgccagcgtgaaggtgtcctgtaaagcctctggttatacattcacaaactatggcttcagctgggttagacaggcccctggacagggcctggactggatgggatggatcagcgcctacaacggctacaccaactacacccagaagctgcagggcagagtgacaatgaccacagataccagcaccaccacagcttacatggaactgaggtccctgcggagcgacgacaccgccgtgtactactgcgccagacggggcctgctgtactactactacagcatggacgtgtggggcaagggcaccaccgtgaccgtgtcttctaccacgacgccagcgccgcggccaccaacaccggcgcccaccatcgcgtcgcagcccctgtccctgcgcccagaggcgtgccggccagcggcggggggcgcagtgcacacgagggggctggacttcgcctgtgatatctacatctgggcgcccttggccgggacttgtggggtccttctcctgtcactggttatcaccctttactgccggagggaccagaggctgccccccgatgcccacaagccccctgggggaggcagtttccggacccccatccaagaggagcaggccgacgcccactccaccctggccaagatcagagtgaagttcagcaggagcgcagacgcccccgcgtaccagcagggccagaaccagctctataacgagctcaatctaggacgaagagaggagtacgatgttttggacaagagacgtggccgggaccctgagatggggggaaagccgagaaggaagaaccctcaggaaggcctgtacaatgaactgcagaaagataagatggcggaggcctacagtgagattgggatgaaaggcgagcgccggaggggcaaggggcacgatggcctttaccagggtctcagtacagccaccaaggacacctacgacgcccttcacatgcaggccctgccccctcgcggctctggcgagggaaggggttccctgcttacttgcggcgacgtcgaagagaatcccggtccgatggccctcccagtaactgccctccttttgcccctcgcactccttcttcatgccgctcgccccaactgggtcaacgtgattagcgatttgaagaaaatcgaggaccttatacagtctatgcatattgacgctacactgtatactgagagtgatgtacacccgtcctgtaaggtaacggccatgaaatgctttcttctggagctccaggtcatcagcttggagtctggggacgcaagcatccacgatacggttgaaaacctcatcatccttgcgaacaactctctctcatctaatggaaacgttacagagagtgggtgtaaggagtgcgaagagttggaagaaaaaaacatcaaagaatttcttcaatccttcgttcacatagtgcaaatgttcattaacacgtccactaccacacccgccccgaggccacctacgccggcaccgactatcgccagtcaacccctctctctgcgccccgaggcttgccggcctgcggctggtggggcggtccacacccggggcctggattttgcgtgcgatatatacatctgggcacctcttgccggcacctgcggagtgctgcttctctcactcgttattacgctgtactgctaa

SEQ ID NO: 1041 - DNA, 2118 bp, synthetic construct
  misc_feature 1..2118: note = Synthetic
  source 1..2118: mol_type = other DNA
atggccttaccagtgaccgccttgctcctgccgctggccttgctgctccacgccgccaggccgcagaccgtggtgacccaggagcctagcctgtccgtgtcccctggcggcaccgtgaccctcacatgcggcctgagcagcggctcagtttccacgagcgactaccccagctggtatcagcaaacccctggacaggctcctcggaccctgatctacagaaccaacacccggagcagcggcgtgcccgatagattctctggctctatcctgggcaacaaggccgctctgaccattacaggcgcccaggccgacgacgagagcgattattactgcgtgctgtacatggacagcggcatcatcttcggctctggaacaaaggtgacagtgctgggcggaggcggcagcggaggcggcggcagcggcggaggaggctctgaggtgcagctgctggaaagcggcggcggactggtgcaacctggcggctctctgcggctgtcctgtaccgccagcggcttcaccttcagcagcttcgccatgagctgggtcagacaggctccaggaaaaggcctggaatgggtgtctgccatgagcggatctggcgacaccacatactacgccgattccgtgaagggcagatttaccatcagcagagataatagcaagacaacactgtatctgcagatgaacagcctgagggccgaggacacagccgtgtacagctgcgccaagcacaccacctactacatggacgtgtggggcaaaggcaccaccgtcacagtgtccagcaccacgacgccagcgccgcggccaccaacaccggcgcccaccatcgcgtcgcagcccctgtccctgcgcccagaggcgtgccggccagcggcggggggcgcagtgcacacgagggggctggacttcgcctgtgatatctacatctgggcgcccttggccgggacttgtggggtccttctcctgtcactggttatcaccctttactgccggagggaccagaggctgccccccgatgcccacaagccccctgggggaggcagtttccggacccccatccaagaggagcaggccgacgcccactccaccctggccaagatcagagtgaagttcagcaggagcgcagacgcccccgcgtaccagcagggccagaaccagctctataacgagctcaatctaggacgaagagaggagtacgatgttttggacaagagacgtggccgggaccctgagatggggggaaagccgagaaggaagaaccctcaggaaggcctgtacaatgaactgcagaaagataagatggcggaggcctacagtgagattgggatgaaaggcgagcgccggaggggcaaggggcacgatggcctttaccagggtctcagtacagccaccaaggacacctacgacgcccttcacatgcaggccctgccccctcgcggctctggcgagggaaggggttccctgcttacttgcggcgacgtcgaagagaatcccggtccgatggccctcccagtaactgccctccttttgcccctcgcactccttcttcatgccgctcgccccaactgggtcaacgtgattagcgatttgaagaaaatcgaggaccttatacagtctatgcatattgacgctacactgtatactgagagtgatgtacacccgtcctgtaaggtaacggccatgaaatgctttcttctggagctccaggtcatcagcttggagtctggggacgcaagcatccacgatacggttgaaaacctcatcatccttgcgaacaactctctctcatctaatggaaacgttacagagagtgggtgtaaggagtgcgaagagttggaagaaaaaaacatcaaagaatttcttcaatccttcgttcacatagtgcaaatgttcattaacacgtccactaccacacccgccccgaggccacctacgccggcaccgactatcgccagtcaacccctctctctgcgccccgaggcttgccggcctgcggctggtggggcggtccacacccggggcctggattttgcgtgcgatatatacatctgggcacctcttgccggcacctgcggagtgctgcttctctcactcgttattacgctgtactgctaa

SEQ ID NO: 1042 - DNA, 2118 bp, synthetic construct
  misc_feature 1..2118: note = Synthetic
  source 1..2118: mol_type = other DNA
atggccttaccagtgaccgccttgctcctgccgctggccttgctgctccacgccgccaggccgcagaccgtcgtgacccaggagccttctctgagcgtgtctccaggaggcacagttactctgacatgcggcctgtctagcggcagcgtgtccaccagcgactaccccagctggtatcagcaaacacctggccaggctcctagaaccctgatctatagaacaaataccagaagcagcggcgtgcccgatagattcagcggaagcatcctgggcaacaaggccgccctgaccatcaccggcgcccaggctgacgacgagtctgattactactgcgtgctgtacatgggcagcggcatcattttcggcagcggaacaaaggtgacagtgctgggaggtggcggcagcggcggcggaggctccggcggcggaggctcagaggtgcagctgctggaaagcggcggcggcctggtgcaacctggcggaagtctgcggctgtcttgtgccgcttctggattcaccttcaacacctacgccatgagctgggtgcggcaggcccctggcaaaggcctggaatgggtctccgccatgagcggctctggcgacacaacctactatgccgacagcgtgaagggcagatttacaatcagcagggataacagcaagaccaccctgtacctgcagatgaacagcctccgggccgaggacaccgccgtgtacagctgcgccaagcacaccagctactacatggacgtgtggggcaaaggcaccaccgtgaccgtgtccagcaccacgacgccagcgccgcggccaccaacaccggcgcccaccatcgcgtcgcagcccctgtccctgcgcccagaggcgtgccggccagcggcggggggcgcagtgcacacgagggggctggacttcgcctgtgatatctacatctgggcgcccttggccgggacttgtggggtccttctcctgtcactggttatcaccctttactgccggagggaccagaggctgccccccgatgcccacaagccccctgggggaggcagtttccggacccccatccaagaggagcaggccgacgcccactccaccctggccaagatcagagtgaagttcagcaggagcgcagacgcccccgcgtaccagcagggccagaaccagctctataacgagctcaatctaggacgaagagaggagtacgatgttttggacaagagacgtggccgggaccctgagatggggggaaagccgagaaggaagaaccctcaggaaggcctgtacaatgaactgcagaaagataagatggcggaggcctacagtgagattgggatgaaaggcgagcgccggaggggcaaggggcacgatggcctttaccagggtctcagtacagccaccaaggacacctacgacgcccttcacatgcaggccctgccccctcgcggctctggcgagggaaggggttccctgcttacttgcggcgacgtcgaagagaatcccggtccgatggccctcccagtaactgccctccttttgcccctcgcactccttcttcatgccgctcgccccaactgggtcaacgtgattagcgatttgaagaaaatcgaggaccttatacagtctatgcatattgacgctacactgtatactgagagtgatgtacacccgtcctgtaaggtaacggccatgaaatgctttcttctggagctccaggtcatcagcttggagtctggggacgcaagcatccacgatacggttgaaaacctcatcatccttgcgaacaactctctctcatctaatggaaacgttacagagagtgggtgtaaggagtgcgaagagttggaagaaaaaaacatcaaagaatttcttcaatccttcgttcacatagtgcaaatgttcattaacacgtccactaccacacccgccccgaggccacctacgccggcaccgactatcgccagtcaacccctctctctgcgccccgaggcttgccggcctgcggctggtggggcggtccacacccggggcctggattttgcgtgcgatatatacatctgggcacctcttgccggcacctgcggagtgctgcttctctcactcgttattacgctgtactgctaa

SEQ ID NO: 1043 - DNA, 2118 bp, synthetic construct
  misc_feature 1..2118: note = Synthetic
  source 1..2118: mol_type = other DNA
atggccttaccagtgaccgccttgctcctgccgctggccttgctgctccacgccgccaggccgcagaccgtggtgacccaagagcccagcttctctgtgtccccaggtggcaccgtgacactgacatgcggcctgtacagcgacagcgtgtctacaagctactatcctagctggtatcagcagacacctggccaggctcctagaaccctgatctacaacaccaacacaagaagcagcggcgtgcccgaccggtttagcggaagcatcctgggcaacaaggccgccctgaccatcaccggcgcccaggccgacgacgagagcgactactattgtgtgctgtacatggtgtccggcatcgtgttcggctctggaacaaaggtgaccgttctgggaggcggcggcagcggcggaggcggcagcggaggaggcggctcagaagtgcagctgctggaaagcggcggcgacctggtgcaacctggcggctccctgagactgagctgcgccgcttctggctttaccttcagcacctacgccatgagctgggtgcggcaggcccctggcaaaggactggagtgggtctccgccatcagcggcagcggcgagaatatctactacgctgatagcgtgaagggcagattcaccattagcagagataattctaagaacaccctgttcctgcagatgaacagcctgcgggccgaagataccgccgtgtactactgcgccaagcacacatcttactacatggacgtgtggggcaaaggcaccaccgtcacagtgtccagcaccacgacgccagcgccgcggccaccaacaccggcgcccaccatcgcgtcgcagcccctgtccctgcgcccagaggcgtgccggccagcggcggggggcgcagtgcacacgagggggctggacttcgcctgtgatatctacatctgggcgcccttggccgggacttgtggggtccttctcctgtcactggttatcaccctttactgccggagggaccagaggctgccccccgatgcccacaagccccctgggggaggcagtttccggacccccatccaagaggagcaggccgacgcccactccaccctggccaagatcagagtgaagttcagcaggagcgcagacgcccccgcgtaccagcagggccagaaccagctctataacgagctcaatctaggacgaagagaggagtacgatgttttggacaagagacgtggccgggaccctgagatggggggaaagccgagaaggaagaaccctcaggaaggcctgtacaatgaactgcagaaagataagatggcggaggcctacagtgagattgggatgaaaggcgagcgccggaggggcaaggggcacgatggcctttaccagggtctcagtacagccaccaaggacacctacgacgcccttcacatgcaggccctgccccctcgcggctctggcgagggaaggggttccctgcttacttgcggcgacgtcgaagagaatcccggtccgatggccctcccagtaactgccctccttttgcccctcgcactccttcttcatgccgctcgccccaactgggtcaacgtgattagcgatttgaagaaaatcgaggaccttatacagtctatgcatattgacgctacactgtatactgagagtgatgtacacccgtcctgtaaggtaacggccatgaaatgctttcttctggagctccaggtcatcagcttggagtctggggacgcaagcatccacgatacggttgaaaacctcatcatccttgcgaacaactctctctcatctaatggaaacgttacagagagtgggtgtaaggagtgcgaagagttggaagaaaaaaacatcaaagaatttcttcaatccttcgttcacatagtgcaaatgttcattaacacgtccactaccacacccgccccgaggccacctacgccggcaccgactatcgccagtcaacccctctctctgcgccccgaggcttgccggcctgcggctggtggggcggtccacacccggggcctggattttgcgtgcgatatatacatctgggcacctcttgccggcacctgcggagtgctgcttctctcactcgttattacgctgtactgctaa

SEQ ID NO: 1044 - DNA, 2136 bp, synthetic construct
  misc_feature 1..2136: note = Synthetic
  source 1..2136: mol_type = other DNA
atggccttaccagtgaccgccttgctcctgccgctggccttgctgctccacgccgccaggccgcagaccgtggtgacccaggagcctagcttcagcgtgtcccccggaggcacagtgaccctgacatgcggcctcagctctggctccgtcagcacctcttactatcctggatggtatcagcagacacctggccaggccccaagaaccctgatctacagcacaaacaccagaagcagcggcgtgcccgatagatttagcggcagcatcctgggcaacaaggccgccctgaccattacaggcgcccaggctgatgacgagagcgactactactgtgtgctgtacatgggcagcggcatgttcatcttcggctctggaaccaaggtgacagtgctgggtggcggaggatctggcggaggcggctctggcggcggcggcagccaagtgcagctggtggaaagcggaggcggagttgtgcaacctggcagatctctgcgcctgtcatgcgccgccagcggctttacattctccagctacggcatgcactgggtgcggcaggcccctggcaaaggcctggaatgggtcgctgtgatctggtacgacggcatcaacaaatactacgccgacagcgtgaagggcagattcaccatcagcagagataatagcaagaacaccctgtacctgcagatgaacagcctgcgggccgaggacactgccgtgtactactgcgccagagagcggctggaacggagatactactactacatggacgtgtggggcaagggcaccaccgtgaccgtgtccagtaccacgacgccagcgccgcggccaccaacaccggcgcccaccatcgcgtcgcagcccctgtccctgcgcccagaggcgtgccggccagcggcggggggcgcagtgcacacgagggggctggacttcgcctgtgatatctacatctgggcgcccttggccgggacttgtggggtccttctcctgtcactggttatcaccctttactgccggagggaccagaggctgccccccgatgcccacaagccccctgggggaggcagtttccggacccccatccaagaggagcaggccgacgcccactccaccctggccaagatcagagtgaagttcagcaggagcgcagacgcccccgcgtaccagcagggccagaaccagctctataacgagctcaatctaggacgaagagaggagtacgatgttttggacaagagacgtggccgggaccctgagatggggggaaagccgagaaggaagaaccctcaggaaggcctgtacaatgaactgcagaaagataagatggcggaggcctacagtgagattgggatgaaaggcgagcgccggaggggcaaggggcacgatggcctttaccagggtctcagtacagccaccaaggacacctacgacgcccttcacatgcaggccctgccccctcgcggctctggcgagggaaggggttccctgcttacttgcggcgacgtcgaagagaatcccggtccgatggccctcccagtaactgccctccttttgcccctcgcactccttcttcatgccgctcgccccaactgggtcaacgtgattagcgatttgaagaaaatcgaggaccttatacagtctatgcatattgacgctacactgtatactgagagtgatgtacacccgtcctgtaaggtaacggccatgaaatgctttcttctggagctccaggtcatcagcttggagtctggggacgcaagcatccacgatacggttgaaaacctcatcatccttgcgaacaactctctctcatctaatggaaacgttacagagagtgggtgtaaggagtgcgaagagttggaagaaaaaaacatcaaagaatttcttcaatccttcgttcacatagtgcaaatgttcattaacacgtccactaccacacccgccccgaggccacctacgccggcaccgactatcgccagtcaacccctctctctgcgccccgaggcttgccggcctgcggctggtggggcggtccacacccggggcctggattttgcgtgcgatatatacatctgggcacctcttgccggcacctgcggagtgctgcttctctcactcgttattacgctgtactgctaa

SEQ ID NO: 1045 - DNA, 2118 bp, synthetic construct
  misc_feature 1..2118: note = Synthetic
  source 1..2118: mol_type = other DNA
atggccttaccagtgaccgccttgctcctgccgctggccttgctgctccacgccgccaggccgcagacagtggtgacacaggagcctagcttttctgtgtcccctggcggcaccgtgacactgacatgcgccctgagctccgatagcgtgtcaacatcttacttccccagctggtatcggcagacccctggacaggcccctagaaccctgatctacaacaccaacaccagaagcagcggcgtgccagatagattcagcggctccatcctgggcaacaaggccgccctgaccattacaggcgcccaggccgacgacgagagcgactactactgtgtgctgtacatgggcagcggcatcatcttcggctctggcacaaaggtgaccgtcctgggcggcggcggcagcggcggaggtggaagcggcggaggcggatctgaggtgcagctgctggaatctggaggcggcctcgtgcagcctggaggcagcctgaggctgagctgcgctgcttctggcttcaccttcagcagcttcgccatgagctgggtcagacaagctcccggcaaaggcctggaatgggtgtccgccgtgtctggcagcggcgacgatacctactacgccgatagcgtgaaaggaagatttacaatcagccgggacaacagcaagaataccctgtacctgcagatgaactctctgcgggccgaggacaccgccgtgtactattgcgccaagcacaccagctactacctggacgtgtggggcaagggcaccaccgtgaccgtttccagcaccacgacgccagcgccgcggccaccaacaccggcgcccaccatcgcgtcgcagcccctgtccctgcgcccagaggcgtgccggccagcggcggggggcgcagtgcacacgagggggctggacttcgcctgtgatatctacatctgggcgcccttggccgggacttgtggggtccttctcctgtcactggttatcaccctttactgccggagggaccagaggctgccccccgatgcccacaagccccctgggggaggcagtttccggacccccatccaagaggagcaggccgacgcccactccaccctggccaagatcagagtgaagttcagcaggagcgcagacgcccccgcgtaccagcagggccagaaccagctctataacgagctcaatctaggacgaagagaggagtacgatgttttggacaagagacgtggccgggaccctgagatggggggaaagccgagaaggaagaaccctcaggaaggcctgtacaatgaactgcagaaagataagatggcggaggcctacagtgagattgggatgaaaggcgagcgccggaggggcaaggggcacgatggcctttaccagggtctcagtacagccaccaaggacacctacgacgcccttcacatgcaggccctgccccctcgcggctctggcgagggaaggggttccctgcttacttgcggcgacgtcgaagagaatcccggtccgatggccctcccagtaactgccctccttttgcccctcgcactccttcttcatgccgctcgccccaactgggtcaacgtgattagcgatttgaagaaaatcgaggaccttatacagtctatgcatattgacgctacactgtatactgagagtgatgtacacccgtcctgtaaggtaacggccatgaaatgctttcttctggagctccaggtcatcagcttggagtctggggacgcaagcatccacgatacggttgaaaacctcatcatccttgcgaacaactctctctcatctaatggaaacgttacagagagtgggtgtaaggagtgcgaagagttggaagaaaaaaacatcaaagaatttcttcaatccttcgttcacatagtgcaaatgttcattaacacgtccactaccacacccgccccgaggccacctacgccggcaccgactatcgccagtcaacccctctctctgcgccccgaggcttgccggcctgcggctggtggggcggtccacacccggggcctggattttgcgtgcgatatatacatctgggcacctcttgccggcacctgcggagtgctgcttctctcactcgttattacgctgtactgctaa

SEQ ID NO: 1046 - DNA, 2136 bp, synthetic construct
  misc_feature 1..2136: note = Synthetic
  source 1..2136: mol_type = other DNA
atggccttaccagtgaccgccttgctcctgccgctggccttgctgctccacgccgccaggccggagatcgtgctgacccagtctcctgatttccagtccgtgacccctaaggaaaaggtgaccatcacctgtagagcttctcagagcatcggcagctctctgcactggtatcagcagaaacctgaccagagcccaaagctgctgatcaaattcgccagccagtccttcagcggcgtgccctcccggtttagcggctccggcagcggaacagacttcaccctgacaattaacagcctggaagccgaggatgccgccacatacttctgccaccagtcttctagcctgccctggacattcggccagggcacaaaggtggagatcaagggcggcggcggcagcggcggcggcggcagcggtggaggcggaagccaagtgcagctggtggaaagcggaggcggcgtcgtgcaacctggcagaagcctgagactgagctgcgccgccagcggctttaacttcagcaccttcgacatccactgggtgcggcaggcccctggaaaaggcctggagtgggtcgccctgatctggtatgacggcagctacaagtactacgccgatagcgttaagggcaggttcaccatcagcagagataattctaagaacaccctggacctgagaatgaacagcctccgggctgaggacaccgccgtgtactactgcgccagaaatgacaactggaacgacgagcattactatcactactacatggacgtgtggggcaagggcaccaccgtgacagtgtcctctaccacgacgccagcgccgcggccaccaacaccggcgcccaccatcgcgtcgcagcccctgtccctgcgcccagaggcgtgccggccagcggcggggggcgcagtgcacacgagggggctggacttcgcctgtgatatctacatctgggcgcccttggccgggacttgtggggtccttctcctgtcactggttatcaccctttactgccggagggaccagaggctgccccccgatgcccacaagccccctgggggaggcagtttccggacccccatccaagaggagcaggccgacgcccactccaccctggccaagatcagagtgaagttcagcaggagcgcagacgcccccgcgtaccagcagggccagaaccagctctataacgagctcaatctaggacgaagagaggagtacgatgttttggacaagagacgtggccgggaccctgagatggggggaaagccgagaaggaagaaccctcaggaaggcctgtacaatgaactgcagaaagataagatggcggaggcctacagtgagattgggatgaaaggcgagcgccggaggggcaaggggcacgatggcctttaccagggtctcagtacagccaccaaggacacctacgacgcccttcacatgcaggccctgccccctcgcggctctggcgagggaaggggttccctgcttacttgcggcgacgtcgaagagaatcccggtccgatggccctcccagtaactgccctccttttgcccctcgcactccttcttcatgccgctcgccccaactgggtcaacgtgattagcgatttgaagaaaatcgaggaccttatacagtctatgcatattgacgctacactgtatactgagagtgatgtacacccgtcctgtaaggtaacggccatgaaatgctttcttctggagctccaggtcatcagcttggagtctggggacgcaagcatccacgatacggttgaaaacctcatcatccttgcgaacaactctctctcatctaatggaaacgttacagagagtgggtgtaaggagtgcgaagagttggaagaaaaaaacatcaaagaatttcttcaatccttcgttcacatagtgcaaatgttcattaacacgtccactaccacacccgccccgaggccacctacgccggcaccgactatcgccagtcaacccctctctctgcgccccgaggcttgccggcctgcggctggtggggcggtccacacccggggcctggattttgcgtgcgatatatacatctgggcacctcttgccggcacctgcggagtgctgcttctctcactcgttattacgctgtactgctaa

SEQ ID NO: 1047 - DNA, 2151 bp, synthetic construct
  misc_feature 1..2151: note = Synthetic
  source 1..2151: mol_type = other DNA
atggccttaccagtgaccgccttgctcctgccgctggccttgctgctccacgccgccaggccgcagaccgtggtgacacaggagcctagcttcagcgtgtctccaggaggaacagtgaccctgacatgcggcctcagcagcggctctgtgtccaccagctatttccccagctggtatcagcagacccctggccaggctcccaggaccctgatctacatcaccaacacaagaagcagcggcgtgcccgacagattttctggcagcatcatcggcaacaaggccgctctgaccatcacaggcgcccaggccgacgacgagagtgattacttctgcgtgctgtacatgggcagcggaacatgggtgttcggcggaggcacaaagctgaccgtcctgggcggcggcggaagcggcggcggcggctctggcggaggcggcagcgaggtgcacctgctggaaagcggcggcggcctggtgcagcctggaggctctctgcggctgagctgtgccgcctctggttttaccttcagcagctacgccatgaattgggttagacaggcccctggcaagggcctggaatgggtcagcagcatcagcggctccggcagcagctcttactatgctgatagcgtgaagggcagattcaccattagcagagacaatagcaagaacaccctgtacctgcagatgaacagcctgcgggccgaggacaccgccgtgtactactgcgccagccggggcttcaactcccaataccctcctggctactactactactacatggacgtgtggggaaaaggcacgaccgtgaccgtgtcctccaccacgacgccagcgccgcggccaccaacaccggcgcccaccatcgcgtcgcagcccctgtccctgcgcccagaggcgtgccggccagcggcggggggcgcagtgcacacgagggggctggacttcgcctgtgatatctacatctgggcgcccttggccgggacttgtggggtccttctcctgtcactggttatcaccctttactgccggagggaccagaggctgccccccgatgcccacaagccccctgggggaggcagtttccggacccccatccaagaggagcaggccgacgcccactccaccctggccaagatcagagtgaagttcagcaggagcgcagacgcccccgcgtaccagcagggccagaaccagctctataacgagctcaatctaggacgaagagaggagtacgatgttttggacaagagacgtggccgggaccctgagatggggggaaagccgagaaggaagaaccctcaggaaggcctgtacaatgaactgcagaaagataagatggcggaggcctacagtgagattgggatgaaaggcgagcgccggaggggcaaggggcacgatggcctttaccagggtctcagtacagccaccaaggacacctacgacgcccttcacatgcaggccctgccccctcgcggctctggcgagggaaggggttccctgcttacttgcggcgacgtcgaagagaatcccggtccgatggccctcccagtaactgccctccttttgcccctcgcactccttcttcatgccgctcgccccaactgggtcaacgtgattagcgatttgaagaaaatcgaggaccttatacagtctatgcatattgacgctacactgtatactgagagtgatgtacacccgtcctgtaaggtaacggccatgaaatgctttcttctggagctccaggtcatcagcttggagtctggggacgcaagcatccacgatacggttgaaaacctcatcatccttgcgaacaactctctctcatctaatggaaacgttacagagagtgggtgtaaggagtgcgaagagttggaagaaaaaaacatcaaagaatttcttcaatccttcgttcacatagtgcaaatgttcattaacacgtccactaccacacccgccccgaggccacctacgccggcaccgactatcgccagtcaacccctctctctgcgccccgaggcttgccggcctgcggctggtggggcggtccacacccggggcctggattttgcgtgcgatatatacatctgggcacctcttgccggcacctgcggagtgctgcttctctcactcgttattacgctgtactgctaa

SEQ ID NO: 1048 - DNA, 2112 bp, synthetic construct
  misc_feature 1..2112: note = Synthetic
  source 1..2112: mol_type = other DNA
atggccttaccagtgaccgccttgctcctgccgctggccttgctgctccacgccgccaggccggagatcgtgctgacacagtctcccgactttcagagcgtgacccctaaagagaaggtgacaatcacctgcagagccagccagtcaatcggctctagcctgcactggtatcagcagaaacctgatcagagccctaagctgctgatcaagttcgcctctcagagcttcagcggcgtgccaagccggttcagcggctccggcagcggcaccgacttcaccctgaccatccacagcctggaggccgaagatgccgctacatactactgccaccagtccagcagcctcccctggaccttcggccagggcacaaaggtggaaatcaaaggcggcggaggcagcggcggcggaggctccggaggcggaggcagcgaggtgcagctgctggaaagcggcggcggcctggtgcaacctggcggctccctgaggctgagctgcgccgccagcggcttcacctttagcaactacgctatgacctgggtcagacaggcccctggaaagggcctggagtgggtgtccgccatcagcggatctggtattggaacatactacgccgacagcgtgcaaggcagattcacaacaagcagagataattctaagaacaccctgtacctgcagatgaacagcctgcgggccgaggacaccgccgtgtactattgtgccaagggcggctacaactggaaggacgtgtggggcaagggaaccaccgtgaccgtttcttctaccacgacgccagcgccgcggccaccaacaccggcgcccaccatcgcgtcgcagcccctgtccctgcgcccagaggcgtgccggccagcggcggggggcgcagtgcacacgagggggctggacttcgcctgtgatatctacatctgggcgcccttggccgggacttgtggggtccttctcctgtcactggttatcaccctttactgccggagggaccagaggctgccccccgatgcccacaagccccctgggggaggcagtttccggacccccatccaagaggagcaggccgacgcccactccaccctggccaagatcagagtgaagttcagcaggagcgcagacgcccccgcgtaccagcagggccagaaccagctctataacgagctcaatctaggacgaagagaggagtacgatgttttggacaagagacgtggccgggaccctgagatggggggaaagccgagaaggaagaaccctcaggaaggcctgtacaatgaactgcagaaagataagatggcggaggcctacagtgagattgggatgaaaggcgagcgccggaggggcaaggggcacgatggcctttaccagggtctcagtacagccaccaaggacacctacgacgcccttcacatgcaggccctgccccctcgcggctctggcgagggaaggggttccctgcttacttgcggcgacgtcgaagagaatcccggtccgatggccctcccagtaactgccctccttttgcccctcgcactccttcttcatgccgctcgccccaactgggtcaacgtgattagcgatttgaagaaaatcgaggaccttatacagtctatgcatattgacgctacactgtatactgagagtgatgtacacccgtcctgtaaggtaacggccatgaaatgctttcttctggagctccaggtcatcagcttggagtctggggacgcaagcatccacgatacggttgaaaacctcatcatccttgcgaacaactctctctcatctaatggaaacgttacagagagtgggtgtaaggagtgcgaagagttggaagaaaaaaacatcaaagaatttcttcaatccttcgttcacatagtgcaaatgttcattaacacgtccactaccacacccgccccgaggccacctacgccggcaccgactatcgccagtcaacccctctctctgcgccccgaggcttgccggcctgcggctggtggggcggtccacacccggggcctggattttgcgtgcgatatatacatctgggcacctcttgccggcacctgcggagtgctgcttctctcactcgttattacgctgtactgctaa

SEQ ID NO: 1049 - DNA, 2136 bp, synthetic construct
  misc_feature 1..2136: note = Synthetic
  source 1..2136: mol_type = other DNA
atggccttaccagtgaccgccttgctcctgccgctggccttgctgctccacgccgccaggccggagatcgtgctgacccagagccctgacttccagtctgtgacacctaaggaaaaggtgacaatcacctgtagggccagccaaagcatcggcagcagcctgcattggtatcagcagaagcccgatcagtctccaaagctgctgatcaaattcgccagccagagcttcagcggagttcctagccggttcagcggctctggcagcggaacagatttcaccctgacaattcactctctggaggccgaggatgccgccacatattactgccaccagtctagcagcctgccttggacctttggacagggcaccaaggtggaaatcaagggcggaggcggctccggaggaggcggctctggtggcggcggcagccaagtgcagctggtggagagcggcggcggcgtcgtgcagcccggcagaagcctgcggctgtcttgcgctgccagcggcttcacctttacaaactacgacatgcactgggtcagacaggcccctggcaaaggcctggaatgggtgaccatcatctggcacgacggctccaataagtactacctggacagcgtgcggggcagattcacgatcagcagagataattccaagaacaccctgtacctgcagatgaacagcctgagagccgaggacaccgccgtgtactattgcgccagaggcgacaactggaacgacgagcaccactacttctactacatggacgtgtggggcaagggcaccaccgtgaccgtgtccagcaccacgacgccagcgccgcggccaccaacaccggcgcccaccatcgcgtcgcagcccctgtccctgcgcccagaggcgtgccggccagcggcggggggcgcagtgcacacgagggggctggacttcgcctgtgatatctacatctgggcgcccttggccgggacttgtggggtccttctcctgtcactggttatcaccctttactgccggagggaccagaggctgccccccgatgcccacaagccccctgggggaggcagtttccggacccccatccaagaggagcaggccgacgcccactccaccctggccaagatcagagtgaagttcagcaggagcgcagacgcccccgcgtaccagcagggccagaaccagctctataacgagctcaatctaggacgaagagaggagtacgatgttttggacaagagacgtggccgggaccctgagatggggggaaagccgagaaggaagaaccctcaggaaggcctgtacaatgaactgcagaaagataagatggcggaggcctacagtgagattgggatgaaaggcgagcgccggaggggcaaggggcacgatggcctttaccagggtctcagtacagccaccaaggacacctacgacgcccttcacatgcaggccctgccccctcgcggctctggcgagggaaggggttccctgcttacttgcggcgacgtcgaagagaatcccggtccgatggccctcccagtaactgccctccttttgcccctcgcactccttcttcatgccgctcgccccaactgggtcaacgtgattagcgatttgaagaaaatcgaggaccttatacagtctatgcatattgacgctacactgtatactgagagtgatgtacacccgtcctgtaaggtaacggccatgaaatgctttcttctggagctccaggtcatcagcttggagtctggggacgcaagcatccacgatacggttgaaaacctcatcatccttgcgaacaactctctctcatctaatggaaacgttacagagagtgggtgtaaggagtgcgaagagttggaagaaaaaaacatcaaagaatttcttcaatccttcgttcacatagtgcaaatgttcattaacacgtccactaccacacccgccccgaggccacctacgccggcaccgactatcgccagtcaacccctctctctgcgccccgaggcttgccggcctgcggctggtggggcggtccacacccggggcctggattttgcgtgcgatatatacatctgggcacctcttgccggcacctgcggagtgctgcttctctcactcgttattacgctgtactgctaa

SEQ ID NO: 1050 - DNA, 2136 bp, synthetic construct
  misc_feature 1..2136: note = Synthetic
  source 1..2136: mol_type = other DNA
atggccttaccagtgaccgccttgctcctgccgctggccttgctgctccacgccgccaggccggaaatcgtgctgacccagagccccgctacactgagcctctcccctggcgagcgggccacactgtcttgtagagcctctcagtccgtgtccagcagcctggcctggtatcagcagaagcccggccaggctccaagactgctgatctacgacgccagcaatagagccaccggcatccccgcccggttttccggcagcggatctggaacagattttaccctgaccatcagcagcctggaacctgaggatttcgccgtgtactactgccagcaaagaagcaactggcctctgacattcggcggcggcacaaaggtggaaatcaagggcggcggaggcagcggaggcggaggctctggcggcggtggcagtcaggtgcagctggttgagagcggcggaggcgtggtgcaacctggaagatctctgcgcctgagctgcgccgccagcggcttcaccttcagcaactacgatatgcactgggtgcggcaggcccctggcaagggcctggaatgggtcaccattatctggcatgacggcagcaacaagtactacctggacagcgtgaaaggcagattcaccatcagcagagacaatagcaagaacaccctgtacctgcagatgaacagcctgcgggccgaggacaccgccgtgtactattgcgccagaggcgacaactggaacgacgagcaccactacttctactatatggacgtgtggggcaaaggcacaaccgtgaccgtcagcagcaccacgacgccagcgccgcggccaccaacaccggcgcccaccatcgcgtcgcagcccctgtccctgcgcccagaggcgtgccggccagcggcggggggcgcagtgcacacgagggggctggacttcgcctgtgatatctacatctgggcgcccttggccgggacttgtggggtccttctcctgtcactggttatcaccctttactgccggagggaccagaggctgccccccgatgcccacaagccccctgggggaggcagtttccggacccccatccaagaggagcaggccgacgcccactccaccctggccaagatcagagtgaagttcagcaggagcgcagacgcccccgcgtaccagcagggccagaaccagctctataacgagctcaatctaggacgaagagaggagtacgatgttttggacaagagacgtggccgggaccctgagatggggggaaagccgagaaggaagaaccctcaggaaggcctgtacaatgaactgcagaaagataagatggcggaggcctacagtgagattgggatgaaaggcgagcgccggaggggcaaggggcacgatggcctttaccagggtctcagtacagccaccaaggacacctacgacgcccttcacatgcaggccctgccccctcgcggctctggcgagggaaggggttccctgcttacttgcggcgacgtcgaagagaatcccggtccgatggccctcccagtaactgccctccttttgcccctcgcactccttcttcatgccgctcgccccaactgggtcaacgtgattagcgatttgaagaaaatcgaggaccttatacagtctatgcatattgacgctacactgtatactgagagtgatgtacacccgtcctgtaaggtaacggccatgaaatgctttcttctggagctccaggtcatcagcttggagtctggggacgcaagcatccacgatacggttgaaaacctcatcatccttgcgaacaactctctctcatctaatggaaacgttacagagagtgggtgtaaggagtgcgaagagttggaagaaaaaaacatcaaagaatttcttcaatccttcgttcacatagtgcaaatgttcattaacacgtccactaccacacccgccccgaggccacctacgccggcaccgactatcgccagtcaacccctctctctgcgccccgaggcttgccggcctgcggctggtggggcggtccacacccggggcctggattttgcgtgcgatatatacatctgggcacctcttgccggcacctgcggagtgctgcttctctcactcgttattacgctgtactgctaa

SEQ ID NO: 1051 - DNA, 2124 bp, synthetic construct
  misc_feature 1..2124: note = Synthetic
  source 1..2124: mol_type = other DNA
atggccttaccagtgaccgccttgctcctgccgctggccttgctgctccacgccgccaggccggagatcgtgctgacacagagccccggaacactgagcctgagccctggcgagcgggctacactgtcttgcagagcttctcagagcgtttcctccagctacctggcctggtatcagcaaaagcccggccaagctccaagactgctgatctacggcgccagctctagggccaccggcattcctgatagattcagcggctctggcagcggaacagattttaccctgaccatcagcagactggagcctgaggatttcgccgtgtactactgccagcagtacggatctagctggacctttggccagggcaccaaggtggaaatcaaaggcggaggaggcagcggcggcggcggcagcggcggaggcggcagcgaagtgcagctggtcgagagcggcggcggcgtggtgcggcctggcgggtccctgagactgagctgcgccgcctctggcttcaccttcgacgactatggcatgagctgggtcagacaggcccctggaaaaggcctggaatgggtgtccggaatcaactggaatggcggcagtacaggctacgtggacagcgtgaagggcagattcaccatcagccgggacaacgccaagaacagcctgtatctgcagatgaacagcctgcgggccgaggacaccgccctgtaccactgtgccagacctgtgacaaccgactactactactacatggacgtgtggggcaagggcaccaccgtgaccgtgtcttccaccacgacgccagcgccgcggccaccaacaccggcgcccaccatcgcgtcgcagcccctgtccctgcgcccagaggcgtgccggccagcggcggggggcgcagtgcacacgagggggctggacttcgcctgtgatatctacatctgggcgcccttggccgggacttgtggggtccttctcctgtcactggttatcaccctttactgccggagggaccagaggctgccccccgatgcccacaagccccctgggggaggcagtttccggacccccatccaagaggagcaggccgacgcccactccaccctggccaagatcagagtgaagttcagcaggagcgcagacgcccccgcgtaccagcagggccagaaccagctctataacgagctcaatctaggacgaagagaggagtacgatgttttggacaagagacgtggccgggaccctgagatggggggaaagccgagaaggaagaaccctcaggaaggcctgtacaatgaactgcagaaagataagatggcggaggcctacagtgagattgggatgaaaggcgagcgccggaggggcaaggggcacgatggcctttaccagggtctcagtacagccaccaaggacacctacgacgcccttcacatgcaggccctgccccctcgcggctctggcgagggaaggggttccctgcttacttgcggcgacgtcgaagagaatcccggtccgatggccctcccagtaactgccctccttttgcccctcgcactccttcttcatgccgctcgccccaactgggtcaacgtgattagcgatttgaagaaaatcgaggaccttatacagtctatgcatattgacgctacactgtatactgagagtgatgtacacccgtcctgtaaggtaacggccatgaaatgctttcttctggagctccaggtcatcagcttggagtctggggacgcaagcatccacgatacggttgaaaacctcatcatccttgcgaacaactctctctcatctaatggaaacgttacagagagtgggtgtaaggagtgcgaagagttggaagaaaaaaacatcaaagaatttcttcaatccttcgttcacatagtgcaaatgttcattaacacgtccactaccacacccgccccgaggccacctacgccggcaccgactatcgccagtcaacccctctctctgcgccccgaggcttgccggcctgcggctggtggggcggtccacacccggggcctggattttgcgtgcgatatatacatctgggcacctcttgccggcacctgcggagtgctgcttctctcactcgttattacgctgtactgctaa

SEQ ID NO: 1052 - DNA, 2148 bp, synthetic construct
  misc_feature 1..2148: note = Synthetic
  source 1..2148: mol_type = other DNA
atggccttaccagtgaccgccttgctcctgccgctggccttgctgctccacgccgccaggccggaaattgtgctgacccagagccccggcaccctgagcctgtctccaggcgagcgggctaccctgtcctgcagagccagccagtctgtttccagctcttacctggcctggtatcagcaaaagcctggacaggcccctagactgctgatctacggcgcctctagcagggctacaggcatccctgatagatttagcggcagcggctctggcaccgacttcaccctgaccatctccagactggaacccgaggatttcgccgtgtactactgccagcagtacggcagcagctggacatttggccagggcacaaaggtggaaatcaagggcggtggaggcagcggaggcggcggaagcggcggcggcggcagtgaggtgcagctgctggagagcggaggaggcctggtgcaacctggcggcagcctgcggctgagctgcgccgcttccggcttcaccttcagcagctacgccatgagctgggtgcggcaggctcctggaaaaggcctggagtgggtcagcgccatcagcggcagcggaggctcaacatactacgccgacagcgtgaagggcagattcaccatcagccgcgacaactctaagaacaccctgtacctgcagatgaactctctgagagccgaggacaccgccgtgtactattgtgccaagaagggcacaagctacaactggaatgatgtgcactactactactactattatatggacgtgtggggcaaaggcacaaccgtgaccgtgtccagcaccacgacgccagcgccgcggccaccaacaccggcgcccaccatcgcgtcgcagcccctgtccctgcgcccagaggcgtgccggccagcggcggggggcgcagtgcacacgagggggctggacttcgcctgtgatatctacatctgggcgcccttggccgggacttgtggggtccttctcctgtcactggttatcaccctttactgccggagggaccagaggctgccccccgatgcccacaagccccctgggggaggcagtttccggacccccatccaagaggagcaggccgacgcccactccaccctggccaagatcagagtgaagttcagcaggagcgcagacgcccccgcgtaccagcagggccagaaccagctctataacgagctcaatctaggacgaagagaggagtacgatgttttggacaagagacgtggccgggaccctgagatggggggaaagccgagaaggaagaaccctcaggaaggcctgtacaatgaactgcagaaagataagatggcggaggcctacagtgagattgggatgaaaggcgagcgccggaggggcaaggggcacgatggcctttaccagggtctcagtacagccaccaaggacacctacgacgcccttcacatgcaggccctgccccctcgcggctctggcgagggaaggggttccctgcttacttgcggcgacgtcgaagagaatcccggtccgatggccctcccagtaactgccctccttttgcccctcgcactccttcttcatgccgctcgccccaactgggtcaacgtgattagcgatttgaagaaaatcgaggaccttatacagtctatgcatattgacgctacactgtatactgagagtgatgtacacccgtcctgtaaggtaacggccatgaaatgctttcttctggagctccaggtcatcagcttggagtctggggacgcaagcatccacgatacggttgaaaacctcatcatccttgcgaacaactctctctcatctaatggaaacgttacagagagtgggtgtaaggagtgcgaagagttggaagaaaaaaacatcaaagaatttcttcaatccttcgttcacatagtgcaaatgttcattaacacgtccactaccacacccgccccgaggccacctacgccggcaccgactatcgccagtcaacccctctctctgcgccccgaggcttgccggcctgcggctggtggggcggtccacacccggggcctggattttgcgtgcgatatatacatctgggcacctcttgccggcacctgcggagtgctgcttctctcactcgttattacgctgtactgctaa

SEQ ID NO: 1053 - DNA, 2130 bp, synthetic construct
  misc_feature 1..2130: note = Synthetic
  source 1..2130: mol_type = other DNA
atggccttaccagtgaccgccttgctcctgccgctggccttgctgctccacgccgccaggccggagatcgtgctgacccagtctccaggcaccctgagcctgagccccggcgagcgggccacactgagctgcagagcctctcagagcgtcagctctagctacctggcctggtatcagcaaaaacctggccaggcccctagactgctgatctacggcgccagcagccgggccaccggcatccctgatagattcagcggatctggcagcggcaccgactttaccctcaccatcagcagactggaacccgaggacttcgccgtgtactattgtcagcagtacggcagcagctggacattcggccagggcaccaaggtggaaatcaagggcggaggcggcagcggcggaggaggatctggcggcggcggcagccagctgcaactgcaggagagcggtcctggactggtgaagccttctgagacactgagcctgacctgcaccgtgtccggcggctctatcagctcctccagctactactggggctggatcagacagccacctggcaagggcctggaatggatcggcagcatttactattctggctcaacatactacaaccccagccttaaaagcagagtgacaatcagcgtggacaccagcaagaaccagttcagcctgaagctgtcctctgtgaccgccgctgatactgccgtttactactgcaccaccggaacaacagcttattactactactactacatggacgtgtggggaaagggcaccacagtgaccgtgtccagcaccacgacgccagcgccgcggccaccaacaccggcgcccaccatcgcgtcgcagcccctgtccctgcgcccagaggcgtgccggccagcggcggggggcgcagtgcacacgagggggctggacttcgcctgtgatatctacatctgggcgcccttggccgggacttgtggggtccttctcctgtcactggttatcaccctttactgccggagggaccagaggctgccccccgatgcccacaagccccctgggggaggcagtttccggacccccatccaagaggagcaggccgacgcccactccaccctggccaagatcagagtgaagttcagcaggagcgcagacgcccccgcgtaccagcagggccagaaccagctctataacgagctcaatctaggacgaagagaggagtacgatgttttggacaagagacgtggccgggaccctgagatggggggaaagccgagaaggaagaaccctcaggaaggcctgtacaatgaactgcagaaagataagatggcggaggcctacagtgagattgggatgaaaggcgagcgccggaggggcaaggggcacgatggcctttaccagggtctcagtacagccaccaaggacacctacgacgcccttcacatgcaggccctgccccctcgcggctctggcgagggaaggggttccctgcttacttgcggcgacgtcgaagagaatcccggtccgatggccctcccagtaactgccctccttttgcccctcgcactccttcttcatgccgctcgccccaactgggtcaacgtgattagcgatttgaagaaaatcgaggaccttatacagtctatgcatattgacgctacactgtatactgagagtgatgtacacccgtcctgtaaggtaacggccatgaaatgctttcttctggagctccaggtcatcagcttggagtctggggacgcaagcatccacgatacggttgaaaacctcatcatccttgcgaacaactctctctcatctaatggaaacgttacagagagtgggtgtaaggagtgcgaagagttggaagaaaaaaacatcaaagaatttcttcaatccttcgttcacatagtgcaaatgttcattaacacgtccactaccacacccgccccgaggccacctacgccggcaccgactatcgccagtcaacccctctctctgcgccccgaggcttgccggcctgcggctggtggggcggtccacacccggggcctggattttgcgtgcgatatatacatctgggcacctcttgccggcacctgcggagtgctgcttctctcactcgttattacgctgtactgctaa

SEQ ID NO: 1054 - DNA, 2127 bp, synthetic construct
  misc_feature 1..2127: note = Synthetic
  source 1..2127: mol_type = other DNA
atggccttaccagtgaccgccttgctcctgccgctggccttgctgctccacgccgccaggccggagatcgtgctgacccagtctcccggaacactctccctgtccccaggcgagcgggctacactgagctgccgggccagccagagcgtgtcctcgtcttatctggcctggtatcagcagaaacctggccaagcccctagactgctgatctacggcgccagcagccgggccacaggcatccccgatagattcagcggcagcggaagcggcaccgacttcaccctgacaatcagcagactggaacctgaggacttcgccgtgtactattgtcagcagtacggcagcagctggaccttcggccagggcaccaaggttgaaattaagggcggcggcggctctggcggaggcggctctggcggcggcggaagcgaggtgcagctgctggagagcggtggaggcctggtgcaacctggcggctccctgcggctgagctgcgccgccagcggcttcacctttagctcttacgccatgacctgggtcagacaggcccctggcaagggactggaatgggtgtctgccatcagcggcagcggaggatctacatactacgctgatagcgtgaagggcagatttacaatcagccgcgacaatagcaagaacaccctgtacctgcagatgaacagcctgagagccgaggacaccgccgtgtactactgcgctagaggcggctacaactggcactactactactacatggacgtgtggggcaaaggaaccaccgtgaccgtgtccagcaccacgacgccagcgccgcggccaccaacaccggcgcccaccatcgcgtcgcagcccctgtccctgcgcccagaggcgtgccggccagcggcggggggcgcagtgcacacgagggggctggacttcgcctgtgatatctacatctgggcgcccttggccgggacttgtggggtccttctcctgtcactggttatcaccctttactgccggagggaccagaggctgccccccgatgcccacaagccccctgggggaggcagtttccggacccccatccaagaggagcaggccgacgcccactccaccctggccaagatcagagtgaagttcagcaggagcgcagacgcccccgcgtaccagcagggccagaaccagctctataacgagctcaatctaggacgaagagaggagtacgatgttttggacaagagacgtggccgggaccctgagatggggggaaagccgagaaggaagaaccctcaggaaggcctgtacaatgaactgcagaaagataagatggcggaggcctacagtgagattgggatgaaaggcgagcgccggaggggcaaggggcacgatggcctttaccagggtctcagtacagccaccaaggacacctacgacgcccttcacatgcaggccctgccccctcgcggctctggcgagggaaggggttccctgcttacttgcggcgacgtcgaagagaatcccggtccgatggccctcccagtaactgccctccttttgcccctcgcactccttcttcatgccgctcgccccaactgggtcaacgtgattagcgatttgaagaaaatcgaggaccttatacagtctatgcatattgacgctacactgtatactgagagtgatgtacacccgtcctgtaaggtaacggccatgaaatgctttcttctggagctccaggtcatcagcttggagtctggggacgcaagcatccacgatacggttgaaaacctcatcatccttgcgaacaactctctctcatctaatggaaacgttacagagagtgggtgtaaggagtgcgaagagttggaagaaaaaaacatcaaagaatttcttcaatccttcgttcacatagtgcaaatgttcattaacacgtccactaccacacccgccccgaggccacctacgccggcaccgactatcgccagtcaacccctctctctgcgccccgaggcttgccggcctgcggctggtggggcggtccacacccggggcctggattttgcgtgcgatatatacatctgggcacctcttgccggcacctgcggagtgctgcttctctcactcgttattacgctgtactgctaa

SEQ ID NO: 1055 - DNA, 2139 bp, synthetic construct
  misc_feature 1..2139: note = Synthetic
  source 1..2139: mol_type = other DNA
atggccttaccagtgaccgccttgctcctgccgctggccttgctgctccacgccgccaggccggagatcgtgctgacccagagccccgacttccagtccgtgacccctaaggaaaaggtgaccatcacatgcagagccagccagaacatcggcagcagcctgcactggtatcagcagaaacctgatcagtctccaaagctgctgatcaaattcgcctctcagagcatcagcggtgttcctagcagattcagcggctccggcagcggcactgattttacactgaccatcaacagcctggaggccgaggatgccgctgcctactactgccaccagagctctagcctgccctggaccttcggccagggcacaaaggtggaaatcaagggcggcggcggaagcggcggcggcggatctggcggaggcggcagccaagtgcagctggtggagagcggaggcggagtcgtgcaacctggcagaagcctgagactgagctgcgccgcttctggcttcaccttttctagctacgacatgcactgggtgcggcaggcccctggaaaaggcctggaatgggtcagcgtgatctggtatgacggctccaacaagaagtacggcgacagcgccaagggcaggttcaccattagccgggacaattctaagaacaccctggacctgcagatgaacagcctgcgggctgaggacaccgccgtgtactattgtgccagaggcgataattggaacgacgagggcggctactactactactacatggacgtgtggggcaagggaacaaccgtgacagtgtccagcaccacgacgccagcgccgcggccaccaacaccggcgcccaccatcgcgtcgcagcccctgtccctgcgcccagaggcgtgccggccagcggcggggggcgcagtgcacacgagggggctggacttcgcctgtgatatctacatctgggcgcccttggccgggacttgtggggtccttctcctgtcactggttatcaccctttactgccggagggaccagaggctgccccccgatgcccacaagccccctgggggaggcagtttccggacccccatccaagaggagcaggccgacgcccactccaccctggccaagatcagagtgaagttcagcaggagcgcagacgcccccgcgtaccagcagggccagaaccagctctataacgagctcaatctaggacgaagagaggagtacgatgttttggacaagagacgtggccgggaccctgagatggggggaaagccgagaaggaagaaccctcaggaaggcctgtacaatgaactgcagaaagataagatggcggaggcctacagtgagattgggatgaaaggcgagcgccggaggggcaaggggcacgatggcctttaccagggtctcagtacagccaccaaggacacctacgacgcccttcacatgcaggccctgccccctcgcggctctggcgagggaaggggttccctgcttacttgcggcgacgtcgaagagaatcccggtccgatggccctcccagtaactgccctccttttgcccctcgcactccttcttcatgccgctcgccccaactgggtcaacgtgattagcgatttgaagaaaatcgaggaccttatacagtctatgcatattgacgctacactgtatactgagagtgatgtacacccgtcctgtaaggtaacggccatgaaatgctttcttctggagctccaggtcatcagcttggagtctggggacgcaagcatccacgatacggttgaaaacctcatcatccttgcgaacaactctctctcatctaatggaaacgttacagagagtgggtgtaaggagtgcgaagagttggaagaaaaaaacatcaaagaatttcttcaatccttcgttcacatagtgcaaatgttcattaacacgtccactaccacacccgccccgaggccacctacgccggcaccgactatcgccagtcaacccctctctctgcgccccgaggcttgccggcctgcggctggtggggcggtccacacccggggcctggattttgcgtgcgatatatacatctgggcacctcttgccggcacctgcggagtgctgcttctctcactcgttattacgctgtactgctaa

SEQ ID NO: 1056 - DNA, 2139 bp, synthetic construct
  misc_feature 1..2139: note = Synthetic
  source 1..2139: mol_type = other DNA
atggccttaccagtgaccgccttgctcctgccgctggccttgctgctccacgccgccaggccggacattcagatgacacagagccccagcagcctctccacctctgtgggcgatagagtgaccatcacatgccgggccagccagggcatcagcaactacctggcctggttccagcagaagcctggaaaggcccctaagagcctgatctacgccgccagcagcctgcagagcggagtgccatctaagttcagcggcagcggatctggcaccgacttcagcctgaccatcagctctctgcagcctgaggattttgccacatactactgtcagcagtacaacagctaccctatcacattcggccagggcaccagactggaaatcaagggcggaggcggcagcggcggcggcggatctggcggaggcggcagccaagtgcagctggtggagagcggcggcggcgtggtgcagcccggacgctccctgcggctgagctgcgccgccagcggctttaccttctctagctacgatatgcactgggtcagacaggctcctggcaaaggcctggaatgggtgtccgtgatctggtacgacggctccaacaagaagtacggcgacagcgccaagggcagattcaccatctctcgggacaatagcaagaacacactggacctgcagatgaactctctgagagccgaggacaccgccgtgtactactgcgccagaggcgataattggaacgacgagggcggttattactactactatatggacgtgtggggaaaaggcacaaccgtgaccgtttccagcaccacgacgccagcgccgcggccaccaacaccggcgcccaccatcgcgtcgcagcccctgtccctgcgcccagaggcgtgccggccagcggcggggggcgcagtgcacacgagggggctggacttcgcctgtgatatctacatctgggcgcccttggccgggacttgtggggtccttctcctgtcactggttatcaccctttactgccggagggaccagaggctgccccccgatgcccacaagccccctgggggaggcagtttccggacccccatccaagaggagcaggccgacgcccactccaccctggccaagatcagagtgaagttcagcaggagcgcagacgcccccgcgtaccagcagggccagaaccagctctataacgagctcaatctaggacgaagagaggagtacgatgttttggacaagagacgtggccgggaccctgagatggggggaaagccgagaaggaagaaccctcaggaaggcctgtacaatgaactgcagaaagataagatggcggaggcctacagtgagattgggatgaaaggcgagcgccggaggggcaaggggcacgatggcctttaccagggtctcagtacagccaccaaggacacctacgacgcccttcacatgcaggccctgccccctcgcggctctggcgagggaaggggttccctgcttacttgcggcgacgtcgaagagaatcccggtccgatggccctcccagtaactgccctccttttgcccctcgcactccttcttcatgccgctcgccccaactgggtcaacgtgattagcgatttgaagaaaatcgaggaccttatacagtctatgcatattgacgctacactgtatactgagagtgatgtacacccgtcctgtaaggtaacggccatgaaatgctttcttctggagctccaggtcatcagcttggagtctggggacgcaagcatccacgatacggttgaaaacctcatcatccttgcgaacaactctctctcatctaatggaaacgttacagagagtgggtgtaaggagtgcgaagagttggaagaaaaaaacatcaaagaatttcttcaatccttcgttcacatagtgcaaatgttcattaacacgtccactaccacacccgccccgaggccacctacgccggcaccgactatcgccagtcaacccctctctctgcgccccgaggcttgccggcctgcggctggtggggcggtccacacccggggcctggattttgcgtgcgatatatacatctgggcacctcttgccggcacctgcggagtgctgcttctctcactcgttattacgctgtactgctaa

SEQ ID NO: 1057 - DNA, 2130 bp, synthetic construct
  misc_feature 1..2130: note = Synthetic
  source 1..2130: mol_type = other DNA
atggccttaccagtgaccgccttgctcctgccgctggccttgctgctccacgccgccaggccggagatcgtgctgacacagagccctgatttccaaagcgtgacccctaaggaaaaggtgaccatcacatgcagagcctctcagaacattggaagtagcctgcactggtatcagcagaaacccgatcagtccccaaagctgctgatcaagttcgccagccagagcatcagcggagtgcccagccggttcagcggctctggctctggcaccgacttcaccctgaccatcaatagcctggaggccgaggacgccgctgcttattactgccaccagagcagctccctgccttggacctttggccagggcaccaaggtcgagatcaagggaggcggaggcagcggaggcggcggcagcggcggcggcggcagccaagtgcagctggtgcagtctggagccgaggtgaaaaagagcggcgcctcagtgaaggtgtcctgcaaggccagcggctacacactgaccagctacggcatctcttgggttagacaggcccctggacaaggcctggaatggatgggctggatcagcgcctacaacggcaacatcaactacgcccagaaattccagggcagagtgacaatgaccacagacaccagcacctccaccgcttacatggaactgcggagcctgagaagcgacgacaccgccgtgtactactgtgtgcgggacggcgatagatacaattggaaccacagctatatggacgtgtggggcaagggcacaacagtcaccgtgtcttctaccacgacgccagcgccgcggccaccaacaccggcgcccaccatcgcgtcgcagcccctgtccctgcgcccagaggcgtgccggccagcggcggggggcgcagtgcacacgagggggctggacttcgcctgtgatatctacatctgggcgcccttggccgggacttgtggggtccttctcctgtcactggttatcaccctttactgccggagggaccagaggctgccccccgatgcccacaagccccctgggggaggcagtttccggacccccatccaagaggagcaggccgacgcccactccaccctggccaagatcagagtgaagttcagcaggagcgcagacgcccccgcgtaccagcagggccagaaccagctctataacgagctcaatctaggacgaagagaggagtacgatgttttggacaagagacgtggccgggaccctgagatggggggaaagccgagaaggaagaaccctcaggaaggcctgtacaatgaactgcagaaagataagatggcggaggcctacagtgagattgggatgaaaggcgagcgccggaggggcaaggggcacgatggcctttaccagggtctcagtacagccaccaaggacacctacgacgcccttcacatgcaggccctgccccctcgcggctctggcgagggaaggggttccctgcttacttgcggcgacgtcgaagagaatcccggtccgatggccctcccagtaactgccctccttttgcccctcgcactccttcttcatgccgctcgccccaactgggtcaacgtgattagcgatttgaagaaaatcgaggaccttatacagtctatgcatattgacgctacactgtatactgagagtgatgtacacccgtcctgtaaggtaacggccatgaaatgctttcttctggagctccaggtcatcagcttggagtctggggacgcaagcatccacgatacggttgaaaacctcatcatccttgcgaacaactctctctcatctaatggaaacgttacagagagtgggtgtaaggagtgcgaagagttggaagaaaaaaacatcaaagaatttcttcaatccttcgttcacatagtgcaaatgttcattaacacgtccactaccacacccgccccgaggccacctacgccggcaccgactatcgccagtcaacccctctctctgcgccccgaggcttgccggcctgcggctggtggggcggtccacacccggggcctggattttgcgtgcgatatatacatctgggcacctcttgccggcacctgcggagtgctgcttctctcactcgttattacgctgtactgctaa

SEQ ID NO: 1058 - DNA, 2130 bp, synthetic construct
  misc_feature 1..2130: note = Synthetic
  source 1..2130: mol_type = other DNA
atggccttaccagtgaccgccttgctcctgccgctggccttgctgctccacgccgccaggccggacatccagatgacacagagccccagcagcctgagcacctctgtgggcgatagagtgaccatcacctgcagagccagccagggcatcagcaactacctggcctggttccagcagaaacctggaaaggcccctaagagcctgatctacgccgcttcttctctgcaaagcggcgtgccaagcaagttcagcggcagcggcagcggaacagacttcagcctgacaatttctagcctccagcctgaggattttgccacatactactgccagcagtacaacagctaccccatcaccttcggccagggcacaagactggaaatcaagggcggcggcggctctggaggcggcggatctggcggaggaggttcccaagtgcagctggttcagagcggagccgaggtgaaaaagtccggcgccagcgtgaaggtgtcatgcaaggcctctggctacaccctgacctcctacggcatcagctgggtccggcaggcccctggccagggcctggagtggatgggctggatcagcgcttataatggcaacatcaattacgcccagaagttccaaggcagagtgacaatgaccacagataccagcaccagcacagcttacatggaactgagatccctgcggagcgacgacaccgccgtgtactattgtgtgcgggacggcgacagatacaactggaaccacagctacatggacgtgtggggcaagggcaccaccgtgaccgtgtccagcaccacgacgccagcgccgcggccaccaacaccggcgcccaccatcgcgtcgcagcccctgtccctgcgcccagaggcgtgccggccagcggcggggggcgcagtgcacacgagggggctggacttcgcctgtgatatctacatctgggcgcccttggccgggacttgtggggtccttctcctgtcactggttatcaccctttactgccggagggaccagaggctgccccccgatgcccacaagccccctgggggaggcagtttccggacccccatccaagaggagcaggccgacgcccactccaccctggccaagatcagagtgaagttcagcaggagcgcagacgcccccgcgtaccagcagggccagaaccagctctataacgagctcaatctaggacgaagagaggagtacgatgttttggacaagagacgtggccgggaccctgagatggggggaaagccgagaaggaagaaccctcaggaaggcctgtacaatgaactgcagaaagataagatggcggaggcctacagtgagattgggatgaaaggcgagcgccggaggggcaaggggcacgatggcctttaccagggtctcagtacagccaccaaggacacctacgacgcccttcacatgcaggccctgccccctcgcggctctggcgagggaaggggttccctgcttacttgcggcgacgtcgaagagaatcccggtccgatggccctcccagtaactgccctccttttgcccctcgcactccttcttcatgccgctcgccccaactgggtcaacgtgattagcgatttgaagaaaatcgaggaccttatacagtctatgcatattgacgctacactgtatactgagagtgatgtacacccgtcctgtaaggtaacggccatgaaatgctttcttctggagctccaggtcatcagcttggagtctggggacgcaagcatccacgatacggttgaaaacctcatcatccttgcgaacaactctctctcatctaatggaaacgttacagagagtgggtgtaaggagtgcgaagagttggaagaaaaaaacatcaaagaatttcttcaatccttcgttcacatagtgcaaatgttcattaacacgtccactaccacacccgccccgaggccacctacgccggcaccgactatcgccagtcaacccctctctctgcgccccgaggcttgccggcctgcggctggtggggcggtccacacccggggcctggattttgcgtgcgatatatacatctgggcacctcttgccggcacctgcggagtgctgcttctctcactcgttattacgctgtactgctaa

SEQ ID NO: 1059 - DNA, 2127 bp, synthetic construct
  misc_feature 1..2127: note = Synthetic
  source 1..2127: mol_type = other DNA
atggccttaccagtgaccgccttgctcctgccgctggccttgctgctccacgccgccaggccggagatcgtgctgacacagtcccctgacttccagagcgtgacccctaaggaaaaggtgacaatcacctgccgggcctctcagagcatcggcagcagcctgcactggtatcagcagaagcccgatcagtccccaaagctgctgatcaaatacgtgtcccaatctatcagcggcgtgcccagccggttttctggcagcggcagcggaacagacttcaccctgaccattaactccctggaggccgaggatgccgctgcctactattgtcaccagagcagcagcctgccttggacattcggccagggcaccaaggtggaaatcaagggcggaggaggcagcggcggtggcggcagtggcggaggcggcagcgaggtgcagctgctggaaagcggaggcgacctggtgcaacctggaggcagcctgcggctgagctgcgccgcttctggcttcacctttagcacctacgccatgacatgggttagacaggcccctggcaagggcctggagtgggtcagcgccatcagcggcaccagcggctctacctactacgccgacagcgtgaagggcagattcaccatctccagagataattcaaagagcaccctgtacctgcacatgaacagcctgagaaccgaggacaccgccgtgtactattgcgctagaggcggctacaactggcactactactactacatggacgtgtggggaaaaggcacaacagtgaccgtgtcttctaccacgacgccagcgccgcggccaccaacaccggcgcccaccatcgcgtcgcagcccctgtccctgcgcccagaggcgtgccggccagcggcggggggcgcagtgcacacgagggggctggacttcgcctgtgatatctacatctgggcgcccttggccgggacttgtggggtccttctcctgtcactggttatcaccctttactgccggagggaccagaggctgccccccgatgcccacaagccccctgggggaggcagtttccggacccccatccaagaggagcaggccgacgcccactccaccctggccaagatcagagtgaagttcagcaggagcgcagacgcccccgcgtaccagcagggccagaaccagctctataacgagctcaatctaggacgaagagaggagtacgatgttttggacaagagacgtggccgggaccctgagatggggggaaagccgagaaggaagaaccctcaggaaggcctgtacaatgaactgcagaaagataagatggcggaggcctacagtgagattgggatgaaaggcgagcgccggaggggcaaggggcacgatggcctttaccagggtctcagtacagccaccaaggacacctacgacgcccttcacatgcaggccctgccccctcgcggctctggcgagggaaggggttccctgcttacttgcggcgacgtcgaagagaatcccggtccgatggccctcccagtaactgccctccttttgcccctcgcactccttcttcatgccgctcgccccaactgggtcaacgtgattagcgatttgaagaaaatcgaggaccttatacagtctatgcatattgacgctacactgtatactgagagtgatgtacacccgtcctgtaaggtaacggccatgaaatgctttcttctggagctccaggtcatcagcttggagtctggggacgcaagcatccacgatacggttgaaaacctcatcatccttgcgaacaactctctctcatctaatggaaacgttacagagagtgggtgtaaggagtgcgaagagttggaagaaaaaaacatcaaagaatttcttcaatccttcgttcacatagtgcaaatgttcattaacacgtccactaccacacccgccccgaggccacctacgccggcaccgactatcgccagtcaacccctctctctgcgccccgaggcttgccggcctgcggctggtggggcggtccacacccggggcctggattttgcgtgcgatatatacatctgggcacctcttgccggcacctgcggagtgctgcttctctcactcgttattacgctgtactgctaa

SEQ ID NO: 1060 - DNA, 2130 bp, synthetic construct
  misc_feature 1..2130: note = Synthetic
  source 1..2130: mol_type = other DNA
atggccttaccagtgaccgccttgctcctgccgctggccttgctgctccacgccgccaggccggagatcgtgatgacccagtctcctgctacactgagcctgagccccggcgagcgggccaccctgagttgtagagccagccagagcgtgtcttctagctacctgagctggtatcagcaaaaacctggccttgctccaagactgctgatctacggcgcctctacaagagccaccggcatccccgccagatttagcggctctggcagcggcaccgacttcaccctgaccatctccagcctccagcctgaggatttcgccgtctactactgccagcaggattacaacctgcctcctaccttcggccagggcacaaaggtggaaattaagggcggcggaggcagcggcggaggaggctctggcggcggcggcagcgaggtgcaactgctggaaagcggaggagatctggtgcagcccggcggctccctgcgcctgtcttgcgccgccagcggctttacattcagcacctacgccatgacatgggttagacaggcccctggaaaaggcctggaatgggtgtccgccatcagcggaaccagcggcagcacatactacgccgacagcgtgaagggcagattcaccatcagccgggacaacagcaagtccaccctgtacctgcacatgaacagcctgcggaccgaggacaccgccgtgtactattgcgctagaggcggttataattggcactactactactacatggacgtgtggggcaagggcacgaccgtgacagtgtccagcaccacgacgccagcgccgcggccaccaacaccggcgcccaccatcgcgtcgcagcccctgtccctgcgcccagaggcgtgccggccagcggcggggggcgcagtgcacacgagggggctggacttcgcctgtgatatctacatctgggcgcccttggccgggacttgtggggtccttctcctgtcactggttatcaccctttactgccggagggaccagaggctgccccccgatgcccacaagccccctgggggaggcagtttccggacccccatccaagaggagcaggccgacgcccactccaccctggccaagatcagagtgaagttcagcaggagcgcagacgcccccgcgtaccagcagggccagaaccagctctataacgagctcaatctaggacgaagagaggagtacgatgttttggacaagagacgtggccgggaccctgagatggggggaaagccgagaaggaagaaccctcaggaaggcctgtacaatgaactgcagaaagataagatggcggaggcctacagtgagattgggatgaaaggcgagcgccggaggggcaaggggcacgatggcctttaccagggtctcagtacagccaccaaggacacctacgacgcccttcacatgcaggccctgccccctcgcggctctggcgagggaaggggttccctgcttacttgcggcgacgtcgaagagaatcccggtccgatggccctcccagtaactgccctccttttgcccctcgcactccttcttcatgccgctcgccccaactgggtcaacgtgattagcgatttgaagaaaatcgaggaccttatacagtctatgcatattgacgctacactgtatactgagagtgatgtacacccgtcctgtaaggtaacggccatgaaatgctttcttctggagctccaggtcatcagcttggagtctggggacgcaagcatccacgatacggttgaaaacctcatcatccttgcgaacaactctctctcatctaatggaaacgttacagagagtgggtgtaaggagtgcgaagagttggaagaaaaaaacatcaaagaatttcttcaatccttcgttcacatagtgcaaatgttcattaacacgtccactaccacacccgccccgaggccacctacgccggcaccgactatcgccagtcaacccctctctctgcgccccgaggcttgccggcctgcggctggtggggcggtccacacccggggcctggattttgcgtgcgatatatacatctgggcacctcttgccggcacctgcggagtgctgcttctctcactcgttattacgctgtactgctaa

SEQ ID NO: 1061 - protein, 453 aa, synthetic construct
  REGION 1..453: note = Synthetic
MALPVTALLLPLALLLHAARPQVQLVESGGGVVQPGRSLRLSCAASGFTFNNYDMYWVRQAPGKGLEWVAVTWYDGSNKYYADSVKGRFTISRDNSKNTLYLQMNSLRAEDTAVYYCARGDNWNDEHHYFYYMDVWGKGTTVTVSSGGGGSGGGGSGGGGSEIVLTQSPDFQSVTPKEKVTITCRASQSIGSSLHWYQQKPDQSPKLLIKFASQSFSGVPSRFSGSGSGTDFTLTIHSLEAEDAATYYCHQSSSLPWTFGQGTKVEIKESKYGPPCPSCPIYIWAPLAGTCGVLLLSLVITLYCRRDQRLPPDAHKPPGGGSFRTPIQEEQADAHSTLAKIRVKFSRSADAPAYQQGQNQLYNELNLGRREEYDVLDKRRGRDPEMGGKPRRKNPQEGLYNELQKDKMAEAYSEIGMKGERRRGKGHDGLYQGLSTATKDTYDALHMQALPPR

SEQ ID NO: 1062 - protein, 453 aa, synthetic construct
  REGION 1..453: note = Synthetic
MALPVTALLLPLALLLHAARPQVQLVESGGGVVQPGRSLRLSCAASGFTFSNYDMHWVRQAPGKGLEWVTIIWHDASNKYYLDSVKGRFTISRDNSKNTLYLQMNSLRAEDTAVYYCARGDNWNDEHHYFYYMDVWGKGTTVTVSSGGGGSGGGGSGGGGSEIVLTQSPDFQSVTPKEKVTITCRASQSIGSSLHWYQQKPDQSPKLLIKFASQSFSGVPSRFSGSGSGTDFTLTIHSLEAEDAATYYCHQSSSLPWTFGQGTKVEIKESKYGPPCPSCPIYIWAPLAGTCGVLLLSLVITLYCRRDQRLPPDAHKPPGGGSFRTPIQEEQADAHSTLAKIRVKFSRSADAPAYQQGQNQLYNELNLGRREEYDVLDKRRGRDPEMGGKPRRKNPQEGLYNELQKDKMAEAYSEIGMKGERRRGKGHDGLYQGLSTATKDTYDALHMQALPPR

SEQ ID NO: 1063 - protein, 453 aa, synthetic construct
  REGION 1..453: note = Synthetic
MALPVTALLLPLALLLHAARPQVQLVESGGGVVQPGRSLRLSCAASGFTFSNYDMHWVRQAPGKGLEWVTIIWHDGSNKYYLDSVKGRFTISRDNSKNTLYLQMNSLRAEDTAVYYCARGDNWNDEHHYFYYMDVWGKGTTVTVSSGGGGSGGGGSGGGGSEIVLTQSPDFQSVTPKEKVTITCRASQSIGSSLHWYQQKPDQSPKLLIKFASQSFSGVPSRFSGSGSGTDFTLTIHSLEAEDAATYYCHQSSSLPWTFGQGTKVEIKESKYGPPCPSCPIYIWAPLAGTCGVLLLSLVITLYCRRDQRLPPDAHKPPGGGSFRTPIQEEQADAHSTLAKIRVKFSRSADAPAYQQGQNQLYNELNLGRREEYDVLDKRRGRDPEMGGKPRRKNPQEGLYNELQKDKMAEAYSEIGMKGERRRGKGHDGLYQGLSTATKDTYDALHMQALPPR

SEQ ID NO: 1064 - protein, 447 aa, synthetic construct
  REGION 1..447: note = Synthetic
MALPVTALLLPLALLLHAARPEVQLLESGGGLVQPGGSLRLSCAASGFTFSIYAMSWVRQAPGKGLEWVSAISGGGDTTYYADSVKGRFTISRDNSKTTLDLQMNSLRAEDTAVYYCAKHTSYYMDVWGKGTTVTVSSGGGGSGGGGSGGGGSQTVVTQEPSLSVSPGGTVTLTCGLSSGSVSTSYYPSWYQQTPGQAPRTLIYSTNIRSSGVPDRFSGSILGNKAALTITGAQADDESDYYCKLYMGSGIIFGSGTKVTVLESKYGPPCPSCPIYIWAPLAGTCGVLLLSLVITLYCRRDQRLPPDAHKPPGGGSFRTPIQEEQADAHSTLAKIRVKFSRSADAPAYQQGQNQLYNELNLGRREEYDVLDKRRGRDPEMGGKPRRKNPQEGLYNELQKDKMAEAYSEIGMKGERRRGKGHDGLYQGLSTATKDTYDALHMQALPPR

SEQ ID NO: 1065 - protein, 453 aa, synthetic construct
  REGION 1..453: note = Synthetic
MALPVTALLLPLALLLHAARPQVQLVESGGGVVQPGRSLRLSCAASGFTFSNYDKHWVRQAPGKGLEWVAVIWYDGSNKYYADSVKGRFTISRDNSKNTLYLQMNSLRAEDTAMYYCARGDNWNDEHHYFYYMDVWGKGTTVTVSSGGGGSGGGGSGGGGSEIVLTQSPDFQSVTPKEKVTITCRASQSIGSSLHWYQQKPDQSPKLLIKFASQSFSGVPSRFSGSGSGTDFTLTIHSLEAEDAATYYCHQSSSLPWTFGQGTKVEIKESKYGPPCPSCPIYIWAPLAGTCGVLLLSLVITLYCRRDQRLPPDAHKPPGGGSFRTPIQEEQADAHSTLAKIRVKFSRSADAPAYQQGQNQLYNELNLGRREEYDVLDKRRGRDPEMGGKPRRKNPQEGLYNELQKDKMAEAYSEIGMKGERRRGKGHDGLYQGLSTATKDTYDALHMQALPPR

SEQ ID NO: 1066 - protein, 451 aa, synthetic construct
  REGION 1..451: note = Synthetic
MALPVTALLLPLALLLHAARPQVQLVQSGAEVKKPGASVKVSCKASGYTFTNYGFSWVRQAPGQGLDWMGWISAYNGYTNYTQKLQGRVTMTTDTSTTTAYMELRSLRSDDTAVYYCARRGLLYYYYSMDVWGKGTTVTVSSGGGGSGGGGSGGGGSEIVLTQSPATLSLSPGERATLSCGASQSVYNSYLAWYQQKPGLAPRLLIYDASLRATGVPDRFSGSGSGTDFTLTISTLEPEDFAVYYCQQYGGSPMYTFGQGTKLEIKESKYGPPCPSCPIYIWAPLAGTCGVLLLSLVITLYCRRDQRLPPDAHKPPGGGSFRTPIQEEQADAHSTLAKIRVKFSRSADAPAYQQGQNQLYNELNLGRREEYDVLDKRRGRDPEMGGKPRRKNPQEGLYNELQKDKMAEAYSEIGMKGERRRGKGHDGLYQGLSTATKDTYDALHMQALPPR

SEQ ID NO: 1067 - protein, 447 aa, synthetic construct
  REGION 1..447: note = Synthetic
MALPVTALLLPLALLLHAARPEVQLLESGGGLVQPGGSLRLSCTASGFTFSSFAMSWVRQAPGKGLEWVSAMSGSGDTTYYADSVKGRFTISRDNSKTTLYLQMNSLRAEDTAVYSCAKHTTYYMDVWGKGTTVTVSSGGGGSGGGGSGGGGSQTVVTQEPSLSVSPGGTVTLTCGLSSGSVSTSDYPSWYQQTPGQAPRTLIYRTNTRSSGVPDRFSGSILGNKAALTITGAQADDESDYYCVLYMDSGIIFGSGTKVTVLESKYGPPCPSCPIYIWAPLAGTCGVLLLSLVITLYCRRDQRLPPDAHKPPGGGSFRTPIQEEQADAHSTLAKIRVKFSRSADAPAYQQGQNQLYNELNLGRREEYDVLDKRRGRDPEMGGKPRRKNPQEGLYNELQKDKMAEAYSEIGMKGERRRGKGHDGLYQGLSTATKDTYDALHMQALPPR

SEQ ID NO: 1068 - protein, 447 aa, synthetic construct
  REGION 1..447: note = Synthetic
MALPVTALLLPLALLLHAARPEVQLLESGGGLVQPGGSLRLSCAASGFTFNTYAMSWVRQAPGKGLEWVSAMSGSGDTTYYADSVKGRFTISRDNSKTTLYLQMNSLRAEDTAVYSCAKHTSYYMDVWGKGTTVTVSSGGGGSGGGGSGGGGSQTVVTQEPSLSVSPGGTVTLTCGLSSGSVSTSDYPSWYQQTPGQAPRTLIYRTNTRSSGVPDRFSGSILGNKAALTITGAQADDESDYYCVLYMGSGIIFGSGTKVTVLESKYGPPCPSCPIYIWAPLAGTCGVLLLSLVITLYCRRDQRLPPDAHKPPGGGSFRTPIQEEQADAHSTLAKIRVKFSRSADAPAYQQGQNQLYNELNLGRREEYDVLDKRRGRDPEMGGKPRRKNPQEGLYNELQKDKMAEAYSEIGMKGERRRGKGHDGLYQGLSTATKDTYDALHMQALPPR

SEQ ID NO: 1069 - protein, 447 aa, synthetic construct
  REGION 1..447: note = Synthetic
MALPVTALLLPLALLLHAARPEVQLLESGGDLVQPGGSLRLSCAASGFTFSTYAMSWVRQAPGKGLEWVSAISGSGENIYYADSVKGRFTISRDNSKNTLFLQMNSLRAEDTAVYYCAKHTSYYMDVWGKGTTVTVSSGGGGSGGGGSGGGGSQTVVTQEPSFSVSPGGTVTLTCGLYSDSVSTSYYPSWYQQTPGQAPRTLIYNTNTRSSGVPDRFSGSILGNKAALTITGAQADDESDYYCVLYMVSGIVFGSGTKVTVLESKYGPPCPSCPIYIWAPLAGTCGVLLLSLVITLYCRRDQRLPPDAHKPPGGGSFRTPIQEEQADAHSTLAKIRVKFSRSADAPAYQQGQNQLYNELNLGRREEYDVLDKRRGRDPEMGGKPRRKNPQEGLYNELQKDKMAEAYSEIGMKGERRRGKGHDGLYQGLSTATKDTYDALHMQALPPR

SEQ ID NO: 1070 - protein, 453 aa, synthetic construct
  REGION 1..453: note = Synthetic
MALPVTALLLPLALLLHAARPQVQLVESGGGVVQPGRSLRLSCAASGFTFSSYGMHWVRQAPGKGLEWVAVIWYDGINKYYADSVKGRFTISRDNSKNTLYLQMNSLRAEDTAVYYCARERLERRYYYYMDVWGKGTTVTVSSGGGGSGGGGSGGGGSQTVVTQEPSFSVSPGGTVTLTCGLSSGSVSTSYYPGWYQQTPGQAPRTLIYSTNTRSSGVPDRFSGSILGNKAALTITGAQADDESDYYCVLYMGSGMFIFGSGTKVTVLESKYGPPCPSCPIYIWAPLAGTCGVLLLSLVITLYCRRDQRLPPDAHKPPGGGSFRTPIQEEQADAHSTLAKIRVKFSRSADAPAYQQGQNQLYNELNLGRREEYDVLDKRRGRDPEMGGKPRRKNPQEGLYNELQKDKMAEAYSEIGMKGERRRGKGHDGLYQGLSTATKDTYDALHMQALPPR

SEQ ID NO: 1071 - protein, 447 aa, synthetic construct
  REGION 1..447: note = Synthetic
MALPVTALLLPLALLLHAARPEVQLLESGGGLVQPGGSLRLSCAASGFTFSSFAMSWVRQAPGKGLEWVSAVSGSGDDTYYADSVKGRFTISRDNSKNTLYLQMNSLRAEDTAVYYCAKHTSYYLDVWGKGTTVTVSSGGGGSGGGGSGGGGSQTVVTQEPSFSVSPGGTVTLTCALSSDSVSTSYFPSWYRQTPGQAPRTLIYNTNTRSSGVPDRFSGSILGNKAALTITGAQADDESDYYCVLYMGSGIIFGSGTKVTVLESKYGPPCPSCPIYIWAPLAGTCGVLLLSLVITLYCRRDQRLPPDAHKPPGGGSFRTPIQEEQADAHSTLAKIRVKFSRSADAPAYQQGQNQLYNELNLGRREEYDVLDKRRGRDPEMGGKPRRKNPQEGLYNELQKDKMAEAYSEIGMKGERRRGKGHDGLYQGLSTATKDTYDALHMQALPPR

SEQ ID NO: 1072 - protein, 453 aa, synthetic construct
  REGION 1..453: note = Synthetic
MALPVTALLLPLALLLHAARPQVQLVESGGGVVQPGRSLRLSCAASGFNFSTFDIHWVRQAPGKGLEWVALIWYDGSYKYYADSVKGRFTISRDNSKNTLDLRMNSLRAEDTAVYYCARNDNWNDEHYYHYYMDVWGKGTTVTVSSGGGGSGGGGSGGGGSEIVLTQSPDFQSVTPKEKVTITCRASQSIGSSLHWYQQKPDQSPKLLIKFASQSFSGVPSRFSGSGSGTDFTLTINSLEAEDAATYFCHQSSSLPWTFGQGTKVEIKESKYGPPCPSCPIYIWAPLAGTCGVLLLSLVITLYCRRDQRLPPDAHKPPGGGSFRTPIQEEQADAHSTLAKIRVKFSRSADAPAYQQGQNQLYNELNLGRREEYDVLDKRRGRDPEMGGKPRRKNPQEGLYNELQKDKMAEAYSEIGMKGERRRGKGHDGLYQGLSTATKDTYDALHMQALPPR

SEQ ID NO: 1073 - protein, 458 aa, synthetic construct
  REGION 1..458: note = Synthetic
MALPVTALLLPLALLLHAARPEVHLLESGGGLVQPGGSLRLSCAASGFTFSSYAMNWVRQAPGKGLEWVSSISGSGSSSYYADSVKGRFTISRDNSKNTLYLQMNSLRAEDTAVYYCASRGFNSQYPPGYYYYYMDVWGKGTTVTVSSGGGGSGGGGSGGGGSQTVVTQEPSFSVSPGGTVTLTCGLSSGSVSTSYFPSWYQQTPGQAPRTLIYITNTRSSGVPDRFSGSIIGNKAALTITGAQADDESDYFCVLYMGSGTWVFGGGTKLTVLESKYGPPCPSCPIYIWAPLAGTCGVLLLSLVITLYCRRDQRLPPDAHKPPGGGSFRTPIQEEQADAHSTLAKIRVKFSRSADAPAYQQGQNQLYNELNLGRREEYDVLDKRRGRDPEMGGKPRRKNPQEGLYNELQKDKMAEAYSEIGMKGERRRGKGHDGLYQGLSTATKDTYDALHMQALPPR

SEQ ID NO: 1074 - protein, 445 aa, synthetic construct
  REGION 1..445: note = Synthetic
MALPVTALLLPLALLLHAARPEVQLLESGGGLVQPGGSLRLSCAASGFTFSNYAMTWVRQAPGKGLEWVSAISGSGIGTYYADSVQGRFTTSRDNSKNTLYLQMNSLRAEDTAVYYCAKGGYNWKDVWGKGTTVTVSSGGGGSGGGGSGGGGSEIVLTQSPDFQSVTPKEKVTITCRASQSIGSSLHWYQQKPDQSPKLLIKFASQSFSGVPSRFSGSGSGTDFTLTIHSLEAEDAATYYCHQSSSLPWTFGQGTKVEIKESKYGPPCPSCPIYIWAPLAGTCGVLLLSLVITLYCRRDQRLPPDAHKPPGGGSFRTPIQEEQADAHSTLAKIRVKFSRSADAPAYQQGQNQLYNELNLGRREEYDVLDKRRGRDPEMGGKPRRKNPQEGLYNELQKDKMAEAYSEIGMKGERRRGKGHDGLYQGLSTATKDTYDALHMQALPPR

SEQ ID NO: 1075 - protein, 453 aa, synthetic construct
  REGION 1..453: note = Synthetic
MALPVTALLLPLALLLHAARPQVQLVESGGGVVQPGRSLRLSCAASGFTFTNYDMHWVRQAPGKGLEWVTIIWHDGSNKYYLDSVRGRFTISRDNSKNTLYLQMNSLRAEDTAVYYCARGDNWNDEHHYFYYMDVWGKGTTVTVSSGGGGSGGGGSGGGGSEIVLTQSPDFQSVTPKEKVTITCRASQSIGSSLHWYQQKPDQSPKLLIKFASQSFSGVPSRFSGSGSGTDFTLTIHSLEAEDAATYYCHQSSSLPWTFGQGTKVEIKESKYGPPCPSCPIYIWAPLAGTCGVLLLSLVITLYCRRDQRLPPDAHKPPGGGSFRTPIQEEQADAHSTLAKIRVKFSRSADAPAYQQGQNQLYNELNLGRREEYDVLDKRRGRDPEMGGKPRRKNPQEGLYNELQKDKMAEAYSEIGMKGERRRGKGHDGLYQGLSTATKDTYDALHMQALPPR

SEQ ID NO: 1076 - protein, 453 aa, synthetic construct
  REGION 1..453: note = Synthetic
MALPVTALLLPLALLLHAARPQVQLVESGGGVVQPGRSLRLSCAASGFTFSNYDMHWVRQAPGKGLEWVTIIWHDGSNKYYLDSVKGRFTISRDNSKNTLYLQMNSLRAEDTAVYYCARGDNWNDEHHYFYYMDVWGKGTTVTVSSGGGGSGGGGSGGGGSEIVLTQSPATLSLSPGERATLSCRASQSVSSSLAWYQQKPGQAPRLLIYDASNRATGIPARFSGSGSGTDFTLTISSLEPEDFAVYYCQQRSNWPLTFGGGTKVEIKESKYGPPCPSCPIYIWAPLAGTCGVLLLSLVITLYCRRDQRLPPDAHKPPGGGSFRTPIQEEQADAHSTLAKIRVKFSRSADAPAYQQGQNQLYNELNLGRREEYDVLDKRRGRDPEMGGKPRRKNPQEGLYNELQKDKMAEAYSEIGMKGERRRGKGHDGLYQGLSTATKDTYDALHMQALPPR

SEQ ID NO: 1077 - protein, 449 aa, synthetic construct
  REGION 1..449: note = Synthetic
MALPVTALLLPLALLLHAARPEVQLVESGGGVVRPGGSLRLSCAASGFTFDDYGMSWVRQAPGKGLEWVSGINWNGGSTGYVDSVKGRFTISRDNAKNSLYLQMNSLRAEDTALYHCARPVTTDYYYYMDVWGKGTTVTVSSGGGGSGGGGSGGGGSEIVLTQSPGTLSLSPGERATLSCRASQSVSSSYLAWYQQKPGQAPRLLIYGASSRATGIPDRFSGSGSGTDFTLTISRLEPEDFAVYYCQQYGSSWTFGQGTKVEIKESKYGPPCPSCPIYIWAPLAGTCGVLLLSLVITLYCRRDQRLPPDAHKPPGGGSFRTPIQEEQADAHSTLAKIRVKFSRSADAPAYQQGQNQLYNELNLGRREEYDVLDKRRGRDPEMGGKPRRKNPQEGLYNELQKDKMAEAYSEIGMKGERRRGKGHDGLYQGLSTATKDTYDALHMQALPPR

SEQ ID NO: 1078 - protein, 457 aa, synthetic construct
  REGION 1..457: note = Synthetic
MALPVTALLLPLALLLHAARPEVQLLESGGGLVQPGGSLRLSCAASGFTFSSYAMSWVRQAPGKGLEWVSAISGSGGSTYYADSVKGRFTISRDNSKNTLYLQMNSLRAEDTAVYYCAKKGTSYNWNDVHYYYYYYMDVWGKGTTVTVSSGGGGSGGGGSGGGGSEIVLTQSPGTLSLSPGERATLSCRASQSVSSSYLAWYQQKPGQAPRLLIYGASSRATGIPDRFSGSGSGTDFTLTISRLEPEDFAVYYCQQYGSSWTFGQGTKVEIKESKYGPPCPSCPIYIWAPLAGTCGVLLLSLVITLYCRRDQRLPPDAHKPPGGGSFRTPIQEEQADAHSTLAKIRVKFSRSADAPAYQQGQNQLYNELNLGRREEYDVLDKRRGRDPEMGGKPRRKNPQEGLYNELQKDKMAEAYSEIGMKGERRRGKGHDGLYQGLSTATKDTYDALHMQALPPR

SEQ ID NO: 1079 - protein, 451 aa, synthetic construct
  REGION 1..451: note = Synthetic
MALPVTALLLPLALLLHAARPQLQLQESGPGLVKPSETLSLTCTVSGGSISSSSYYWGWIRQPPGKGLEWIGSIYYSGSTYYNPSLKSRVTISVDTSKNQFSLKLSSVTAADTAVYYCTTGTTAYYYYYYMDVWGKGTTVTVSSGGGGSGGGGSGGGGSEIVLTQSPGTLSLSPGERATLSCRASQSVSSSYLAWYQQKPGQAPRLLIYGASSRATGIPDRFSGSGSGTDFTLTISRLEPEDFAVYYCQQYGSSWTFGQGTKVEIKESKYGPPCPSCPIYIWAPLAGTCGVLLLSLVITLYCRRDQRLPPDAHKPPGGGSFRTPIQEEQADAHSTLAKIRVKFSRSADAPAYQQGQNQLYNELNLGRREEYDVLDKRRGRDPEMGGKPRRKNPQEGLYNELQKDKMAEAYSEIGMKGERRRGKGHDGLYQGLSTATKDTYDALHMQALPPR

SEQ ID NO: 1080 - protein, 450 aa, synthetic construct
  REGION 1..450: note = Synthetic
MALPVTALLLPLALLLHAARPEVQLLESGGGLVQPGGSLRLSCAASGFTFSSYAMTWVRQAPGKGLEWVSAISGSGGSTYYADSVKGRFTISRDNSKNTLYLQMNSLRAEDTAVYYCARGGYNWHYYYYMDVWGKGTTVTVSSGGGGSGGGGSGGGGSEIVLTQSPGTLSLSPGERATLSCRASQSVSSSYLAWYQQKPGQAPRLLIYGASSRATGIPDRFSGSGSGTDFTLTISRLEPEDFAVYYCQQYGSSWTFGQGTKVEIKESKYGPPCPSCPIYIWAPLAGTCGVLLLSLVITLYCRRDQRLPPDAHKPPGGGSFRTPIQEEQADAHSTLAKIRVKFSRSADAPAYQQGQNQLYNELNLGRREEYDVLDKRRGRDPEMGGKPRRKNPQEGLYNELQKDKMAEAYSEIGMKGERRRGKGHDGLYQGLSTATKDTYDALHMQALPPR

SEQ ID NO: 1081 - protein, 454 aa, synthetic construct
  REGION 1..454: note = Synthetic
MALPVTALLLPLALLLHAARPQVQLVESGGGVVQPGRSLRLSCAASGFTFSSYDMHWVRQAPGKGLEWVSVIWYDGSNKKYGDSAKGRFTISRDNSKNTLDLQMNSLRAEDTAVYYCARGDNWNDEGGYYYYYMDVWGKGTTVTVSSGGGGSGGGGSGGGGSEIVLTQSPDFQSVTPKEKVTITCRASQNIGSSLHWYQQKPDQSPKLLIKFASQSISGVPSRFSGSGSGTDFTLTINSLEAEDAAAYYCHQSSSLPWTFGQGTKVEIKESKYGPPCPSCPIYIWAPLAGTCGVLLLSLVITLYCRRDQRLPPDAHKPPGGGSFRTPIQEEQADAHSTLAKIRVKFSRSADAPAYQQGQNQLYNELNLGRREEYDVLDKRRGRDPEMGGKPRRKNPQEGLYNELQKDKMAEAYSEIGMKGERRRGKGHDGLYQGLSTATKDTYDALHMQALPPR

SEQ ID NO: 1082 - protein, 454 aa, synthetic construct
  REGION 1..454: note = Synthetic
MALPVTALLLPLALLLHAARPQVQLVESGGGVVQPGRSLRLSCAASGFTFSSYDMHWVRQAPGKGLEWVSVIWYDGSNKKYGDSAKGRFTISRDNSKNTLDLQMNSLRAEDTAVYYCARGDNWNDEGGYYYYYMDVWGKGTTVTVSSGGGGSGGGGSGGGGSDIQMTQSPSSLSTSVGDRVTITCRASQGISNYLAWFQQKPGKAPKSLIYAASSLQSGVPSKFSGSGSGTDFSLTISSLQPEDFATYYCQQYNSYPITFGQGTRLEIKESKYGPPCPSCPIYIWAPLAGTCGVLLLSLVITLYCRRDQRLPPDAHKPPGGGSFRTPIQEEQADAHSTLAKIRVKFSRSADAPAYQQGQNQLYNELNLGRREEYDVLDKRRGRDPEMGGKPRRKNPQEGLYNELQKDKMAEAYSEIGMKGERRRGKGHDGLYQGLSTATKDTYDALHMQALPPR

SEQ ID NO: 1083 - protein, 451 aa, synthetic construct
  REGION 1..451: note = Synthetic
MALPVTALLLPLALLLHAARPQVQLVQSGAEVKKSGASVKVSCKASGYTLTSYGISWVRQAPGQGLEWMGWISAYNGNINYAQKFQGRVTMTTDTSTSTAYMELRSLRSDDTAVYYCVRDGDRYNWNHSYMDVWGKGTTVTVSSGGGGSGGGGSGGGGSEIVLTQSPDFQSVTPKEKVTITCRASQNIGSSLHWYQQKPDQSPKLLIKFASQSISGVPSRFSGSGSGTDFTLTINSLEAEDAAAYYCHQSSSLPWTFGQGTKVEIKESKYGPPCPSCPIYIWAPLAGTCGVLLLSLVITLYCRRDQRLPPDAHKPPGGGSFRTPIQEEQADAHSTLAKIRVKFSRSADAPAYQQGQNQLYNELNLGRREEYDVLDKRRGRDPEMGGKPRRKNPQEGLYNELQKDKMAEAYSEIGMKGERRRGKGHDGLYQGLSTATKDTYDALHMQALPPR

SEQ ID NO: 1084 - protein, 451 aa, synthetic construct
  REGION 1..451: note = Synthetic
MALPVTALLLPLALLLHAARPQVQLVQSGAEVKKSGASVKVSCKASGYTLTSYGISWVRQAPGQGLEWMGWISAYNGNINYAQKFQGRVTMTTDTSTSTAYMELRSLRSDDTAVYYCVRDGDRYNWNHSYMDVWGKGTTVTVSSGGGGSGGGGSGGGGSDIQMTQSPSSLSTSVGDRVTITCRASQGISNYLAWFQQKPGKAPKSLIYAASSLQSGVPSKFSGSGSGTDFSLTISSLQPEDFATYYCQQYNSYPITFGQGTRLEIKESKYGPPCPSCPIYIWAPLAGTCGVLLLSLVITLYCRRDQRLPPDAHKPPGGGSFRTPIQEEQADAHSTLAKIRVKFSRSADAPAYQQGQNQLYNELNLGRREEYDVLDKRRGRDPEMGGKPRRKNPQEGLYNELQKDKMAEAYSEIGMKGERRRGKGHDGLYQGLSTATKDTYDALHMQALPPR

SEQ ID NO: 1085 - protein, 450 aa, synthetic construct
  REGION 1..450: note = Synthetic
MALPVTALLLPLALLLHAARPEVQLLESGGDLVQPGGSLRLSCAASGFTFSTYAMTWVRQAPGKGLEWVSAISGTSGSTYYADSVKGRFTISRDNSKSTLYLHMNSLRTEDTAVYYCARGGYNWHYYYYMDVWGKGTTVTVSSGGGGSGGGGSGGGGSEIVLTQSPDFQSVTPKEKVTITCRASQSIGSSLHWYQQKPDQSPKLLIKYVSQSISGVPSRFSGSGSGTDFTLTINSLEAEDAAAYYCHQSSSLPWTFGQGTKVEIKESKYGPPCPSCPIYIWAPLAGTCGVLLLSLVITLYCRRDQRLPPDAHKPPGGGSFRTPIQEEQADAHSTLAKIRVKFSRSADAPAYQQGQNQLYNELNLGRREEYDVLDKRRGRDPEMGGKPRRKNPQEGLYNELQKDKMAEAYSEIGMKGERRRGKGHDGLYQGLSTATKDTYDALHMQALPPR

SEQ ID NO: 1086 - protein, 451 aa, synthetic construct
  REGION 1..451: note = Synthetic
MALPVTALLLPLALLLHAARPEVQLLESGGDLVQPGGSLRLSCAASGFTFSTYAMTWVRQAPGKGLEWVSAISGTSGSTYYADSVKGRFTISRDNSKSTLYLHMNSLRTEDTAVYYCARGGYNWHYYYYMDVWGKGTTVTVSSGGGGSGGGGSGGGGSEIVMTQSPATLSLSPGERATLSCRASQSVSSSYLSWYQQKPGLAPRLLIYGASTRATGIPARFSGSGSGTDFTLTISSLQPEDFAVYYCQQDYNLPPTFGQGTKVEIKESKYGPPCPSCPIYIWAPLAGTCGVLLLSLVITLYCRRDQRLPPDAHKPPGGGSFRTPIQEEQADAHSTLAKIRVKFSRSADAPAYQQGQNQLYNELNLGRREEYDVLDKRRGRDPEMGGKPRRKNPQEGLYNELQKDKMAEAYSEIGMKGERRRGKGHDGLYQGLSTATKDTYDALHMQALPPR

SEQ ID NO: 1087 - DNA, 1361 bp, synthetic construct
  misc_feature 1..1361: note = Synthetic
  source 1..1361: mol_type = other DNA
atggccttaccagtgaccgccttgctcctgccgctggccttgctgctccacgccgccaggccgcaggtgcagctggtggagtctgggggaggcgtggtccagcctgggaggtccctgagactctcctgtgcagcgtctggattcaccttcaataattatgacatgtactgggtccgccaggccccaggcaaggggctggagtgggtggcagttacatggtatgatggaagtaataaatactatgcagactccgtgaagggccgattcaccatctccagagacaattccaagaacacgctgtatctgcaaatgaacagcctgagagccgaggacacggctgtgtattactgtgcgagaggtgacaactggaatgacgaacaccactatttttactacatggacgtctggggcaaagggaccacggtcaccgtctcctcaggtggaggcggttcaggcggaggtggctctggcggtggcggatcggaaattgtgctgactcagtctccagactttcagtctgtgactccaaaggagaaagtcaccatcacctgccgggccagtcagagcattggtagtagcttacactggtaccagcagaaaccagatcagtctccaaagctcctcatcaagtttgcttcccagtccttctcaggggtcccctcgaggttcagtggcagtggatctgggacagatttcaccctcaccatccatagcctggaagctgaagatgctgcaacgtattactgtcatcagagtagtagtttaccgtggacgttcggccaagggaccaaggtggaaatcaaagagtccaaatatgggcccccatgcccatcatgcccaatctacatctgggcgcccttggccgggacttgtggggtccttctcctgtcactggttatcaccctttactgccggagggaccagaggctgccccccgatgcccacaagccccctgggggaggcagtttccggacccccatccaagaggagcaggccgacgcccactccaccctggccaagatcagagtgaagttcagcaggagcgcagacgcccccgcgtaccagcagggccagaaccagctctataacgagctcaatctaggacgaagagaggagtacgatgttttggacaagagacgtggccgggaccctgagatggggggaaagccgagaaggaagaaccctcaggaaggcctgtacaatgaactgcagaaagataagatggcggaggcctacagtgagattgggatgaaaggcgagcgccggaggggcaaggggcacgatggcctttaccagggtctcagtacagccaccaaggacacctacgacgcccttcacatgcaggccctgccccctcgcgg

SEQ ID NO: 1088 - DNA, 1361 bp, synthetic construct
  misc_feature 1..1361: note = Synthetic
  source 1..1361: mol_type = other DNA
atggccttaccagtgaccgccttgctcctgccgctggccttgctgctccacgccgccaggccgcaggtgcagctggtggagtctgggggaggcgtggtccagcctgggaggtccctgagactctcctgtgcagcgtctgggttcaccttcagtaactatgacatgcactgggtccgccaggccccaggcaaggggctggagtgggtgacaattatatggcatgatgcaagtaataaatattatttagactccgtgaagggccgattcaccatctccagagacaattccaagaacacgctgtatctgcaaatgaacagcctgagagccgaggacacggctgtgtattactgtgcgagaggtgacaactggaacgacgaacaccactacttctactacatggacgtctggggcaaagggaccacggtcaccgtctcctcaggtggaggcggttcaggcggaggtggctctggcggtggcggatcggaaattgtgctgactcagtctccagactttcagtctgtgactccaaaggagaaagtcaccatcacctgccgggccagtcagagcattggtagtagcttacactggtaccagcagaaaccagatcagtctccaaagctcctcatcaagtttgcttcccagtccttctcaggggtcccctcgaggttcagtggcagtggatctgggacagatttcaccctcaccatccatagcctggaagctgaagatgctgcaacgtattactgtcatcagagtagtagtttaccgtggacgttcggccaagggaccaaggtggaaatcaaagagtccaaatatgggcccccatgcccatcatgcccaatctacatctgggcgcccttggccgggacttgtggggtccttctcctgtcactggttatcaccctttactgccggagggaccagaggctgccccccgatgcccacaagccccctgggggaggcagtttccggacccccatccaagaggagcaggccgacgcccactccaccctggccaagatcagagtgaagttcagcaggagcgcagacgcccccgcgtaccagcagggccagaaccagctctataacgagctcaatctaggacgaagagaggagtacgatgttttggacaagagacgtggccgggaccctgagatggggggaaagccgagaaggaagaaccctcaggaaggcctgtacaatgaactgcagaaagataagatggcggaggcctacagtgagattgggatgaaaggcgagcgccggaggggcaaggggcacgatggcctttaccagggtctcagtacagccaccaaggacacctacgacgcccttcacatgcaggccctgccccctcgcgg

SEQ ID NO: 1089 - DNA, 1361 bp, synthetic construct
  misc_feature 1..1361: note = Synthetic
  source 1..1361: mol_type = other DNA
atggccttaccagtgaccgccttgctcctgccgctggccttgctgctccacgccgccaggccgcaggtgcagctggtggagtctgggggaggcgtggtccagcctgggaggtccctgagactctcctgtgcagcgtctgggttcaccttcagtaactatgacatgcactgggtccgccaggccccaggcaaggggctggagtgggtgacaattatatggcatgatggaagtaataaatattatttagactccgtgaagggccgattcaccatctccagagacaattccaagaacacgctgtatctgcaaatgaacagcctgagagccgaggacacggctgtgtattactgtgcgagaggtgacaactggaacgacgaacaccactacttctactacatggacgtctggggcaaagggaccacggtcaccgtctcctcaggtggaggcggttcaggcggaggtggctctggcggtggcggatcggaaattgtgctgactcagtctccagactttcagtctgtgactccaaaggagaaagtcaccatcacctgccgggccagtcagagcattggtagtagcttacactggtaccagcagaaaccagatcagtctccaaagctcctcatcaagtttgcttcccagtccttctcaggggtcccctcgaggttcagtggcagtggatctgggacagatttcaccctcaccatccatagcctggaagctgaagatgctgcaacgtattactgtcatcagagtagtagtttaccgtggacgttcggccaagggaccaaggtggaaatcaaagagtccaaatatgggcccccatgcccatcatgcccaatctacatctgggcgcccttggccgggacttgtggggtccttctcctgtcactggttatcaccctttactgccggagggaccagaggctgccccccgatgcccacaagccccctgggggaggcagtttccggacccccatccaagaggagcaggccgacgcccactccaccctggccaagatcagagtgaagttcagcaggagcgcagacgcccccgcgtaccagcagggccagaaccagctctataacgagctcaatctaggacgaagagaggagtacgatgttttggacaagagacgtggccgggaccctgagatggggggaaagccgagaaggaagaaccctcaggaaggcctgtacaatgaactgcagaaagataagatggcggaggcctacagtgagattgggatgaaaggcgagcgccggaggggcaaggggcacgatggcctttaccagggtctcagtacagccaccaaggacacctacgacgcccttcacatgcaggccctgccccctcgcgg

SEQ ID NO: 1090 - DNA, 1343 bp, synthetic construct
  misc_feature 1..1343: note = Synthetic
  source 1..1343: mol_type = other DNA
atggccttaccagtgaccgccttgctcctgccgctggccttgctgctccacgccgccaggccggaggtgcagctgctggagtctgggggaggcttggtacagcctggggggtccctgagactctcctgtgcagcctctggattcacctttagcatctatgccatgagctgggtccgccaggctccagggaaggggctggagtgggtctcagctattagtggtggtggtgataccacatactacgcagactccgtgaagggccggttcaccatctccagagacaattccaagaccacgctggatctgcaaatgaacagcctgagagccgaggacacggccgtatattactgtgcgaaacacactagctactacatggacgtctggggcaaagggaccacggtcaccgtctcctcaggtggaggcggttcaggcggaggtggctctggcggtggcggatcgcagactgtggtgacccaggagccatcgctctcagtgtcccctggagggacagtcacactcacttgtggcttgagctctggctcagtctctactagttactaccccagctggtaccagcagaccccaggccaggctccacgcacgctcatctacagcacaaatattcggtcttctggggtccctgatcgcttctctggctccatccttgggaacaaagctgccctcaccatcacgggggcccaggcagatgatgaatctgattattattgtaagctgtatatgggaagtggcattattttcggcagtggaaccaaggtcactgtcctagagtccaaatatgggcccccatgcccatcatgcccaatctacatctgggcgcccttggccgggacttgtggggtccttctcctgtcactggttatcaccctttactgccggagggaccagaggctgccccccgatgcccacaagccccctgggggaggcagtttccggacccccatccaagaggagcaggccgacgcccactccaccctggccaagatcagagtgaagttcagcaggagcgcagacgcccccgcgtaccagcagggccagaaccagctctataacgagctcaatctaggacgaagagaggagtacgatgttttggacaagagacgtggccgggaccctgagatggggggaaagccgagaaggaagaaccctcaggaaggcctgtacaatgaactgcagaaagataagatggcggaggcctacagtgagattgggatgaaaggcgagcgccggaggggcaaggggcacgatggcctttaccagggtctcagtacagccaccaaggacacctacgacgcccttcacatgcaggccctgccccctcgcgg

SEQ ID NO: 1091 - DNA, 1361 bp, synthetic construct
  misc_feature 1..1361: note = Synthetic
  source 1..1361: mol_type = other DNA
atggccttaccagtgaccgccttgctcctgccgctggccttgctgctccacgccgccaggccgcaggtgcagctggtggagtctgggggaggcgtggtccagcctgggaggtccctgagactctcctgtgcagcgtctggattcaccttcagtaactatgacaagcactgggtccgccaggccccaggcaaggggctggagtgggtggcagttatatggtatgatggaagtaataagtactatgcagactccgtgaagggccgattcaccatttccagagacaattccaagaacacgctgtatctacaaatgaacagcctgagagccgaggacacggctatgtattactgtgcgagaggtgacaactggaacgacgaacaccactacttctactacatggacgtctggggcaaagggaccacggtcaccgtctcctcaggtggaggcggttcaggcggaggtggctctggcggtggcggatcggaaattgtgctgactcagtctccagactttcagtctgtgactccaaaggagaaagtcaccatcacctgccgggccagtcagagcattggtagtagcttacactggtaccagcagaaaccagatcagtctccaaagctcctcatcaagtttgcttcccagtccttctcaggggtcccctcgaggttcagtggcagtggatctgggacagatttcaccctcaccatccatagcctggaagctgaagatgctgcaacgtattactgtcatcagagtagtagtttaccgtggacgttcggccaagggaccaaggtggaaatcaaagagtccaaatatgggcccccatgcccatcatgcccaatctacatctgggcgcccttggccgggacttgtggggtccttctcctgtcactggttatcaccctttactgccggagggaccagaggctgccccccgatgcccacaagccccctgggggaggcagtttccggacccccatccaagaggagcaggccgacgcccactccaccctggccaagatcagagtgaagttcagcaggagcgcagacgcccccgcgtaccagcagggccagaaccagctctataacgagctcaatctaggacgaagagaggagtacgatgttttggacaagagacgtggccgggaccctgagatggggggaaagccgagaaggaagaaccctcaggaaggcctgtacaatgaactgcagaaagataagatggcggaggcctacagtgagattgggatgaaaggcgagcgccggaggggcaaggggcacgatggcctttaccagggtctcagtacagccaccaaggacacctacgacgcccttcacatgcaggccctgccccctcgcgg

SEQ ID NO: 1092 - DNA, 1355 bp, synthetic construct
  misc_feature 1..1355: note = Synthetic
  source 1..1355: mol_type = other DNA
atggccttaccagtgaccgccttgctcctgccgctggccttgctgctccacgccgccaggccgcaggttcagttggtacagtctggagctgaggtgaagaagcctggggcctcagtgaaggtctcctgtaaggcttctggttacacctttaccaactatggtttcagctgggtgcgacaggcccctggacaagggcttgactggatgggatggatcagcgcttacaatggttacacaaattatacacagaaactccagggcagagtcaccatgaccactgacacatccacgaccacagcctacatggagctgaggagcctgagatctgacgacacggccgtctattactgtgcgagaagaggactactctactactactactccatggacgtctggggcaaagggaccacggtcaccgtctcctcaggtggaggcggttcaggcggaggtggctctggcggtggcggatcggaaattgtgttgacgcagtctccagccaccctgtctttgtctccaggggaaagagccaccctctcctgcggggccagtcagagtgtttacaacagttacttagcctggtaccagcagaaacctggcctggcgcccaggctcctcatctatgatgcatccctcagggccactggcgtcccagacaggttcagtggcagtgggtctgggacagacttcactctcaccatcagcacactggagcctgaagattttgcagtgtattactgtcagcagtatggtggctcacccatgtacacttttggccaggggaccaagctggagatcaaagagtccaaatatgggcccccatgcccatcatgcccaatctacatctgggcgcccttggccgggacttgtggggtccttctcctgtcactggttatcaccctttactgccggagggaccagaggctgccccccgatgcccacaagccccctgggggaggcagtttccggacccccatccaagaggagcaggccgacgcccactccaccctggccaagatcagagtgaagttcagcaggagcgcagacgcccccgcgtaccagcagggccagaaccagctctataacgagctcaatctaggacgaagagaggagtacgatgttttggacaagagacgtggccgggaccctgagatggggggaaagccgagaaggaagaaccctcaggaaggcctgtacaatgaactgcagaaagataagatggcggaggcctacagtgagattgggatgaaaggcgagcgccggaggggcaaggggcacgatggcctttaccagggtctcagtacagccaccaaggacacctacgacgcccttcacatgcaggccctgccccctcgcgg

SEQ ID NO: 1093 - DNA, 1343 bp, synthetic construct
  misc_feature 1..1343: note = Synthetic
  source 1..1343: mol_type = other DNA
atggccttaccagtgaccgccttgctcctgccgctggccttgctgctccacgccgccaggccggaggtgcagctgctggagtctgggggaggcctggtacagcctggggggtccctgagactctcctgtacagcctctggattcacctttagcagctttgccatgagctgggtccgccaggctccagggaaggggctggagtgggtctcagctatgagtggtagtggtgataccacatactacgcagactccgtgaagggccggttcaccatctcccgagacaattccaagaccacgctgtatctgcaaatgaacagcctgagagccgaggacacggccgtatattcctgtgcgaagcacactacctactacatggacgtctggggcaaagggaccacggtcaccgtctcctcaggtggaggcggttcaggcggaggtggctctggcggtggcggatcgcagactgtggtgacccaggagccatcgctctcagtgtcccctggagggacagtcacactcacttgtggcttgagctctggctcagtctctactagtgactaccccagctggtaccagcagaccccaggccaggctccacgcacgctcatctacagaacaaacactcgctcttctggggtccctgatcgcttctctggctccatccttgggaacaaagctgccctcaccatcacgggggcccaggcagatgatgaatctgattattactgtgtgctgtatatggatagtggcattattttcggcagtggaaccaaggtcactgtcctagagtccaaatatgggcccccatgcccatcatgcccaatctacatctgggcgcccttggccgggacttgtggggtccttctcctgtcactggttatcaccctttactgccggagggaccagaggctgccccccgatgcccacaagccccctgggggaggcagtttccggacccccatccaagaggagcaggccgacgcccactccaccctggccaagatcagagtgaagttcagcaggagcgcagacgcccccgcgtaccagcagggccagaaccagctctataacgagctcaatctaggacgaagagaggagtacgatgttttggacaagagacgtggccgggaccctgagatggggggaaagccgagaaggaagaaccctcaggaaggcctgtacaatgaactgcagaaagataagatggcggaggcctacagtgagattgggatgaaaggcgagcgccggaggggcaaggggcacgatggcctttaccagggtctcagtacagccaccaaggacacctacgacgcccttcacatgcaggccctgccccctcgcgg

SEQ ID NO: 1094 - DNA, 1343 bp, synthetic construct
  misc_feature 1..1343: note = Synthetic
  source 1..1343: mol_type = other DNA
atggccttaccagtgaccgccttgctcctgccgctggccttgctgctccacgccgccaggccggaggtgcagctgctggagtctgggggaggcttggtacagcctggggggtccctgagactctcctgtgcagcctctggattcacctttaacacctatgccatgagctgggtccgccaggctccagggaaggggctggagtgggtctcagctatgagtggtagtggtgataccacatactacgcagactccgtgaagggccggttcaccatctccagagacaattccaagaccactctgtatctgcaaatgaacagcctgagagccgaggacacggccgtatattcctgtgcgaaacacacttcctactacatggacgtctggggcaaagggaccacggtcaccgtctcctcaggtggaggcggttcaggcggaggtggctctggcggtggcggatcgcagactgtggtgacccaggagccatcgctctcagtgtcccctggagggacagtcacactcacttgtggcttgagctctggctcagtctctactagtgactaccccagttggtaccagcagaccccaggccaggctccacgcacgctcatctacagaacaaacactcgctcttctggggtccctgatcgcttctctggctccatccttgggaacaaagctgccctcaccatcacgggggcccaggcagatgatgaatctgattattactgtgtgctgtatatgggtagtggcattattttcggcagtggaaccaaggtcactgtcctagagtccaaatatgggcccccatgcccatcatgcccaatctacatctgggcgcccttggccgggacttgtggggtccttctcctgtcactggttatcaccctttactgccggagggaccagaggctgccccccgatgcccacaagccccctgggggaggcagtttccggacccccatccaagaggagcaggccgacgcccactccaccctggccaagatcagagtgaagttcagcaggagcgcagacgcccccgcgtaccagcagggccagaaccagctctataacgagctcaatctaggacgaagagaggagtacgatgttttggacaagagacgtggccgggaccctgagatggggggaaagccgagaaggaagaaccctcaggaaggcctgtacaatgaactgcagaaagataagatggcggaggcctacagtgagattgggatgaaaggcgagcgccggaggggcaaggggcacgatggcctttaccagggtctcagtacagccaccaaggacacctacgacgcccttcacatgcaggccctgccccctcgcgg

SEQ ID NO: 1095 - DNA, 1343 bp, synthetic construct
  misc_feature 1..1343: note = Synthetic
  source 1..1343: mol_type = other DNA
atggccttaccagtgaccgccttgctcctgccgctggccttgctgctccacgccgccaggccggaggtccaattattggagtctgggggagacttggtacagcctggggggtccctgagactctcctgtgcagcctctggattcacctttagcacctatgccatgagctgggtccgccaggctccagggaaggggctggaatgggtctcagctattagtggtagtggtgaaaacatatactacgcagactccgtgaagggccggttcaccatctccagagacaattccaagaacacgctatttctacaaatgaacagcctgagagccgaggacacggccgtatattactgtgcgaaacacactagctattacatggacgtctggggcaaagggaccacggtcaccgtctcctcaggtggaggcggttcaggcggaggtggctctggcggtggcggatcgcagactgtggtgacccaggagccatcgttctcagtgtcccctggagggacagtcacactcacttgtggcttatactctgactcagtctctactagttactaccccagctggtaccagcagaccccaggccaggctccacgcacgctcatctacaacacaaacactcgctcttctggggtccctgatcgcttctctggctccatccttgggaacaaagctgccctcaccatcacgggggcccaggcagatgatgaatctgattattactgtgtactatatatggttagtggcattgttttcggcagtggaaccaaggtcactgtcctggagtccaaatatgggcccccatgcccatcatgcccaatctacatctgggcgcccttggccgggacttgtggggtccttctcctgtcactggttatcaccctttactgccggagggaccagaggctgccccccgatgcccacaagccccctgggggaggcagtttccggacccccatccaagaggagcaggccgacgcccactccaccctggccaagatcagagtgaagttcagcaggagcgcagacgcccccgcgtaccagcagggccagaaccagctctataacgagctcaatctaggacgaagagaggagtacgatgttttggacaagagacgtggccgggaccctgagatggggggaaagccgagaaggaagaaccctcaggaaggcctgtacaatgaactgcagaaagataagatggcggaggcctacagtgagattgggatgaaaggcgagcgccggaggggcaaggggcacgatggcctttaccagggtctcagtacagccaccaaggacacctacgacgcccttcacatgcaggccctgccccctcgcgg

SEQ ID NO: 1096 - DNA, 1361 bp, synthetic construct
  misc_feature 1..1361: note = Synthetic
  source 1..1361: mol_type = other DNA
atggccttaccagtgaccgccttgctcctgccgctggccttgctgctccacgccgccaggccgcaggtgcagctggtggagtctgggggaggcgtggtccagcctgggaggtccctgagactctcctgtgcagcgtctggattcaccttcagtagttatggcatgcactgggtccgccaggctccaggcaaggggctggagtgggtggcagttatatggtatgatggaattaataaatactatgcagactccgtgaagggccgattcaccatctccagagacaattccaagaacacgctgtatctgcaaatgaacagcctgagagccgaagacacggctgtgtattactgtgcgagagaacggctggaacgaaggtactactactacatggacgtctggggcaaagggaccacggtcaccgtctcctcaggtggaggcggttcaggcggaggtggctctggcggtggcggatcgcagactgtggtgacccaggagccatcgttctcagtgtcccctggagggacagtcacactcacttgtggcttgagctctggctcagtctctactagttactaccccggctggtaccagcagaccccaggccaggctccacgcacgctcatctacagcacaaacactcgctcttctggggtccctgatcgcttctctggctccatccttgggaacaaagctgccctcaccatcacgggggcccaggcagatgatgaatctgattattactgtgtgctatatatgggtagtggcatgtttattttcggcagtggaaccaaggtcactgtcctagagtccaaatatgggcccccatgcccatcatgcccaatctacatctgggcgcccttggccgggacttgtggggtccttctcctgtcactggttatcaccctttactgccggagggaccagaggctgccccccgatgcccacaagccccctgggggaggcagtttccggacccccatccaagaggagcaggccgacgcccactccaccctggccaagatcagagtgaagttcagcaggagcgcagacgcccccgcgtaccagcagggccagaaccagctctataacgagctcaatctaggacgaagagaggagtacgatgttttggacaagagacgtggccgggaccctgagatggggggaaagccgagaaggaagaaccctcaggaaggcctgtacaatgaactgcagaaagataagatggcggaggcctacagtgagattgggatgaaaggcgagcgccggaggggcaaggggcacgatggcctttaccagggtctcagtacagccaccaaggacacctacgacgcccttcacatgcaggccctgccccctcgcgg

SEQ ID NO: 1097 - DNA, 1343 bp, synthetic construct
  misc_feature 1..1343: note = Synthetic
  source 1..1343: mol_type = other DNA
atggccttaccagtgaccgccttgctcctgccgctggccttgctgctccacgccgccaggccggaggtgcagttgttggagtctgggggaggcttggtacagcctggggggtccctgagactctcctgtgcagcctctggattcacctttagcagctttgccatgagctgggtccgccaggctccagggaaggggctggaatgggtctcagctgttagtggtagtggtgatgacacatactacgcagactccgtgaagggccggttcaccatctccagagacaattccaagaacacgctgtatctgcaaatgaacagcctgagagccgaggacacggccgtatattactgtgcgaaacacactagctactacctggacgtctggggcaaagggaccacggtcaccgtctcctcaggtggaggcggttcaggcggaggtggctctggcggtggcggatcgcagactgtggtgacccaggagccatcgttctcagtgtcccctggagggacagtcacactcacttgtgccttgagctctgactcagtctctactagttactttcccagctggtaccggcagaccccaggccaggctccacgcacgctcatctacaacacaaacactcgctcttctggggtccctgatcgcttctctggctccatccttgggaacaaagctgccctcaccatcacgggggcccaggcagatgatgaatctgattattactgtgtgctatatatgggtagtggcattattttcggcagtggaaccaaggtcactgtcctagagtccaaatatgggcccccatgcccatcatgcccaatctacatctgggcgcccttggccgggacttgtggggtccttctcctgtcactggttatcaccctttactgccggagggaccagaggctgccccccgatgcccacaagccccctgggggaggcagtttccggacccccatccaagaggagcaggccgacgcccactccaccctggccaagatcagagtgaagttcagcaggagcgcagacgcccccgcgtaccagcagggccagaaccagctctataacgagctcaatctaggacgaagagaggagtacgatgttttggacaagagacgtggccgggaccctgagatggggggaaagccgagaaggaagaaccctcaggaaggcctgtacaatgaactgcagaaagataagatggcggaggcctacagtgagattgggatgaaaggcgagcgccggaggggcaaggggcacgatggcctttaccagggtctcagtacagccaccaaggacacctacgacgcccttcacatgcaggccctgccccctcgcgg

SEQ ID NO: 1098 - DNA, 1361 bp, synthetic construct
  misc_feature 1..1361: note = Synthetic
  source 1..1361: mol_type = other DNA
atggccttaccagtgaccgccttgctcctgccgctggccttgctgctccacgccgccaggccgcaggtgcagctggtggagtctgggggaggcgtggtccagcctgggaggtccctgagactctcctgtgcagcgtctggattcaacttcagtacctttgacatacactgggtccgccaggctccaggcaaggggctggagtgggtggcacttatatggtatgatggaagttataaatactatgcagactccgtgaagggccgattcaccatttccagagacaattccaagaacacgctggatctgcgaatgaacagcctgagagccgaggacacggctgtgtattactgtgcgcgaaatgacaactggaacgacgaacactactaccactattacatggacgtctggggcaaagggaccacggtcaccgtctcctcaggtggaggcggttcaggcggaggtggctctggcggtggcggatcggaaattgtcctgactcagtctccagactttcagtctgtgactccaaaggagaaagtcaccatcacctgccgggccagtcagagtattggtagtagcttacactggtaccagcagaaaccagatcagtctccaaagctcctcatcaagtttgcttcccagtccttctcaggggtcccctcgaggttcagtggcagtggatctgggacagatttcaccctcaccatcaatagcctggaagctgaagatgctgcaacgtatttctgtcatcagagtagtagtttaccgtggacgttcggccaagggaccaaggtggaaatcaaagagtccaaatatgggcccccatgcccatcatgcccaatctacatctgggcgcccttggccgggacttgtggggtccttctcctgtcactggttatcaccctttactgccggagggaccagaggctgccccccgatgcccacaagccccctgggggaggcagtttccggacccccatccaagaggagcaggccgacgcccactccaccctggccaagatcagagtgaagttcagcaggagcgcagacgcccccgcgtaccagcagggccagaaccagctctataacgagctcaatctaggacgaagagaggagtacgatgttttggacaagagacgtggccgggaccctgagatggggggaaagccgagaaggaagaaccctcaggaaggcctgtacaatgaactgcagaaagataagatggcggaggcctacagtgagattgggatgaaaggcgagcgccggaggggcaaggggcacgatggcctttaccagggtctcagtacagccaccaaggacacctacgacgcccttcacatgcaggccctgccccctcgcgg

SEQ ID NO: 1099 - DNA, 1376 bp, synthetic construct
  misc_feature 1..1376: note = Synthetic
  source 1..1376: mol_type = other DNA
atggccttaccagtgaccgccttgctcctgccgctggccttgctgctccacgccgccaggccggaagtgcacctgttggagtctgggggaggcttggtccagcctggggggtccctgagactctcctgtgcggcctctggattcacctttagcagctatgccatgaactgggtccgccaggctccagggaaggggctggagtgggtctcttctattagtggtagtggtagtagctcatactacgcagactccgtgaagggccggttcaccatctccagagacaattccaagaacacgctgtatctgcaaatgaacagcctgagagccgaggacacggccgtatattactgtgcgtctcgtggattcaactcccagtatcctcccggatactactactactacatggacgtctggggcaaagggaccacggtcaccgtctcctcaggtggaggcggttcaggcggaggtggctctggcggtggcggatcgcagactgtggtgacccaggagccatcgttctcagtgtcccctggagggacagtcacactcacttgtggcttgagctctggctcagtctccactagttacttccccagctggtaccagcagacccccggccaggctccacgcacgctcatctacatcacaaacactcgctcttcaggggtccctgatcgcttctctggctccattattgggaacaaagctgccctcaccatcacgggggcccaggcagatgatgaatctgattatttctgtgtactatatatgggtagtggcacttgggtgttcggtggaggaaccaagctgactgtcctagagtccaaatatgggcccccatgcccatcatgcccaatctacatctgggcgcccttggccgggacttgtggggtccttctcctgtcactggttatcaccctttactgccggagggaccagaggctgccccccgatgcccacaagccccctgggggaggcagtttccggacccccatccaagaggagcaggccgacgcccactccaccctggccaagatcagagtgaagttcagcaggagcgcagacgcccccgcgtaccagcagggccagaaccagctctataacgagctcaatctaggacgaagagaggagtacgatgttttggacaagagacgtggccgggaccctgagatggggggaaagccgagaaggaagaaccctcaggaaggcctgtacaatgaactgcagaaagataagatggcggaggcctacagtgagattgggatgaaaggcgagcgccggaggggcaaggggcacgatggcctttaccagggtctcagtacagccaccaaggacacctacgacgcccttcacatgcaggccctgccccctcgcgg

SEQ ID NO: 1100 - DNA, 1337 bp, synthetic construct
  misc_feature 1..1337: note = Synthetic
  source 1..1337: mol_type = other DNA
atggccttaccagtgaccgccttgctcctgccgctggccttgctgctccacgccgccaggccggaggtgcagctgttggagtctgggggaggcttggtacagcctggggggtccctgagactctcctgtgcagcctctggattcaccttcagcaactatgccatgacctgggtccgccaggctccagggaaggggctggagtgggtctcagctattagtggtagtggtattggcacatactacgcagactccgtgcagggccggttcaccacctccagagacaattccaagaacacgctgtatctgcaaatgaacagcctgagagccgaggacacggccgtttattactgtgcgaaaggggggtacaactggaaggacgtctggggcaaagggaccacggtcaccgtctcctcaggtggaggcggttcaggcggaggtggctctggcggtggcggatcggaaattgtgctgactcagtctccagactttcagtctgtgactccaaaggagaaagtcaccatcacctgccgggccagtcagagcattggtagtagcttacactggtaccagcagaaaccagatcagtctccaaagctcctcatcaagtttgcttcccagtccttctcaggggtcccctcgaggttcagtggcagtggatctgggacagatttcaccctcaccatccatagcctggaagctgaagatgctgcaacgtattactgtcatcagagtagtagtttaccgtggacgttcggccaagggaccaaggtggaaatcaaagagtccaaatatgggcccccatgcccatcatgcccaatctacatctgggcgcccttggccgggacttgtggggtccttctcctgtcactggttatcaccctttactgccggagggaccagaggctgccccccgatgcccacaagccccctgggggaggcagtttccggacccccatccaagaggagcaggccgacgcccactccaccctggccaagatcagagtgaagttcagcaggagcgcagacgcccccgcgtaccagcagggccagaaccagctctataacgagctcaatctaggacgaagagaggagtacgatgttttggacaagagacgtggccgggaccctgagatggggggaaagccgagaaggaagaaccctcaggaaggcctgtacaatgaactgcagaaagataagatggcggaggcctacagtgagattgggatgaaaggcgagcgccggaggggcaaggggcacgatggcctttaccagggtctcagtacagccaccaaggacacctacgacgcccttcacatgcaggccctgccccctcgcgg

SEQ ID NO: 1101 - DNA, 1361 bp, synthetic construct
  misc_feature 1..1361: note = Synthetic
  source 1..1361: mol_type = other DNA
atggccttaccagtgaccgccttgctcctgccgctggccttgctgctccacgccgccaggccgcaggtgcagctggtggagtctgggggaggcgtggtccagcctgggaggtccctgagactctcctgtgcagcgtctgggttcaccttcactaactatgacatgcactgggtccgccaggccccaggcaaggggctggagtgggtgacaattatatggcatgatggaagtaataaatattatttagactccgtgaggggccgattcaccatctccagagacaattccaagaacacgctgtatctgcaaatgaacagcctgagagccgaggacacggctgtgtattactgtgcgagaggtgacaactggaacgacgaacaccactacttctactacatggacgtctggggcaaagggaccacggtcaccgtctcctcaggtggaggcggttcaggcggaggtggctctggcggtggcggatcggaaattgtgctgactcagtctccagactttcagtctgtgactccaaaggagaaagtcaccatcacctgccgggccagtcagagcattggtagtagcttacactggtaccagcagaaaccagatcagtctccaaagctcctcatcaagtttgcttcccagtccttctcaggggtcccctcgaggttcagtggcagtggatctgggacagatttcaccctcaccatccatagcctggaagctgaagatgctgcaacgtattactgtcatcagagtagtagtttaccgtggacgttcggccaagggaccaaggtggaaatcaaagagtccaaatatgggcccccatgcccatcatgcccaatctacatctgggcgcccttggccgggacttgtggggtccttctcctgtcactggttatcaccctttactgccggagggaccagaggctgccccccgatgcccacaagccccctgggggaggcagtttccggacccccatccaagaggagcaggccgacgcccactccaccctggccaagatcagagtgaagttcagcaggagcgcagacgcccccgcgtaccagcagggccagaaccagctctataacgagctcaatctaggacgaagagaggagtacgatgttttggacaagagacgtggccgggaccctgagatggggggaaagccgagaaggaagaaccctcaggaaggcctgtacaatgaactgcagaaagataagatggcggaggcctacagtgagattgggatgaaaggcgagcgccggaggggcaaggggcacgatggcctttaccagggtctcagtacagccaccaaggacacctacgacgcccttcacatgcaggccctgccccctcgcgg

SEQ ID NO: 1102 - DNA, 1361 bp, synthetic construct
  misc_feature 1..1361: note = Synthetic
  source 1..1361: mol_type = other DNA
atggccttaccagtgaccgccttgctcctgccgctggccttgctgctccacgccgccaggccgcaggtgcagctggtggagtctgggggaggcgtggtccagcctgggaggtccctgagactctcctgtgcagcgtctgggttcaccttcagtaactatgacatgcactgggtccgccaggccccaggcaaggggctggagtgggtgacaattatatggcatgatggaagtaataaatattatttagactccgtgaagggccgattcaccatctccagagacaattccaagaacacgctgtatctgcaaatgaacagcctgagagccgaggacacggctgtgtattactgtgcgagaggtgacaactggaacgacgaacaccactacttctactacatggacgtctggggcaaagggaccacggtcaccgtctcctcaggtggaggcggttcaggcggaggtggctctggcggtggcggatcggaaattgtgttgacacagtctccagccaccctgtctttgtctccaggggaaagagccaccctctcctgcagggccagtcagagtgttagcagctccttagcctggtaccaacagaaacctggccaggctccccggctcctcatctatgatgcatccaacagggccactggcatcccagccaggttcagtggcagtgggtctgggacagacttcactctcaccatcagcagcctagagcctgaagattttgcagtttattactgtcagcagcgtagcaactggcctctcactttcggcggagggaccaaggtggagatcaaagagtccaaatatgggcccccatgcccatcatgcccaatctacatctgggcgcccttggccgggacttgtggggtccttctcctgtcactggttatcaccctttactgccggagggaccagaggctgccccccgatgcccacaagccccctgggggaggcagtttccggacccccatccaagaggagcaggccgacgcccactccaccctggccaagatcagagtgaagttcagcaggagcgcagacgcccccgcgtaccagcagggccagaaccagctctataacgagctcaatctaggacgaagagaggagtacgatgttttggacaagagacgtggccgggaccctgagatggggggaaagccgagaaggaagaaccctcaggaaggcctgtacaatgaactgcagaaagataagatggcggaggcctacagtgagattgggatgaaaggcgagcgccggaggggcaaggggcacgatggcctttaccagggtctcagtacagccaccaaggacacctacgacgcccttcacatgcaggccctgccccctcgcgg

SEQ ID NO: 1103 - DNA, 1349 bp, synthetic construct
  misc_feature 1..1349: note = Synthetic
  source 1..1349: mol_type = other DNA
atggccttaccagtgaccgccttgctcctgccgctggccttgctgctccacgccgccaggccggaggtgcagctggtggagtctgggggaggtgtggtacggcctggggggtccctgagactctcctgtgcagcctctggattcacctttgatgattatggcatgagctgggtccgccaagctccagggaaggggctggagtgggtctctggtattaattggaatggtggtagcacaggttatgtagactctgtgaagggccgattcaccatctccagagacaacgccaagaactccctgtatctgcaaatgaacagtctgagagccgaggacacggccttgtatcactgtgcgagaccagtaactacggactactactactacatggacgtctggggcaaagggaccacggtcaccgtctcctcaggtggaggcggttcaggcggaggtggctctggcggtggcggatcggaaattgtgttgacgcagtctccaggcaccctgtctttgtctccaggggaaagagccaccctctcctgcagggccagtcagagtgttagcagcagctacttagcctggtaccagcagaaacctggccaggctcccaggctcctcatctatggtgcatccagcagggccactggcatcccagacaggttcagtggcagtgggtctgggacagacttcactctcaccatcagcagactggagcctgaagattttgcagtgtattactgtcagcagtatggtagctcgtggacgttcggccaagggaccaaggtggaaatcaaagagtccaaatatgggcccccatgcccatcatgcccaatctacatctgggcgcccttggccgggacttgtggggtccttctcctgtcactggttatcaccctttactgccggagggaccagaggctgccccccgatgcccacaagccccctgggggaggcagtttccggacccccatccaagaggagcaggccgacgcccactccaccctggccaagatcagagtgaagttcagcaggagcgcagacgcccccgcgtaccagcagggccagaaccagctctataacgagctcaatctaggacgaagagaggagtacgatgttttggacaagagacgtggccgggaccctgagatggggggaaagccgagaaggaagaaccctcaggaaggcctgtacaatgaactgcagaaagataagatggcggaggcctacagtgagattgggatgaaaggcgagcgccggaggggcaaggggcacgatggcctttaccagggtctcagtacagccaccaaggacacctacgacgcccttcacatgcaggccctgccccctcgcgg

SEQ ID NO: 1104 - DNA, 1373 bp, synthetic construct
  misc_feature 1..1373: note = Synthetic
  source 1..1373: mol_type = other DNA
atggccttaccagtgaccgccttgctcctgccgctggccttgctgctccacgccgccaggccggaggtgcagctgttggagtctgggggaggcttggtacagcctggggggtccctgagactctcctgtgcagcctctggattcacctttagcagctatgccatgagctgggtccgccaggctccagggaaggggctggagtgggtctcagctattagtggtagtggtggtagcacatactacgcagactccgtgaagggccggttcaccatctccagagacaattccaagaacacgctgtatctgcaaatgaacagcctgagagccgaggacacggccgtatattactgtgcgaaaaaggggacgtcgtacaactggaacgacgtccattactactactactactacatggacgtctggggcaaagggaccacggtcaccgtctcctcaggtggaggcggttcaggcggaggtggctctggcggtggcggatcggaaattgtgttgacgcagtctccaggcaccctgtctttgtctccaggggaaagagccaccctctcctgcagggccagtcagagtgttagcagcagctacttagcctggtaccagcagaaacctggccaggctcccaggctcctcatctatggtgcatccagcagggccactggcatcccagacaggttcagtggcagtgggtctgggacagacttcactctcaccatcagcagactggagcctgaagattttgcagtgtattactgtcagcagtatggtagctcgtggacgttcggccaagggaccaaggtggaaatcaaagagtccaaatatgggcccccatgcccatcatgcccaatctacatctgggcgcccttggccgggacttgtggggtccttctcctgtcactggttatcaccctttactgccggagggaccagaggctgccccccgatgcccacaagccccctgggggaggcagtttccggacccccatccaagaggagcaggccgacgcccactccaccctggccaagatcagagtgaagttcagcaggagcgcagacgcccccgcgtaccagcagggccagaaccagctctataacgagctcaatctaggacgaagagaggagtacgatgttttggacaagagacgtggccgggaccctgagatggggggaaagccgagaaggaagaaccctcaggaaggcctgtacaatgaactgcagaaagataagatggcggaggcctacagtgagattgggatgaaaggcgagcgccggaggggcaaggggcacgatggcctttaccagggtctcagtacagccaccaaggacacctacgacgcccttcacatgcaggccctgccccctcgcgg

SEQ ID NO: 1105 - DNA, 1355 bp, synthetic construct
  misc_feature 1..1355: note = Synthetic
  source 1..1355: mol_type = other DNA
atggccttaccagtgaccgccttgctcctgccgctggccttgctgctccacgccgccaggccgcagctgcagctgcaggagtcgggcccaggactggtgaagccttcggagaccctgtccctcacctgcactgtctctggtggctccatcagcagtagtagttactactggggctggatccgccagcccccagggaaggggctggagtggattgggagtatctattatagtgggagcacctactacaacccgtccctcaagagtcgagtcaccatatccgtagacacgtccaagaaccagttctccctgaagctgagctctgtgaccgccgcagacacggctgtgtattactgcacaactggaacgacggcttactactactactactacatggacgtctggggcaaagggaccacggtcaccgtctcctcaggtggaggcggttcaggcggaggtggctctggcggtggcggatcggaaattgtgttgacgcagtctccaggcaccctgtctttgtctccaggggaaagagccaccctctcctgcagggccagtcagagtgttagcagcagctacttagcctggtaccagcagaaacctggccaggctcccaggctcctcatctatggtgcatccagcagggccactggcatcccagacaggttcagtggcagtgggtctgggacagacttcactctcaccatcagcagactggagcctgaagattttgcagtgtattactgtcagcagtatggtagctcgtggacgttcggccaagggaccaaggtggaaatcaaagagtccaaatatgggcccccatgcccatcatgcccaatctacatctgggcgcccttggccgggacttgtggggtccttctcctgtcactggttatcaccctttactgccggagggaccagaggctgccccccgatgcccacaagccccctgggggaggcagtttccggacccccatccaagaggagcaggccgacgcccactccaccctggccaagatcagagtgaagttcagcaggagcgcagacgcccccgcgtaccagcagggccagaaccagctctataacgagctcaatctaggacgaagagaggagtacgatgttttggacaagagacgtggccgggaccctgagatggggggaaagccgagaaggaagaaccctcaggaaggcctgtacaatgaactgcagaaagataagatggcggaggcctacagtgagattgggatgaaaggcgagcgccggaggggcaaggggcacgatggcctttaccagggtctcagtacagccaccaaggacacctacgacgcccttcacatgcaggccctgccccctcgcgg

SEQ ID NO: 1106 - DNA, 1352 bp, synthetic construct
  misc_feature 1..1352: note = Synthetic
  source 1..1352: mol_type = other DNA
atggccttaccagtgaccgccttgctcctgccgctggccttgctgctccacgccgccaggccggaggtgcagctgttggagtctgggggaggcttggtgcagcctggggggtccctgagactctcctgtgcagcctctggattcacctttagcagctatgccatgacctgggtccgccaggctccagggaaggggctggagtgggtctcagctattagtggtagtggtggtagcacatactacgcagactccgtgaagggccggttcaccatctccagagacaattccaagaacacgctgtatctgcaaatgaacagcctgagagccgaggacacggccgtatattactgtgcgagaggcgggtataactggcactactactactacatggacgtctggggcaaagggaccacggtcaccgtctcctcaggtggaggcggttcaggcggaggtggctctggcggtggcggatcggaaattgtgttgacgcagtctccaggcaccctgtctttgtctccaggggaaagagccaccctctcctgcagggccagtcagagtgttagcagcagctacttagcctggtaccagcagaaacctggccaggctcccaggctcctcatctatggtgcatccagcagggccactggcatcccagacaggttcagtggcagtgggtctgggacagacttcactctcaccatcagcagactggagcctgaagattttgcagtgtattactgtcagcagtatggtagctcgtggacgttcggccaagggaccaaggtggaaatcaaagagtccaaatatgggcccccatgcccatcatgcccaatctacatctgggcgcccttggccgggacttgtggggtccttctcctgtcactggttatcaccctttactgccggagggaccagaggctgccccccgatgcccacaagccccctgggggaggcagtttccggacccccatccaagaggagcaggccgacgcccactccaccctggccaagatcagagtgaagttcagcaggagcgcagacgcccccgcgtaccagcagggccagaaccagctctataacgagctcaatctaggacgaagagaggagtacgatgttttggacaagagacgtggccgggaccctgagatggggggaaagccgagaaggaagaaccctcaggaaggcctgtacaatgaactgcagaaagataagatggcggaggcctacagtgagattgggatgaaaggcgagcgccggaggggcaaggggcacgatggcctttaccagggtctcagtacagccaccaaggacacctacgacgcccttcacatgcaggccctgccccctcgcgg

SEQ ID NO: 1107 - DNA, 1364 bp, synthetic construct
  misc_feature 1..1364: note = Synthetic
  source 1..1364: mol_type = other DNA
atggccttaccagtgaccgccttgctcctgccgctggccttgctgctccacgccgccaggccgcaggtgcagctggtggagtctgggggaggcgtggtccagcctgggaggtccctgagactctcctgtgcagcgtctggattcaccttcagtagctatgacatgcactgggtccgccaggctccaggcaaggggctggagtgggtgtcagttatatggtatgatggaagtaataaaaagtatggagactccgcgaagggccgattcaccatctccagagacaattccaagaacacgctggatctgcaaatgaacagcctgagagccgaggacacggctgtgtattactgtgcgagaggcgacaactggaacgacgaaggtggctactactactactacatggacgtctggggcaaagggaccacggtcaccgtctcctcaggtggaggcggttcaggcggaggtggctctggcggtggcggatcggaaattgtgctgactcagtctccagactttcagtctgtgactccaaaggagaaagtcaccatcacctgccgggccagtcagaacattggtagtagcttacactggtaccagcagaaaccagatcagtctccaaagctcctcatcaagtttgcttcccagtccatctcaggggtcccctcgaggttcagtggcagtggatctgggacagatttcaccctcaccatcaatagcctggaagctgaagatgctgcagcgtattactgtcatcagagtagtagtttaccgtggacgttcggccaagggaccaaggtggaaatcaaagagtccaaatatgggcccccatgcccatcatgcccaatctacatctgggcgcccttggccgggacttgtggggtccttctcctgtcactggttatcaccctttactgccggagggaccagaggctgccccccgatgcccacaagccccctgggggaggcagtttccggacccccatccaagaggagcaggccgacgcccactccaccctggccaagatcagagtgaagttcagcaggagcgcagacgcccccgcgtaccagcagggccagaaccagctctataacgagctcaatctaggacgaagagaggagtacgatgttttggacaagagacgtggccgggaccctgagatggggggaaagccgagaaggaagaaccctcaggaaggcctgtacaatgaactgcagaaagataagatggcggaggcctacagtgagattgggatgaaaggcgagcgccggaggggcaaggggcacgatggcctttaccagggtctcagtacagccaccaaggacacctacgacgcccttcacatgcaggccctgccccctcgcgg

SEQ ID NO: 1108 - DNA, 1364 bp, synthetic construct
  misc_feature 1..1364: note = Synthetic
  source 1..1364: mol_type = other DNA
atggccttaccagtgaccgccttgctcctgccgctggccttgctgctccacgccgccaggccgcaggtgcagctggtggagtctgggggaggcgtggtccagcctgggaggtccctgagactctcctgtgcagcgtctggattcaccttcagtagctatgacatgcactgggtccgccaggctccaggcaaggggctggagtgggtgtcagttatatggtatgatggaagtaataaaaagtatggagactccgcgaagggccgattcaccatctccagagacaattccaagaacacgctggatctgcaaatgaacagcctgagagccgaggacacggctgtgtattactgtgcgagaggcgacaactggaacgacgaaggtggctactactactactacatggacgtctggggcaaagggaccacggtcaccgtctcctcaggtggaggcggttcaggcggaggtggctctggcggtggcggatcggacatccagatgacccagtctccatcctcactgtctacatctgtaggagacagagtcaccatcacttgtcgggcgagtcagggcattagcaattatttagcctggtttcagcagaaaccagggaaagcccctaagtccctgatctatgctgcatccagtttgcaaagtggggtcccatcaaagttcagcggcagtggatctgggacagatttctctctcaccattagcagcctgcagcctgaagattttgcaacttattactgccaacagtataatagttacccgatcaccttcggccaagggacacgactggagattaaagagtccaaatatgggcccccatgcccatcatgcccaatctacatctgggcgcccttggccgggacttgtggggtccttctcctgtcactggttatcaccctttactgccggagggaccagaggctgccccccgatgcccacaagccccctgggggaggcagtttccggacccccatccaagaggagcaggccgacgcccactccaccctggccaagatcagagtgaagttcagcaggagcgcagacgcccccgcgtaccagcagggccagaaccagctctataacgagctcaatctaggacgaagagaggagtacgatgttttggacaagagacgtggccgggaccctgagatggggggaaagccgagaaggaagaaccctcaggaaggcctgtacaatgaactgcagaaagataagatggcggaggcctacagtgagattgggatgaaaggcgagcgccggaggggcaaggggcacgatggcctttaccagggtctcagtacagccaccaaggacacctacgacgcccttcacatgcaggccctgccccctcgcgg

SEQ ID NO: 1109 - DNA, 1355 bp, synthetic construct
  misc_feature 1..1355: note = Synthetic
  source 1..1355: mol_type = other DNA
atggccttaccagtgaccgccttgctcctgccgctggccttgctgctccacgccgccaggccgcaggttcagctggtacagtctggagctgaggtgaagaagtctggggcctcagtgaaggtctcctgcaaggcttctggttacaccttaaccagctatggcatcagctgggtgcgacaggcccctggacaagggcttgagtggatgggatggatcagcgcttacaatggtaacataaactatgcacagaagttccagggcagagtcaccatgaccacagacacatccacgagcacagcctacatggagctgaggagcctgagatctgacgacacggccgtgtattactgtgtgagagatggggaccggtacaactggaaccacagctacatggacgtctggggcaaagggaccacggtcaccgtctcctcaggtggaggcggttcaggcggaggtggctctggcggtggcggatcggaaattgtgctgactcagtctccagactttcagtctgtgactccaaaggagaaagtcaccatcacctgccgggccagtcagaacattggtagtagcttacactggtaccagcagaaaccagatcagtctccaaagctcctcatcaagtttgcttcccagtccatctcaggggtcccctcgaggttcagtggcagtggatctgggacagatttcaccctcaccatcaatagcctggaagctgaagatgctgcagcgtattactgtcatcagagtagtagtttaccgtggacgttcggccaagggaccaaggtggaaatcaaagagtccaaatatgggcccccatgcccatcatgcccaatctacatctgggcgcccttggccgggacttgtggggtccttctcctgtcactggttatcaccctttactgccggagggaccagaggctgccccccgatgcccacaagccccctgggggaggcagtttccggacccccatccaagaggagcaggccgacgcccactccaccctggccaagatcagagtgaagttcagcaggagcgcagacgcccccgcgtaccagcagggccagaaccagctctataacgagctcaatctaggacgaagagaggagtacgatgttttggacaagagacgtggccgggaccctgagatggggggaaagccgagaaggaagaaccctcaggaaggcctgtacaatgaactgcagaaagataagatggcggaggcctacagtgagattgggatgaaaggcgagcgccggaggggcaaggggcacgatggcctttaccagggtctcagtacagccaccaaggacacctacgacgcccttcacatgcaggccctgccccctcgcgg

SEQ ID NO: 1110 - DNA, 1355 bp, synthetic construct
  misc_feature 1..1355: note = Synthetic
  source 1..1355: mol_type = other DNA
atggccttaccagtgaccgccttgctcctgccgctggccttgctgctccacgccgccaggccgcaggttcagctggtacagtctggagctgaggtgaagaagtctggggcctcagtgaaggtctcctgcaaggcttctggttacaccttaaccagctatggcatcagctgggtgcgacaggcccctggacaagggcttgagtggatgggatggatcagcgcttacaatggtaacataaactatgcacagaagttccagggcagagtcaccatgaccacagacacatccacgagcacagcctacatggagctgaggagcctgagatctgacgacacggccgtgtattactgtgtgagagatggggaccggtacaactggaaccacagctacatggacgtctggggcaaagggaccacggtcaccgtctcctcaggtggaggcggttcaggcggaggtggctctggcggtggcggatcggacatccagatgacccagtctccatcctcactgtctacatctgtaggagacagagtcaccatcacttgtcgggcgagtcagggcattagcaattatttagcctggtttcagcagaaaccagggaaagcccctaagtccctgatctatgctgcatccagtttgcaaagtggggtcccatcaaagttcagcggcagtggatctgggacagatttctctctcaccattagcagcctgcagcctgaagattttgcaacttattactgccaacagtataatagttacccgatcaccttcggccaagggacacgactggagattaaagagtccaaatatgggcccccatgcccatcatgcccaatctacatctgggcgcccttggccgggacttgtggggtccttctcctgtcactggttatcaccctttactgccggagggaccagaggctgccccccgatgcccacaagccccctgggggaggcagtttccggacccccatccaagaggagcaggccgacgcccactccaccctggccaagatcagagtgaagttcagcaggagcgcagacgcccccgcgtaccagcagggccagaaccagctctataacgagctcaatctaggacgaagagaggagtacgatgttttggacaagagacgtggccgggaccctgagatggggggaaagccgagaaggaagaaccctcaggaaggcctgtacaatgaactgcagaaagataagatggcggaggcctacagtgagattgggatgaaaggcgagcgccggaggggcaaggggcacgatggcctttaccagggtctcagtacagccaccaaggacacctacgacgcccttcacatgcaggccctgccccctcgcgg

SEQ ID NO: 1111 - DNA, 1352 bp, synthetic construct
  misc_feature 1..1352: note = Synthetic
  source 1..1352: mol_type = other DNA
atggccttaccagtgaccgccttgctcctgccgctggccttgctgctccacgccgccaggccggaggtgcagctgttggagtctgggggagacttggtacagcctggggggtccctgcgactctcctgtgcagcctctggattcacctttagcacctatgccatgacctgggtccgccaggctccagggaaggggctggagtgggtctcagctattagtggtactagtggtagcacatactacgcagactccgtgaagggccggttcaccatctccagagacaattccaagagcacgctgtatctgcacatgaacagcctgagaaccgaggacacggccgtatattactgtgcgagaggcggatataactggcactactactactacatggacgtctggggcaaagggaccacggtcaccgtctcctcaggtggaggcggttcaggcggaggtggctctggcggtggcggatcggaaattgtgctgactcagtctccagactttcagtctgtgactccaaaggagaaagtcaccatcacctgccgggccagtcagagcattggaagtagcttacactggtaccagcagaaaccagatcagtctccaaagctcctcatcaagtatgtttcccagtccatctcaggggtcccctcgaggttcagtggcagtggatctgggacagatttcaccctcaccatcaatagcctggaagctgaagatgctgcagcgtattactgtcatcagagtagtagtttaccgtggacgttcggccaagggaccaaggtggaaatcaaagagtccaaatatgggcccccatgcccatcatgcccaatctacatctgggcgcccttggccgggacttgtggggtccttctcctgtcactggttatcaccctttactgccggagggaccagaggctgccccccgatgcccacaagccccctgggggaggcagtttccggacccccatccaagaggagcaggccgacgcccactccaccctggccaagatcagagtgaagttcagcaggagcgcagacgcccccgcgtaccagcagggccagaaccagctctataacgagctcaatctaggacgaagagaggagtacgatgttttggacaagagacgtggccgggaccctgagatggggggaaagccgagaaggaagaaccctcaggaaggcctgtacaatgaactgcagaaagataagatggcggaggcctacagtgagattgggatgaaaggcgagcgccggaggggcaaggggcacgatggcctttaccagggtctcagtacagccaccaaggacacctacgacgcccttcacatgcaggccctgccccctcgcgg

SEQ ID NO: 1112 - DNA, 1355 bp, synthetic construct
  misc_feature 1..1355: note = Synthetic
  source 1..1355: mol_type = other DNA
atggccttaccagtgaccgccttgctcctgccgctggccttgctgctccacgccgccaggccggaggtgcagctgttggagtctgggggagacttggtacagcctggggggtccctgcgactctcctgtgcagcctctggattcacctttagcacctatgccatgacctgggtccgccaggctccagggaaggggctggagtgggtctcagctattagtggtactagtggtagcacatactacgcagactccgtgaagggccggttcaccatctccagagacaattccaagagcacgctgtatctgcacatgaacagcctgagaaccgaggacacggccgtatattactgtgcgagaggcggatataactggcactactactactacatggacgtctggggcaaagggaccacggtcaccgtctcctcaggtggaggcggttcaggcggaggtggctctggcggtggcggatcggaaattgtaatgacacagtctccagccaccctgtctttgtctccaggggaaagagccaccctctcctgcagggccagtcagagtgttagcagcagctacttatcctggtaccagcagaaacctgggctggctcccaggctcctcatctatggtgcatccaccagggccactggcatcccagccaggttcagtggcagtgggtctgggacagacttcactctcaccatcagcagcctgcagcctgaagattttgcagtttattactgtcagcaggattataacttacctccgacgttcggccaagggaccaaggtggaaatcaaagagtccaaatatgggcccccatgcccatcatgcccaatctacatctgggcgcccttggccgggacttgtggggtccttctcctgtcactggttatcaccctttactgccggagggaccagaggctgccccccgatgcccacaagccccctgggggaggcagtttccggacccccatccaagaggagcaggccgacgcccactccaccctggccaagatcagagtgaagttcagcaggagcgcagacgcccccgcgtaccagcagggccagaaccagctctataacgagctcaatctaggacgaagagaggagtacgatgttttggacaagagacgtggccgggaccctgagatggggggaaagccgagaaggaagaaccctcaggaaggcctgtacaatgaactgcagaaagataagatggcggaggcctacagtgagattgggatgaaaggcgagcgccggaggggcaaggggcacgatggcctttaccagggtctcagtacagccaccaaggacacctacgacgcccttcacatgcaggccctgccccctcgcgg

SEQ ID NO: 1113 - DNA, 1361 bp, synthetic construct
  misc_feature 1..1361: note = Synthetic
  source 1..1361: mol_type = other DNA
atggccttaccagtgaccgccttgctcctgccgctggccttgctgctccacgccgccaggccgcaagtgcagctggtggagagcggcggaggagtggtgcaacctggccggagcctgagactgagctgcgctgccagcggcttcaccttcaacaactacgacatgtactgggtgcggcaggcccctggcaagggcctggaatgggtcgccgtgacatggtatgacggctccaacaagtactacgccgacagcgtgaagggcagattcaccatcagcagagataatagcaagaacaccctgtacctgcagatgaacagcctgcgggccgaggacaccgccgtgtactactgcgctagaggcgacaattggaacgacgagcaccattacttctactacatggacgtgtggggcaaaggcaccaccgtgaccgtgtccagcggcggcggtggatctggaggcggaggctctggaggcggcggctccgagatcgtgctgacacagtctccagatttccagtctgtgacccctaaggaaaaggttacaattacatgcagagcctctcagagcatcggaagctctctgcactggtatcagcagaaacctgatcagagccccaagctgctgatcaaattcgccagccagtccttcagcggcgtccccagccgcttcagcggcagcggcagcggcactgattttacactgaccatccacagcctggaggccgaggacgccgccacctactattgtcaccagagcagctccctgccttggacctttggccagggcacaaaggtggaaatcaaggagtccaaatatgggcccccatgcccatcatgcccaatctacatctgggcgcccttggccgggacttgtggggtccttctcctgtcactggttatcaccctttactgccggagggaccagaggctgccccccgatgcccacaagccccctgggggaggcagtttccggacccccatccaagaggagcaggccgacgcccactccaccctggccaagatcagagtgaagttcagcaggagcgcagacgcccccgcgtaccagcagggccagaaccagctctataacgagctcaatctaggacgaagagaggagtacgatgttttggacaagagacgtggccgggaccctgagatggggggaaagccgagaaggaagaaccctcaggaaggcctgtacaatgaactgcagaaagataagatggcggaggcctacagtgagattgggatgaaaggcgagcgccggaggggcaaggggcacgatggcctttaccagggtctcagtacagccaccaaggacacctacgacgcccttcacatgcaggccctgccccctcgcgg

SEQ ID NO: 1114 - DNA, 1361 bp, synthetic construct
  misc_feature 1..1361: note = Synthetic
  source 1..1361: mol_type = other DNA
atggccttaccagtgaccgccttgctcctgccgctggccttgctgctccacgccgccaggccgcaagtgcagctggtggagtctggcggcggagtggtgcaacctggaaggagcctgcggctgagctgcgctgccagcggcttcaccttcagcaattacgacatgcactgggtgcggcaggcccctggcaaaggcctggaatgggtcacaatcatctggcatgatgccagcaacaagtactacctggacagcgtcaagggcagattcacaatcagccgggacaacagcaagaacaccctgtacctgcagatgaacagcctgagagccgaggacaccgctgtgtactattgtgccagaggagataattggaacgacgagcaccactacttctactacatggacgtgtggggcaagggcaccaccgtgaccgtttctagcggcggaggcggctccggcggtggaggctccggaggcggcggctctgagatcgtgctgacacagagccctgattttcagagcgtgacacctaaagagaaggtgaccatcacctgcagagccagccagagcatcggctccagcctgcactggtatcagcagaagcccgaccagagcccaaagctgctgatcaagttcgcctcccagtctttttccggcgtgcccagcagattcagcgggagcggctctggcaccgacttcacactgaccatccactctctggaagccgaggatgccgccacctactattgccaccagagcagctctctcccttggaccttcggccagggcacaaaagtggaaattaaggagtccaaatatgggcccccatgcccatcatgcccaatctacatctgggcgcccttggccgggacttgtggggtccttctcctgtcactggttatcaccctttactgccggagggaccagaggctgccccccgatgcccacaagccccctgggggaggcagtttccggacccccatccaagaggagcaggccgacgcccactccaccctggccaagatcagagtgaagttcagcaggagcgcagacgcccccgcgtaccagcagggccagaaccagctctataacgagctcaatctaggacgaagagaggagtacgatgttttggacaagagacgtggccgggaccctgagatggggggaaagccgagaaggaagaaccctcaggaaggcctgtacaatgaactgcagaaagataagatggcggaggcctacagtgagattgggatgaaaggcgagcgccggaggggcaaggggcacgatggcctttaccagggtctcagtacagccaccaaggacacctacgacgcccttcacatgcaggccctgccccctcgcgg

SEQ ID NO: 1115 - DNA, 1361 bp, synthetic construct
  misc_feature 1..1361: note = Synthetic
  source 1..1361: mol_type = other DNA
atggccttaccagtgaccgccttgctcctgccgctggccttgctgctccacgccgccaggccgcaagtgcagctggtcgaaagcggcggaggcgtggtgcaacctggaagaagcctgagactgagctgcgccgcctctggcttcaccttttctaattacgacatgcactgggtgcggcaggcccctggcaagggtcttgagtgggttaccatcatctggcacgacggcagcaacaagtactacctggacagcgtgaagggcagatttacaatcagcagagataatagcaagaacaccctgtacctgcagatgaacagcctgcgggccgaggacaccgccgtgtactattgtgccagaggcgacaactggaacgacgagcaccactacttctactacatggacgtgtggggcaaaggcaccacagtgaccgtgtccagcggcggcggcggcagcggcggaggaggctctggcggaggcggcagcgagatcgtgctgacccagagccctgacttccagagcgtgacccctaaggaaaaggtgacaattacatgcagggccagccagtccatcggctcttctctgcattggtatcagcagaagcccgatcagtctccaaagctgctgatcaaattcgccagccagagcttcagcggagtccccagccggttcagcggatctggctccggcactgatttcaccctgaccatccacagcctggaggccgaagatgccgctacatactattgccaccagtcctccagcctgccttggacattcggccagggcaccaaggtggagatcaaagagtccaaatatgggcccccatgcccatcatgcccaatctacatctgggcgcccttggccgggacttgtggggtccttctcctgtcactggttatcaccctttactgccggagggaccagaggctgccccccgatgcccacaagccccctgggggaggcagtttccggacccccatccaagaggagcaggccgacgcccactccaccctggccaagatcagagtgaagttcagcaggagcgcagacgcccccgcgtaccagcagggccagaaccagctctataacgagctcaatctaggacgaagagaggagtacgatgttttggacaagagacgtggccgggaccctgagatggggggaaagccgagaaggaagaaccctcaggaaggcctgtacaatgaactgcagaaagataagatggcggaggcctacagtgagattgggatgaaaggcgagcgccggaggggcaaggggcacgatggcctttaccagggtctcagtacagccaccaaggacacctacgacgcccttcacatgcaggccctgccccctcgcgg

SEQ ID NO: 1116 - DNA, 1343 bp, synthetic construct
  misc_feature 1..1343: note = Synthetic
  source 1..1343: mol_type = other DNA
atggccttaccagtgaccgccttgctcctgccgctggccttgctgctccacgccgccaggccggaggtgcagctgctggaaagcggcggcggactcgtgcaacctggcggctccctgcggctgtcttgcgccgcttctggcttcacattcagcatctacgccatgagctgggtcagacaggcccccggcaaaggcctggaatgggtgtccgccatcagcggcggcggagataccacctactacgccgacagcgtgaagggcagattcaccattagcagagataatagcaagaccacactggacctgcaaatgaacagcctgcgggccgaggacaccgccgtgtactactgtgctaagcacacctcttattacatggacgtgtggggaaaaggcacaaccgtgaccgtgtccagcggcggaggcggctctggcggcggcggcagcggcggtggcggaagccagaccgtggtgacacaggagccttctctgagcgtgagccccggcggcaccgtgaccctgacatgcggcctgagcagcggctccgtctccaccagctactatcctagctggtatcagcagacccctggccaggcccctagaaccctgatctacagcacaaacatccggagctctggagtgccagacagatttagcggaagcatcctgggcaacaaggccgccctgaccatcaccggcgcccaggctgacgacgagagtgattactactgcaagctgtacatgggctctggcatcatcttcggcagcggaacaaaggtgacagttctggagtccaaatatgggcccccatgcccatcatgcccaatctacatctgggcgcccttggccgggacttgtggggtccttctcctgtcactggttatcaccctttactgccggagggaccagaggctgccccccgatgcccacaagccccctgggggaggcagtttccggacccccatccaagaggagcaggccgacgcccactccaccctggccaagatcagagtgaagttcagcaggagcgcagacgcccccgcgtaccagcagggccagaaccagctctataacgagctcaatctaggacgaagagaggagtacgatgttttggacaagagacgtggccgggaccctgagatggggggaaagccgagaaggaagaaccctcaggaaggcctgtacaatgaactgcagaaagataagatggcggaggcctacagtgagattgggatgaaaggcgagcgccggaggggcaaggggcacgatggcctttaccagggtctcagtacagccaccaaggacacctacgacgcccttcacatgcaggccctgccccctcgcgg

SEQ ID NO: 1117 - DNA, 1361 bp, synthetic construct
  misc_feature 1..1361: note = Synthetic
  source 1..1361: mol_type = other DNA
atggccttaccagtgaccgccttgctcctgccgctggccttgctgctccacgccgccaggccgcaagtgcagctggtggaaagcggcggtggagtggtgcaacctggcagaagcctgcggctgagctgcgccgcttctggcttcacattttctaattacgacaagcactgggtgcggcaggcccctggcaaaggcctggagtgggtcgctgtgatctggtatgacggcagcaacaagtactacgccgacagcgtgaagggcagattcaccatcagcagagacaacagcaagaacaccctgtacctgcagatgaacagcctgcgggctgaagataccgccatgtactattgtgccaggggcgataattggaacgacgagcaccactacttctactacatggacgtgtggggaaagggcaccacagtgaccgtgtccagcggcggcggcggcagcggcggcggcggcagcggcggcggcggcagcgagatcgtgctgacacagtcccctgactttcagagcgtgacccctaaggaaaaggtcacaattacatgcagagcctctcagagcatcggcagctctctgcactggtatcagcagaaacctgatcagagccccaagctgctgatcaaattcgccagccagagcttctccggcgtgccaagcagattcagcggcagcggcagcggaaccgatttcaccctgaccatccattctctggaggccgaggacgccgccacctactactgccaccagtctagcagcctgccctggaccttcggccagggcacaaaggttgagatcaaggagtccaaatatgggcccccatgcccatcatgcccaatctacatctgggcgcccttggccgggacttgtggggtccttctcctgtcactggttatcaccctttactgccggagggaccagaggctgccccccgatgcccacaagccccctgggggaggcagtttccggacccccatccaagaggagcaggccgacgcccactccaccctggccaagatcagagtgaagttcagcaggagcgcagacgcccccgcgtaccagcagggccagaaccagctctataacgagctcaatctaggacgaagagaggagtacgatgttttggacaagagacgtggccgggaccctgagatggggggaaagccgagaaggaagaaccctcaggaaggcctgtacaatgaactgcagaaagataagatggcggaggcctacagtgagattgggatgaaaggcgagcgccggaggggcaaggggcacgatggcctttaccagggtctcagtacagccaccaaggacacctacgacgcccttcacatgcaggccctgccccctcgcgg

SEQ ID NO: 1118 - DNA, 1355 bp, synthetic construct
  misc_feature 1..1355: note = Synthetic
  source 1..1355: mol_type = other DNA
atggccttaccagtgaccgccttgctcctgccgctggccttgctgctccacgccgccaggccgcaagtgcagctggtccagtctggagctgaggtgaagaagcccggcgccagcgtgaaggtgtcctgtaaagcctctggttatacattcacaaactatggcttcagctgggttagacaggcccctggacagggcctggactggatgggatggatcagcgcctacaacggctacaccaactacacccagaagctgcagggcagagtgacaatgaccacagataccagcaccaccacagcttacatggaactgaggtccctgcggagcgacgacaccgccgtgtactactgcgccagacggggcctgctgtactactactacagcatggacgtgtggggcaagggcaccaccgtgaccgtgtcttctggcggcggcggaagcggcggcggaggaagcggcggcggcggcagcgagatcgtgctgacccaatctcctgccacactgagcctctccccaggcgagcgggccaccctgagctgcggcgcttctcagagcgtgtacaatagctacctggcctggtatcagcagaaacccggcctggctcctagactgctgatctacgacgccagcctgagagccaccggcgtgcctgatagattcagcggcagcggcagcggaaccgacttcaccctgacaatcagcacactggaacccgaggattttgccgtgtactattgccagcagtacggcggcagccctatgtacacattcggccagggcaccaagctggaaatcaaggagtccaaatatgggcccccatgcccatcatgcccaatctacatctgggcgcccttggccgggacttgtggggtccttctcctgtcactggttatcaccctttactgccggagggaccagaggctgccccccgatgcccacaagccccctgggggaggcagtttccggacccccatccaagaggagcaggccgacgcccactccaccctggccaagatcagagtgaagttcagcaggagcgcagacgcccccgcgtaccagcagggccagaaccagctctataacgagctcaatctaggacgaagagaggagtacgatgttttggacaagagacgtggccgggaccctgagatggggggaaagccgagaaggaagaaccctcaggaaggcctgtacaatgaactgcagaaagataagatggcggaggcctacagtgagattgggatgaaaggcgagcgccggaggggcaaggggcacgatggcctttaccagggtctcagtacagccaccaaggacacctacgacgcccttcacatgcaggccctgccccctcgcgg

SEQ ID NO: 1119 - DNA, 1343 bp, synthetic construct
  misc_feature 1..1343: note = Synthetic
  source 1..1343: mol_type = other DNA
atggccttaccagtgaccgccttgctcctgccgctggccttgctgctccacgccgccaggccggaggtgcagctgctggaaagcggcggcggactggtgcaacctggcggctctctgcggctgtcctgtaccgccagcggcttcaccttcagcagcttcgccatgagctgggtcagacaggctccaggaaaaggcctggaatgggtgtctgccatgagcggatctggcgacaccacatactacgccgattccgtgaagggcagatttaccatcagcagagataatagcaagacaacactgtatctgcagatgaacagcctgagggccgaggacacagccgtgtacagctgcgccaagcacaccacctactacatggacgtgtggggcaaaggcaccaccgtcacagtgtccagcggcggaggcggcagcggaggcggcggcagcggcggaggaggctctcagaccgtggtgacccaggagcctagcctgtccgtgtcccctggcggcaccgtgaccctcacatgcggcctgagcagcggctcagtttccacgagcgactaccccagctggtatcagcaaacccctggacaggctcctcggaccctgatctacagaaccaacacccggagcagcggcgtgcccgatagattctctggctctatcctgggcaacaaggccgctctgaccattacaggcgcccaggccgacgacgagagcgattattactgcgtgctgtacatggacagcggcatcatcttcggctctggaacaaaggtgacagtgctggagtccaaatatgggcccccatgcccatcatgcccaatctacatctgggcgcccttggccgggacttgtggggtccttctcctgtcactggttatcaccctttactgccggagggaccagaggctgccccccgatgcccacaagccccctgggggaggcagtttccggacccccatccaagaggagcaggccgacgcccactccaccctggccaagatcagagtgaagttcagcaggagcgcagacgcccccgcgtaccagcagggccagaaccagctctataacgagctcaatctaggacgaagagaggagtacgatgttttggacaagagacgtggccgggaccctgagatggggggaaagccgagaaggaagaaccctcaggaaggcctgtacaatgaactgcagaaagataagatggcggaggcctacagtgagattgggatgaaaggcgagcgccggaggggcaaggggcacgatggcctttaccagggtctcagtacagccaccaaggacacctacgacgcccttcacatgcaggccctgccccctcgcgg

SEQ ID NO: 1120 - DNA, 1343 bp, synthetic construct
  misc_feature 1..1343: note = Synthetic
  source 1..1343: mol_type = other DNA
atggccttaccagtgaccgccttgctcctgccgctggccttgctgctccacgccgccaggccggaggtgcagctgctggaaagcggcggcggcctggtgcaacctggcggaagtctgcggctgtcttgtgccgcttctggattcaccttcaacacctacgccatgagctgggtgcggcaggcccctggcaaaggcctggaatgggtctccgccatgagcggctctggcgacacaacctactatgccgacagcgtgaagggcagatttacaatcagcagggataacagcaagaccaccctgtacctgcagatgaacagcctccgggccgaggacaccgccgtgtacagctgcgccaagcacaccagctactacatggacgtgtggggcaaaggcaccaccgtgaccgtgtccagcggaggtggcggcagcggcggcggaggctccggcggcggaggctcacagaccgtcgtgacccaggagccttctctgagcgtgtctccaggaggcacagttactctgacatgcggcctgtctagcggcagcgtgtccaccagcgactaccccagctggtatcagcaaacacctggccaggctcctagaaccctgatctatagaacaaataccagaagcagcggcgtgcccgatagattcagcggaagcatcctgggcaacaaggccgccctgaccatcaccggcgcccaggctgacgacgagtctgattactactgcgtgctgtacatgggcagcggcatcattttcggcagcggaacaaaggtgacagtgctggagtccaaatatgggcccccatgcccatcatgcccaatctacatctgggcgcccttggccgggacttgtggggtccttctcctgtcactggttatcaccctttactgccggagggaccagaggctgccccccgatgcccacaagccccctgggggaggcagtttccggacccccatccaagaggagcaggccgacgcccactccaccctggccaagatcagagtgaagttcagcaggagcgcagacgcccccgcgtaccagcagggccagaaccagctctataacgagctcaatctaggacgaagagaggagtacgatgttttggacaagagacgtggccgggaccctgagatggggggaaagccgagaaggaagaaccctcaggaaggcctgtacaatgaactgcagaaagataagatggcggaggcctacagtgagattgggatgaaaggcgagcgccggaggggcaaggggcacgatggcctttaccagggtctcagtacagccaccaaggacacctacgacgcccttcacatgcaggccctgccccctcgcgg

SEQ ID NO: 1121 - DNA, 1343 bp, synthetic construct
  misc_feature 1..1343: note = Synthetic
  source 1..1343: mol_type = other DNA
atggccttaccagtgaccgccttgctcctgccgctggccttgctgctccacgccgccaggccggaagtgcagctgctggaaagcggcggcgacctggtgcaacctggcggctccctgagactgagctgcgccgcttctggctttaccttcagcacctacgccatgagctgggtgcggcaggcccctggcaaaggactggagtgggtctccgccatcagcggcagcggcgagaatatctactacgctgatagcgtgaagggcagattcaccattagcagagataattctaagaacaccctgttcctgcagatgaacagcctgcgggccgaagataccgccgtgtactactgcgccaagcacacatcttactacatggacgtgtggggcaaaggcaccaccgtcacagtgtccagcggaggcggcggcagcggcggaggcggcagcggaggaggcggctcacagaccgtggtgacccaagagcccagcttctctgtgtccccaggtggcaccgtgacactgacatgcggcctgtacagcgacagcgtgtctacaagctactatcctagctggtatcagcagacacctggccaggctcctagaaccctgatctacaacaccaacacaagaagcagcggcgtgcccgaccggtttagcggaagcatcctgggcaacaaggccgccctgaccatcaccggcgcccaggccgacgacgagagcgactactattgtgtgctgtacatggtgtccggcatcgtgttcggctctggaacaaaggtgaccgttctggagtccaaatatgggcccccatgcccatcatgcccaatctacatctgggcgcccttggccgggacttgtggggtccttctcctgtcactggttatcaccctttactgccggagggaccagaggctgccccccgatgcccacaagccccctgggggaggcagtttccggacccccatccaagaggagcaggccgacgcccactccaccctggccaagatcagagtgaagttcagcaggagcgcagacgcccccgcgtaccagcagggccagaaccagctctataacgagctcaatctaggacgaagagaggagtacgatgttttggacaagagacgtggccgggaccctgagatggggggaaagccgagaaggaagaaccctcaggaaggcctgtacaatgaactgcagaaagataagatggcggaggcctacagtgagattgggatgaaaggcgagcgccggaggggcaaggggcacgatggcctttaccagggtctcagtacagccaccaaggacacctacgacgcccttcacatgcaggccctgccccctcgcgg

SEQ ID NO: 1122 - DNA, 1361 bp, synthetic construct
  misc_feature 1..1361: note = Synthetic
  source 1..1361: mol_type = other DNA
atggccttaccagtgaccgccttgctcctgccgctggccttgctgctccacgccgccaggccgcaagtgcagctggtggaaagcggaggcggagttgtgcaacctggcagatctctgcgcctgtcatgcgccgccagcggctttacattctccagctacggcatgcactgggtgcggcaggcccctggcaaaggcctggaatgggtcgctgtgatctggtacgacggcatcaacaaatactacgccgacagcgtgaagggcagattcaccatcagcagagataatagcaagaacaccctgtacctgcagatgaacagcctgcgggccgaggacactgccgtgtactactgcgccagagagcggctggaacggagatactactactacatggacgtgtggggcaagggcaccaccgtgaccgtgtccagtggtggcggaggatctggcggaggcggctctggcggcggcggcagccagaccgtggtgacccaggagcctagcttcagcgtgtcccccggaggcacagtgaccctgacatgcggcctcagctctggctccgtcagcacctcttactatcctggatggtatcagcagacacctggccaggccccaagaaccctgatctacagcacaaacaccagaagcagcggcgtgcccgatagatttagcggcagcatcctgggcaacaaggccgccctgaccattacaggcgcccaggctgatgacgagagcgactactactgtgtgctgtacatgggcagcggcatgttcatcttcggctctggaaccaaggtgacagtgctggagtccaaatatgggcccccatgcccatcatgcccaatctacatctgggcgcccttggccgggacttgtggggtccttctcctgtcactggttatcaccctttactgccggagggaccagaggctgccccccgatgcccacaagccccctgggggaggcagtttccggacccccatccaagaggagcaggccgacgcccactccaccctggccaagatcagagtgaagttcagcaggagcgcagacgcccccgcgtaccagcagggccagaaccagctctataacgagctcaatctaggacgaagagaggagtacgatgttttggacaagagacgtggccgggaccctgagatggggggaaagccgagaaggaagaaccctcaggaaggcctgtacaatgaactgcagaaagataagatggcggaggcctacagtgagattgggatgaaaggcgagcgccggaggggcaaggggcacgatggcctttaccagggtctcagtacagccaccaaggacacctacgacgcccttcacatgcaggccctgccccctcgcgg

SEQ ID NO: 1123 - DNA, 1343 bp, synthetic construct
  misc_feature 1..1343: note = Synthetic
  source 1..1343: mol_type = other DNA
atggccttaccagtgaccgccttgctcctgccgctggccttgctgctccacgccgccaggccggaggtgcagctgctggaatctggaggcggcctcgtgcagcctggaggcagcctgaggctgagctgcgctgcttctggcttcaccttcagcagcttcgccatgagctgggtcagacaagctcccggcaaaggcctggaatgggtgtccgccgtgtctggcagcggcgacgatacctactacgccgatagcgtgaaaggaagatttacaatcagccgggacaacagcaagaataccctgtacctgcagatgaactctctgcgggccgaggacaccgccgtgtactattgcgccaagcacaccagctactacctggacgtgtggggcaagggcaccaccgtgaccgtttccagcggcggcggcggcagcggcggaggtggaagcggcggaggcggatctcagacagtggtgacacaggagcctagcttttctgtgtcccctggcggcaccgtgacactgacatgcgccctgagctccgatagcgtgtcaacatcttacttccccagctggtatcggcagacccctggacaggcccctagaaccctgatctacaacaccaacaccagaagcagcggcgtgccagatagattcagcggctccatcctgggcaacaaggccgccctgaccattacaggcgcccaggccgacgacgagagcgactactactgtgtgctgtacatgggcagcggcatcatcttcggctctggcacaaaggtgaccgtcctggagtccaaatatgggcccccatgcccatcatgcccaatctacatctgggcgcccttggccgggacttgtggggtccttctcctgtcactggttatcaccctttactgccggagggaccagaggctgccccccgatgcccacaagccccctgggggaggcagtttccggacccccatccaagaggagcaggccgacgcccactccaccctggccaagatcagagtgaagttcagcaggagcgcagacgcccccgcgtaccagcagggccagaaccagctctataacgagctcaatctaggacgaagagaggagtacgatgttttggacaagagacgtggccgggaccctgagatggggggaaagccgagaaggaagaaccctcaggaaggcctgtacaatgaactgcagaaagataagatggcggaggcctacagtgagattgggatgaaaggcgagcgccggaggggcaaggggcacgatggcctttaccagggtctcagtacagccaccaaggacacctacgacgcccttcacatgcaggccctgccccctcgcgg

SEQ ID NO: 1124 - DNA, 1361 bp, synthetic construct
  misc_feature 1..1361: note = Synthetic
  source 1..1361: mol_type = other DNA
atggccttaccagtgaccgccttgctcctgccgctggccttgctgctccacgccgccaggccgcaagtgcagctggtggaaagcggaggcggcgtcgtgcaacctggcagaagcctgagactgagctgcgccgccagcggctttaacttcagcaccttcgacatccactgggtgcggcaggcccctggaaaaggcctggagtgggtcgccctgatctggtatgacggcagctacaagtactacgccgatagcgttaagggcaggttcaccatcagcagagataattctaagaacaccctggacctgagaatgaacagcctccgggctgaggacaccgccgtgtactactgcgccagaaatgacaactggaacgacgagcattactatcactactacatggacgtgtggggcaagggcaccaccgtgacagtgtcctctggcggcggcggcagcggcggcggcggcagcggtggaggcggaagcgagatcgtgctgacccagtctcctgatttccagtccgtgacccctaaggaaaaggtgaccatcacctgtagagcttctcagagcatcggcagctctctgcactggtatcagcagaaacctgaccagagcccaaagctgctgatcaaattcgccagccagtccttcagcggcgtgccctcccggtttagcggctccggcagcggaacagacttcaccctgacaattaacagcctggaagccgaggatgccgccacatacttctgccaccagtcttctagcctgccctggacattcggccagggcacaaaggtggagatcaaggagtccaaatatgggcccccatgcccatcatgcccaatctacatctgggcgcccttggccgggacttgtggggtccttctcctgtcactggttatcaccctttactgccggagggaccagaggctgccccccgatgcccacaagccccctgggggaggcagtttccggacccccatccaagaggagcaggccgacgcccactccaccctggccaagatcagagtgaagttcagcaggagcgcagacgcccccgcgtaccagcagggccagaaccagctctataacgagctcaatctaggacgaagagaggagtacgatgttttggacaagagacgtggccgggaccctgagatggggggaaagccgagaaggaagaaccctcaggaaggcctgtacaatgaactgcagaaagataagatggcggaggcctacagtgagattgggatgaaaggcgagcgccggaggggcaaggggcacgatggcctttaccagggtctcagtacagccaccaaggacacctacgacgcccttcacatgcaggccctgccccctcgcgg

SEQ ID NO: 1125 - DNA, 1376 bp, synthetic construct
  misc_feature 1..1376: note = Synthetic
  source 1..1376: mol_type = other DNA
atggccttaccagtgaccgccttgctcctgccgctggccttgctgctccacgccgccaggccggaggtgcacctgctggaaagcggcggcggcctggtgcagcctggaggctctctgcggctgagctgtgccgcctctggttttaccttcagcagctacgccatgaattgggttagacaggcccctggcaagggcctggaatgggtcagcagcatcagcggctccggcagcagctcttactatgctgatagcgtgaagggcagattcaccattagcagagacaatagcaagaacaccctgtacctgcagatgaacagcctgcgggccgaggacaccgccgtgtactactgcgccagccggggcttcaactcccaataccctcctggctactactactactacatggacgtgtggggaaaaggcacgaccgtgaccgtgtcctccggcggcggcggaagcggcggcggcggctctggcggaggcggcagccagaccgtggtgacacaggagcctagcttcagcgtgtctccaggaggaacagtgaccctgacatgcggcctcagcagcggctctgtgtccaccagctatttccccagctggtatcagcagacccctggccaggctcccaggaccctgatctacatcaccaacacaagaagcagcggcgtgcccgacagattttctggcagcatcatcggcaacaaggccgctctgaccatcacaggcgcccaggccgacgacgagagtgattacttctgcgtgctgtacatgggcagcggaacatgggtgttcggcggaggcacaaagctgaccgtcctggagtccaaatatgggcccccatgcccatcatgcccaatctacatctgggcgcccttggccgggacttgtggggtccttctcctgtcactggttatcaccctttactgccggagggaccagaggctgccccccgatgcccacaagccccctgggggaggcagtttccggacccccatccaagaggagcaggccgacgcccactccaccctggccaagatcagagtgaagttcagcaggagcgcagacgcccccgcgtaccagcagggccagaaccagctctataacgagctcaatctaggacgaagagaggagtacgatgttttggacaagagacgtggccgggaccctgagatggggggaaagccgagaaggaagaaccctcaggaaggcctgtacaatgaactgcagaaagataagatggcggaggcctacagtgagattgggatgaaaggcgagcgccggaggggcaaggggcacgatggcctttaccagggtctcagtacagccaccaaggacacctacgacgcccttcacatgcaggccctgccccctcgcgg

SEQ ID NO: 1126 - DNA, 1337 bp, synthetic construct
  misc_feature 1..1337: note = Synthetic
  source 1..1337: mol_type = other DNA
atggccttaccagtgaccgccttgctcctgccgctggccttgctgctccacgccgccaggccggaggtgcagctgctggaaagcggcggcggcctggtgcaacctggcggctccctgaggctgagctgcgccgccagcggcttcacctttagcaactacgctatgacctgggtcagacaggcccctggaaagggcctggagtgggtgtccgccatcagcggatctggtattggaacatactacgccgacagcgtgcaaggcagattcacaacaagcagagataattctaagaacaccctgtacctgcagatgaacagcctgcgggccgaggacaccgccgtgtactattgtgccaagggcggctacaactggaaggacgtgtggggcaagggaaccaccgtgaccgtttcttctggcggcggaggcagcggcggcggaggctccggaggcggaggcagcgagatcgtgctgacacagtctcccgactttcagagcgtgacccctaaagagaaggtgacaatcacctgcagagccagccagtcaatcggctctagcctgcactggtatcagcagaaacctgatcagagccctaagctgctgatcaagttcgcctctcagagcttcagcggcgtgccaagccggttcagcggctccggcagcggcaccgacttcaccctgaccatccacagcctggaggccgaagatgccgctacatactactgccaccagtccagcagcctcccctggaccttcggccagggcacaaaggtggaaatcaaagagtccaaatatgggcccccatgcccatcatgcccaatctacatctgggcgcccttggccgggacttgtggggtccttctcctgtcactggttatcaccctttactgccggagggaccagaggctgccccccgatgcccacaagccccctgggggaggcagtttccggacccccatccaagaggagcaggccgacgcccactccaccctggccaagatcagagtgaagttcagcaggagcgcagacgcccccgcgtaccagcagggccagaaccagctctataacgagctcaatctaggacgaagagaggagtacgatgttttggacaagagacgtggccgggaccctgagatggggggaaagccgagaaggaagaaccctcaggaaggcctgtacaatgaactgcagaaagataagatggcggaggcctacagtgagattgggatgaaaggcgagcgccggaggggcaaggggcacgatggcctttaccagggtctcagtacagccaccaaggacacctacgacgcccttcacatgcaggccctgccccctcgcgg

SEQ ID NO: 1127 - DNA, 1361 bp, synthetic construct
  misc_feature 1..1361: note = Synthetic
  source 1..1361: mol_type = other DNA
atggccttaccagtgaccgccttgctcctgccgctggccttgctgctccacgccgccaggccgcaagtgcagctggtggagagcggcggcggcgtcgtgcagcccggcagaagcctgcggctgtcttgcgctgccagcggcttcacctttacaaactacgacatgcactgggtcagacaggcccctggcaaaggcctggaatgggtgaccatcatctggcacgacggctccaataagtactacctggacagcgtgcggggcagattcacgatcagcagagataattccaagaacaccctgtacctgcagatgaacagcctgagagccgaggacaccgccgtgtactattgcgccagaggcgacaactggaacgacgagcaccactacttctactacatggacgtgtggggcaagggcaccaccgtgaccgtgtccagcggcggaggcggctccggaggaggcggctctggtggcggcggcagcgagatcgtgctgacccagagccctgacttccagtctgtgacacctaaggaaaaggtgacaatcacctgtagggccagccaaagcatcggcagcagcctgcattggtatcagcagaagcccgatcagtctccaaagctgctgatcaaattcgccagccagagcttcagcggagttcctagccggttcagcggctctggcagcggaacagatttcaccctgacaattcactctctggaggccgaggatgccgccacatattactgccaccagtctagcagcctgccttggacctttggacagggcaccaaggtggaaatcaaggagtccaaatatgggcccccatgcccatcatgcccaatctacatctgggcgcccttggccgggacttgtggggtccttctcctgtcactggttatcaccctttactgccggagggaccagaggctgccccccgatgcccacaagccccctgggggaggcagtttccggacccccatccaagaggagcaggccgacgcccactccaccctggccaagatcagagtgaagttcagcaggagcgcagacgcccccgcgtaccagcagggccagaaccagctctataacgagctcaatctaggacgaagagaggagtacgatgttttggacaagagacgtggccgggaccctgagatggggggaaagccgagaaggaagaaccctcaggaaggcctgtacaatgaactgcagaaagataagatggcggaggcctacagtgagattgggatgaaaggcgagcgccggaggggcaaggggcacgatggcctttaccagggtctcagtacagccaccaaggacacctacgacgcccttcacatgcaggccctgccccctcgcgg

SEQ ID NO: 1128 - DNA, 1361 bp, synthetic construct
  misc_feature 1..1361: note = Synthetic
  source 1..1361: mol_type = other DNA
atggccttaccagtgaccgccttgctcctgccgctggccttgctgctccacgccgccaggccgcaggtgcagctggttgagagcggcggaggcgtggtgcaacctggaagatctctgcgcctgagctgcgccgccagcggcttcaccttcagcaactacgatatgcactgggtgcggcaggcccctggcaagggcctggaatgggtcaccattatctggcatgacggcagcaacaagtactacctggacagcgtgaaaggcagattcaccatcagcagagacaatagcaagaacaccctgtacctgcagatgaacagcctgcgggccgaggacaccgccgtgtactattgcgccagaggcgacaactggaacgacgagcaccactacttctactatatggacgtgtggggcaaaggcacaaccgtgaccgtcagcagcggcggcggaggcagcggaggcggaggctctggcggcggtggcagtgaaatcgtgctgacccagagccccgctacactgagcctctcccctggcgagcgggccacactgtcttgtagagcctctcagtccgtgtccagcagcctggcctggtatcagcagaagcccggccaggctccaagactgctgatctacgacgccagcaatagagccaccggcatccccgcccggttttccggcagcggatctggaacagattttaccctgaccatcagcagcctggaacctgaggatttcgccgtgtactactgccagcaaagaagcaactggcctctgacattcggcggcggcacaaaggtggaaatcaaggagtccaaatatgggcccccatgcccatcatgcccaatctacatctgggcgcccttggccgggacttgtggggtccttctcctgtcactggttatcaccctttactgccggagggaccagaggctgccccccgatgcccacaagccccctgggggaggcagtttccggacccccatccaagaggagcaggccgacgcccactccaccctggccaagatcagagtgaagttcagcaggagcgcagacgcccccgcgtaccagcagggccagaaccagctctataacgagctcaatctaggacgaagagaggagtacgatgttttggacaagagacgtggccgggaccctgagatggggggaaagccgagaaggaagaaccctcaggaaggcctgtacaatgaactgcagaaagataagatggcggaggcctacagtgagattgggatgaaaggcgagcgccggaggggcaaggggcacgatggcctttaccagggtctcagtacagccaccaaggacacctacgacgcccttcacatgcaggccctgccccctcgcgg

SEQ ID NO: 1129 - DNA, 1349 bp, synthetic construct
  misc_feature 1..1349: note = Synthetic
  source 1..1349: mol_type = other DNA
atggccttaccagtgaccgccttgctcctgccgctggccttgctgctccacgccgccaggccggaagtgcagctggtcgagagcggcggcggcgtggtgcggcctggcgggtccctgagactgagctgcgccgcctctggcttcaccttcgacgactatggcatgagctgggtcagacaggcccctggaaaaggcctggaatgggtgtccggaatcaactggaatggcggcagtacaggctacgtggacagcgtgaagggcagattcaccatcagccgggacaacgccaagaacagcctgtatctgcagatgaacagcctgcgggccgaggacaccgccctgtaccactgtgccagacctgtgacaaccgactactactactacatggacgtgtggggcaagggcaccaccgtgaccgtgtcttccggcggaggaggcagcggcggcggcggcagcggcggaggcggcagcgagatcgtgctgacacagagccccggaacactgagcctgagccctggcgagcgggctacactgtcttgcagagcttctcagagcgtttcctccagctacctggcctggtatcagcaaaagcccggccaagctccaagactgctgatctacggcgccagctctagggccaccggcattcctgatagattcagcggctctggcagcggaacagattttaccctgaccatcagcagactggagcctgaggatttcgccgtgtactactgccagcagtacggatctagctggacctttggccagggcaccaaggtggaaatcaaagagtccaaatatgggcccccatgcccatcatgcccaatctacatctgggcgcccttggccgggacttgtggggtccttctcctgtcactggttatcaccctttactgccggagggaccagaggctgccccccgatgcccacaagccccctgggggaggcagtttccggacccccatccaagaggagcaggccgacgcccactccaccctggccaagatcagagtgaagttcagcaggagcgcagacgcccccgcgtaccagcagggccagaaccagctctataacgagctcaatctaggacgaagagaggagtacgatgttttggacaagagacgtggccgggaccctgagatggggggaaagccgagaaggaagaaccctcaggaaggcctgtacaatgaactgcagaaagataagatggcggaggcctacagtgagattgggatgaaaggcgagcgccggaggggcaaggggcacgatggcctttaccagggtctcagtacagccaccaaggacacctacgacgcccttcacatgcaggccctgccccctcgcgg

SEQ ID NO: 1130 - DNA, 1373 bp, synthetic construct
  misc_feature 1..1373: note = Synthetic
  source 1..1373: mol_type = other DNA
atggccttaccagtgaccgccttgctcctgccgctggccttgctgctccacgccgccaggccggaggtgcagctgctggagagcggaggaggcctggtgcaacctggcggcagcctgcggctgagctgcgccgcttccggcttcaccttcagcagctacgccatgagctgggtgcggcaggctcctggaaaaggcctggagtgggtcagcgccatcagcggcagcggaggctcaacatactacgccgacagcgtgaagggcagattcaccatcagccgcgacaactctaagaacaccctgtacctgcagatgaactctctgagagccgaggacaccgccgtgtactattgtgccaagaagggcacaagctacaactggaatgatgtgcactactactactactattatatggacgtgtggggcaaaggcacaaccgtgaccgtgtccagcggcggtggaggcagcggaggcggcggaagcggcggcggcggcagtgaaattgtgctgacccagagccccggcaccctgagcctgtctccaggcgagcgggctaccctgtcctgcagagccagccagtctgtttccagctcttacctggcctggtatcagcaaaagcctggacaggcccctagactgctgatctacggcgcctctagcagggctacaggcatccctgatagatttagcggcagcggctctggcaccgacttcaccctgaccatctccagactggaacccgaggatttcgccgtgtactactgccagcagtacggcagcagctggacatttggccagggcacaaaggtggaaatcaaggagtccaaatatgggcccccatgcccatcatgcccaatctacatctgggcgcccttggccgggacttgtggggtccttctcctgtcactggttatcaccctttactgccggagggaccagaggctgccccccgatgcccacaagccccctgggggaggcagtttccggacccccatccaagaggagcaggccgacgcccactccaccctggccaagatcagagtgaagttcagcaggagcgcagacgcccccgcgtaccagcagggccagaaccagctctataacgagctcaatctaggacgaagagaggagtacgatgttttggacaagagacgtggccgggaccctgagatggggggaaagccgagaaggaagaaccctcaggaaggcctgtacaatgaactgcagaaagataagatggcggaggcctacagtgagattgggatgaaaggcgagcgccggaggggcaaggggcacgatggcctttaccagggtctcagtacagccaccaaggacacctacgacgcccttcacatgcaggccctgccccctcgcgg

SEQ ID NO: 1131 - DNA, 1355 bp, synthetic construct
  misc_feature 1..1355: note = Synthetic
  source 1..1355: mol_type = other DNA
atggccttaccagtgaccgccttgctcctgccgctggccttgctgctccacgccgccaggccgcagctgcaactgcaggagagcggtcctggactggtgaagccttctgagacactgagcctgacctgcaccgtgtccggcggctctatcagctcctccagctactactggggctggatcagacagccacctggcaagggcctggaatggatcggcagcatttactattctggctcaacatactacaaccccagccttaaaagcagagtgacaatcagcgtggacaccagcaagaaccagttcagcctgaagctgtcctctgtgaccgccgctgatactgccgtttactactgcaccaccggaacaacagcttattactactactactacatggacgtgtggggaaagggcaccacagtgaccgtgtccagcggcggaggcggcagcggcggaggaggatctggcggcggcggcagcgagatcgtgctgacccagtctccaggcaccctgagcctgagccccggcgagcgggccacactgagctgcagagcctctcagagcgtcagctctagctacctggcctggtatcagcaaaaacctggccaggcccctagactgctgatctacggcgccagcagccgggccaccggcatccctgatagattcagcggatctggcagcggcaccgactttaccctcaccatcagcagactggaacccgaggacttcgccgtgtactattgtcagcagtacggcagcagctggacattcggccagggcaccaaggtggaaatcaaggagtccaaatatgggcccccatgcccatcatgcccaatctacatctgggcgcccttggccgggacttgtggggtccttctcctgtcactggttatcaccctttactgccggagggaccagaggctgccccccgatgcccacaagccccctgggggaggcagtttccggacccccatccaagaggagcaggccgacgcccactccaccctggccaagatcagagtgaagttcagcaggagcgcagacgcccccgcgtaccagcagggccagaaccagctctataacgagctcaatctaggacgaagagaggagtacgatgttttggacaagagacgtggccgggaccctgagatggggggaaagccgagaaggaagaaccctcaggaaggcctgtacaatgaactgcagaaagataagatggcggaggcctacagtgagattgggatgaaaggcgagcgccggaggggcaaggggcacgatggcctttaccagggtctcagtacagccaccaaggacacctacgacgcccttcacatgcaggccctgccccctcgcgg

SEQ ID NO: 1132 - DNA, 1352 bp, synthetic construct
  misc_feature 1..1352: note = Synthetic
  source 1..1352: mol_type = other DNA
atggccttaccagtgaccgccttgctcctgccgctggccttgctgctccacgccgccaggccggaggtgcagctgctggagagcggtggaggcctggtgcaacctggcggctccctgcggctgagctgcgccgccagcggcttcacctttagctcttacgccatgacctgggtcagacaggcccctggcaagggactggaatgggtgtctgccatcagcggcagcggaggatctacatactacgctgatagcgtgaagggcagatttacaatcagccgcgacaatagcaagaacaccctgtacctgcagatgaacagcctgagagccgaggacaccgccgtgtactactgcgctagaggcggctacaactggcactactactactacatggacgtgtggggcaaaggaaccaccgtgaccgtgtccagcggcggcggcggctctggcggaggcggctctggcggcggcggaagcgagatcgtgctgacccagtctcccggaacactctccctgtccccaggcgagcgggctacactgagctgccgggccagccagagcgtgtcctcgtcttatctggcctggtatcagcagaaacctggccaagcccctagactgctgatctacggcgccagcagccgggccacaggcatccccgatagattcagcggcagcggaagcggcaccgacttcaccctgacaatcagcagactggaacctgaggacttcgccgtgtactattgtcagcagtacggcagcagctggaccttcggccagggcaccaaggttgaaattaaggagtccaaatatgggcccccatgcccatcatgcccaatctacatctgggcgcccttggccgggacttgtggggtccttctcctgtcactggttatcaccctttactgccggagggaccagaggctgccccccgatgcccacaagccccctgggggaggcagtttccggacccccatccaagaggagcaggccgacgcccactccaccctggccaagatcagagtgaagttcagcaggagcgcagacgcccccgcgtaccagcagggccagaaccagctctataacgagctcaatctaggacgaagagaggagtacgatgttttggacaagagacgtggccgggaccctgagatggggggaaagccgagaaggaagaaccctcaggaaggcctgtacaatgaactgcagaaagataagatggcggaggcctacagtgagattgggatgaaaggcgagcgccggaggggcaaggggcacgatggcctttaccagggtctcagtacagccaccaaggacacctacgacgcccttcacatgcaggccctgccccctcgcgg

SEQ ID NO: 1133 - DNA, 1364 bp, synthetic construct
  misc_feature 1..1364: note = Synthetic
  source 1..1364: mol_type = other DNA
atggccttaccagtgaccgccttgctcctgccgctggccttgctgctccacgccgccaggccgcaagtgcagctggtggagagcggaggcggagtcgtgcaacctggcagaagcctgagactgagctgcgccgcttctggcttcaccttttctagctacgacatgcactgggtgcggcaggcccctggaaaaggcctggaatgggtcagcgtgatctggtatgacggctccaacaagaagtacggcgacagcgccaagggcaggttcaccattagccgggacaattctaagaacaccctggacctgcagatgaacagcctgcgggctgaggacaccgccgtgtactattgtgccagaggcgataattggaacgacgagggcggctactactactactacatggacgtgtggggcaagggaacaaccgtgacagtgtccagcggcggcggcggaagcggcggcggcggatctggcggaggcggcagcgagatcgtgctgacccagagccccgacttccagtccgtgacccctaaggaaaaggtgaccatcacatgcagagccagccagaacatcggcagcagcctgcactggtatcagcagaaacctgatcagtctccaaagctgctgatcaaattcgcctctcagagcatcagcggtgttcctagcagattcagcggctccggcagcggcactgattttacactgaccatcaacagcctggaggccgaggatgccgctgcctactactgccaccagagctctagcctgccctggaccttcggccagggcacaaaggtggaaatcaaggagtccaaatatgggcccccatgcccatcatgcccaatctacatctgggcgcccttggccgggacttgtggggtccttctcctgtcactggttatcaccctttactgccggagggaccagaggctgccccccgatgcccacaagccccctgggggaggcagtttccggacccccatccaagaggagcaggccgacgcccactccaccctggccaagatcagagtgaagttcagcaggagcgcagacgcccccgcgtaccagcagggccagaaccagctctataacgagctcaatctaggacgaagagaggagtacgatgttttggacaagagacgtggccgggaccctgagatggggggaaagccgagaaggaagaaccctcaggaaggcctgtacaatgaactgcagaaagataagatggcggaggcctacagtgagattgggatgaaaggcgagcgccggaggggcaaggggcacgatggcctttaccagggtctcagtacagccaccaaggacacctacgacgcccttcacatgcaggccctgccccctcgcgg

SEQ ID NO: 1134 - DNA, 1364 bp, synthetic construct
  misc_feature 1..1364: note = Synthetic
  source 1..1364: mol_type = other DNA
atggccttaccagtgaccgccttgctcctgccgctggccttgctgctccacgccgccaggccgcaagtgcagctggtggagagcggcggcggcgtggtgcagcccggacgctccctgcggctgagctgcgccgccagcggctttaccttctctagctacgatatgcactgggtcagacaggctcctggcaaaggcctggaatgggtgtccgtgatctggtacgacggctccaacaagaagtacggcgacagcgccaagggcagattcaccatctctcgggacaatagcaagaacacactggacctgcagatgaactctctgagagccgaggacaccgccgtgtactactgcgccagaggcgataattggaacgacgagggcggttattactactactatatggacgtgtggggaaaaggcacaaccgtgaccgtttccagcggcggaggcggcagcggcggcggcggatctggcggaggcggcagcgacattcagatgacacagagccccagcagcctctccacctctgtgggcgatagagtgaccatcacatgccgggccagccagggcatcagcaactacctggcctggttccagcagaagcctggaaaggcccctaagagcctgatctacgccgccagcagcctgcagagcggagtgccatctaagttcagcggcagcggatctggcaccgacttcagcctgaccatcagctctctgcagcctgaggattttgccacatactactgtcagcagtacaacagctaccctatcacattcggccagggcaccagactggaaatcaaggagtccaaatatgggcccccatgcccatcatgcccaatctacatctgggcgcccttggccgggacttgtggggtccttctcctgtcactggttatcaccctttactgccggagggaccagaggctgccccccgatgcccacaagccccctgggggaggcagtttccggacccccatccaagaggagcaggccgacgcccactccaccctggccaagatcagagtgaagttcagcaggagcgcagacgcccccgcgtaccagcagggccagaaccagctctataacgagctcaatctaggacgaagagaggagtacgatgttttggacaagagacgtggccgggaccctgagatggggggaaagccgagaaggaagaaccctcaggaaggcctgtacaatgaactgcagaaagataagatggcggaggcctacagtgagattgggatgaaaggcgagcgccggaggggcaaggggcacgatggcctttaccagggtctcagtacagccaccaaggacacctacgacgcccttcacatgcaggccctgccccctcgcgg

SEQ ID NO: 1135 - DNA, 1355 bp, synthetic construct
  misc_feature 1..1355: note = Synthetic
  source 1..1355: mol_type = other DNA
atggccttaccagtgaccgccttgctcctgccgctggccttgctgctccacgccgccaggccgcaagtgcagctggtgcagtctggagccgaggtgaaaaagagcggcgcctcagtgaaggtgtcctgcaaggccagcggctacacactgaccagctacggcatctcttgggttagacaggcccctggacaaggcctggaatggatgggctggatcagcgcctacaacggcaacatcaactacgcccagaaattccagggcagagtgacaatgaccacagacaccagcacctccaccgcttacatggaactgcggagcctgagaagcgacgacaccgccgtgtactactgtgtgcgggacggcgatagatacaattggaaccacagctatatggacgtgtggggcaagggcacaacagtcaccgtgtcttctggaggcggaggcagcggaggcggcggcagcggcggcggcggcagcgagatcgtgctgacacagagccctgatttccaaagcgtgacccctaaggaaaaggtgaccatcacatgcagagcctctcagaacattggaagtagcctgcactggtatcagcagaaacccgatcagtccccaaagctgctgatcaagttcgccagccagagcatcagcggagtgcccagccggttcagcggctctggctctggcaccgacttcaccctgaccatcaatagcctggaggccgaggacgccgctgcttattactgccaccagagcagctccctgccttggacctttggccagggcaccaaggtcgagatcaaggagtccaaatatgggcccccatgcccatcatgcccaatctacatctgggcgcccttggccgggacttgtggggtccttctcctgtcactggttatcaccctttactgccggagggaccagaggctgccccccgatgcccacaagccccctgggggaggcagtttccggacccccatccaagaggagcaggccgacgcccactccaccctggccaagatcagagtgaagttcagcaggagcgcagacgcccccgcgtaccagcagggccagaaccagctctataacgagctcaatctaggacgaagagaggagtacgatgttttggacaagagacgtggccgggaccctgagatggggggaaagccgagaaggaagaaccctcaggaaggcctgtacaatgaactgcagaaagataagatggcggaggcctacagtgagattgggatgaaaggcgagcgccggaggggcaaggggcacgatggcctttaccagggtctcagtacagccaccaaggacacctacgacgcccttcacatgcaggccctgccccctcgcgg

SEQ ID NO: 1136 - DNA, 1355 bp, synthetic construct
  misc_feature 1..1355: note = Synthetic
  source 1..1355: mol_type = other DNA
atggccttaccagtgaccgccttgctcctgccgctggccttgctgctccacgccgccaggccgcaagtgcagctggttcagagcggagccgaggtgaaaaagtccggcgccagcgtgaaggtgtcatgcaaggcctctggctacaccctgacctcctacggcatcagctgggtccggcaggcccctggccagggcctggagtggatgggctggatcagcgcttataatggcaacatcaattacgcccagaagttccaaggcagagtgacaatgaccacagataccagcaccagcacagcttacatggaactgagatccctgcggagcgacgacaccgccgtgtactattgtgtgcgggacggcgacagatacaactggaaccacagctacatggacgtgtggggcaagggcaccaccgtgaccgtgtccagcggcggcggcggctctggaggcggcggatctggcggaggaggttccgacatccagatgacacagagccccagcagcctgagcacctctgtgggcgatagagtgaccatcacctgcagagccagccagggcatcagcaactacctggcctggttccagcagaaacctggaaaggcccctaagagcctgatctacgccgcttcttctctgcaaagcggcgtgccaagcaagttcagcggcagcggcagcggaacagacttcagcctgacaatttctagcctccagcctgaggattttgccacatactactgccagcagtacaacagctaccccatcaccttcggccagggcacaagactggaaatcaaggagtccaaatatgggcccccatgcccatcatgcccaatctacatctgggcgcccttggccgggacttgtggggtccttctcctgtcactggttatcaccctttactgccggagggaccagaggctgccccccgatgcccacaagccccctgggggaggcagtttccggacccccatccaagaggagcaggccgacgcccactccaccctggccaagatcagagtgaagttcagcaggagcgcagacgcccccgcgtaccagcagggccagaaccagctctataacgagctcaatctaggacgaagagaggagtacgatgttttggacaagagacgtggccgggaccctgagatggggggaaagccgagaaggaagaaccctcaggaaggcctgtacaatgaactgcagaaagataagatggcggaggcctacagtgagattgggatgaaaggcgagcgccggaggggcaaggggcacgatggcctttaccagggtctcagtacagccaccaaggacacctacgacgcccttcacatgcaggccctgccccctcgcgg

SEQ ID NO: 1137 - DNA, 1352 bp, synthetic construct
  misc_feature 1..1352: note = Synthetic
  source 1..1352: mol_type = other DNA
atggccttaccagtgaccgccttgctcctgccgctggccttgctgctccacgccgccaggccggaggtgcagctgctggaaagcggaggcgacctggtgcaacctggaggcagcctgcggctgagctgcgccgcttctggcttcacctttagcacctacgccatgacatgggttagacaggcccctggcaagggcctggagtgggtcagcgccatcagcggcaccagcggctctacctactacgccgacagcgtgaagggcagattcaccatctccagagataattcaaagagcaccctgtacctgcacatgaacagcctgagaaccgaggacaccgccgtgtactattgcgctagaggcggctacaactggcactactactactacatggacgtgtggggaaaaggcacaacagtgaccgtgtcttctggcggaggaggcagcggcggtggcggcagtggcggaggcggcagcgagatcgtgctgacacagtcccctgacttccagagcgtgacccctaaggaaaaggtgacaatcacctgccgggcctctcagagcatcggcagcagcctgcactggtatcagcagaagcccgatcagtccccaaagctgctgatcaaatacgtgtcccaatctatcagcggcgtgcccagccggttttctggcagcggcagcggaacagacttcaccctgaccattaactccctggaggccgaggatgccgctgcctactattgtcaccagagcagcagcctgccttggacattcggccagggcaccaaggtggaaatcaaggagtccaaatatgggcccccatgcccatcatgcccaatctacatctgggcgcccttggccgggacttgtggggtccttctcctgtcactggttatcaccctttactgccggagggaccagaggctgccccccgatgcccacaagccccctgggggaggcagtttccggacccccatccaagaggagcaggccgacgcccactccaccctggccaagatcagagtgaagttcagcaggagcgcagacgcccccgcgtaccagcagggccagaaccagctctataacgagctcaatctaggacgaagagaggagtacgatgttttggacaagagacgtggccgggaccctgagatggggggaaagccgagaaggaagaaccctcaggaaggcctgtacaatgaactgcagaaagataagatggcggaggcctacagtgagattgggatgaaaggcgagcgccggaggggcaaggggcacgatggcctttaccagggtctcagtacagccaccaaggacacctacgacgcccttcacatgcaggccctgccccctcgcgg

SEQ ID NO: 1138 - DNA, 1355 bp, synthetic construct
  misc_feature 1..1355: note = Synthetic
  source 1..1355: mol_type = other DNA
atggccttaccagtgaccgccttgctcctgccgctggccttgctgctccacgccgccaggccggaggtgcaactgctggaaagcggaggagatctggtgcagcccggcggctccctgcgcctgtcttgcgccgccagcggctttacattcagcacctacgccatgacatgggttagacaggcccctggaaaaggcctggaatgggtgtccgccatcagcggaaccagcggcagcacatactacgccgacagcgtgaagggcagattcaccatcagccgggacaacagcaagtccaccctgtacctgcacatgaacagcctgcggaccgaggacaccgccgtgtactattgcgctagaggcggttataattggcactactactactacatggacgtgtggggcaagggcacgaccgtgacagtgtccagcggcggcggaggcagcggcggaggaggctctggcggcggcggcagcgagatcgtgatgacccagtctcctgctacactgagcctgagccccggcgagcgggccaccctgagttgtagagccagccagagcgtgtcttctagctacctgagctggtatcagcaaaaacctggccttgctccaagactgctgatctacggcgcctctacaagagccaccggcatccccgccagatttagcggctctggcagcggcaccgacttcaccctgaccatctccagcctccagcctgaggatttcgccgtctactactgccagcaggattacaacctgcctcctaccttcggccagggcacaaaggtggaaattaaggagtccaaatatgggcccccatgcccatcatgcccaatctacatctgggcgcccttggccgggacttgtggggtccttctcctgtcactggttatcaccctttactgccggagggaccagaggctgccccccgatgcccacaagccccctgggggaggcagtttccggacccccatccaagaggagcaggccgacgcccactccaccctggccaagatcagagtgaagttcagcaggagcgcagacgcccccgcgtaccagcagggccagaaccagctctataacgagctcaatctaggacgaagagaggagtacgatgttttggacaagagacgtggccgggaccctgagatggggggaaagccgagaaggaagaaccctcaggaaggcctgtacaatgaactgcagaaagataagatggcggaggcctacagtgagattgggatgaaaggcgagcgccggaggggcaaggggcacgatggcctttaccagggtctcagtacagccaccaaggacacctacgacgcccttcacatgcaggccctgccccctcgcgg

SEQ ID NO: 1139 - protein, 678 aa, synthetic construct
  REGION 1..678: note = Synthetic
MALPVTALLLPLALLLHAARPQVQLVESGGGVVQPGRSLRLSCAASGFTFNNYDMYWVRQAPGKGLEWVAVTWYDGSNKYYADSVKGRFTISRDNSKNTLYLQMNSLRAEDTAVYYCARGDNWNDEHHYFYYMDVWGKGTTVTVSSGGGGSGGGGSGGGGSEIVLTQSPDFQSVTPKEKVTITCRASQSIGSSLHWYQQKPDQSPKLLIKFASQSFSGVPSRFSGSGSGTDFTLTIHSLEAEDAATYYCHQSSSLPWTFGQGTKVEIKESKYGPPCPSCPIYIWAPLAGTCGVLLLSLVITLYCRRDQRLPPDAHKPPGGGSFRTPIQEEQADAHSTLAKIRVKFSRSADAPAYQQGQNQLYNELNLGRREEYDVLDKRRGRDPEMGGKPRRKNPQEGLYNELQKDKMAEAYSEIGMKGERRRGKGHDGLYQGLSTATKDTYDALHMQALPPRGSGEGRGSLLTCGDVEENPGPMALPVTALLLPLALLLHAARPNWVNVISDLKKIEDLIQSMHIDATLYTESDVHPSCKVTAMKCFLLELQVISLESGDASIHDTVENLIILANNSLSSNGNVTESGCKECEELEEKNIKEFLQSFVHIVQMFINTSTTTPAPRPPTPAPTIASQPLSLRPEACRPAAGGAVHTRGLDFACDIYIWAPLAGTCGVLLLSLVITLYC

SEQ ID NO: 1140 - protein, 678 aa, synthetic construct
  REGION 1..678: note = Synthetic
MALPVTALLLPLALLLHAARPQVQLVESGGGVVQPGRSLRLSCAASGFTFSNYDMHWVRQAPGKGLEWVTIIWHDASNKYYLDSVKGRFTISRDNSKNTLYLQMNSLRAEDTAVYYCARGDNWNDEHHYFYYMDVWGKGTTVTVSSGGGGSGGGGSGGGGSEIVLTQSPDFQSVTPKEKVTITCRASQSIGSSLHWYQQKPDQSPKLLIKFASQSFSGVPSRFSGSGSGTDFTLTIHSLEAEDAATYYCHQSSSLPWTFGQGTKVEIKESKYGPPCPSCPIYIWAPLAGTCGVLLLSLVITLYCRRDQRLPPDAHKPPGGGSFRTPIQEEQADAHSTLAKIRVKFSRSADAPAYQQGQNQLYNELNLGRREEYDVLDKRRGRDPEMGGKPRRKNPQEGLYNELQKDKMAEAYSEIGMKGERRRGKGHDGLYQGLSTATKDTYDALHMQALPPRGSGEGRGSLLTCGDVEENPGPMALPVTALLLPLALLLHAARPNWVNVISDLKKIEDLIQSMHIDATLYTESDVHPSCKVTAMKCFLLELQVISLESGDASIHDTVENLIILANNSLSSNGNVTESGCKECEELEEKNIKEFLQSFVHIVQMFINTSTTTPAPRPPTPAPTIASQPLSLRPEACRPAAGGAVHTRGLDFACDIYIWAPLAGTCGVLLLSLVITLYC

SEQ ID NO: 1141 - protein, 678 aa, synthetic construct
  REGION 1..678: note = Synthetic
MALPVTALLLPLALLLHAARPQVQLVESGGGVVQPGRSLRLSCAASGFTFSNYDMHWVRQAPGKGLEWVTIIWHDGSNKYYLDSVKGRFTISRDNSKNTLYLQMNSLRAEDTAVYYCARGDNWNDEHHYFYYMDVWGKGTTVTVSSGGGGSGGGGSGGGGSEIVLTQSPDFQSVTPKEKVTITCRASQSIGSSLHWYQQKPDQSPKLLIKFASQSFSGVPSRFSGSGSGTDFTLTIHSLEAEDAATYYCHQSSSLPWTFGQGTKVEIKESKYGPPCPSCPIYIWAPLAGTCGVLLLSLVITLYCRRDQRLPPDAHKPPGGGSFRTPIQEEQADAHSTLAKIRVKFSRSADAPAYQQGQNQLYNELNLGRREEYDVLDKRRGRDPEMGGKPRRKNPQEGLYNELQKDKMAEAYSEIGMKGERRRGKGHDGLYQGLSTATKDTYDALHMQALPPRGSGEGRGSLLTCGDVEENPGPMALPVTALLLPLALLLHAARPNWVNVISDLKKIEDLIQSMHIDATLYTESDVHPSCKVTAMKCFLLELQVISLESGDASIHDTVENLIILANNSLSSNGNVTESGCKECEELEEKNIKEFLQSFVHIVQMFINTSTTTPAPRPPTPAPTIASQPLSLRPEACRPAAGGAVHTRGLDFACDIYIWAPLAGTCGVLLLSLVITLYC

SEQ ID NO: 1142 - protein, 672 aa, synthetic construct
  REGION 1..672: note = Synthetic
MALPVTALLLPLALLLHAARPEVQLLESGGGLVQPGGSLRLSCAASGFTFSIYAMSWVRQAPGKGLEWVSAISGGGDTTYYADSVKGRFTISRDNSKTTLDLQMNSLRAEDTAVYYCAKHTSYYMDVWGKGTTVTVSSGGGGSGGGGSGGGGSQTVVTQEPSLSVSPGGTVTLTCGLSSGSVSTSYYPSWYQQTPGQAPRTLIYSTNIRSSGVPDRFSGSILGNKAALTITGAQADDESDYYCKLYMGSGIIFGSGTKVTVLESKYGPPCPSCPIYIWAPLAGTCGVLLLSLVITLYCRRDQRLPPDAHKPPGGGSFRTPIQEEQADAHSTLAKIRVKFSRSADAPAYQQGQNQLYNELNLGRREEYDVLDKRRGRDPEMGGKPRRKNPQEGLYNELQKDKMAEAYSEIGMKGERRRGKGHDGLYQGLSTATKDTYDALHMQALPPRGSGEGRGSLLTCGDVEENPGPMALPVTALLLPLALLLHAARPNWVNVISDLKKIEDLIQSMHIDATLYTESDVHPSCKVTAMKCFLLELQVISLESGDASIHDTVENLIILANNSLSSNGNVTESGCKECEELEEKNIKEFLQSFVHIVQMFINTSTTTPAPRPPTPAPTIASQPLSLRPEACRPAAGGAVHTRGLDFACDIYIWAPLAGTCGVLLLSLVITLYC

SEQ ID NO: 1143 - protein, 678 aa, synthetic construct
  REGION 1..678: note = Synthetic
MALPVTALLLPLALLLHAARPQVQLVESGGGVVQPGRSLRLSCAASGFTFSNYDKHWVRQAPGKGLEWVAVIWYDGSNKYYADSVKGRFTISRDNSKNTLYLQMNSLRAEDTAMYYCARGDNWNDEHHYFYYMDVWGKGTTVTVSSGGGGSGGGGSGGGGSEIVLTQSPDFQSVTPKEKVTITCRASQSIGSSLHWYQQKPDQSPKLLIKFASQSFSGVPSRFSGSGSGTDFTLTIHSLEAEDAATYYCHQSSSLPWTFGQGTKVEIKESKYGPPCPSCPIYIWAPLAGTCGVLLLSLVITLYCRRDQRLPPDAHKPPGGGSFRTPIQEEQADAHSTLAKIRVKFSRSADAPAYQQGQNQLYNELNLGRREEYDVLDKRRGRDPEMGGKPRRKNPQEGLYNELQKDKMAEAYSEIGMKGERRRGKGHDGLYQGLSTATKDTYDALHMQALPPRGSGEGRGSLLTCGDVEENPGPMALPVTALLLPLALLLHAARPNWVNVISDLKKIEDLIQSMHIDATLYTESDVHPSCKVTAMKCFLLELQVISLESGDASIHDTVENLIILANNSLSSNGNVTESGCKECEELEEKNIKEFLQSFVHIVQMFINTSTTTPAPRPPTPAPTIASQPLSLRPEACRPAAGGAVHTRGLDFACDIYIWAPLAGTCGVLLLSLVITLYC

SEQ ID NO: 1144 - protein, 676 aa, synthetic construct
  REGION 1..676: note = Synthetic
MALPVTALLLPLALLLHAARPQVQLVQSGAEVKKPGASVKVSCKASGYTFTNYGFSWVRQAPGQGLDWMGWISAYNGYTNYTQKLQGRVTMTTDTSTTTAYMELRSLRSDDTAVYYCARRGLLYYYYSMDVWGKGTTVTVSSGGGGSGGGGSGGGGSEIVLTQSPATLSLSPGERATLSCGASQSVYNSYLAWYQQKPGLAPRLLIYDASLRATGVPDRFSGSGSGTDFTLTISTLEPEDFAVYYCQQYGGSPMYTFGQGTKLEIKESKYGPPCPSCPIYIWAPLAGTCGVLLLSLVITLYCRRDQRLPPDAHKPPGGGSFRTPIQEEQADAHSTLAKIRVKFSRSADAPAYQQGQNQLYNELNLGRREEYDVLDKRRGRDPEMGGKPRRKNPQEGLYNELQKDKMAEAYSEIGMKGERRRGKGHDGLYQGLSTATKDTYDALHMQALPPRGSGEGRGSLLTCGDVEENPGPMALPVTALLLPLALLLHAARPNWVNVISDLKKIEDLIQSMHIDATLYTESDVHPSCKVTAMKCFLLELQVISLESGDASIHDTVENLIILANNSLSSNGNVTESGCKECEELEEKNIKEFLQSFVHIVQMFINTSTTTPAPRPPTPAPTIASQPLSLRPEACRPAAGGAVHTRGLDFACDIYIWAPLAGTCGVLLLSLVITLYC

SEQ ID NO: 1145 - protein, 672 aa, synthetic construct
  REGION 1..672: note = Synthetic
MALPVTALLLPLALLLHAARPEVQLLESGGGLVQPGGSLRLSCTASGFTFSSFAMSWVRQAPGKGLEWVSAMSGSGDTTYYADSVKGRFTISRDNSKTTLYLQMNSLRAEDTAVYSCAKHTTYYMDVWGKGTTVTVSSGGGGSGGGGSGGGGSQTVVTQEPSLSVSPGGTVTLTCGLSSGSVSTSDYPSWYQQTPGQAPRTLIYRTNTRSSGVPDRFSGSILGNKAALTITGAQADDESDYYCVLYMDSGIIFGSGTKVTVLESKYGPPCPSCPIYIWAPLAGTCGVLLLSLVITLYCRRDQRLPPDAHKPPGGGSFRTPIQEEQADAHSTLAKIRVKFSRSADAPAYQQGQNQLYNELNLGRREEYDVLDKRRGRDPEMGGKPRRKNPQEGLYNELQKDKMAEAYSEIGMKGERRRGKGHDGLYQGLSTATKDTYDALHMQALPPRGSGEGRGSLLTCGDVEENPGPMALPVTALLLPLALLLHAARPNWVNVISDLKKIEDLIQSMHIDATLYTESDVHPSCKVTAMKCFLLELQVISLESGDASIHDTVENLIILANNSLSSNGNVTESGCKECEELEEKNIKEFLQSFVHIVQMFINTSTTTPAPRPPTPAPTIASQPLSLRPEACRPAAGGAVHTRGLDFACDIYIWAPLAGTCGVLLLSLVITLYC

SEQ ID NO: 1146 - protein, 672 aa, synthetic construct
  REGION 1..672: note = Synthetic
MALPVTALLLPLALLLHAARPEVQLLESGGGLVQPGGSLRLSCAASGFTFNTYAMSWVRQAPGKGLEWVSAMSGSGDTTYYADSVKGRFTISRDNSKTTLYLQMNSLRAEDTAVYSCAKHTSYYMDVWGKGTTVTVSSGGGGSGGGGSGGGGSQTVVTQEPSLSVSPGGTVTLTCGLSSGSVSTSDYPSWYQQTPGQAPRTLIYRTNTRSSGVPDRFSGSILGNKAALTITGAQADDESDYYCVLYMGSGIIFGSGTKVTVLESKYGPPCPSCPIYIWAPLAGTCGVLLLSLVITLYCRRDQRLPPDAHKPPGGGSFRTPIQEEQADAHSTLAKIRVKFSRSADAPAYQQGQNQLYNELNLGRREEYDVLDKRRGRDPEMGGKPRRKNPQEGLYNELQKDKMAEAYSEIGMKGERRRGKGHDGLYQGLSTATKDTYDALHMQALPPRGSGEGRGSLLTCGDVEENPGPMALPVTALLLPLALLLHAARPNWVNVISDLKKIEDLIQSMHIDATLYTESDVHPSCKVTAMKCFLLELQVISLESGDASIHDTVENLIILANNSLSSNGNVTESGCKECEELEEKNIKEFLQSFVHIVQMFINTSTTTPAPRPPTPAPTIASQPLSLRPEACRPAAGGAVHTRGLDFACDIYIWAPLAGTCGVLLLSLVITLYC

SEQ ID NO: 1147 - protein, 672 aa, synthetic construct
  REGION 1..672: note = Synthetic
MALPVTALLLPLALLLHAARPEVQLLESGGDLVQPGGSLRLSCAASGFTFSTYAMSWVRQAPGKGLEWVSAISGSGENIYYADSVKGRFTISRDNSKNTLFLQMNSLRAEDTAVYYCAKHTSYYMDVWGKGTTVTVSSGGGGSGGGGSGGGGSQTVVTQEPSFSVSPGGTVTLTCGLYSDSVSTSYYPSWYQQTPGQAPRTLIYNTNTRSSGVPDRFSGSILGNKAALTITGAQADDESDYYCVLYMVSGIVFGSGTKVTVLESKYGPPCPSCPIYIWAPLAGTCGVLLLSLVITLYCRRDQRLPPDAHKPPGGGSFRTPIQEEQADAHSTLAKIRVKFSRSADAPAYQQGQNQLYNELNLGRREEYDVLDKRRGRDPEMGGKPRRKNPQEGLYNELQKDKMAEAYSEIGMKGERRRGKGHDGLYQGLSTATKDTYDALHMQALPPRGSGEGRGSLLTCGDVEENPGPMALPVTALLLPLALLLHAARPNWVNVISDLKKIEDLIQSMHIDATLYTESDVHPSCKVTAMKCFLLELQVISLESGDASIHDTVENLIILANNSLSSNGNVTESGCKECEELEEKNIKEFLQSFVHIVQMFINTSTTTPAPRPPTPAPTIASQPLSLRPEACRPAAGGAVHTRGLDFACDIYIWAPLAGTCGVLLLSLVITLYC

SEQ ID NO: 1148 - protein, 678 aa, synthetic construct
  REGION 1..678: note = Synthetic
MALPVTALLLPLALLLHAARPQVQLVESGGGVVQPGRSLRLSCAASGFTFSSYGMHWVRQAPGKGLEWVAVIWYDGINKYYADSVKGRFTISRDNSKNTLYLQMNSLRAEDTAVYYCARERLERRYYYYMDVWGKGTTVTVSSGGGGSGGGGSGGGGSQTVVTQEPSFSVSPGGTVTLTCGLSSGSVSTSYYPGWYQQTPGQAPRTLIYSTNTRSSGVPDRFSGSILGNKAALTITGAQADDESDYYCVLYMGSGMFIFGSGTKVTVLESKYGPPCPSCPIYIWAPLAGTCGVLLLSLVITLYCRRDQRLPPDAHKPPGGGSFRTPIQEEQADAHSTLAKIRVKFSRSADAPAYQQGQNQLYNELNLGRREEYDVLDKRRGRDPEMGGKPRRKNPQEGLYNELQKDKMAEAYSEIGMKGERRRGKGHDGLYQGLSTATKDTYDALHMQALPPRGSGEGRGSLLTCGDVEENPGPMALPVTALLLPLALLLHAARPNWVNVISDLKKIEDLIQSMHIDATLYTESDVHPSCKVTAMKCFLLELQVISLESGDASIHDTVENLIILANNSLSSNGNVTESGCKECEELEEKNIKEFLQSFVHIVQMFINTSTTTPAPRPPTPAPTIASQPLSLRPEACRPAAGGAVHTRGLDFACDIYIWAPLAGTCGVLLLSLVITLYC

SEQ ID NO: 1149 - protein, 672 aa, synthetic construct
  REGION 1..672: note = Synthetic
MALPVTALLLPLALLLHAARPEVQLLESGGGLVQPGGSLRLSCAASGFTFSSFAMSWVRQAPGKGLEWVSAVSGSGDDTYYADSVKGRFTISRDNSKNTLYLQMNSLRAEDTAVYYCAKHTSYYLDVWGKGTTVTVSSGGGGSGGGGSGGGGSQTVVTQEPSFSVSPGGTVTLTCALSSDSVSTSYFPSWYRQTPGQAPRTLIYNTNTRSSGVPDRFSGSILGNKAALTITGAQADDESDYYCVLYMGSGIIFGSGTKVTVLESKYGPPCPSCPIYIWAPLAGTCGVLLLSLVITLYCRRDQRLPPDAHKPPGGGSFRTPIQEEQADAHSTLAKIRVKFSRSADAPAYQQGQNQLYNELNLGRREEYDVLDKRRGRDPEMGGKPRRKNPQEGLYNELQKDKMAEAYSEIGMKGERRRGKGHDGLYQGLSTATKDTYDALHMQALPPRGSGEGRGSLLTCGDVEENPGPMALPVTALLLPLALLLHAARPNWVNVISDLKKIEDLIQSMHIDATLYTESDVHPSCKVTAMKCFLLELQVISLESGDASIHDTVENLIILANNSLSSNGNVTESGCKECEELEEKNIKEFLQSFVHIVQMFINTSTTTPAPRPPTPAPTIASQPLSLRPEACRPAAGGAVHTRGLDFACDIYIWAPLAGTCGVLLLSLVITLYC

SEQ ID NO: 1150 - protein, 678 aa, synthetic construct
  REGION 1..678: note = Synthetic
MALPVTALLLPLALLLHAARPQVQLVESGGGVVQPGRSLRLSCAASGFNFSTFDIHWVRQAPGKGLEWVALIWYDGSYKYYADSVKGRFTISRDNSKNTLDLRMNSLRAEDTAVYYCARNDNWNDEHYYHYYMDVWGKGTTVTVSSGGGGSGGGGSGGGGSEIVLTQSPDFQSVTPKEKVTITCRASQSIGSSLHWYQQKPDQSPKLLIKFASQSFSGVPSRFSGSGSGTDFTLTINSLEAEDAATYFCHQSSSLPWTFGQGTKVEIKESKYGPPCPSCPIYIWAPLAGTCGVLLLSLVITLYCRRDQRLPPDAHKPPGGGSFRTPIQEEQADAHSTLAKIRVKFSRSADAPAYQQGQNQLYNELNLGRREEYDVLDKRRGRDPEMGGKPRRKNPQEGLYNELQKDKMAEAYSEIGMKGERRRGKGHDGLYQGLSTATKDTYDALHMQALPPRGSGEGRGSLLTCGDVEENPGPMALPVTALLLPLALLLHAARPNWVNVISDLKKIEDLIQSMHIDATLYTESDVHPSCKVTAMKCFLLELQVISLESGDASIHDTVENLIILANNSLSSNGNVTESGCKECEELEEKNIKEFLQSFVHIVQMFINTSTTTPAPRPPTPAPTIASQPLSLRPEACRPAAGGAVHTRGLDFACDIYIWAPLAGTCGVLLLSLVITLYC

SEQ ID NO: 1151 - protein, 683 aa, synthetic construct
  REGION 1..683: note = Synthetic
MALPVTALLLPLALLLHAARPEVHLLESGGGLVQPGGSLRLSCAASGFTFSSYAMNWVRQAPGKGLEWVSSISGSGSSSYYADSVKGRFTISRDNSKNTLYLQMNSLRAEDTAVYYCASRGFNSQYPPGYYYYYMDVWGKGTTVTVSSGGGGSGGGGSGGGGSQTVVTQEPSFSVSPGGTVTLTCGLSSGSVSTSYFPSWYQQTPGQAPRTLIYITNTRSSGVPDRFSGSIIGNKAALTITGAQADDESDYFCVLYMGSGTWVFGGGTKLTVLESKYGPPCPSCPIYIWAPLAGTCGVLLLSLVITLYCRRDQRLPPDAHKPPGGGSFRTPIQEEQADAHSTLAKIRVKFSRSADAPAYQQGQNQLYNELNLGRREEYDVLDKRRGRDPEMGGKPRRKNPQEGLYNELQKDKMAEAYSEIGMKGERRRGKGHDGLYQGLSTATKDTYDALHMQALPPRGSGEGRGSLLTCGDVEENPGPMALPVTALLLPLALLLHAARPNWVNVISDLKKIEDLIQSMHIDATLYTESDVHPSCKVTAMKCFLLELQVISLESGDASIHDTVENLIILANNSLSSNGNVTESGCKECEELEEKNIKEFLQSFVHIVQMFINTSTTTPAPRPPTPAPTIASQPLSLRPEACRPAAGGAVHTRGLDFACDIYIWAPLAGTCGVLLLSLVITLYC

SEQ ID NO: 1152 - protein, 670 aa, synthetic construct
  REGION 1..670: note = Synthetic
MALPVTALLLPLALLLHAARPEVQLLESGGGLVQPGGSLRLSCAASGFTFSNYAMTWVRQAPGKGLEWVSAISGSGIGTYYADSVQGRFTTSRDNSKNTLYLQMNSLRAEDTAVYYCAKGGYNWKDVWGKGTTVTVSSGGGGSGGGGSGGGGSEIVLTQSPDFQSVTPKEKVTITCRASQSIGSSLHWYQQKPDQSPKLLIKFASQSFSGVPSRFSGSGSGTDFTLTIHSLEAEDAATYYCHQSSSLPWTFGQGTKVEIKESKYGPPCPSCPIYIWAPLAGTCGVLLLSLVITLYCRRDQRLPPDAHKPPGGGSFRTPIQEEQADAHSTLAKIRVKFSRSADAPAYQQGQNQLYNELNLGRREEYDVLDKRRGRDPEMGGKPRRKNPQEGLYNELQKDKMAEAYSEIGMKGERRRGKGHDGLYQGLSTATKDTYDALHMQALPPRGSGEGRGSLLTCGDVEENPGPMALPVTALLLPLALLLHAARPNWVNVISDLKKIEDLIQSMHIDATLYTESDVHPSCKVTAMKCFLLELQVISLESGDASIHDTVENLIILANNSLSSNGNVTESGCKECEELEEKNIKEFLQSFVHIVQMFINTSTTTPAPRPPTPAPTIASQPLSLRPEACRPAAGGAVHTRGLDFACDIYIWAPLAGTCGVLLLSLVITLYC

SEQ ID NO: 1153 - protein, 678 aa, synthetic construct
  REGION 1..678: note = Synthetic
MALPVTALLLPLALLLHAARPQVQLVESGGGVVQPGRSLRLSCAASGFTFTNYDMHWVRQAPGKGLEWVTIIWHDGSNKYYLDSVRGRFTISRDNSKNTLYLQMNSLRAEDTAVYYCARGDNWNDEHHYFYYMDVWGKGTTVTVSSGGGGSGGGGSGGGGSEIVLTQSPDFQSVTPKEKVTITCRASQSIGSSLHWYQQKPDQSPKLLIKFASQSFSGVPSRFSGSGSGTDFTLTIHSLEAEDAATYYCHQSSSLPWTFGQGTKVEIKESKYGPPCPSCPIYIWAPLAGTCGVLLLSLVITLYCRRDQRLPPDAHKPPGGGSFRTPIQEEQADAHSTLAKIRVKFSRSADAPAYQQGQNQLYNELNLGRREEYDVLDKRRGRDPEMGGKPRRKNPQEGLYNELQKDKMAEAYSEIGMKGERRRGKGHDGLYQGLSTATKDTYDALHMQALPPRGSGEGRGSLLTCGDVEENPGPMALPVTALLLPLALLLHAARPNWVNVISDLKKIEDLIQSMHIDATLYTESDVHPSCKVTAMKCFLLELQVISLESGDASIHDTVENLIILANNSLSSNGNVTESGCKECEELEEKNIKEFLQSFVHIVQMFINTSTTTPAPRPPTPAPTIASQPLSLRPEACRPAAGGAVHTRGLDFACDIYIWAPLAGTCGVLLLSLVITLYC

SEQ ID NO: 1154 - protein, 678 aa, synthetic construct
  REGION 1..678: note = Synthetic
MALPVTALLLPLALLLHAARPQVQLVESGGGVVQPGRSLRLSCAASGFTFSNYDMHWVRQAPGKGLEWVTIIWHDGSNKYYLDSVKGRFTISRDNSKNTLYLQMNSLRAEDTAVYYCARGDNWNDEHHYFYYMDVWGKGTTVTVSSGGGGSGGGGSGGGGSEIVLTQSPATLSLSPGERATLSCRASQSVSSSLAWYQQKPGQAPRLLIYDASNRATGIPARFSGSGSGTDFTLTISSLEPEDFAVYYCQQRSNWPLTFGGGTKVEIKESKYGPPCPSCPIYIWAPLAGTCGVLLLSLVITLYCRRDQRLPPDAHKPPGGGSFRTPIQEEQADAHSTLAKIRVKFSRSADAPAYQQGQNQLYNELNLGRREEYDVLDKRRGRDPEMGGKPRRKNPQEGLYNELQKDKMAEAYSEIGMKGERRRGKGHDGLYQGLSTATKDTYDALHMQALPPRGSGEGRGSLLTCGDVEENPGPMALPVTALLLPLALLLHAARPNWVNVISDLKKIEDLIQSMHIDATLYTESDVHPSCKVTAMKCFLLELQVISLESGDASIHDTVENLIILANNSLSSNGNVTESGCKECEELEEKNIKEFLQSFVHIVQMFINTSTTTPAPRPPTPAPTIASQPLSLRPEACRPAAGGAVHTRGLDFACDIYIWAPLAGTCGVLLLSLVITLYC

SEQ ID NO: 1155 - protein, 674 aa, synthetic construct
  REGION 1..674: note = Synthetic
MALPVTALLLPLALLLHAARPEVQLVESGGGVVRPGGSLRLSCAASGFTFDDYGMSWVRQAPGKGLEWVSGINWNGGSTGYVDSVKGRFTISRDNAKNSLYLQMNSLRAEDTALYHCARPVTTDYYYYMDVWGKGTTVTVSSGGGGSGGGGSGGGGSEIVLTQSPGTLSLSPGERATLSCRASQSVSSSYLAWYQQKPGQAPRLLIYGASSRATGIPDRFSGSGSGTDFTLTISRLEPEDFAVYYCQQYGSSWTFGQGTKVEIKESKYGPPCPSCPIYIWAPLAGTCGVLLLSLVITLYCRRDQRLPPDAHKPPGGGSFRTPIQEEQADAHSTLAKIRVKFSRSADAPAYQQGQNQLYNELNLGRREEYDVLDKRRGRDPEMGGKPRRKNPQEGLYNELQKDKMAEAYSEIGMKGERRRGKGHDGLYQGLSTATKDTYDALHMQALPPRGSGEGRGSLLTCGDVEENPGPMALPVTALLLPLALLLHAARPNWVNVISDLKKIEDLIQSMHIDATLYTESDVHPSCKVTAMKCFLLELQVISLESGDASIHDTVENLIILANNSLSSNGNVTESGCKECEELEEKNIKEFLQSFVHIVQMFINTSTTTPAPRPPTPAPTIASQPLSLRPEACRPAAGGAVHTRGLDFACDIYIWAPLAGTCGVLLLSLVITLYC

SEQ ID NO: 1156 - protein, 682 aa, synthetic construct
  REGION 1..682: note = Synthetic
MALPVTALLLPLALLLHAARPEVQLLESGGGLVQPGGSLRLSCAASGFTFSSYAMSWVRQAPGKGLEWVSAISGSGGSTYYADSVKGRFTISRDNSKNTLYLQMNSLRAEDTAVYYCAKKGTSYNWNDVHYYYYYYMDVWGKGTTVTVSSGGGGSGGGGSGGGGSEIVLTQSPGTLSLSPGERATLSCRASQSVSSSYLAWYQQKPGQAPRLLIYGASSRATGIPDRFSGSGSGTDFTLTISRLEPEDFAVYYCQQYGSSWTFGQGTKVEIKESKYGPPCPSCPIYIWAPLAGTCGVLLLSLVITLYCRRDQRLPPDAHKPPGGGSFRTPIQEEQADAHSTLAKIRVKFSRSADAPAYQQGQNQLYNELNLGRREEYDVLDKRRGRDPEMGGKPRRKNPQEGLYNELQKDKMAEAYSEIGMKGERRRGKGHDGLYQGLSTATKDTYDALHMQALPPRGSGEGRGSLLTCGDVEENPGPMALPVTALLLPLALLLHAARPNWVNVISDLKKIEDLIQSMHIDATLYTESDVHPSCKVTAMKCFLLELQVISLESGDASIHDTVENLIILANNSLSSNGNVTESGCKECEELEEKNIKEFLQSFVHIVQMFINTSTTTPAPRPPTPAPTIASQPLSLRPEACRPAAGGAVHTRGLDFACDIYIWAPLAGTCGVLLLSLVITLYC

SEQ ID NO: 1157 - protein, 676 aa, synthetic construct
  REGION 1..676: note = Synthetic
MALPVTALLLPLALLLHAARPQLQLQESGPGLVKPSETLSLTCTVSGGSISSSSYYWGWIRQPPGKGLEWIGSIYYSGSTYYNPSLKSRVTISVDTSKNQFSLKLSSVTAADTAVYYCTTGTTAYYYYYYMDVWGKGTTVTVSSGGGGSGGGGSGGGGSEIVLTQSPGTLSLSPGERATLSCRASQSVSSSYLAWYQQKPGQAPRLLIYGASSRATGIPDRFSGSGSGTDFTLTISRLEPEDFAVYYCQQYGSSWTFGQGTKVEIKESKYGPPCPSCPIYIWAPLAGTCGVLLLSLVITLYCRRDQRLPPDAHKPPGGGSFRTPIQEEQADAHSTLAKIRVKFSRSADAPAYQQGQNQLYNELNLGRREEYDVLDKRRGRDPEMGGKPRRKNPQEGLYNELQKDKMAEAYSEIGMKGERRRGKGHDGLYQGLSTATKDTYDALHMQALPPRGSGEGRGSLLTCGDVEENPGPMALPVTALLLPLALLLHAARPNWVNVISDLKKIEDLIQSMHIDATLYTESDVHPSCKVTAMKCFLLELQVISLESGDASIHDTVENLIILANNSLSSNGNVTESGCKECEELEEKNIKEFLQSFVHIVQMFINTSTTTPAPRPPTPAPTIASQPLSLRPEACRPAAGGAVHTRGLDFACDIYIWAPLAGTCGVLLLSLVITLYC

SEQ ID NO: 1158 - protein, 675 aa, synthetic construct
  REGION 1..675: note = Synthetic
MALPVTALLLPLALLLHAARPEVQLLESGGGLVQPGGSLRLSCAASGFTFSSYAMTWVRQAPGKGLEWVSAISGSGGSTYYADSVKGRFTISRDNSKNTLYLQMNSLRAEDTAVYYCARGGYNWHYYYYMDVWGKGTTVTVSSGGGGSGGGGSGGGGSEIVLTQSPGTLSLSPGERATLSCRASQSVSSSYLAWYQQKPGQAPRLLIYGASSRATGIPDRFSGSGSGTDFTLTISRLEPEDFAVYYCQQYGSSWTFGQGTKVEIKESKYGPPCPSCPIYIWAPLAGTCGVLLLSLVITLYCRRDQRLPPDAHKPPGGGSFRTPIQEEQADAHSTLAKIRVKFSRSADAPAYQQGQNQLYNELNLGRREEYDVLDKRRGRDPEMGGKPRRKNPQEGLYNELQKDKMAEAYSEIGMKGERRRGKGHDGLYQGLSTATKDTYDALHMQALPPRGSGEGRGSLLTCGDVEENPGPMALPVTALLLPLALLLHAARPNWVNVISDLKKIEDLIQSMHIDATLYTESDVHPSCKVTAMKCFLLELQVISLESGDASIHDTVENLIILANNSLSSNGNVTESGCKECEELEEKNIKEFLQSFVHIVQMFINTSTTTPAPRPPTPAPTIASQPLSLRPEACRPAAGGAVHTRGLDFACDIYIWAPLAGTCGVLLLSLVITLYC

SEQ ID NO: 1159 - protein, 679 aa, synthetic construct
  REGION 1..679: note = Synthetic
MALPVTALLLPLALLLHAARPQVQLVESGGGVVQPGRSLRLSCAASGFTFSSYDMHWVRQAPGKGLEWVSVIWYDGSNKKYGDSAKGRFTISRDNSKNTLDLQMNSLRAEDTAVYYCARGDNWNDEGGYYYYYMDVWGKGTTVTVSSGGGGSGGGGSGGGGSEIVLTQSPDFQSVTPKEKVTITCRASQNIGSSLHWYQQKPDQSPKLLIKFASQSISGVPSRFSGSGSGTDFTLTINSLEAEDAAAYYCHQSSSLPWTFGQGTKVEIKESKYGPPCPSCPIYIWAPLAGTCGVLLLSLVITLYCRRDQRLPPDAHKPPGGGSFRTPIQEEQADAHSTLAKIRVKFSRSADAPAYQQGQNQLYNELNLGRREEYDVLDKRRGRDPEMGGKPRRKNPQEGLYNELQKDKMAEAYSEIGMKGERRRGKGHDGLYQGLSTATKDTYDALHMQALPPRGSGEGRGSLLTCGDVEENPGPMALPVTALLLPLALLLHAARPNWVNVISDLKKIEDLIQSMHIDATLYTESDVHPSCKVTAMKCFLLELQVISLESGDASIHDTVENLIILANNSLSSNGNVTESGCKECEELEEKNIKEFLQSFVHIVQMFINTSTTTPAPRPPTPAPTIASQPLSLRPEACRPAAGGAVHTRGLDFACDIYIWAPLAGTCGVLLLSLVITLYC

SEQ ID NO: 1160 - protein, 679 aa, synthetic construct
  REGION 1..679: note = Synthetic
MALPVTALLLPLALLLHAARPQVQLVESGGGVVQPGRSLRLSCAASGFTFSSYDMHWVRQAPGKGLEWVSVIWYDGSNKKYGDSAKGRFTISRDNSKNTLDLQMNSLRAEDTAVYYCARGDNWNDEGGYYYYYMDVWGKGTTVTVSSGGGGSGGGGSGGGGSDIQMTQSPSSLSTSVGDRVTITCRASQGISNYLAWFQQKPGKAPKSLIYAASSLQSGVPSKFSGSGSGTDFSLTISSLQPEDFATYYCQQYNSYPITFGQGTRLEIKESKYGPPCPSCPIYIWAPLAGTCGVLLLSLVITLYCRRDQRLPPDAHKPPGGGSFRTPIQEEQADAHSTLAKIRVKFSRSADAPAYQQGQNQLYNELNLGRREEYDVLDKRRGRDPEMGGKPRRKNPQEGLYNELQKDKMAEAYSEIGMKGERRRGKGHDGLYQGLSTATKDTYDALHMQALPPRGSGEGRGSLLTCGDVEENPGPMALPVTALLLPLALLLHAARPNWVNVISDLKKIEDLIQSMHIDATLYTESDVHPSCKVTAMKCFLLELQVISLESGDASIHDTVENLIILANNSLSSNGNVTESGCKECEELEEKNIKEFLQSFVHIVQMFINTSTTTPAPRPPTPAPTIASQPLSLRPEACRPAAGGAVHTRGLDFACDIYIWAPLAGTCGVLLLSLVITLYC

SEQ ID NO: 1161 - protein, 676 aa, synthetic construct
  REGION 1..676: note = Synthetic
MALPVTALLLPLALLLHAARPQVQLVQSGAEVKKSGASVKVSCKASGYTLTSYGISWVRQAPGQGLEWMGWISAYNGNINYAQKFQGRVTMTTDTSTSTAYMELRSLRSDDTAVYYCVRDGDRYNWNHSYMDVWGKGTTVTVSSGGGGSGGGGSGGGGSEIVLTQSPDFQSVTPKEKVTITCRASQNIGSSLHWYQQKPDQSPKLLIKFASQSISGVPSRFSGSGSGTDFTLTINSLEAEDAAAYYCHQSSSLPWTFGQGTKVEIKESKYGPPCPSCPIYIWAPLAGTCGVLLLSLVITLYCRRDQRLPPDAHKPPGGGSFRTPIQEEQADAHSTLAKIRVKFSRSADAPAYQQGQNQLYNELNLGRREEYDVLDKRRGRDPEMGGKPRRKNPQEGLYNELQKDKMAEAYSEIGMKGERRRGKGHDGLYQGLSTATKDTYDALHMQALPPRGSGEGRGSLLTCGDVEENPGPMALPVTALLLPLALLLHAARPNWVNVISDLKKIEDLIQSMHIDATLYTESDVHPSCKVTAMKCFLLELQVISLESGDASIHDTVENLIILANNSLSSNGNVTESGCKECEELEEKNIKEFLQSFVHIVQMFINTSTTTPAPRPPTPAPTIASQPLSLRPEACRPAAGGAVHTRGLDFACDIYIWAPLAGTCGVLLLSLVITLYC

SEQ ID NO: 1162 - protein, 676 aa, synthetic construct
  REGION 1..676: note = Synthetic
MALPVTALLLPLALLLHAARPQVQLVQSGAEVKKSGASVKVSCKASGYTLTSYGISWVRQAPGQGLEWMGWISAYNGNINYAQKFQGRVTMTTDTSTSTAYMELRSLRSDDTAVYYCVRDGDRYNWNHSYMDVWGKGTTVTVSSGGGGSGGGGSGGGGSDIQMTQSPSSLSTSVGDRVTITCRASQGISNYLAWFQQKPGKAPKSLIYAASSLQSGVPSKFSGSGSGTDFSLTISSLQPEDFATYYCQQYNSYPITFGQGTRLEIKESKYGPPCPSCPIYIWAPLAGTCGVLLLSLVITLYCRRDQRLPPDAHKPPGGGSFRTPIQEEQADAHSTLAKIRVKFSRSADAPAYQQGQNQLYNELNLGRREEYDVLDKRRGRDPEMGGKPRRKNPQEGLYNELQKDKMAEAYSEIGMKGERRRGKGHDGLYQGLSTATKDTYDALHMQALPPRGSGEGRGSLLTCGDVEENPGPMALPVTALLLPLALLLHAARPNWVNVISDLKKIEDLIQSMHIDATLYTESDVHPSCKVTAMKCFLLELQVISLESGDASIHDTVENLIILANNSLSSNGNVTESGCKECEELEEKNIKEFLQSFVHIVQMFINTSTTTPAPRPPTPAPTIASQPLSLRPEACRPAAGGAVHTRGLDFACDIYIWAPLAGTCGVLLLSLVITLYC

SEQ ID NO: 1163 - protein, 675 aa, synthetic construct
  REGION 1..675: note = Synthetic
MALPVTALLLPLALLLHAARPEVQLLESGGDLVQPGGSLRLSCAASGFTFSTYAMTWVRQAPGKGLEWVSAISGTSGSTYYADSVKGRFTISRDNSKSTLYLHMNSLRTEDTAVYYCARGGYNWHYYYYMDVWGKGTTVTVSSGGGGSGGGGSGGGGSEIVLTQSPDFQSVTPKEKVTITCRASQSIGSSLHWYQQKPDQSPKLLIKYVSQSISGVPSRFSGSGSGTDFTLTINSLEAEDAAAYYCHQSSSLPWTFGQGTKVEIKESKYGPPCPSCPIYIWAPLAGTCGVLLLSLVITLYCRRDQRLPPDAHKPPGGGSFRTPIQEEQADAHSTLAKIRVKFSRSADAPAYQQGQNQLYNELNLGRREEYDVLDKRRGRDPEMGGKPRRKNPQEGLYNELQKDKMAEAYSEIGMKGERRRGKGHDGLYQGLSTATKDTYDALHMQALPPRGSGEGRGSLLTCGDVEENPGPMALPVTALLLPLALLLHAARPNWVNVISDLKKIEDLIQSMHIDATLYTESDVHPSCKVTAMKCFLLELQVISLESGDASIHDTVENLIILANNSLSSNGNVTESGCKECEELEEKNIKEFLQSFVHIVQMFINTSTTTPAPRPPTPAPTIASQPLSLRPEACRPAAGGAVHTRGLDFACDIYIWAPLAGTCGVLLLSLVITLYC

SEQ ID NO: 1164 - protein, 676 aa, synthetic construct
  REGION 1..676: note = Synthetic
MALPVTALLLPLALLLHAARPEVQLLESGGDLVQPGGSLRLSCAASGFTFSTYAMTWVRQAPGKGLEWVSAISGTSGSTYYADSVKGRFTISRDNSKSTLYLHMNSLRTEDTAVYYCARGGYNWHYYYYMDVWGKGTTVTVSSGGGGSGGGGSGGGGSEIVMTQSPATLSLSPGERATLSCRASQSVSSSYLSWYQQKPGLAPRLLIYGASTRATGIPARFSGSGSGTDFTLTISSLQPEDFAVYYCQQDYNLPPTFGQGTKVEIKESKYGPPCPSCPIYIWAPLAGTCGVLLLSLVITLYCRRDQRLPPDAHKPPGGGSFRTPIQEEQADAHSTLAKIRVKFSRSADAPAYQQGQNQLYNELNLGRREEYDVLDKRRGRDPEMGGKPRRKNPQEGLYNELQKDKMAEAYSEIGMKGERRRGKGHDGLYQGLSTATKDTYDALHMQALPPRGSGEGRGSLLTCGDVEENPGPMALPVTALLLPLALLLHAARPNWVNVISDLKKIEDLIQSMHIDATLYTESDVHPSCKVTAMKCFLLELQVISLESGDASIHDTVENLIILANNSLSSNGNVTESGCKECEELEEKNIKEFLQSFVHIVQMFINTSTTTPAPRPPTPAPTIASQPLSLRPEACRPAAGGAVHTRGLDFACDIYIWAPLAGTCGVLLLSLVITLYC

SEQ ID NO: 1165 - DNA, 2037 bp, synthetic construct
  misc_feature 1..2037: note = Synthetic
  source 1..2037: mol_type = other DNA
atggccttaccagtgaccgccttgctcctgccgctggccttgctgctccacgccgccaggccgcaggtgcagctggtggagtctgggggaggcgtggtccagcctgggaggtccctgagactctcctgtgcagcgtctggattcaccttcaataattatgacatgtactgggtccgccaggccccaggcaaggggctggagtgggtggcagttacatggtatgatggaagtaataaatactatgcagactccgtgaagggccgattcaccatctccagagacaattccaagaacacgctgtatctgcaaatgaacagcctgagagccgaggacacggctgtgtattactgtgcgagaggtgacaactggaatgacgaacaccactatttttactacatggacgtctggggcaaagggaccacggtcaccgtctcctcaggtggaggcggttcaggcggaggtggctctggcggtggcggatcggaaattgtgctgactcagtctccagactttcagtctgtgactccaaaggagaaagtcaccatcacctgccgggccagtcagagcattggtagtagcttacactggtaccagcagaaaccagatcagtctccaaagctcctcatcaagtttgcttcccagtccttctcaggggtcccctcgaggttcagtggcagtggatctgggacagatttcaccctcaccatccatagcctggaagctgaagatgctgcaacgtattactgtcatcagagtagtagtttaccgtggacgttcggccaagggaccaaggtggaaatcaaagagtccaaatatgggcccccatgcccatcatgcccaatctacatctgggcgcccttggccgggacttgtggggtccttctcctgtcactggttatcaccctttactgccggagggaccagaggctgccccccgatgcccacaagccccctgggggaggcagtttccggacccccatccaagaggagcaggccgacgcccactccaccctggccaagatcagagtgaagttcagcaggagcgcagacgcccccgcgtaccagcagggccagaaccagctctataacgagctcaatctaggacgaagagaggagtacgatgttttggacaagagacgtggccgggaccctgagatggggggaaagccgagaaggaagaaccctcaggaaggcctgtacaatgaactgcagaaagataagatggcggaggcctacagtgagattgggatgaaaggcgagcgccggaggggcaaggggcacgatggcctttaccagggtctcagtacagccaccaaggacacctacgacgcccttcacatgcaggccctgccccctcgcggctctggcgagggaaggggttccctgcttacttgcggcgacgtcgaagagaatcccggtccgatggccctcccagtaactgccctccttttgcccctcgcactccttcttcatgccgctcgccccaactgggtcaacgtgattagcgatttgaagaaaatcgaggaccttatacagtctatgcatattgacgctacactgtatactgagagtgatgtacacccgtcctgtaaggtaacggccatgaaatgctttcttctggagctccaggtcatcagcttggagtctggggacgcaagcatccacgatacggttgaaaacctcatcatccttgcgaacaactctctctcatctaatggaaacgttacagagagtgggtgtaaggagtgcgaagagttggaagaaaaaaacatcaaagaatttcttcaatccttcgttcacatagtgcaaatgttcattaacacgtccactaccacacccgccccgaggccacctacgccggcaccgactatcgccagtcaacccctctctctgcgccccgaggcttgccggcctgcggctggtggggcggtccacacccggggcctggattttgcgtgcgatatatacatctgggcacctcttgccggcacctgcggagtgctgcttctctcactcgttattacgctgtactgctaa

SEQ ID NO: 1166 - DNA, 2037 bp, synthetic construct
  misc_feature 1..2037: note = Synthetic
  source 1..2037: mol_type = other DNA
atggccttaccagtgaccgccttgctcctgccgctggccttgctgctccacgccgccaggccgcaggtgcagctggtggagtctgggggaggcgtggtccagcctgggaggtccctgagactctcctgtgcagcgtctgggttcaccttcagtaactatgacatgcactgggtccgccaggccccaggcaaggggctggagtgggtgacaattatatggcatgatgcaagtaataaatattatttagactccgtgaagggccgattcaccatctccagagacaattccaagaacacgctgtatctgcaaatgaacagcctgagagccgaggacacggctgtgtattactgtgcgagaggtgacaactggaacgacgaacaccactacttctactacatggacgtctggggcaaagggaccacggtcaccgtctcctcaggtggaggcggttcaggcggaggtggctctggcggtggcggatcggaaattgtgctgactcagtctccagactttcagtctgtgactccaaaggagaaagtcaccatcacctgccgggccagtcagagcattggtagtagcttacactggtaccagcagaaaccagatcagtctccaaagctcctcatcaagtttgcttcccagtccttctcaggggtcccctcgaggttcagtggcagtggatctgggacagatttcaccctcaccatccatagcctggaagctgaagatgctgcaacgtattactgtcatcagagtagtagtttaccgtggacgttcggccaagggaccaaggtggaaatcaaagagtccaaatatgggcccccatgcccatcatgcccaatctacatctgggcgcccttggccgggacttgtggggtccttctcctgtcactggttatcaccctttactgccggagggaccagaggctgccccccgatgcccacaagccccctgggggaggcagtttccggacccccatccaagaggagcaggccgacgcccactccaccctggccaagatcagagtgaagttcagcaggagcgcagacgcccccgcgtaccagcagggccagaaccagctctataacgagctcaatctaggacgaagagaggagtacgatgttttggacaagagacgtggccgggaccctgagatggggggaaagccgagaaggaagaaccctcaggaaggcctgtacaatgaactgcagaaagataagatggcggaggcctacagtgagattgggatgaaaggcgagcgccggaggggcaaggggcacgatggcctttaccagggtctcagtacagccaccaaggacacctacgacgcccttcacatgcaggccctgccccctcgcggctctggcgagggaaggggttccctgcttacttgcggcgacgtcgaagagaatcccggtccgatggccctcccagtaactgccctccttttgcccctcgcactccttcttcatgccgctcgccccaactgggtcaacgtgattagcgatttgaagaaaatcgaggaccttatacagtctatgcatattgacgctacactgtatactgagagtgatgtacacccgtcctgtaaggtaacggccatgaaatgctttcttctggagctccaggtcatcagcttggagtctggggacgcaagcatccacgatacggttgaaaacctcatcatccttgcgaacaactctctctcatctaatggaaacgttacagagagtgggtgtaaggagtgcgaagagttggaagaaaaaaacatcaaagaatttcttcaatccttcgttcacatagtgcaaatgttcattaacacgtccactaccacacccgccccgaggccacctacgccggcaccgactatcgccagtcaacccctctctctgcgccccgaggcttgccggcctgcggctggtggggcggtccacacccggggcctggattttgcgtgcgatatatacatctgggcacctcttgccggcacctgcggagtgctgcttctctcactcgttattacgctgtactgctaa

SEQ ID NO: 1167 - DNA, 2037 bp, synthetic construct
  misc_feature 1..2037: note = Synthetic
  source 1..2037: mol_type = other DNA
atggccttaccagtgaccgccttgctcctgccgctggccttgctgctccacgccgccaggccgcaggtgcagctggtggagtctgggggaggcgtggtccagcctgggaggtccctgagactctcctgtgcagcgtctgggttcaccttcagtaactatgacatgcactgggtccgccaggccccaggcaaggggctggagtgggtgacaattatatggcatgatggaagtaataaatattatttagactccgtgaagggccgattcaccatctccagagacaattccaagaacacgctgtatctgcaaatgaacagcctgagagccgaggacacggctgtgtattactgtgcgagaggtgacaactggaacgacgaacaccactacttctactacatggacgtctggggcaaagggaccacggtcaccgtctcctcaggtggaggcggttcaggcggaggtggctctggcggtggcggatcggaaattgtgctgactcagtctccagactttcagtctgtgactccaaaggagaaagtcaccatcacctgccgggccagtcagagcattggtagtagcttacactggtaccagcagaaaccagatcagtctccaaagctcctcatcaagtttgcttcccagtccttctcaggggtcccctcgaggttcagtggcagtggatctgggacagatttcaccctcaccatccatagcctggaagctgaagatgctgcaacgtattactgtcatcagagtagtagtttaccgtggacgttcggccaagggaccaaggtggaaatcaaagagtccaaatatgggcccccatgcccatcatgcccaatctacatctgggcgcccttggccgggacttgtggggtccttctcctgtcactggttatcaccctttactgccggagggaccagaggctgccccccgatgcccacaagccccctgggggaggcagtttccggacccccatccaagaggagcaggccgacgcccactccaccctggccaagatcagagtgaagttcagcaggagcgcagacgcccccgcgtaccagcagggccagaaccagctctataacgagctcaatctaggacgaagagaggagtacgatgttttggacaagagacgtggccgggaccctgagatggggggaaagccgagaaggaagaaccctcaggaaggcctgtacaatgaactgcagaaagataagatggcggaggcctacagtgagattgggatgaaaggcgagcgccggaggggcaaggggcacgatggcctttaccagggtctcagtacagccaccaaggacacctacgacgcccttcacatgcaggccctgccccctcgcggctctggcgagggaaggggttccctgcttacttgcggcgacgtcgaagagaatcccggtccgatggccctcccagtaactgccctccttttgcccctcgcactccttcttcatgccgctcgccccaactgggtcaacgtgattagcgatttgaagaaaatcgaggaccttatacagtctatgcatattgacgctacactgtatactgagagtgatgtacacccgtcctgtaaggtaacggccatgaaatgctttcttctggagctccaggtcatcagcttggagtctggggacgcaagcatccacgatacggttgaaaacctcatcatccttgcgaacaactctctctcatctaatggaaacgttacagagagtgggtgtaaggagtgcgaagagttggaagaaaaaaacatcaaagaatttcttcaatccttcgttcacatagtgcaaatgttcattaacacgtccactaccacacccgccccgaggccacctacgccggcaccgactatcgccagtcaacccctctctctgcgccccgaggcttgccggcctgcggctggtggggcggtccacacccggggcctggattttgcgtgcgatatatacatctgggcacctcttgccggcacctgcggagtgctgcttctctcactcgttattacgctgtactgctaa

SEQ ID NO: 1168 - DNA, 2019 bp, synthetic construct
  misc_feature 1..2019: note = Synthetic
  source 1..2019: mol_type = other DNA
atggccttaccagtgaccgccttgctcctgccgctggccttgctgctccacgccgccaggccggaggtgcagctgctggagtctgggggaggcttggtacagcctggggggtccctgagactctcctgtgcagcctctggattcacctttagcatctatgccatgagctgggtccgccaggctccagggaaggggctggagtgggtctcagctattagtggtggtggtgataccacatactacgcagactccgtgaagggccggttcaccatctccagagacaattccaagaccacgctggatctgcaaatgaacagcctgagagccgaggacacggccgtatattactgtgcgaaacacactagctactacatggacgtctggggcaaagggaccacggtcaccgtctcctcaggtggaggcggttcaggcggaggtggctctggcggtggcggatcgcagactgtggtgacccaggagccatcgctctcagtgtcccctggagggacagtcacactcacttgtggcttgagctctggctcagtctctactagttactaccccagctggtaccagcagaccccaggccaggctccacgcacgctcatctacagcacaaatattcggtcttctggggtccctgatcgcttctctggctccatccttgggaacaaagctgccctcaccatcacgggggcccaggcagatgatgaatctgattattattgtaagctgtatatgggaagtggcattattttcggcagtggaaccaaggtcactgtcctagagtccaaatatgggcccccatgcccatcatgcccaatctacatctgggcgcccttggccgggacttgtggggtccttctcctgtcactggttatcaccctttactgccggagggaccagaggctgccccccgatgcccacaagccccctgggggaggcagtttccggacccccatccaagaggagcaggccgacgcccactccaccctggccaagatcagagtgaagttcagcaggagcgcagacgcccccgcgtaccagcagggccagaaccagctctataacgagctcaatctaggacgaagagaggagtacgatgttttggacaagagacgtggccgggaccctgagatggggggaaagccgagaaggaagaaccctcaggaaggcctgtacaatgaactgcagaaagataagatggcggaggcctacagtgagattgggatgaaaggcgagcgccggaggggcaaggggcacgatggcctttaccagggtctcagtacagccaccaaggacacctacgacgcccttcacatgcaggccctgccccctcgcggctctggcgagggaaggggttccctgcttacttgcggcgacgtcgaagagaatcccggtccgatggccctcccagtaactgccctccttttgcccctcgcactccttcttcatgccgctcgccccaactgggtcaacgtgattagcgatttgaagaaaatcgaggaccttatacagtctatgcatattgacgctacactgtatactgagagtgatgtacacccgtcctgtaaggtaacggccatgaaatgctttcttctggagctccaggtcatcagcttggagtctggggacgcaagcatccacgatacggttgaaaacctcatcatccttgcgaacaactctctctcatctaatggaaacgttacagagagtgggtgtaaggagtgcgaagagttggaagaaaaaaacatcaaagaatttcttcaatccttcgttcacatagtgcaaatgttcattaacacgtccactaccacacccgccccgaggccacctacgccggcaccgactatcgccagtcaacccctctctctgcgccccgaggcttgccggcctgcggctggtggggcggtccacacccggggcctggattttgcgtgcgatatatacatctgggcacctcttgccggcacctgcggagtgctgcttctctcactcgttattacgctgtactgctaa

SEQ ID NO: 1169 - DNA, 2037 bp, synthetic construct
  misc_feature 1..2037: note = Synthetic
  source 1..2037: mol_type = other DNA
atggccttaccagtgaccgccttgctcctgccgctggccttgctgctccacgccgccaggccgcaggtgcagctggtggagtctgggggaggcgtggtccagcctgggaggtccctgagactctcctgtgcagcgtctggattcaccttcagtaactatgacaagcactgggtccgccaggccccaggcaaggggctggagtgggtggcagttatatggtatgatggaagtaataagtactatgcagactccgtgaagggccgattcaccatttccagagacaattccaagaacacgctgtatctacaaatgaacagcctgagagccgaggacacggctatgtattactgtgcgagaggtgacaactggaacgacgaacaccactacttctactacatggacgtctggggcaaagggaccacggtcaccgtctcctcaggtggaggcggttcaggcggaggtggctctggcggtggcggatcggaaattgtgctgactcagtctccagactttcagtctgtgactccaaaggagaaagtcaccatcacctgccgggccagtcagagcattggtagtagcttacactggtaccagcagaaaccagatcagtctccaaagctcctcatcaagtttgcttcccagtccttctcaggggtcccctcgaggttcagtggcagtggatctgggacagatttcaccctcaccatccatagcctggaagctgaagatgctgcaacgtattactgtcatcagagtagtagtttaccgtggacgttcggccaagggaccaaggtggaaatcaaagagtccaaatatgggcccccatgcccatcatgcccaatctacatctgggcgcccttggccgggacttgtggggtccttctcctgtcactggttatcaccctttactgccggagggaccagaggctgccccccgatgcccacaagccccctgggggaggcagtttccggacccccatccaagaggagcaggccgacgcccactccaccctggccaagatcagagtgaagttcagcaggagcgcagacgcccccgcgtaccagcagggccagaaccagctctataacgagctcaatctaggacgaagagaggagtacgatgttttggacaagagacgtggccgggaccctgagatggggggaaagccgagaaggaagaaccctcaggaaggcctgtacaatgaactgcagaaagataagatggcggaggcctacagtgagattgggatgaaaggcgagcgccggaggggcaaggggcacgatggcctttaccagggtctcagtacagccaccaaggacacctacgacgcccttcacatgcaggccctgccccctcgcggctctggcgagggaaggggttccctgcttacttgcggcgacgtcgaagagaatcccggtccgatggccctcccagtaactgccctccttttgcccctcgcactccttcttcatgccgctcgccccaactgggtcaacgtgattagcgatttgaagaaaatcgaggaccttatacagtctatgcatattgacgctacactgtatactgagagtgatgtacacccgtcctgtaaggtaacggccatgaaatgctttcttctggagctccaggtcatcagcttggagtctggggacgcaagcatccacgatacggttgaaaacctcatcatccttgcgaacaactctctctcatctaatggaaacgttacagagagtgggtgtaaggagtgcgaagagttggaagaaaaaaacatcaaagaatttcttcaatccttcgttcacatagtgcaaatgttcattaacacgtccactaccacacccgccccgaggccacctacgccggcaccgactatcgccagtcaacccctctctctgcgccccgaggcttgccggcctgcggctggtggggcggtccacacccggggcctggattttgcgtgcgatatatacatctgggcacctcttgccggcacctgcggagtgctgcttctctcactcgttattacgctgtactgctaa

SEQ ID NO: 1170 - DNA, 2031 bp, synthetic construct
  misc_feature 1..2031: note = Synthetic
  source 1..2031: mol_type = other DNA
atggccttaccagtgaccgccttgctcctgccgctggccttgctgctccacgccgccaggccgcaggttcagttggtacagtctggagctgaggtgaagaagcctggggcctcagtgaaggtctcctgtaaggcttctggttacacctttaccaactatggtttcagctgggtgcgacaggcccctggacaagggcttgactggatgggatggatcagcgcttacaatggttacacaaattatacacagaaactccagggcagagtcaccatgaccactgacacatccacgaccacagcctacatggagctgaggagcctgagatctgacgacacggccgtctattactgtgcgagaagaggactactctactactactactccatggacgtctggggcaaagggaccacggtcaccgtctcctcaggtggaggcggttcaggcggaggtggctctggcggtggcggatcggaaattgtgttgacgcagtctccagccaccctgtctttgtctccaggggaaagagccaccctctcctgcggggccagtcagagtgtttacaacagttacttagcctggtaccagcagaaacctggcctggcgcccaggctcctcatctatgatgcatccctcagggccactggcgtcccagacaggttcagtggcagtgggtctgggacagacttcactctcaccatcagcacactggagcctgaagattttgcagtgtattactgtcagcagtatggtggctcacccatgtacacttttggccaggggaccaagctggagatcaaagagtccaaatatgggcccccatgcccatcatgcccaatctacatctgggcgcccttggccgggacttgtggggtccttctcctgtcactggttatcaccctttactgccggagggaccagaggctgccccccgatgcccacaagccccctgggggaggcagtttccggacccccatccaagaggagcaggccgacgcccactccaccctggccaagatcagagtgaagttcagcaggagcgcagacgcccccgcgtaccagcagggccagaaccagctctataacgagctcaatctaggacgaagagaggagtacgatgttttggacaagagacgtggccgggaccctgagatggggggaaagccgagaaggaagaaccctcaggaaggcctgtacaatgaactgcagaaagataagatggcggaggcctacagtgagattgggatgaaaggcgagcgccggaggggcaaggggcacgatggcctttaccagggtctcagtacagccaccaaggacacctacgacgcccttcacatgcaggccctgccccctcgcggctctggcgagggaaggggttccctgcttacttgcggcgacgtcgaagagaatcccggtccgatggccctcccagtaactgccctccttttgcccctcgcactccttcttcatgccgctcgccccaactgggtcaacgtgattagcgatttgaagaaaatcgaggaccttatacagtctatgcatattgacgctacactgtatactgagagtgatgtacacccgtcctgtaaggtaacggccatgaaatgctttcttctggagctccaggtcatcagcttggagtctggggacgcaagcatccacgatacggttgaaaacctcatcatccttgcgaacaactctctctcatctaatggaaacgttacagagagtgggtgtaaggagtgcgaagagttggaagaaaaaaacatcaaagaatttcttcaatccttcgttcacatagtgcaaatgttcattaacacgtccactaccacacccgccccgaggccacctacgccggcaccgactatcgccagtcaacccctctctctgcgccccgaggcttgccggcctgcggctggtggggcggtccacacccggggcctggattttgcgtgcgatatatacatctgggcacctcttgccggcacctgcggagtgctgcttctctcactcgttattacgctgtactgctaa

SEQ ID NO: 1171 - DNA, 2019 bp, synthetic construct
  misc_feature 1..2019: note = Synthetic
  source 1..2019: mol_type = other DNA
atggccttaccagtgaccgccttgctcctgccgctggccttgctgctccacgccgccaggccggaggtgcagctgctggagtctgggggaggcctggtacagcctggggggtccctgagactctcctgtacagcctctggattcacctttagcagctttgccatgagctgggtccgccaggctccagggaaggggctggagtgggtctcagctatgagtggtagtggtgataccacatactacgcagactccgtgaagggccggttcaccatctcccgagacaattccaagaccacgctgtatctgcaaatgaacagcctgagagccgaggacacggccgtatattcctgtgcgaagcacactacctactacatggacgtctggggcaaagggaccacggtcaccgtctcctcaggtggaggcggttcaggcggaggtggctctggcggtggcggatcgcagactgtggtgacccaggagccatcgctctcagtgtcccctggagggacagtcacactcacttgtggcttgagctctggctcagtctctactagtgactaccccagctggtaccagcagaccccaggccaggctccacgcacgctcatctacagaacaaacactcgctcttctggggtccctgatcgcttctctggctccatccttgggaacaaagctgccctcaccatcacgggggcccaggcagatgatgaatctgattattactgtgtgctgtatatggatagtggcattattttcggcagtggaaccaaggtcactgtcctagagtccaaatatgggcccccatgcccatcatgcccaatctacatctgggcgcccttggccgggacttgtggggtccttctcctgtcactggttatcaccctttactgccggagggaccagaggctgccccccgatgcccacaagccccctgggggaggcagtttccggacccccatccaagaggagcaggccgacgcccactccaccctggccaagatcagagtgaagttcagcaggagcgcagacgcccccgcgtaccagcagggccagaaccagctctataacgagctcaatctaggacgaagagaggagtacgatgttttggacaagagacgtggccgggaccctgagatggggggaaagccgagaaggaagaaccctcaggaaggcctgtacaatgaactgcagaaagataagatggcggaggcctacagtgagattgggatgaaaggcgagcgccggaggggcaaggggcacgatggcctttaccagggtctcagtacagccaccaaggacacctacgacgcccttcacatgcaggccctgccccctcgcggctctggcgagggaaggggttccctgcttacttgcggcgacgtcgaagagaatcccggtccgatggccctcccagtaactgccctccttttgcccctcgcactccttcttcatgccgctcgccccaactgggtcaacgtgattagcgatttgaagaaaatcgaggaccttatacagtctatgcatattgacgctacactgtatactgagagtgatgtacacccgtcctgtaaggtaacggccatgaaatgctttcttctggagctccaggtcatcagcttggagtctggggacgcaagcatccacgatacggttgaaaacctcatcatccttgcgaacaactctctctcatctaatggaaacgttacagagagtgggtgtaaggagtgcgaagagttggaagaaaaaaacatcaaagaatttcttcaatccttcgttcacatagtgcaaatgttcattaacacgtccactaccacacccgccccgaggccacctacgccggcaccgactatcgccagtcaacccctctctctgcgccccgaggcttgccggcctgcggctggtggggcggtccacacccggggcctggattttgcgtgcgatatatacatctgggcacctcttgccggcacctgcggagtgctgcttctctcactcgttattacgctgtactgctaa

SEQ ID NO: 1172 - DNA, 2019 bp, synthetic construct
  misc_feature 1..2019: note = Synthetic
  source 1..2019: mol_type = other DNA
atggccttaccagtgaccgccttgctcctgccgctggccttgctgctccacgccgccaggccggaggtgcagctgctggagtctgggggaggcttggtacagcctggggggtccctgagactctcctgtgcagcctctggattcacctttaacacctatgccatgagctgggtccgccaggctccagggaaggggctggagtgggtctcagctatgagtggtagtggtgataccacatactacgcagactccgtgaagggccggttcaccatctccagagacaattccaagaccactctgtatctgcaaatgaacagcctgagagccgaggacacggccgtatattcctgtgcgaaacacacttcctactacatggacgtctggggcaaagggaccacggtcaccgtctcctcaggtggaggcggttcaggcggaggtggctctggcggtggcggatcgcagactgtggtgacccaggagccatcgctctcagtgtcccctggagggacagtcacactcacttgtggcttgagctctggctcagtctctactagtgactaccccagttggtaccagcagaccccaggccaggctccacgcacgctcatctacagaacaaacactcgctcttctggggtccctgatcgcttctctggctccatccttgggaacaaagctgccctcaccatcacgggggcccaggcagatgatgaatctgattattactgtgtgctgtatatgggtagtggcattattttcggcagtggaaccaaggtcactgtcctagagtccaaatatgggcccccatgcccatcatgcccaatctacatctgggcgcccttggccgggacttgtggggtccttctcctgtcactggttatcaccctttactgccggagggaccagaggctgccccccgatgcccacaagccccctgggggaggcagtttccggacccccatccaagaggagcaggccgacgcccactccaccctggccaagatcagagtgaagttcagcaggagcgcagacgcccccgcgtaccagcagggccagaaccagctctataacgagctcaatctaggacgaagagaggagtacgatgttttggacaagagacgtggccgggaccctgagatggggggaaagccgagaaggaagaaccctcaggaaggcctgtacaatgaactgcagaaagataagatggcggaggcctacagtgagattgggatgaaaggcgagcgccggaggggcaaggggcacgatggcctttaccagggtctcagtacagccaccaaggacacctacgacgcccttcacatgcaggccctgccccctcgcggctctggcgagggaaggggttccctgcttacttgcggcgacgtcgaagagaatcccggtccgatggccctcccagtaactgccctccttttgcccctcgcactccttcttcatgccgctcgccccaactgggtcaacgtgattagcgatttgaagaaaatcgaggaccttatacagtctatgcatattgacgctacactgtatactgagagtgatgtacacccgtcctgtaaggtaacggccatgaaatgctttcttctggagctccaggtcatcagcttggagtctggggacgcaagcatccacgatacggttgaaaacctcatcatccttgcgaacaactctctctcatctaatggaaacgttacagagagtgggtgtaaggagtgcgaagagttggaagaaaaaaacatcaaagaatttcttcaatccttcgttcacatagtgcaaatgttcattaacacgtccactaccacacccgccccgaggccacctacgccggcaccgactatcgccagtcaacccctctctctgcgccccgaggcttgccggcctgcggctggtggggcggtccacacccggggcctggattttgcgtgcgatatatacatctgggcacctcttgccggcacctgcggagtgctgcttctctcactcgttattacgctgtactgctaa

SEQ ID NO: 1173 - DNA, 2019 bp, synthetic construct
  misc_feature 1..2019: note = Synthetic
  source 1..2019: mol_type = other DNA
atggccttaccagtgaccgccttgctcctgccgctggccttgctgctccacgccgccaggccggaggtccaattattggagtctgggggagacttggtacagcctggggggtccctgagactctcctgtgcagcctctggattcacctttagcacctatgccatgagctgggtccgccaggctccagggaaggggctggaatgggtctcagctattagtggtagtggtgaaaacatatactacgcagactccgtgaagggccggttcaccatctccagagacaattccaagaacacgctatttctacaaatgaacagcctgagagccgaggacacggccgtatattactgtgcgaaacacactagctattacatggacgtctggggcaaagggaccacggtcaccgtctcctcaggtggaggcggttcaggcggaggtggctctggcggtggcggatcgcagactgtggtgacccaggagccatcgttctcagtgtcccctggagggacagtcacactcacttgtggcttatactctgactcagtctctactagttactaccccagctggtaccagcagaccccaggccaggctccacgcacgctcatctacaacacaaacactcgctcttctggggtccctgatcgcttctctggctccatccttgggaacaaagctgccctcaccatcacgggggcccaggcagatgatgaatctgattattactgtgtactatatatggttagtggcattgttttcggcagtggaaccaaggtcactgtcctggagtccaaatatgggcccccatgcccatcatgcccaatctacatctgggcgcccttggccgggacttgtggggtccttctcctgtcactggttatcaccctttactgccggagggaccagaggctgccccccgatgcccacaagccccctgggggaggcagtttccggacccccatccaagaggagcaggccgacgcccactccaccctggccaagatcagagtgaagttcagcaggagcgcagacgcccccgcgtaccagcagggccagaaccagctctataacgagctcaatctaggacgaagagaggagtacgatgttttggacaagagacgtggccgggaccctgagatggggggaaagccgagaaggaagaaccctcaggaaggcctgtacaatgaactgcagaaagataagatggcggaggcctacagtgagattgggatgaaaggcgagcgccggaggggcaaggggcacgatggcctttaccagggtctcagtacagccaccaaggacacctacgacgcccttcacatgcaggccctgccccctcgcggctctggcgagggaaggggttccctgcttacttgcggcgacgtcgaagagaatcccggtccgatggccctcccagtaactgccctccttttgcccctcgcactccttcttcatgccgctcgccccaactgggtcaacgtgattagcgatttgaagaaaatcgaggaccttatacagtctatgcatattgacgctacactgtatactgagagtgatgtacacccgtcctgtaaggtaacggccatgaaatgctttcttctggagctccaggtcatcagcttggagtctggggacgcaagcatccacgatacggttgaaaacctcatcatccttgcgaacaactctctctcatctaatggaaacgttacagagagtgggtgtaaggagtgcgaagagttggaagaaaaaaacatcaaagaatttcttcaatccttcgttcacatagtgcaaatgttcattaacacgtccactaccacacccgccccgaggccacctacgccggcaccgactatcgccagtcaacccctctctctgcgccccgaggcttgccggcctgcggctggtggggcggtccacacccggggcctggattttgcgtgcgatatatacatctgggcacctcttgccggcacctgcggagtgctgcttctctcactcgttattacgctgtactgctaa

SEQ ID NO: 1174 - DNA, 2037 bp, synthetic construct
  misc_feature 1..2037: note = Synthetic
  source 1..2037: mol_type = other DNA
atggccttaccagtgaccgccttgctcctgccgctggccttgctgctccacgccgccaggccgcaggtgcagctggtggagtctgggggaggcgtggtccagcctgggaggtccctgagactctcctgtgcagcgtctggattcaccttcagtagttatggcatgcactgggtccgccaggctccaggcaaggggctggagtgggtggcagttatatggtatgatggaattaataaatactatgcagactccgtgaagggccgattcaccatctccagagacaattccaagaacacgctgtatctgcaaatgaacagcctgagagccgaagacacggctgtgtattactgtgcgagagaacggctggaacgaaggtactactactacatggacgtctggggcaaagggaccacggtcaccgtctcctcaggtggaggcggttcaggcggaggtggctctggcggtggcggatcgcagactgtggtgacccaggagccatcgttctcagtgtcccctggagggacagtcacactcacttgtggcttgagctctggctcagtctctactagttactaccccggctggtaccagcagaccccaggccaggctccacgcacgctcatctacagcacaaacactcgctcttctggggtccctgatcgcttctctggctccatccttgggaacaaagctgccctcaccatcacgggggcccaggcagatgatgaatctgattattactgtgtgctatatatgggtagtggcatgtttattttcggcagtggaaccaaggtcactgtcctagagtccaaatatgggcccccatgcccatcatgcccaatctacatctgggcgcccttggccgggacttgtggggtccttctcctgtcactggttatcaccctttactgccggagggaccagaggctgccccccgatgcccacaagccccctgggggaggcagtttccggacccccatccaagaggagcaggccgacgcccactccaccctggccaagatcagagtgaagttcagcaggagcgcagacgcccccgcgtaccagcagggccagaaccagctctataacgagctcaatctaggacgaagagaggagtacgatgttttggacaagagacgtggccgggaccctgagatggggggaaagccgagaaggaagaaccctcaggaaggcctgtacaatgaactgcagaaagataagatggcggaggcctacagtgagattgggatgaaaggcgagcgccggaggggcaaggggcacgatggcctttaccagggtctcagtacagccaccaaggacacctacgacgcccttcacatgcaggccctgccccctcgcggctctggcgagggaaggggttccctgcttacttgcggcgacgtcgaagagaatcccggtccgatggccctcccagtaactgccctccttttgcccctcgcactccttcttcatgccgctcgccccaactgggtcaacgtgattagcgatttgaagaaaatcgaggaccttatacagtctatgcatattgacgctacactgtatactgagagtgatgtacacccgtcctgtaaggtaacggccatgaaatgctttcttctggagctccaggtcatcagcttggagtctggggacgcaagcatccacgatacggttgaaaacctcatcatccttgcgaacaactctctctcatctaatggaaacgttacagagagtgggtgtaaggagtgcgaagagttggaagaaaaaaacatcaaagaatttcttcaatccttcgttcacatagtgcaaatgttcattaacacgtccactaccacacccgccccgaggccacctacgccggcaccgactatcgccagtcaacccctctctctgcgccccgaggcttgccggcctgcggctggtggggcggtccacacccggggcctggattttgcgtgcgatatatacatctgggcacctcttgccggcacctgcggagtgctgcttctctcactcgttattacgctgtactgctaa

SEQ ID NO: 1175 - DNA, 2019 bp, synthetic construct
  misc_feature 1..2019: note = Synthetic
  source 1..2019: mol_type = other DNA
atggccttaccagtgaccgccttgctcctgccgctggccttgctgctccacgccgccaggccggaggtgcagttgttggagtctgggggaggcttggtacagcctggggggtccctgagactctcctgtgcagcctctggattcacctttagcagctttgccatgagctgggtccgccaggctccagggaaggggctggaatgggtctcagctgttagtggtagtggtgatgacacatactacgcagactccgtgaagggccggttcaccatctccagagacaattccaagaacacgctgtatctgcaaatgaacagcctgagagccgaggacacggccgtatattactgtgcgaaacacactagctactacctggacgtctggggcaaagggaccacggtcaccgtctcctcaggtggaggcggttcaggcggaggtggctctggcggtggcggatcgcagactgtggtgacccaggagccatcgttctcagtgtcccctggagggacagtcacactcacttgtgccttgagctctgactcagtctctactagttactttcccagctggtaccggcagaccccaggccaggctccacgcacgctcatctacaacacaaacactcgctcttctggggtccctgatcgcttctctggctccatccttgggaacaaagctgccctcaccatcacgggggcccaggcagatgatgaatctgattattactgtgtgctatatatgggtagtggcattattttcggcagtggaaccaaggtcactgtcctagagtccaaatatgggcccccatgcccatcatgcccaatctacatctgggcgcccttggccgggacttgtggggtccttctcctgtcactggttatcaccctttactgccggagggaccagaggctgccccccgatgcccacaagccccctgggggaggcagtttccggacccccatccaagaggagcaggccgacgcccactccaccctggccaagatcagagtgaagttcagcaggagcgcagacgcccccgcgtaccagcagggccagaaccagctctataacgagctcaatctaggacgaagagaggagtacgatgttttggacaagagacgtggccgggaccctgagatggggggaaagccgagaaggaagaaccctcaggaaggcctgtacaatgaactgcagaaagataagatggcggaggcctacagtgagattgggatgaaaggcgagcgccggaggggcaaggggcacgatggcctttaccagggtctcagtacagccaccaaggacacctacgacgcccttcacatgcaggccctgccccctcgcggctctggcgagggaaggggttccctgcttacttgcggcgacgtcgaagagaatcccggtccgatggccctcccagtaactgccctccttttgcccctcgcactccttcttcatgccgctcgccccaactgggtcaacgtgattagcgatttgaagaaaatcgaggaccttatacagtctatgcatattgacgctacactgtatactgagagtgatgtacacccgtcctgtaaggtaacggccatgaaatgctttcttctggagctccaggtcatcagcttggagtctggggacgcaagcatccacgatacggttgaaaacctcatcatccttgcgaacaactctctctcatctaatggaaacgttacagagagtgggtgtaaggagtgcgaagagttggaagaaaaaaacatcaaagaatttcttcaatccttcgttcacatagtgcaaatgttcattaacacgtccactaccacacccgccccgaggccacctacgccggcaccgactatcgccagtcaacccctctctctgcgccccgaggcttgccggcctgcggctggtggggcggtccacacccggggcctggattttgcgtgcgatatatacatctgggcacctcttgccggcacctgcggagtgctgcttctctcactcgttattacgctgtactgctaa

SEQ ID NO: 1176 - DNA, 2037 bp, synthetic construct
  misc_feature 1..2037: note = Synthetic
  source 1..2037: mol_type = other DNA
atggccttaccagtgaccgccttgctcctgccgctggccttgctgctccacgccgccaggccgcaggtgcagctggtggagtctgggggaggcgtggtccagcctgggaggtccctgagactctcctgtgcagcgtctggattcaacttcagtacctttgacatacactgggtccgccaggctccaggcaaggggctggagtgggtggcacttatatggtatgatggaagttataaatactatgcagactccgtgaagggccgattcaccatttccagagacaattccaagaacacgctggatctgcgaatgaacagcctgagagccgaggacacggctgtgtattactgtgcgcgaaatgacaactggaacgacgaacactactaccactattacatggacgtctggggcaaagggaccacggtcaccgtctcctcaggtggaggcggttcaggcggaggtggctctggcggtggcggatcggaaattgtcctgactcagtctccagactttcagtctgtgactccaaaggagaaagtcaccatcacctgccgggccagtcagagtattggtagtagcttacactggtaccagcagaaaccagatcagtctccaaagctcctcatcaagtttgcttcccagtccttctcaggggtcccctcgaggttcagtggcagtggatctgggacagatttcaccctcaccatcaatagcctggaagctgaagatgctgcaacgtatttctgtcatcagagtagtagtttaccgtggacgttcggccaagggaccaaggtggaaatcaaagagtccaaatatgggcccccatgcccatcatgcccaatctacatctgggcgcccttggccgggacttgtggggtccttctcctgtcactggttatcaccctttactgccggagggaccagaggctgccccccgatgcccacaagccccctgggggaggcagtttccggacccccatccaagaggagcaggccgacgcccactccaccctggccaagatcagagtgaagttcagcaggagcgcagacgcccccgcgtaccagcagggccagaaccagctctataacgagctcaatctaggacgaagagaggagtacgatgttttggacaagagacgtggccgggaccctgagatggggggaaagccgagaaggaagaaccctcaggaaggcctgtacaatgaactgcagaaagataagatggcggaggcctacagtgagattgggatgaaaggcgagcgccggaggggcaaggggcacgatggcctttaccagggtctcagtacagccaccaaggacacctacgacgcccttcacatgcaggccctgccccctcgcggctctggcgagggaaggggttccctgcttacttgcggcgacgtcgaagagaatcccggtccgatggccctcccagtaactgccctccttttgcccctcgcactccttcttcatgccgctcgccccaactgggtcaacgtgattagcgatttgaagaaaatcgaggaccttatacagtctatgcatattgacgctacactgtatactgagagtgatgtacacccgtcctgtaaggtaacggccatgaaatgctttcttctggagctccaggtcatcagcttggagtctggggacgcaagcatccacgatacggttgaaaacctcatcatccttgcgaacaactctctctcatctaatggaaacgttacagagagtgggtgtaaggagtgcgaagagttggaagaaaaaaacatcaaagaatttcttcaatccttcgttcacatagtgcaaatgttcattaacacgtccactaccacacccgccccgaggccacctacgccggcaccgactatcgccagtcaacccctctctctgcgccccgaggcttgccggcctgcggctggtggggcggtccacacccggggcctggattttgcgtgcgatatatacatctgggcacctcttgccggcacctgcggagtgctgcttctctcactcgttattacgctgtactgctaa

SEQ ID NO: 1177 - DNA, 2052 bp, synthetic construct
  misc_feature 1..2052: note = Synthetic
  source 1..2052: mol_type = other DNA
atggccttaccagtgaccgccttgctcctgccgctggccttgctgctccacgccgccaggccggaagtgcacctgttggagtctgggggaggcttggtccagcctggggggtccctgagactctcctgtgcggcctctggattcacctttagcagctatgccatgaactgggtccgccaggctccagggaaggggctggagtgggtctcttctattagtggtagtggtagtagctcatactacgcagactccgtgaagggccggttcaccatctccagagacaattccaagaacacgctgtatctgcaaatgaacagcctgagagccgaggacacggccgtatattactgtgcgtctcgtggattcaactcccagtatcctcccggatactactactactacatggacgtctggggcaaagggaccacggtcaccgtctcctcaggtggaggcggttcaggcggaggtggctctggcggtggcggatcgcagactgtggtgacccaggagccatcgttctcagtgtcccctggagggacagtcacactcacttgtggcttgagctctggctcagtctccactagttacttccccagctggtaccagcagacccccggccaggctccacgcacgctcatctacatcacaaacactcgctcttcaggggtccctgatcgcttctctggctccattattgggaacaaagctgccctcaccatcacgggggcccaggcagatgatgaatctgattatttctgtgtactatatatgggtagtggcacttgggtgttcggtggaggaaccaagctgactgtcctagagtccaaatatgggcccccatgcccatcatgcccaatctacatctgggcgcccttggccgggacttgtggggtccttctcctgtcactggttatcaccctttactgccggagggaccagaggctgccccccgatgcccacaagccccctgggggaggcagtttccggacccccatccaagaggagcaggccgacgcccactccaccctggccaagatcagagtgaagttcagcaggagcgcagacgcccccgcgtaccagcagggccagaaccagctctataacgagctcaatctaggacgaagagaggagtacgatgttttggacaagagacgtggccgggaccctgagatggggggaaagccgagaaggaagaaccctcaggaaggcctgtacaatgaactgcagaaagataagatggcggaggcctacagtgagattgggatgaaaggcgagcgccggaggggcaaggggcacgatggcctttaccagggtctcagtacagccaccaaggacacctacgacgcccttcacatgcaggccctgccccctcgcggctctggcgagggaaggggttccctgcttacttgcggcgacgtcgaagagaatcccggtccgatggccctcccagtaactgccctccttttgcccctcgcactccttcttcatgccgctcgccccaactgggtcaacgtgattagcgatttgaagaaaatcgaggaccttatacagtctatgcatattgacgctacactgtatactgagagtgatgtacacccgtcctgtaaggtaacggccatgaaatgctttcttctggagctccaggtcatcagcttggagtctggggacgcaagcatccacgatacggttgaaaacctcatcatccttgcgaacaactctctctcatctaatggaaacgttacagagagtgggtgtaaggagtgcgaagagttggaagaaaaaaacatcaaagaatttcttcaatccttcgttcacatagtgcaaatgttcattaacacgtccactaccacacccgccccgaggccacctacgccggcaccgactatcgccagtcaacccctctctctgcgccccgaggcttgccggcctgcggctggtggggcggtccacacccggggcctggattttgcgtgcgatatatacatctgggcacctcttgccggcacctgcggagtgctgcttctctcactcgttattacgctgtactgctaa

SEQ ID NO: 1178 - DNA, 2013 bp, synthetic construct
  misc_feature 1..2013: note = Synthetic
  source 1..2013: mol_type = other DNA
atggccttaccagtgaccgccttgctcctgccgctggccttgctgctccacgccgccaggccggaggtgcagctgttggagtctgggggaggcttggtacagcctggggggtccctgagactctcctgtgcagcctctggattcaccttcagcaactatgccatgacctgggtccgccaggctccagggaaggggctggagtgggtctcagctattagtggtagtggtattggcacatactacgcagactccgtgcagggccggttcaccacctccagagacaattccaagaacacgctgtatctgcaaatgaacagcctgagagccgaggacacggccgtttattactgtgcgaaaggggggtacaactggaaggacgtctggggcaaagggaccacggtcaccgtctcctcaggtggaggcggttcaggcggaggtggctctggcggtggcggatcggaaattgtgctgactcagtctccagactttcagtctgtgactccaaaggagaaagtcaccatcacctgccgggccagtcagagcattggtagtagcttacactggtaccagcagaaaccagatcagtctccaaagctcctcatcaagtttgcttcccagtccttctcaggggtcccctcgaggttcagtggcagtggatctgggacagatttcaccctcaccatccatagcctggaagctgaagatgctgcaacgtattactgtcatcagagtagtagtttaccgtggacgttcggccaagggaccaaggtggaaatcaaagagtccaaatatgggcccccatgcccatcatgcccaatctacatctgggcgcccttggccgggacttgtggggtccttctcctgtcactggttatcaccctttactgccggagggaccagaggctgccccccgatgcccacaagccccctgggggaggcagtttccggacccccatccaagaggagcaggccgacgcccactccaccctggccaagatcagagtgaagttcagcaggagcgcagacgcccccgcgtaccagcagggccagaaccagctctataacgagctcaatctaggacgaagagaggagtacgatgttttggacaagagacgtggccgggaccctgagatggggggaaagccgagaaggaagaaccctcaggaaggcctgtacaatgaactgcagaaagataagatggcggaggcctacagtgagattgggatgaaaggcgagcgccggaggggcaaggggcacgatggcctttaccagggtctcagtacagccaccaaggacacctacgacgcccttcacatgcaggccctgccccctcgcggctctggcgagggaaggggttccctgcttacttgcggcgacgtcgaagagaatcccggtccgatggccctcccagtaactgccctccttttgcccctcgcactccttcttcatgccgctcgccccaactgggtcaacgtgattagcgatttgaagaaaatcgaggaccttatacagtctatgcatattgacgctacactgtatactgagagtgatgtacacccgtcctgtaaggtaacggccatgaaatgctttcttctggagctccaggtcatcagcttggagtctggggacgcaagcatccacgatacggttgaaaacctcatcatccttgcgaacaactctctctcatctaatggaaacgttacagagagtgggtgtaaggagtgcgaagagttggaagaaaaaaacatcaaagaatttcttcaatccttcgttcacatagtgcaaatgttcattaacacgtccactaccacacccgccccgaggccacctacgccggcaccgactatcgccagtcaacccctctctctgcgccccgaggcttgccggcctgcggctggtggggcggtccacacccggggcctggattttgcgtgcgatatatacatctgggcacctcttgccggcacctgcggagtgctgcttctctcactcgttattacgctgtactgctaa

SEQ ID NO: 1179 - DNA, 2037 bp, synthetic construct
  misc_feature 1..2037: note = Synthetic
  source 1..2037: mol_type = other DNA
atggccttaccagtgaccgccttgctcctgccgctggccttgctgctccacgccgccaggccgcaggtgcagctggtggagtctgggggaggcgtggtccagcctgggaggtccctgagactctcctgtgcagcgtctgggttcaccttcactaactatgacatgcactgggtccgccaggccccaggcaaggggctggagtgggtgacaattatatggcatgatggaagtaataaatattatttagactccgtgaggggccgattcaccatctccagagacaattccaagaacacgctgtatctgcaaatgaacagcctgagagccgaggacacggctgtgtattactgtgcgagaggtgacaactggaacgacgaacaccactacttctactacatggacgtctggggcaaagggaccacggtcaccgtctcctcaggtggaggcggttcaggcggaggtggctctggcggtggcggatcggaaattgtgctgactcagtctccagactttcagtctgtgactccaaaggagaaagtcaccatcacctgccgggccagtcagagcattggtagtagcttacactggtaccagcagaaaccagatcagtctccaaagctcctcatcaagtttgcttcccagtccttctcaggggtcccctcgaggttcagtggcagtggatctgggacagatttcaccctcaccatccatagcctggaagctgaagatgctgcaacgtattactgtcatcagagtagtagtttaccgtggacgttcggccaagggaccaaggtggaaatcaaagagtccaaatatgggcccccatgcccatcatgcccaatctacatctgggcgcccttggccgggacttgtggggtccttctcctgtcactggttatcaccctttactgccggagggaccagaggctgccccccgatgcccacaagccccctgggggaggcagtttccggacccccatccaagaggagcaggccgacgcccactccaccctggccaagatcagagtgaagttcagcaggagcgcagacgcccccgcgtaccagcagggccagaaccagctctataacgagctcaatctaggacgaagagaggagtacgatgttttggacaagagacgtggccgggaccctgagatggggggaaagccgagaaggaagaaccctcaggaaggcctgtacaatgaactgcagaaagataagatggcggaggcctacagtgagattgggatgaaaggcgagcgccggaggggcaaggggcacgatggcctttaccagggtctcagtacagccaccaaggacacctacgacgcccttcacatgcaggccctgccccctcgcggctctggcgagggaaggggttccctgcttacttgcggcgacgtcgaagagaatcccggtccgatggccctcccagtaactgccctccttttgcccctcgcactccttcttcatgccgctcgccccaactgggtcaacgtgattagcgatttgaagaaaatcgaggaccttatacagtctatgcatattgacgctacactgtatactgagagtgatgtacacccgtcctgtaaggtaacggccatgaaatgctttcttctggagctccaggtcatcagcttggagtctggggacgcaagcatccacgatacggttgaaaacctcatcatccttgcgaacaactctctctcatctaatggaaacgttacagagagtgggtgtaaggagtgcgaagagttggaagaaaaaaacatcaaagaatttcttcaatccttcgttcacatagtgcaaatgttcattaacacgtccactaccacacccgccccgaggccacctacgccggcaccgactatcgccagtcaacccctctctctgcgccccgaggcttgccggcctgcggctggtggggcggtccacacccggggcctggattttgcgtgcgatatatacatctgggcacctcttgccggcacctgcggagtgctgcttctctcactcgttattacgctgtactgctaa

SEQ ID NO: 1180 - DNA, 2037 bp, synthetic construct
  misc_feature 1..2037: note = Synthetic
  source 1..2037: mol_type = other DNA
atggccttaccagtgaccgccttgctcctgccgctggccttgctgctccacgccgccaggccgcaggtgcagctggtggagtctgggggaggcgtggtccagcctgggaggtccctgagactctcctgtgcagcgtctgggttcaccttcagtaactatgacatgcactgggtccgccaggccccaggcaaggggctggagtgggtgacaattatatggcatgatggaagtaataaatattatttagactccgtgaagggccgattcaccatctccagagacaattccaagaacacgctgtatctgcaaatgaacagcctgagagccgaggacacggctgtgtattactgtgcgagaggtgacaactggaacgacgaacaccactacttctactacatggacgtctggggcaaagggaccacggtcaccgtctcctcaggtggaggcggttcaggcggaggtggctctggcggtggcggatcggaaattgtgttgacacagtctccagccaccctgtctttgtctccaggggaaagagccaccctctcctgcagggccagtcagagtgttagcagctccttagcctggtaccaacagaaacctggccaggctccccggctcctcatctatgatgcatccaacagggccactggcatcccagccaggttcagtggcagtgggtctgggacagacttcactctcaccatcagcagcctagagcctgaagattttgcagtttattactgtcagcagcgtagcaactggcctctcactttcggcggagggaccaaggtggagatcaaagagtccaaatatgggcccccatgcccatcatgcccaatctacatctgggcgcccttggccgggacttgtggggtccttctcctgtcactggttatcaccctttactgccggagggaccagaggctgccccccgatgcccacaagccccctgggggaggcagtttccggacccccatccaagaggagcaggccgacgcccactccaccctggccaagatcagagtgaagttcagcaggagcgcagacgcccccgcgtaccagcagggccagaaccagctctataacgagctcaatctaggacgaagagaggagtacgatgttttggacaagagacgtggccgggaccctgagatggggggaaagccgagaaggaagaaccctcaggaaggcctgtacaatgaactgcagaaagataagatggcggaggcctacagtgagattgggatgaaaggcgagcgccggaggggcaaggggcacgatggcctttaccagggtctcagtacagccaccaaggacacctacgacgcccttcacatgcaggccctgccccctcgcggctctggcgagggaaggggttccctgcttacttgcggcgacgtcgaagagaatcccggtccgatggccctcccagtaactgccctccttttgcccctcgcactccttcttcatgccgctcgccccaactgggtcaacgtgattagcgatttgaagaaaatcgaggaccttatacagtctatgcatattgacgctacactgtatactgagagtgatgtacacccgtcctgtaaggtaacggccatgaaatgctttcttctggagctccaggtcatcagcttggagtctggggacgcaagcatccacgatacggttgaaaacctcatcatccttgcgaacaactctctctcatctaatggaaacgttacagagagtgggtgtaaggagtgcgaagagttggaagaaaaaaacatcaaagaatttcttcaatccttcgttcacatagtgcaaatgttcattaacacgtccactaccacacccgccccgaggccacctacgccggcaccgactatcgccagtcaacccctctctctgcgccccgaggcttgccggcctgcggctggtggggcggtccacacccggggcctggattttgcgtgcgatatatacatctgggcacctcttgccggcacctgcggagtgctgcttctctcactcgttattacgctgtactgctaa

SEQ ID NO: 1181 - DNA, 2025 bp, synthetic construct
  misc_feature 1..2025: note = Synthetic
  source 1..2025: mol_type = other DNA
atggccttaccagtgaccgccttgctcctgccgctggccttgctgctccacgccgccaggccggaggtgcagctggtggagtctgggggaggtgtggtacggcctggggggtccctgagactctcctgtgcagcctctggattcacctttgatgattatggcatgagctgggtccgccaagctccagggaaggggctggagtgggtctctggtattaattggaatggtggtagcacaggttatgtagactctgtgaagggccgattcaccatctccagagacaacgccaagaactccctgtatctgcaaatgaacagtctgagagccgaggacacggccttgtatcactgtgcgagaccagtaactacggactactactactacatggacgtctggggcaaagggaccacggtcaccgtctcctcaggtggaggcggttcaggcggaggtggctctggcggtggcggatcggaaattgtgttgacgcagtctccaggcaccctgtctttgtctccaggggaaagagccaccctctcctgcagggccagtcagagtgttagcagcagctacttagcctggtaccagcagaaacctggccaggctcccaggctcctcatctatggtgcatccagcagggccactggcatcccagacaggttcagtggcagtgggtctgggacagacttcactctcaccatcagcagactggagcctgaagattttgcagtgtattactgtcagcagtatggtagctcgtggacgttcggccaagggaccaaggtggaaatcaaagagtccaaatatgggcccccatgcccatcatgcccaatctacatctgggcgcccttggccgggacttgtggggtccttctcctgtcactggttatcaccctttactgccggagggaccagaggctgccccccgatgcccacaagccccctgggggaggcagtttccggacccccatccaagaggagcaggccgacgcccactccaccctggccaagatcagagtgaagttcagcaggagcgcagacgcccccgcgtaccagcagggccagaaccagctctataacgagctcaatctaggacgaagagaggagtacgatgttttggacaagagacgtggccgggaccctgagatggggggaaagccgagaaggaagaaccctcaggaaggcctgtacaatgaactgcagaaagataagatggcggaggcctacagtgagattgggatgaaaggcgagcgccggaggggcaaggggcacgatggcctttaccagggtctcagtacagccaccaaggacacctacgacgcccttcacatgcaggccctgccccctcgcggctctggcgagggaaggggttccctgcttacttgcggcgacgtcgaagagaatcccggtccgatggccctcccagtaactgccctccttttgcccctcgcactccttcttcatgccgctcgccccaactgggtcaacgtgattagcgatttgaagaaaatcgaggaccttatacagtctatgcatattgacgctacactgtatactgagagtgatgtacacccgtcctgtaaggtaacggccatgaaatgctttcttctggagctccaggtcatcagcttggagtctggggacgcaagcatccacgatacggttgaaaacctcatcatccttgcgaacaactctctctcatctaatggaaacgttacagagagtgggtgtaaggagtgcgaagagttggaagaaaaaaacatcaaagaatttcttcaatccttcgttcacatagtgcaaatgttcattaacacgtccactaccacacccgccccgaggccacctacgccggcaccgactatcgccagtcaacccctctctctgcgccccgaggcttgccggcctgcggctggtggggcggtccacacccggggcctggattttgcgtgcgatatatacatctgggcacctcttgccggcacctgcggagtgctgcttctctcactcgttattacgctgtactgctaa

SEQ ID NO: 1182 - DNA, 2049 bp, synthetic construct
  misc_feature 1..2049: note = Synthetic
  source 1..2049: mol_type = other DNA
atggccttaccagtgaccgccttgctcctgccgctggccttgctgctccacgccgccaggccggaggtgcagctgttggagtctgggggaggcttggtacagcctggggggtccctgagactctcctgtgcagcctctggattcacctttagcagctatgccatgagctgggtccgccaggctccagggaaggggctggagtgggtctcagctattagtggtagtggtggtagcacatactacgcagactccgtgaagggccggttcaccatctccagagacaattccaagaacacgctgtatctgcaaatgaacagcctgagagccgaggacacggccgtatattactgtgcgaaaaaggggacgtcgtacaactggaacgacgtccattactactactactactacatggacgtctggggcaaagggaccacggtcaccgtctcctcaggtggaggcggttcaggcggaggtggctctggcggtggcggatcggaaattgtgttgacgcagtctccaggcaccctgtctttgtctccaggggaaagagccaccctctcctgcagggccagtcagagtgttagcagcagctacttagcctggtaccagcagaaacctggccaggctcccaggctcctcatctatggtgcatccagcagggccactggcatcccagacaggttcagtggcagtgggtctgggacagacttcactctcaccatcagcagactggagcctgaagattttgcagtgtattactgtcagcagtatggtagctcgtggacgttcggccaagggaccaaggtggaaatcaaagagtccaaatatgggcccccatgcccatcatgcccaatctacatctgggcgcccttggccgggacttgtggggtccttctcctgtcactggttatcaccctttactgccggagggaccagaggctgccccccgatgcccacaagccccctgggggaggcagtttccggacccccatccaagaggagcaggccgacgcccactccaccctggccaagatcagagtgaagttcagcaggagcgcagacgcccccgcgtaccagcagggccagaaccagctctataacgagctcaatctaggacgaagagaggagtacgatgttttggacaagagacgtggccgggaccctgagatggggggaaagccgagaaggaagaaccctcaggaaggcctgtacaatgaactgcagaaagataagatggcggaggcctacagtgagattgggatgaaaggcgagcgccggaggggcaaggggcacgatggcctttaccagggtctcagtacagccaccaaggacacctacgacgcccttcacatgcaggccctgccccctcgcggctctggcgagggaaggggttccctgcttacttgcggcgacgtcgaagagaatcccggtccgatggccctcccagtaactgccctccttttgcccctcgcactccttcttcatgccgctcgccccaactgggtcaacgtgattagcgatttgaagaaaatcgaggaccttatacagtctatgcatattgacgctacactgtatactgagagtgatgtacacccgtcctgtaaggtaacggccatgaaatgctttcttctggagctccaggtcatcagcttggagtctggggacgcaagcatccacgatacggttgaaaacctcatcatccttgcgaacaactctctctcatctaatggaaacgttacagagagtgggtgtaaggagtgcgaagagttggaagaaaaaaacatcaaagaatttcttcaatccttcgttcacatagtgcaaatgttcattaacacgtccactaccacacccgccccgaggccacctacgccggcaccgactatcgccagtcaacccctctctctgcgccccgaggcttgccggcctgcggctggtggggcggtccacacccggggcctggattttgcgtgcgatatatacatctgggcacctcttgccggcacctgcggagtgctgcttctctcactcgttattacgctgtactgctaa

SEQ ID NO: 1183 - DNA, 2031 bp, synthetic construct
  misc_feature 1..2031: note = Synthetic
  source 1..2031: mol_type = other DNA
atggccttaccagtgaccgccttgctcctgccgctggccttgctgctccacgccgccaggccgcagctgcagctgcaggagtcgggcccaggactggtgaagccttcggagaccctgtccctcacctgcactgtctctggtggctccatcagcagtagtagttactactggggctggatccgccagcccccagggaaggggctggagtggattgggagtatctattatagtgggagcacctactacaacccgtccctcaagagtcgagtcaccatatccgtagacacgtccaagaaccagttctccctgaagctgagctctgtgaccgccgcagacacggctgtgtattactgcacaactggaacgacggcttactactactactactacatggacgtctggggcaaagggaccacggtcaccgtctcctcaggtggaggcggttcaggcggaggtggctctggcggtggcggatcggaaattgtgttgacgcagtctccaggcaccctgtctttgtctccaggggaaagagccaccctctcctgcagggccagtcagagtgttagcagcagctacttagcctggtaccagcagaaacctggccaggctcccaggctcctcatctatggtgcatccagcagggccactggcatcccagacaggttcagtggcagtgggtctgggacagacttcactctcaccatcagcagactggagcctgaagattttgcagtgtattactgtcagcagtatggtagctcgtggacgttcggccaagggaccaaggtggaaatcaaagagtccaaatatgggcccccatgcccatcatgcccaatctacatctgggcgcccttggccgggacttgtggggtccttctcctgtcactggttatcaccctttactgccggagggaccagaggctgccccccgatgcccacaagccccctgggggaggcagtttccggacccccatccaagaggagcaggccgacgcccactccaccctggccaagatcagagtgaagttcagcaggagcgcagacgcccccgcgtaccagcagggccagaaccagctctataacgagctcaatctaggacgaagagaggagtacgatgttttggacaagagacgtggccgggaccctgagatggggggaaagccgagaaggaagaaccctcaggaaggcctgtacaatgaactgcagaaagataagatggcggaggcctacagtgagattgggatgaaaggcgagcgccggaggggcaaggggcacgatggcctttaccagggtctcagtacagccaccaaggacacctacgacgcccttcacatgcaggccctgccccctcgcggctctggcgagggaaggggttccctgcttacttgcggcgacgtcgaagagaatcccggtccgatggccctcccagtaactgccctccttttgcccctcgcactccttcttcatgccgctcgccccaactgggtcaacgtgattagcgatttgaagaaaatcgaggaccttatacagtctatgcatattgacgctacactgtatactgagagtgatgtacacccgtcctgtaaggtaacggccatgaaatgctttcttctggagctccaggtcatcagcttggagtctggggacgcaagcatccacgatacggttgaaaacctcatcatccttgcgaacaactctctctcatctaatggaaacgttacagagagtgggtgtaaggagtgcgaagagttggaagaaaaaaacatcaaagaatttcttcaatccttcgttcacatagtgcaaatgttcattaacacgtccactaccacacccgccccgaggccacctacgccggcaccgactatcgccagtcaacccctctctctgcgccccgaggcttgccggcctgcggctggtggggcggtccacacccggggcctggattttgcgtgcgatatatacatctgggcacctcttgccggcacctgcggagtgctgcttctctcactcgttattacgctgtactgctaa

SEQ ID NO: 1184 - DNA, 2028 bp, synthetic construct
  misc_feature 1..2028: note = Synthetic
  source 1..2028: mol_type = other DNA
atggccttaccagtgaccgccttgctcctgccgctggccttgctgctccacgccgccaggccggaggtgcagctgttggagtctgggggaggcttggtgcagcctggggggtccctgagactctcctgtgcagcctctggattcacctttagcagctatgccatgacctgggtccgccaggctccagggaaggggctggagtgggtctcagctattagtggtagtggtggtagcacatactacgcagactccgtgaagggccggttcaccatctccagagacaattccaagaacacgctgtatctgcaaatgaacagcctgagagccgaggacacggccgtatattactgtgcgagaggcgggtataactggcactactactactacatggacgtctggggcaaagggaccacggtcaccgtctcctcaggtggaggcggttcaggcggaggtggctctggcggtggcggatcggaaattgtgttgacgcagtctccaggcaccctgtctttgtctccaggggaaagagccaccctctcctgcagggccagtcagagtgttagcagcagctacttagcctggtaccagcagaaacctggccaggctcccaggctcctcatctatggtgcatccagcagggccactggcatcccagacaggttcagtggcagtgggtctgggacagacttcactctcaccatcagcagactggagcctgaagattttgcagtgtattactgtcagcagtatggtagctcgtggacgttcggccaagggaccaaggtggaaatcaaagagtccaaatatgggcccccatgcccatcatgcccaatctacatctgggcgcccttggccgggacttgtggggtccttctcctgtcactggttatcaccctttactgccggagggaccagaggctgccccccgatgcccacaagccccctgggggaggcagtttccggacccccatccaagaggagcaggccgacgcccactccaccctggccaagatcagagtgaagttcagcaggagcgcagacgcccccgcgtaccagcagggccagaaccagctctataacgagctcaatctaggacgaagagaggagtacgatgttttggacaagagacgtggccgggaccctgagatggggggaaagccgagaaggaagaaccctcaggaaggcctgtacaatgaactgcagaaagataagatggcggaggcctacagtgagattgggatgaaaggcgagcgccggaggggcaaggggcacgatggcctttaccagggtctcagtacagccaccaaggacacctacgacgcccttcacatgcaggccctgccccctcgcggctctggcgagggaaggggttccctgcttacttgcggcgacgtcgaagagaatcccggtccgatggccctcccagtaactgccctccttttgcccctcgcactccttcttcatgccgctcgccccaactgggtcaacgtgattagcgatttgaagaaaatcgaggaccttatacagtctatgcatattgacgctacactgtatactgagagtgatgtacacccgtcctgtaaggtaacggccatgaaatgctttcttctggagctccaggtcatcagcttggagtctggggacgcaagcatccacgatacggttgaaaacctcatcatccttgcgaacaactctctctcatctaatggaaacgttacagagagtgggtgtaaggagtgcgaagagttggaagaaaaaaacatcaaagaatttcttcaatccttcgttcacatagtgcaaatgttcattaacacgtccactaccacacccgccccgaggccacctacgccggcaccgactatcgccagtcaacccctctctctgcgccccgaggcttgccggcctgcggctggtggggcggtccacacccggggcctggattttgcgtgcgatatatacatctgggcacctcttgccggcacctgcggagtgctgcttctctcactcgttattacgctgtactgctaa

SEQ ID NO: 1185 - DNA, 2040 bp, synthetic construct
  misc_feature 1..2040: note = Synthetic
  source 1..2040: mol_type = other DNA
atggccttaccagtgaccgccttgctcctgccgctggccttgctgctccacgccgccaggccgcaggtgcagctggtggagtctgggggaggcgtggtccagcctgggaggtccctgagactctcctgtgcagcgtctggattcaccttcagtagctatgacatgcactgggtccgccaggctccaggcaaggggctggagtgggtgtcagttatatggtatgatggaagtaataaaaagtatggagactccgcgaagggccgattcaccatctccagagacaattccaagaacacgctggatctgcaaatgaacagcctgagagccgaggacacggctgtgtattactgtgcgagaggcgacaactggaacgacgaaggtggctactactactactacatggacgtctggggcaaagggaccacggtcaccgtctcctcaggtggaggcggttcaggcggaggtggctctggcggtggcggatcggaaattgtgctgactcagtctccagactttcagtctgtgactccaaaggagaaagtcaccatcacctgccgggccagtcagaacattggtagtagcttacactggtaccagcagaaaccagatcagtctccaaagctcctcatcaagtttgcttcccagtccatctcaggggtcccctcgaggttcagtggcagtggatctgggacagatttcaccctcaccatcaatagcctggaagctgaagatgctgcagcgtattactgtcatcagagtagtagtttaccgtggacgttcggccaagggaccaaggtggaaatcaaagagtccaaatatgggcccccatgcccatcatgcccaatctacatctgggcgcccttggccgggacttgtggggtccttctcctgtcactggttatcaccctttactgccggagggaccagaggctgccccccgatgcccacaagccccctgggggaggcagtttccggacccccatccaagaggagcaggccgacgcccactccaccctggccaagatcagagtgaagttcagcaggagcgcagacgcccccgcgtaccagcagggccagaaccagctctataacgagctcaatctaggacgaagagaggagtacgatgttttggacaagagacgtggccgggaccctgagatggggggaaagccgagaaggaagaaccctcaggaaggcctgtacaatgaactgcagaaagataagatggcggaggcctacagtgagattgggatgaaaggcgagcgccggaggggcaaggggcacgatggcctttaccagggtctcagtacagccaccaaggacacctacgacgcccttcacatgcaggccctgccccctcgcggctctggcgagggaaggggttccctgcttacttgcggcgacgtcgaagagaatcccggtccgatggccctcccagtaactgccctccttttgcccctcgcactccttcttcatgccgctcgccccaactgggtcaacgtgattagcgatttgaagaaaatcgaggaccttatacagtctatgcatattgacgctacactgtatactgagagtgatgtacacccgtcctgtaaggtaacggccatgaaatgctttcttctggagctccaggtcatcagcttggagtctggggacgcaagcatccacgatacggttgaaaacctcatcatccttgcgaacaactctctctcatctaatggaaacgttacagagagtgggtgtaaggagtgcgaagagttggaagaaaaaaacatcaaagaatttcttcaatccttcgttcacatagtgcaaatgttcattaacacgtccactaccacacccgccccgaggccacctacgccggcaccgactatcgccagtcaacccctctctctgcgccccgaggcttgccggcctgcggctggtggggcggtccacacccggggcctggattttgcgtgcgatatatacatctgggcacctcttgccggcacctgcggagtgctgcttctctcactcgttattacgctgtactgctaa

SEQ ID NO: 1186 - DNA, 2040 bp, synthetic construct
  misc_feature 1..2040: note = Synthetic
  source 1..2040: mol_type = other DNA
atggccttaccagtgaccgccttgctcctgccgctggccttgctgctccacgccgccaggccgcaggtgcagctggtggagtctgggggaggcgtggtccagcctgggaggtccctgagactctcctgtgcagcgtctggattcaccttcagtagctatgacatgcactgggtccgccaggctccaggcaaggggctggagtgggtgtcagttatatggtatgatggaagtaataaaaagtatggagactccgcgaagggccgattcaccatctccagagacaattccaagaacacgctggatctgcaaatgaacagcctgagagccgaggacacggctgtgtattactgtgcgagaggcgacaactggaacgacgaaggtggctactactactactacatggacgtctggggcaaagggaccacggtcaccgtctcctcaggtggaggcggttcaggcggaggtggctctggcggtggcggatcggacatccagatgacccagtctccatcctcactgtctacatctgtaggagacagagtcaccatcacttgtcgggcgagtcagggcattagcaattatttagcctggtttcagcagaaaccagggaaagcccctaagtccctgatctatgctgcatccagtttgcaaagtggggtcccatcaaagttcagcggcagtggatctgggacagatttctctctcaccattagcagcctgcagcctgaagattttgcaacttattactgccaacagtataatagttacccgatcaccttcggccaagggacacgactggagattaaagagtccaaatatgggcccccatgcccatcatgcccaatctacatctgggcgcccttggccgggacttgtggggtccttctcctgtcactggttatcaccctttactgccggagggaccagaggctgccccccgatgcccacaagccccctgggggaggcagtttccggacccccatccaagaggagcaggccgacgcccactccaccctggccaagatcagagtgaagttcagcaggagcgcagacgcccccgcgtaccagcagggccagaaccagctctataacgagctcaatctaggacgaagagaggagtacgatgttttggacaagagacgtggccgggaccctgagatggggggaaagccgagaaggaagaaccctcaggaaggcctgtacaatgaactgcagaaagataagatggcggaggcctacagtgagattgggatgaaaggcgagcgccggaggggcaaggggcacgatggcctttaccagggtctcagtacagccaccaaggacacctacgacgcccttcacatgcaggccctgccccctcgcggctctggcgagggaaggggttccctgcttacttgcggcgacgtcgaagagaatcccggtccgatggccctcccagtaactgccctccttttgcccctcgcactccttcttcatgccgctcgccccaactgggtcaacgtgattagcgatttgaagaaaatcgaggaccttatacagtctatgcatattgacgctacactgtatactgagagtgatgtacacccgtcctgtaaggtaacggccatgaaatgctttcttctggagctccaggtcatcagcttggagtctggggacgcaagcatccacgatacggttgaaaacctcatcatccttgcgaacaactctctctcatctaatggaaacgttacagagagtgggtgtaaggagtgcgaagagttggaagaaaaaaacatcaaagaatttcttcaatccttcgttcacatagtgcaaatgttcattaacacgtccactaccacacccgccccgaggccacctacgccggcaccgactatcgccagtcaacccctctctctgcgccccgaggcttgccggcctgcggctggtggggcggtccacacccggggcctggattttgcgtgcgatatatacatctgggcacctcttgccggcacctgcggagtgctgcttctctcactcgttattacgctgtactgctaa

SEQ ID NO: 1187 - DNA, 2031 bp, synthetic construct
  misc_feature 1..2031: note = Synthetic
  source 1..2031: mol_type = other DNA
atggccttaccagtgaccgccttgctcctgccgctggccttgctgctccacgccgccaggccgcaggttcagctggtacagtctggagctgaggtgaagaagtctggggcctcagtgaaggtctcctgcaaggcttctggttacaccttaaccagctatggcatcagctgggtgcgacaggcccctggacaagggcttgagtggatgggatggatcagcgcttacaatggtaacataaactatgcacagaagttccagggcagagtcaccatgaccacagacacatccacgagcacagcctacatggagctgaggagcctgagatctgacgacacggccgtgtattactgtgtgagagatggggaccggtacaactggaaccacagctacatggacgtctggggcaaagggaccacggtcaccgtctcctcaggtggaggcggttcaggcggaggtggctctggcggtggcggatcggaaattgtgctgactcagtctccagactttcagtctgtgactccaaaggagaaagtcaccatcacctgccgggccagtcagaacattggtagtagcttacactggtaccagcagaaaccagatcagtctccaaagctcctcatcaagtttgcttcccagtccatctcaggggtcccctcgaggttcagtggcagtggatctgggacagatttcaccctcaccatcaatagcctggaagctgaagatgctgcagcgtattactgtcatcagagtagtagtttaccgtggacgttcggccaagggaccaaggtggaaatcaaagagtccaaatatgggcccccatgcccatcatgcccaatctacatctgggcgcccttggccgggacttgtggggtccttctcctgtcactggttatcaccctttactgccggagggaccagaggctgccccccgatgcccacaagccccctgggggaggcagtttccggacccccatccaagaggagcaggccgacgcccactccaccctggccaagatcagagtgaagttcagcaggagcgcagacgcccccgcgtaccagcagggccagaaccagctctataacgagctcaatctaggacgaagagaggagtacgatgttttggacaagagacgtggccgggaccctgagatggggggaaagccgagaaggaagaaccctcaggaaggcctgtacaatgaactgcagaaagataagatggcggaggcctacagtgagattgggatgaaaggcgagcgccggaggggcaaggggcacgatggcctttaccagggtctcagtacagccaccaaggacacctacgacgcccttcacatgcaggccctgccccctcgcggctctggcgagggaaggggttccctgcttacttgcggcgacgtcgaagagaatcccggtccgatggccctcccagtaactgccctccttttgcccctcgcactccttcttcatgccgctcgccccaactgggtcaacgtgattagcgatttgaagaaaatcgaggaccttatacagtctatgcatattgacgctacactgtatactgagagtgatgtacacccgtcctgtaaggtaacggccatgaaatgctttcttctggagctccaggtcatcagcttggagtctggggacgcaagcatccacgatacggttgaaaacctcatcatccttgcgaacaactctctctcatctaatggaaacgttacagagagtgggtgtaaggagtgcgaagagttggaagaaaaaaacatcaaagaatttcttcaatccttcgttcacatagtgcaaatgttcattaacacgtccactaccacacccgccccgaggccacctacgccggcaccgactatcgccagtcaacccctctctctgcgccccgaggcttgccggcctgcggctggtggggcggtccacacccggggcctggattttgcgtgcgatatatacatctgggcacctcttgccggcacctgcggagtgctgcttctctcactcgttattacgctgtactgctaa

SEQ ID NO: 1188 - DNA, 2031 bp, synthetic construct
  misc_feature 1..2031: note = Synthetic
  source 1..2031: mol_type = other DNA
atggccttaccagtgaccgccttgctcctgccgctggccttgctgctccacgccgccaggccgcaggttcagctggtacagtctggagctgaggtgaagaagtctggggcctcagtgaaggtctcctgcaaggcttctggttacaccttaaccagctatggcatcagctgggtgcgacaggcccctggacaagggcttgagtggatgggatggatcagcgcttacaatggtaacataaactatgcacagaagttccagggcagagtcaccatgaccacagacacatccacgagcacagcctacatggagctgaggagcctgagatctgacgacacggccgtgtattactgtgtgagagatggggaccggtacaactggaaccacagctacatggacgtctggggcaaagggaccacggtcaccgtctcctcaggtggaggcggttcaggcggaggtggctctggcggtggcggatcggacatccagatgacccagtctccatcctcactgtctacatctgtaggagacagagtcaccatcacttgtcgggcgagtcagggcattagcaattatttagcctggtttcagcagaaaccagggaaagcccctaagtccctgatctatgctgcatccagtttgcaaagtggggtcccatcaaagttcagcggcagtggatctgggacagatttctctctcaccattagcagcctgcagcctgaagattttgcaacttattactgccaacagtataatagttacccgatcaccttcggccaagggacacgactggagattaaagagtccaaatatgggcccccatgcccatcatgcccaatctacatctgggcgcccttggccgggacttgtggggtccttctcctgtcactggttatcaccctttactgccggagggaccagaggctgccccccgatgcccacaagccccctgggggaggcagtttccggacccccatccaagaggagcaggccgacgcccactccaccctggccaagatcagagtgaagttcagcaggagcgcagacgcccccgcgtaccagcagggccagaaccagctctataacgagctcaatctaggacgaagagaggagtacgatgttttggacaagagacgtggccgggaccctgagatggggggaaagccgagaaggaagaaccctcaggaaggcctgtacaatgaactgcagaaagataagatggcggaggcctacagtgagattgggatgaaaggcgagcgccggaggggcaaggggcacgatggcctttaccagggtctcagtacagccaccaaggacacctacgacgcccttcacatgcaggccctgccccctcgcggctctggcgagggaaggggttccctgcttacttgcggcgacgtcgaagagaatcccggtccgatggccctcccagtaactgccctccttttgcccctcgcactccttcttcatgccgctcgccccaactgggtcaacgtgattagcgatttgaagaaaatcgaggaccttatacagtctatgcatattgacgctacactgtatactgagagtgatgtacacccgtcctgtaaggtaacggccatgaaatgctttcttctggagctccaggtcatcagcttggagtctggggacgcaagcatccacgatacggttgaaaacctcatcatccttgcgaacaactctctctcatctaatggaaacgttacagagagtgggtgtaaggagtgcgaagagttggaagaaaaaaacatcaaagaatttcttcaatccttcgttcacatagtgcaaatgttcattaacacgtccactaccacacccgccccgaggccacctacgccggcaccgactatcgccagtcaacccctctctctgcgccccgaggcttgccggcctgcggctggtggggcggtccacacccggggcctggattttgcgtgcgatatatacatctgggcacctcttgccggcacctgcggagtgctgcttctctcactcgttattacgctgtactgctaa

SEQ ID NO: 1189 - DNA, 2028 bp, synthetic construct
  misc_feature 1..2028: note = Synthetic
  source 1..2028: mol_type = other DNA
atggccttaccagtgaccgccttgctcctgccgctggccttgctgctccacgccgccaggccggaggtgcagctgttggagtctgggggagacttggtacagcctggggggtccctgcgactctcctgtgcagcctctggattcacctttagcacctatgccatgacctgggtccgccaggctccagggaaggggctggagtgggtctcagctattagtggtactagtggtagcacatactacgcagactccgtgaagggccggttcaccatctccagagacaattccaagagcacgctgtatctgcacatgaacagcctgagaaccgaggacacggccgtatattactgtgcgagaggcggatataactggcactactactactacatggacgtctggggcaaagggaccacggtcaccgtctcctcaggtggaggcggttcaggcggaggtggctctggcggtggcggatcggaaattgtgctgactcagtctccagactttcagtctgtgactccaaaggagaaagtcaccatcacctgccgggccagtcagagcattggaagtagcttacactggtaccagcagaaaccagatcagtctccaaagctcctcatcaagtatgtttcccagtccatctcaggggtcccctcgaggttcagtggcagtggatctgggacagatttcaccctcaccatcaatagcctggaagctgaagatgctgcagcgtattactgtcatcagagtagtagtttaccgtggacgttcggccaagggaccaaggtggaaatcaaagagtccaaatatgggcccccatgcccatcatgcccaatctacatctgggcgcccttggccgggacttgtggggtccttctcctgtcactggttatcaccctttactgccggagggaccagaggctgccccccgatgcccacaagccccctgggggaggcagtttccggacccccatccaagaggagcaggccgacgcccactccaccctggccaagatcagagtgaagttcagcaggagcgcagacgcccccgcgtaccagcagggccagaaccagctctataacgagctcaatctaggacgaagagaggagtacgatgttttggacaagagacgtggccgggaccctgagatggggggaaagccgagaaggaagaaccctcaggaaggcctgtacaatgaactgcagaaagataagatggcggaggcctacagtgagattgggatgaaaggcgagcgccggaggggcaaggggcacgatggcctttaccagggtctcagtacagccaccaaggacacctacgacgcccttcacatgcaggccctgccccctcgcggctctggcgagggaaggggttccctgcttacttgcggcgacgtcgaagagaatcccggtccgatggccctcccagtaactgccctccttttgcccctcgcactccttcttcatgccgctcgccccaactgggtcaacgtgattagcgatttgaagaaaatcgaggaccttatacagtctatgcatattgacgctacactgtatactgagagtgatgtacacccgtcctgtaaggtaacggccatgaaatgctttcttctggagctccaggtcatcagcttggagtctggggacgcaagcatccacgatacggttgaaaacctcatcatccttgcgaacaactctctctcatctaatggaaacgttacagagagtgggtgtaaggagtgcgaagagttggaagaaaaaaacatcaaagaatttcttcaatccttcgttcacatagtgcaaatgttcattaacacgtccactaccacacccgccccgaggccacctacgccggcaccgactatcgccagtcaacccctctctctgcgccccgaggcttgccggcctgcggctggtggggcggtccacacccggggcctggattttgcgtgcgatatatacatctgggcacctcttgccggcacctgcggagtgctgcttctctcactcgttattacgctgtactgctaa

SEQ ID NO: 1190 - DNA, 2031 bp, synthetic construct
  misc_feature 1..2031: note = Synthetic
  source 1..2031: mol_type = other DNA
atggccttaccagtgaccgccttgctcctgccgctggccttgctgctccacgccgccaggccggaggtgcagctgttggagtctgggggagacttggtacagcctggggggtccctgcgactctcctgtgcagcctctggattcacctttagcacctatgccatgacctgggtccgccaggctccagggaaggggctggagtgggtctcagctattagtggtactagtggtagcacatactacgcagactccgtgaagggccggttcaccatctccagagacaattccaagagcacgctgtatctgcacatgaacagcctgagaaccgaggacacggccgtatattactgtgcgagaggcggatataactggcactactactactacatggacgtctggggcaaagggaccacggtcaccgtctcctcaggtggaggcggttcaggcggaggtggctctggcggtggcggatcggaaattgtaatgacacagtctccagccaccctgtctttgtctccaggggaaagagccaccctctcctgcagggccagtcagagtgttagcagcagctacttatcctggtaccagcagaaacctgggctggctcccaggctcctcatctatggtgcatccaccagggccactggcatcccagccaggttcagtggcagtgggtctgggacagacttcactctcaccatcagcagcctgcagcctgaagattttgcagtttattactgtcagcaggattataacttacctccgacgttcggccaagggaccaaggtggaaatcaaagagtccaaatatgggcccccatgcccatcatgcccaatctacatctgggcgcccttggccgggacttgtggggtccttctcctgtcactggttatcaccctttactgccggagggaccagaggctgccccccgatgcccacaagccccctgggggaggcagtttccggacccccatccaagaggagcaggccgacgcccactccaccctggccaagatcagagtgaagttcagcaggagcgcagacgcccccgcgtaccagcagggccagaaccagctctataacgagctcaatctaggacgaagagaggagtacgatgttttggacaagagacgtggccgggaccctgagatggggggaaagccgagaaggaagaaccctcaggaaggcctgtacaatgaactgcagaaagataagatggcggaggcctacagtgagattgggatgaaaggcgagcgccggaggggcaaggggcacgatggcctttaccagggtctcagtacagccaccaaggacacctacgacgcccttcacatgcaggccctgccccctcgcggctctggcgagggaaggggttccctgcttacttgcggcgacgtcgaagagaatcccggtccgatggccctcccagtaactgccctccttttgcccctcgcactccttcttcatgccgctcgccccaactgggtcaacgtgattagcgatttgaagaaaatcgaggaccttatacagtctatgcatattgacgctacactgtatactgagagtgatgtacacccgtcctgtaaggtaacggccatgaaatgctttcttctggagctccaggtcatcagcttggagtctggggacgcaagcatccacgatacggttgaaaacctcatcatccttgcgaacaactctctctcatctaatggaaacgttacagagagtgggtgtaaggagtgcgaagagttggaagaaaaaaacatcaaagaatttcttcaatccttcgttcacatagtgcaaatgttcattaacacgtccactaccacacccgccccgaggccacctacgccggcaccgactatcgccagtcaacccctctctctgcgccccgaggcttgccggcctgcggctggtggggcggtccacacccggggcctggattttgcgtgcgatatatacatctgggcacctcttgccggcacctgcggagtgctgcttctctcactcgttattacgctgtactgctaa

SEQ ID NO: 1191 - DNA, 2037 bp, synthetic construct
  misc_feature 1..2037: note = Synthetic
  source 1..2037: mol_type = other DNA
atggccttaccagtgaccgccttgctcctgccgctggccttgctgctccacgccgccaggccgcaagtgcagctggtggagagcggcggaggagtggtgcaacctggccggagcctgagactgagctgcgctgccagcggcttcaccttcaacaactacgacatgtactgggtgcggcaggcccctggcaagggcctggaatgggtcgccgtgacatggtatgacggctccaacaagtactacgccgacagcgtgaagggcagattcaccatcagcagagataatagcaagaacaccctgtacctgcagatgaacagcctgcgggccgaggacaccgccgtgtactactgcgctagaggcgacaattggaacgacgagcaccattacttctactacatggacgtgtggggcaaaggcaccaccgtgaccgtgtccagcggcggcggtggatctggaggcggaggctctggaggcggcggctccgagatcgtgctgacacagtctccagatttccagtctgtgacccctaaggaaaaggttacaattacatgcagagcctctcagagcatcggaagctctctgcactggtatcagcagaaacctgatcagagccccaagctgctgatcaaattcgccagccagtccttcagcggcgtccccagccgcttcagcggcagcggcagcggcactgattttacactgaccatccacagcctggaggccgaggacgccgccacctactattgtcaccagagcagctccctgccttggacctttggccagggcacaaaggtggaaatcaaggagtccaaatatgggcccccatgcccatcatgcccaatctacatctgggcgcccttggccgggacttgtggggtccttctcctgtcactggttatcaccctttactgccggagggaccagaggctgccccccgatgcccacaagccccctgggggaggcagtttccggacccccatccaagaggagcaggccgacgcccactccaccctggccaagatcagagtgaagttcagcaggagcgcagacgcccccgcgtaccagcagggccagaaccagctctataacgagctcaatctaggacgaagagaggagtacgatgttttggacaagagacgtggccgggaccctgagatggggggaaagccgagaaggaagaaccctcaggaaggcctgtacaatgaactgcagaaagataagatggcggaggcctacagtgagattgggatgaaaggcgagcgccggaggggcaaggggcacgatggcctttaccagggtctcagtacagccaccaaggacacctacgacgcccttcacatgcaggccctgccccctcgcggctctggcgagggaaggggttccctgcttacttgcggcgacgtcgaagagaatcccggtccgatggccctcccagtaactgccctccttttgcccctcgcactccttcttcatgccgctcgccccaactgggtcaacgtgattagcgatttgaagaaaatcgaggaccttatacagtctatgcatattgacgctacactgtatactgagagtgatgtacacccgtcctgtaaggtaacggccatgaaatgctttcttctggagctccaggtcatcagcttggagtctggggacgcaagcatccacgatacggttgaaaacctcatcatccttgcgaacaactctctctcatctaatggaaacgttacagagagtgggtgtaaggagtgcgaagagttggaagaaaaaaacatcaaagaatttcttcaatccttcgttcacatagtgcaaatgttcattaacacgtccactaccacacccgccccgaggccacctacgccggcaccgactatcgccagtcaacccctctctctgcgccccgaggcttgccggcctgcggctggtggggcggtccacacccggggcctggattttgcgtgcgatatatacatctgggcacctcttgccggcacctgcggagtgctgcttctctcactcgttattacgctgtactgctaa

SEQ ID NO: 1192 - DNA, 2037 bp, synthetic construct
  misc_feature 1..2037: note = Synthetic
  source 1..2037: mol_type = other DNA
atggccttaccagtgaccgccttgctcctgccgctggccttgctgctccacgccgccaggccgcaagtgcagctggtggagtctggcggcggagtggtgcaacctggaaggagcctgcggctgagctgcgctgccagcggcttcaccttcagcaattacgacatgcactgggtgcggcaggcccctggcaaaggcctggaatgggtcacaatcatctggcatgatgccagcaacaagtactacctggacagcgtcaagggcagattcacaatcagccgggacaacagcaagaacaccctgtacctgcagatgaacagcctgagagccgaggacaccgctgtgtactattgtgccagaggagataattggaacgacgagcaccactacttctactacatggacgtgtggggcaagggcaccaccgtgaccgtttctagcggcggaggcggctccggcggtggaggctccggaggcggcggctctgagatcgtgctgacacagagccctgattttcagagcgtgacacctaaagagaaggtgaccatcacctgcagagccagccagagcatcggctccagcctgcactggtatcagcagaagcccgaccagagcccaaagctgctgatcaagttcgcctcccagtctttttccggcgtgcccagcagattcagcgggagcggctctggcaccgacttcacactgaccatccactctctggaagccgaggatgccgccacctactattgccaccagagcagctctctcccttggaccttcggccagggcacaaaagtggaaattaaggagtccaaatatgggcccccatgcccatcatgcccaatctacatctgggcgcccttggccgggacttgtggggtccttctcctgtcactggttatcaccctttactgccggagggaccagaggctgccccccgatgcccacaagccccctgggggaggcagtttccggacccccatccaagaggagcaggccgacgcccactccaccctggccaagatcagagtgaagttcagcaggagcgcagacgcccccgcgtaccagcagggccagaaccagctctataacgagctcaatctaggacgaagagaggagtacgatgttttggacaagagacgtggccgggaccctgagatggggggaaagccgagaaggaagaaccctcaggaaggcctgtacaatgaactgcagaaagataagatggcggaggcctacagtgagattgggatgaaaggcgagcgccggaggggcaaggggcacgatggcctttaccagggtctcagtacagccaccaaggacacctacgacgcccttcacatgcaggccctgccccctcgcggctctggcgagggaaggggttccctgcttacttgcggcgacgtcgaagagaatcccggtccgatggccctcccagtaactgccctccttttgcccctcgcactccttcttcatgccgctcgccccaactgggtcaacgtgattagcgatttgaagaaaatcgaggaccttatacagtctatgcatattgacgctacactgtatactgagagtgatgtacacccgtcctgtaaggtaacggccatgaaatgctttcttctggagctccaggtcatcagcttggagtctggggacgcaagcatccacgatacggttgaaaacctcatcatccttgcgaacaactctctctcatctaatggaaacgttacagagagtgggtgtaaggagtgcgaagagttggaagaaaaaaacatcaaagaatttcttcaatccttcgttcacatagtgcaaatgttcattaacacgtccactaccacacccgccccgaggccacctacgccggcaccgactatcgccagtcaacccctctctctgcgccccgaggcttgccggcctgcggctggtggggcggtccacacccggggcctggattttgcgtgcgatatatacatctgggcacctcttgccggcacctgcggagtgctgcttctctcactcgttattacgctgtactgctaa

SEQ ID NO: 1193 - DNA, 2037 bp, synthetic construct
  misc_feature 1..2037: note = Synthetic
  source 1..2037: mol_type = other DNA
atggccttaccagtgaccgccttgctcctgccgctggccttgctgctccacgccgccaggccgcaagtgcagctggtcgaaagcggcggaggcgtggtgcaacctggaagaagcctgagactgagctgcgccgcctctggcttcaccttttctaattacgacatgcactgggtgcggcaggcccctggcaagggtcttgagtgggttaccatcatctggcacgacggcagcaacaagtactacctggacagcgtgaagggcagatttacaatcagcagagataatagcaagaacaccctgtacctgcagatgaacagcctgcgggccgaggacaccgccgtgtactattgtgccagaggcgacaactggaacgacgagcaccactacttctactacatggacgtgtggggcaaaggcaccacagtgaccgtgtccagcggcggcggcggcagcggcggaggaggctctggcggaggcggcagcgagatcgtgctgacccagagccctgacttccagagcgtgacccctaaggaaaaggtgacaattacatgcagggccagccagtccatcggctcttctctgcattggtatcagcagaagcccgatcagtctccaaagctgctgatcaaattcgccagccagagcttcagcggagtccccagccggttcagcggatctggctccggcactgatttcaccctgaccatccacagcctggaggccgaagatgccgctacatactattgccaccagtcctccagcctgccttggacattcggccagggcaccaaggtggagatcaaagagtccaaatatgggcccccatgcccatcatgcccaatctacatctgggcgcccttggccgggacttgtggggtccttctcctgtcactggttatcaccctttactgccggagggaccagaggctgccccccgatgcccacaagccccctgggggaggcagtttccggacccccatccaagaggagcaggccgacgcccactccaccctggccaagatcagagtgaagttcagcaggagcgcagacgcccccgcgtaccagcagggccagaaccagctctataacgagctcaatctaggacgaagagaggagtacgatgttttggacaagagacgtggccgggaccctgagatggggggaaagccgagaaggaagaaccctcaggaaggcctgtacaatgaactgcagaaagataagatggcggaggcctacagtgagattgggatgaaaggcgagcgccggaggggcaaggggcacgatggcctttaccagggtctcagtacagccaccaaggacacctacgacgcccttcacatgcaggccctgccccctcgcggctctggcgagggaaggggttccctgcttacttgcggcgacgtcgaagagaatcccggtccgatggccctcccagtaactgccctccttttgcccctcgcactccttcttcatgccgctcgccccaactgggtcaacgtgattagcgatttgaagaaaatcgaggaccttatacagtctatgcatattgacgctacactgtatactgagagtgatgtacacccgtcctgtaaggtaacggccatgaaatgctttcttctggagctccaggtcatcagcttggagtctggggacgcaagcatccacgatacggttgaaaacctcatcatccttgcgaacaactctctctcatctaatggaaacgttacagagagtgggtgtaaggagtgcgaagagttggaagaaaaaaacatcaaagaatttcttcaatccttcgttcacatagtgcaaatgttcattaacacgtccactaccacacccgccccgaggccacctacgccggcaccgactatcgccagtcaacccctctctctgcgccccgaggcttgccggcctgcggctggtggggcggtccacacccggggcctggattttgcgtgcgatatatacatctgggcacctcttgccggcacctgcggagtgctgcttctctcactcgttattacgctgtactgctaa

SEQ ID NO: 1194 - DNA, 2019 bp, synthetic construct
  misc_feature 1..2019: note = Synthetic
  source 1..2019: mol_type = other DNA
atggccttaccagtgaccgccttgctcctgccgctggccttgctgctccacgccgccaggccggaggtgcagctgctggaaagcggcggcggactcgtgcaacctggcggctccctgcggctgtcttgcgccgcttctggcttcacattcagcatctacgccatgagctgggtcagacaggcccccggcaaaggcctggaatgggtgtccgccatcagcggcggcggagataccacctactacgccgacagcgtgaagggcagattcaccattagcagagataatagcaagaccacactggacctgcaaatgaacagcctgcgggccgaggacaccgccgtgtactactgtgctaagcacacctcttattacatggacgtgtggggaaaaggcacaaccgtgaccgtgtccagcggcggaggcggctctggcggcggcggcagcggcggtggcggaagccagaccgtggtgacacaggagccttctctgagcgtgagccccggcggcaccgtgaccctgacatgcggcctgagcagcggctccgtctccaccagctactatcctagctggtatcagcagacccctggccaggcccctagaaccctgatctacagcacaaacatccggagctctggagtgccagacagatttagcggaagcatcctgggcaacaaggccgccctgaccatcaccggcgcccaggctgacgacgagagtgattactactgcaagctgtacatgggctctggcatcatcttcggcagcggaacaaaggtgacagttctggagtccaaatatgggcccccatgcccatcatgcccaatctacatctgggcgcccttggccgggacttgtggggtccttctcctgtcactggttatcaccctttactgccggagggaccagaggctgccccccgatgcccacaagccccctgggggaggcagtttccggacccccatccaagaggagcaggccgacgcccactccaccctggccaagatcagagtgaagttcagcaggagcgcagacgcccccgcgtaccagcagggccagaaccagctctataacgagctcaatctaggacgaagagaggagtacgatgttttggacaagagacgtggccgggaccctgagatggggggaaagccgagaaggaagaaccctcaggaaggcctgtacaatgaactgcagaaagataagatggcggaggcctacagtgagattgggatgaaaggcgagcgccggaggggcaaggggcacgatggcctttaccagggtctcagtacagccaccaaggacacctacgacgcccttcacatgcaggccctgccccctcgcggctctggcgagggaaggggttccctgcttacttgcggcgacgtcgaagagaatcccggtccgatggccctcccagtaactgccctccttttgcccctcgcactccttcttcatgccgctcgccccaactgggtcaacgtgattagcgatttgaagaaaatcgaggaccttatacagtctatgcatattgacgctacactgtatactgagagtgatgtacacccgtcctgtaaggtaacggccatgaaatgctttcttctggagctccaggtcatcagcttggagtctggggacgcaagcatccacgatacggttgaaaacctcatcatccttgcgaacaactctctctcatctaatggaaacgttacagagagtgggtgtaaggagtgcgaagagttggaagaaaaaaacatcaaagaatttcttcaatccttcgttcacatagtgcaaatgttcattaacacgtccactaccacacccgccccgaggccacctacgccggcaccgactatcgccagtcaacccctctctctgcgccccgaggcttgccggcctgcggctggtggggcggtccacacccggggcctggattttgcgtgcgatatatacatctgggcacctcttgccggcacctgcggagtgctgcttctctcactcgttattacgctgtactgctaa

SEQ ID NO: 1195 - DNA, 2037 bp, synthetic construct
  misc_feature 1..2037: note = Synthetic
  source 1..2037: mol_type = other DNA
atggccttaccagtgaccgccttgctcctgccgctggccttgctgctccacgccgccaggccgcaagtgcagctggtggaaagcggcggtggagtggtgcaacctggcagaagcctgcggctgagctgcgccgcttctggcttcacattttctaattacgacaagcactgggtgcggcaggcccctggcaaaggcctggagtgggtcgctgtgatctggtatgacggcagcaacaagtactacgccgacagcgtgaagggcagattcaccatcagcagagacaacagcaagaacaccctgtacctgcagatgaacagcctgcgggctgaagataccgccatgtactattgtgccaggggcgataattggaacgacgagcaccactacttctactacatggacgtgtggggaaagggcaccacagtgaccgtgtccagcggcggcggcggcagcggcggcggcggcagcggcggcggcggcagcgagatcgtgctgacacagtcccctgactttcagagcgtgacccctaaggaaaaggtcacaattacatgcagagcctctcagagcatcggcagctctctgcactggtatcagcagaaacctgatcagagccccaagctgctgatcaaattcgccagccagagcttctccggcgtgccaagcagattcagcggcagcggcagcggaaccgatttcaccctgaccatccattctctggaggccgaggacgccgccacctactactgccaccagtctagcagcctgccctggaccttcggccagggcacaaaggttgagatcaaggagtccaaatatgggcccccatgcccatcatgcccaatctacatctgggcgcccttggccgggacttgtggggtccttctcctgtcactggttatcaccctttactgccggagggaccagaggctgccccccgatgcccacaagccccctgggggaggcagtttccggacccccatccaagaggagcaggccgacgcccactccaccctggccaagatcagagtgaagttcagcaggagcgcagacgcccccgcgtaccagcagggccagaaccagctctataacgagctcaatctaggacgaagagaggagtacgatgttttggacaagagacgtggccgggaccctgagatggggggaaagccgagaaggaagaaccctcaggaaggcctgtacaatgaactgcagaaagataagatggcggaggcctacagtgagattgggatgaaaggcgagcgccggaggggcaaggggcacgatggcctttaccagggtctcagtacagccaccaaggacacctacgacgcccttcacatgcaggccctgccccctcgcggctctggcgagggaaggggttccctgcttacttgcggcgacgtcgaagagaatcccggtccgatggccctcccagtaactgccctccttttgcccctcgcactccttcttcatgccgctcgccccaactgggtcaacgtgattagcgatttgaagaaaatcgaggaccttatacagtctatgcatattgacgctacactgtatactgagagtgatgtacacccgtcctgtaaggtaacggccatgaaatgctttcttctggagctccaggtcatcagcttggagtctggggacgcaagcatccacgatacggttgaaaacctcatcatccttgcgaacaactctctctcatctaatggaaacgttacagagagtgggtgtaaggagtgcgaagagttggaagaaaaaaacatcaaagaatttcttcaatccttcgttcacatagtgcaaatgttcattaacacgtccactaccacacccgccccgaggccacctacgccggcaccgactatcgccagtcaacccctctctctgcgccccgaggcttgccggcctgcggctggtggggcggtccacacccggggcctggattttgcgtgcgatatatacatctgggcacctcttgccggcacctgcggagtgctgcttctctcactcgttattacgctgtactgctaa

SEQ ID NO: 1196 - DNA, 2031 bp, synthetic construct
  misc_feature 1..2031: note = Synthetic
  source 1..2031: mol_type = other DNA
atggccttaccagtgaccgccttgctcctgccgctggccttgctgctccacgccgccaggccgcaagtgcagctggtccagtctggagctgaggtgaagaagcccggcgccagcgtgaaggtgtcctgtaaagcctctggttatacattcacaaactatggcttcagctgggttagacaggcccctggacagggcctggactggatgggatggatcagcgcctacaacggctacaccaactacacccagaagctgcagggcagagtgacaatgaccacagataccagcaccaccacagcttacatggaactgaggtccctgcggagcgacgacaccgccgtgtactactgcgccagacggggcctgctgtactactactacagcatggacgtgtggggcaagggcaccaccgtgaccgtgtcttctggcggcggcggaagcggcggcggaggaagcggcggcggcggcagcgagatcgtgctgacccaatctcctgccacactgagcctctccccaggcgagcgggccaccctgagctgcggcgcttctcagagcgtgtacaatagctacctggcctggtatcagcagaaacccggcctggctcctagactgctgatctacgacgccagcctgagagccaccggcgtgcctgatagattcagcggcagcggcagcggaaccgacttcaccctgacaatcagcacactggaacccgaggattttgccgtgtactattgccagcagtacggcggcagccctatgtacacattcggccagggcaccaagctggaaatcaaggagtccaaatatgggcccccatgcccatcatgcccaatctacatctgggcgcccttggccgggacttgtggggtccttctcctgtcactggttatcaccctttactgccggagggaccagaggctgccccccgatgcccacaagccccctgggggaggcagtttccggacccccatccaagaggagcaggccgacgcccactccaccctggccaagatcagagtgaagttcagcaggagcgcagacgcccccgcgtaccagcagggccagaaccagctctataacgagctcaatctaggacgaagagaggagtacgatgttttggacaagagacgtggccgggaccctgagatggggggaaagccgagaaggaagaaccctcaggaaggcctgtacaatgaactgcagaaagataagatggcggaggcctacagtgagattgggatgaaaggcgagcgccggaggggcaaggggcacgatggcctttaccagggtctcagtacagccaccaaggacacctacgacgcccttcacatgcaggccctgccccctcgcggctctggcgagggaaggggttccctgcttacttgcggcgacgtcgaagagaatcccggtccgatggccctcccagtaactgccctccttttgcccctcgcactccttcttcatgccgctcgccccaactgggtcaacgtgattagcgatttgaagaaaatcgaggaccttatacagtctatgcatattgacgctacactgtatactgagagtgatgtacacccgtcctgtaaggtaacggccatgaaatgctttcttctggagctccaggtcatcagcttggagtctggggacgcaagcatccacgatacggttgaaaacctcatcatccttgcgaacaactctctctcatctaatggaaacgttacagagagtgggtgtaaggagtgcgaagagttggaagaaaaaaacatcaaagaatttcttcaatccttcgttcacatagtgcaaatgttcattaacacgtccactaccacacccgccccgaggccacctacgccggcaccgactatcgccagtcaacccctctctctgcgccccgaggcttgccggcctgcggctggtggggcggtccacacccggggcctggattttgcgtgcgatatatacatctgggcacctcttgccggcacctgcggagtgctgcttctctcactcgttattacgctgtactgctaa

SEQ ID NO: 1197 - DNA, 2019 bp, synthetic construct
  misc_feature 1..2019: note = Synthetic
  source 1..2019: mol_type = other DNA
atggccttaccagtgaccgccttgctcctgccgctggccttgctgctccacgccgccaggccggaggtgcagctgctggaaagcggcggcggactggtgcaacctggcggctctctgcggctgtcctgtaccgccagcggcttcaccttcagcagcttcgccatgagctgggtcagacaggctccaggaaaaggcctggaatgggtgtctgccatgagcggatctggcgacaccacatactacgccgattccgtgaagggcagatttaccatcagcagagataatagcaagacaacactgtatctgcagatgaacagcctgagggccgaggacacagccgtgtacagctgcgccaagcacaccacctactacatggacgtgtggggcaaaggcaccaccgtcacagtgtccagcggcggaggcggcagcggaggcggcggcagcggcggaggaggctctcagaccgtggtgacccaggagcctagcctgtccgtgtcccctggcggcaccgtgaccctcacatgcggcctgagcagcggctcagtttccacgagcgactaccccagctggtatcagcaaacccctggacaggctcctcggaccctgatctacagaaccaacacccggagcagcggcgtgcccgatagattctctggctctatcctgggcaacaaggccgctctgaccattacaggcgcccaggccgacgacgagagcgattattactgcgtgctgtacatggacagcggcatcatcttcggctctggaacaaaggtgacagtgctggagtccaaatatgggcccccatgcccatcatgcccaatctacatctgggcgcccttggccgggacttgtggggtccttctcctgtcactggttatcaccctttactgccggagggaccagaggctgccccccgatgcccacaagccccctgggggaggcagtttccggacccccatccaagaggagcaggccgacgcccactccaccctggccaagatcagagtgaagttcagcaggagcgcagacgcccccgcgtaccagcagggccagaaccagctctataacgagctcaatctaggacgaagagaggagtacgatgttttggacaagagacgtggccgggaccctgagatggggggaaagccgagaaggaagaaccctcaggaaggcctgtacaatgaactgcagaaagataagatggcggaggcctacagtgagattgggatgaaaggcgagcgccggaggggcaaggggcacgatggcctttaccagggtctcagtacagccaccaaggacacctacgacgcccttcacatgcaggccctgccccctcgcggctctggcgagggaaggggttccctgcttacttgcggcgacgtcgaagagaatcccggtccgatggccctcccagtaactgccctccttttgcccctcgcactccttcttcatgccgctcgccccaactgggtcaacgtgattagcgatttgaagaaaatcgaggaccttatacagtctatgcatattgacgctacactgtatactgagagtgatgtacacccgtcctgtaaggtaacggccatgaaatgctttcttctggagctccaggtcatcagcttggagtctggggacgcaagcatccacgatacggttgaaaacctcatcatccttgcgaacaactctctctcatctaatggaaacgttacagagagtgggtgtaaggagtgcgaagagttggaagaaaaaaacatcaaagaatttcttcaatccttcgttcacatagtgcaaatgttcattaacacgtccactaccacacccgccccgaggccacctacgccggcaccgactatcgccagtcaacccctctctctgcgccccgaggcttgccggcctgcggctggtggggcggtccacacccggggcctggattttgcgtgcgatatatacatctgggcacctcttgccggcacctgcggagtgctgcttctctcactcgttattacgctgtactgctaa

SEQ ID NO: 1198 - DNA, 2019 bp, synthetic construct
  misc_feature 1..2019: note = Synthetic
  source 1..2019: mol_type = other DNA
atggccttaccagtgaccgccttgctcctgccgctggccttgctgctccacgccgccaggccggaggtgcagctgctggaaagcggcggcggcctggtgcaacctggcggaagtctgcggctgtcttgtgccgcttctggattcaccttcaacacctacgccatgagctgggtgcggcaggcccctggcaaaggcctggaatgggtctccgccatgagcggctctggcgacacaacctactatgccgacagcgtgaagggcagatttacaatcagcagggataacagcaagaccaccctgtacctgcagatgaacagcctccgggccgaggacaccgccgtgtacagctgcgccaagcacaccagctactacatggacgtgtggggcaaaggcaccaccgtgaccgtgtccagcggaggtggcggcagcggcggcggaggctccggcggcggaggctcacagaccgtcgtgacccaggagccttctctgagcgtgtctccaggaggcacagttactctgacatgcggcctgtctagcggcagcgtgtccaccagcgactaccccagctggtatcagcaaacacctggccaggctcctagaaccctgatctatagaacaaataccagaagcagcggcgtgcccgatagattcagcggaagcatcctgggcaacaaggccgccctgaccatcaccggcgcccaggctgacgacgagtctgattactactgcgtgctgtacatgggcagcggcatcattttcggcagcggaacaaaggtgacagtgctggagtccaaatatgggcccccatgcccatcatgcccaatctacatctgggcgcccttggccgggacttgtggggtccttctcctgtcactggttatcaccctttactgccggagggaccagaggctgccccccgatgcccacaagccccctgggggaggcagtttccggacccccatccaagaggagcaggccgacgcccactccaccctggccaagatcagagtgaagttcagcaggagcgcagacgcccccgcgtaccagcagggccagaaccagctctataacgagctcaatctaggacgaagagaggagtacgatgttttggacaagagacgtggccgggaccctgagatggggggaaagccgagaaggaagaaccctcaggaaggcctgtacaatgaactgcagaaagataagatggcggaggcctacagtgagattgggatgaaaggcgagcgccggaggggcaaggggcacgatggcctttaccagggtctcagtacagccaccaaggacacctacgacgcccttcacatgcaggccctgccccctcgcggctctggcgagggaaggggttccctgcttacttgcggcgacgtcgaagagaatcccggtccgatggccctcccagtaactgccctccttttgcccctcgcactccttcttcatgccgctcgccccaactgggtcaacgtgattagcgatttgaagaaaatcgaggaccttatacagtctatgcatattgacgctacactgtatactgagagtgatgtacacccgtcctgtaaggtaacggccatgaaatgctttcttctggagctccaggtcatcagcttggagtctggggacgcaagcatccacgatacggttgaaaacctcatcatccttgcgaacaactctctctcatctaatggaaacgttacagagagtgggtgtaaggagtgcgaagagttggaagaaaaaaacatcaaagaatttcttcaatccttcgttcacatagtgcaaatgttcattaacacgtccactaccacacccgccccgaggccacctacgccggcaccgactatcgccagtcaacccctctctctgcgccccgaggcttgccggcctgcggctggtggggcggtccacacccggggcctggattttgcgtgcgatatatacatctgggcacctcttgccggcacctgcggagtgctgcttctctcactcgttattacgctgtactgctaa

SEQ ID NO: 1199 - DNA, 2019 bp, synthetic construct
  misc_feature 1..2019: note = Synthetic
  source 1..2019: mol_type = other DNA
atggccttaccagtgaccgccttgctcctgccgctggccttgctgctccacgccgccaggccggaagtgcagctgctggaaagcggcggcgacctggtgcaacctggcggctccctgagactgagctgcgccgcttctggctttaccttcagcacctacgccatgagctgggtgcggcaggcccctggcaaaggactggagtgggtctccgccatcagcggcagcggcgagaatatctactacgctgatagcgtgaagggcagattcaccattagcagagataattctaagaacaccctgttcctgcagatgaacagcctgcgggccgaagataccgccgtgtactactgcgccaagcacacatcttactacatggacgtgtggggcaaaggcaccaccgtcacagtgtccagcggaggcggcggcagcggcggaggcggcagcggaggaggcggctcacagaccgtggtgacccaagagcccagcttctctgtgtccccaggtggcaccgtgacactgacatgcggcctgtacagcgacagcgtgtctacaagctactatcctagctggtatcagcagacacctggccaggctcctagaaccctgatctacaacaccaacacaagaagcagcggcgtgcccgaccggtttagcggaagcatcctgggcaacaaggccgccctgaccatcaccggcgcccaggccgacgacgagagcgactactattgtgtgctgtacatggtgtccggcatcgtgttcggctctggaacaaaggtgaccgttctggagtccaaatatgggcccccatgcccatcatgcccaatctacatctgggcgcccttggccgggacttgtggggtccttctcctgtcactggttatcaccctttactgccggagggaccagaggctgccccccgatgcccacaagccccctgggggaggcagtttccggacccccatccaagaggagcaggccgacgcccactccaccctggccaagatcagagtgaagttcagcaggagcgcagacgcccccgcgtaccagcagggccagaaccagctctataacgagctcaatctaggacgaagagaggagtacgatgttttggacaagagacgtggccgggaccctgagatggggggaaagccgagaaggaagaaccctcaggaaggcctgtacaatgaactgcagaaagataagatggcggaggcctacagtgagattgggatgaaaggcgagcgccggaggggcaaggggcacgatggcctttaccagggtctcagtacagccaccaaggacacctacgacgcccttcacatgcaggccctgccccctcgcggctctggcgagggaaggggttccctgcttacttgcggcgacgtcgaagagaatcccggtccgatggccctcccagtaactgccctccttttgcccctcgcactccttcttcatgccgctcgccccaactgggtcaacgtgattagcgatttgaagaaaatcgaggaccttatacagtctatgcatattgacgctacactgtatactgagagtgatgtacacccgtcctgtaaggtaacggccatgaaatgctttcttctggagctccaggtcatcagcttggagtctggggacgcaagcatccacgatacggttgaaaacctcatcatccttgcgaacaactctctctcatctaatggaaacgttacagagagtgggtgtaaggagtgcgaagagttggaagaaaaaaacatcaaagaatttcttcaatccttcgttcacatagtgcaaatgttcattaacacgtccactaccacacccgccccgaggccacctacgccggcaccgactatcgccagtcaacccctctctctgcgccccgaggcttgccggcctgcggctggtggggcggtccacacccggggcctggattttgcgtgcgatatatacatctgggcacctcttgccggcacctgcggagtgctgcttctctcactcgttattacgctgtactgctaa

SEQ ID NO: 1200 - DNA, 2037 bp, synthetic construct
  misc_feature 1..2037: note = Synthetic
  source 1..2037: mol_type = other DNA
atggccttaccagtgaccgccttgctcctgccgctggccttgctgctccacgccgccaggccgcaagtgcagctggtggaaagcggaggcggagttgtgcaacctggcagatctctgcgcctgtcatgcgccgccagcggctttacattctccagctacggcatgcactgggtgcggcaggcccctggcaaaggcctggaatgggtcgctgtgatctggtacgacggcatcaacaaatactacgccgacagcgtgaagggcagattcaccatcagcagagataatagcaagaacaccctgtacctgcagatgaacagcctgcgggccgaggacactgccgtgtactactgcgccagagagcggctggaacggagatactactactacatggacgtgtggggcaagggcaccaccgtgaccgtgtccagtggtggcggaggatctggcggaggcggctctggcggcggcggcagccagaccgtggtgacccaggagcctagcttcagcgtgtcccccggaggcacagtgaccctgacatgcggcctcagctctggctccgtcagcacctcttactatcctggatggtatcagcagacacctggccaggccccaagaaccctgatctacagcacaaacaccagaagcagcggcgtgcccgatagatttagcggcagcatcctgggcaacaaggccgccctgaccattacaggcgcccaggctgatgacgagagcgactactactgtgtgctgtacatgggcagcggcatgttcatcttcggctctggaaccaaggtgacagtgctggagtccaaatatgggcccccatgcccatcatgcccaatctacatctgggcgcccttggccgggacttgtggggtccttctcctgtcactggttatcaccctttactgccggagggaccagaggctgccccccgatgcccacaagccccctgggggaggcagtttccggacccccatccaagaggagcaggccgacgcccactccaccctggccaagatcagagtgaagttcagcaggagcgcagacgcccccgcgtaccagcagggccagaaccagctctataacgagctcaatctaggacgaagagaggagtacgatgttttggacaagagacgtggccgggaccctgagatggggggaaagccgagaaggaagaaccctcaggaaggcctgtacaatgaactgcagaaagataagatggcggaggcctacagtgagattgggatgaaaggcgagcgccggaggggcaaggggcacgatggcctttaccagggtctcagtacagccaccaaggacacctacgacgcccttcacatgcaggccctgccccctcgcggctctggcgagggaaggggttccctgcttacttgcggcgacgtcgaagagaatcccggtccgatggccctcccagtaactgccctccttttgcccctcgcactccttcttcatgccgctcgccccaactgggtcaacgtgattagcgatttgaagaaaatcgaggaccttatacagtctatgcatattgacgctacactgtatactgagagtgatgtacacccgtcctgtaaggtaacggccatgaaatgctttcttctggagctccaggtcatcagcttggagtctggggacgcaagcatccacgatacggttgaaaacctcatcatccttgcgaacaactctctctcatctaatggaaacgttacagagagtgggtgtaaggagtgcgaagagttggaagaaaaaaacatcaaagaatttcttcaatccttcgttcacatagtgcaaatgttcattaacacgtccactaccacacccgccccgaggccacctacgccggcaccgactatcgccagtcaacccctctctctgcgccccgaggcttgccggcctgcggctggtggggcggtccacacccggggcctggattttgcgtgcgatatatacatctgggcacctcttgccggcacctgcggagtgctgcttctctcactcgttattacgctgtactgctaa

SEQ ID NO: 1201 - DNA, 2019 bp, synthetic construct
  misc_feature 1..2019: note = Synthetic
  source 1..2019: mol_type = other DNA
atggccttaccagtgaccgccttgctcctgccgctggccttgctgctccacgccgccaggccggaggtgcagctgctggaatctggaggcggcctcgtgcagcctggaggcagcctgaggctgagctgcgctgcttctggcttcaccttcagcagcttcgccatgagctgggtcagacaagctcccggcaaaggcctggaatgggtgtccgccgtgtctggcagcggcgacgatacctactacgccgatagcgtgaaaggaagatttacaatcagccgggacaacagcaagaataccctgtacctgcagatgaactctctgcgggccgaggacaccgccgtgtactattgcgccaagcacaccagctactacctggacgtgtggggcaagggcaccaccgtgaccgtttccagcggcggcggcggcagcggcggaggtggaagcggcggaggcggatctcagacagtggtgacacaggagcctagcttttctgtgtcccctggcggcaccgtgacactgacatgcgccctgagctccgatagcgtgtcaacatcttacttccccagctggtatcggcagacccctggacaggcccctagaaccctgatctacaacaccaacaccagaagcagcggcgtgccagatagattcagcggctccatcctgggcaacaaggccgccctgaccattacaggcgcccaggccgacgacgagagcgactactactgtgtgctgtacatgggcagcggcatcatcttcggctctggcacaaaggtgaccgtcctggagtccaaatatgggcccccatgcccatcatgcccaatctacatctgggcgcccttggccgggacttgtggggtccttctcctgtcactggttatcaccctttactgccggagggaccagaggctgccccccgatgcccacaagccccctgggggaggcagtttccggacccccatccaagaggagcaggccgacgcccactccaccctggccaagatcagagtgaagttcagcaggagcgcagacgcccccgcgtaccagcagggccagaaccagctctataacgagctcaatctaggacgaagagaggagtacgatgttttggacaagagacgtggccgggaccctgagatggggggaaagccgagaaggaagaaccctcaggaaggcctgtacaatgaactgcagaaagataagatggcggaggcctacagtgagattgggatgaaaggcgagcgccggaggggcaaggggcacgatggcctttaccagggtctcagtacagccaccaaggacacctacgacgcccttcacatgcaggccctgccccctcgcggctctggcgagggaaggggttccctgcttacttgcggcgacgtcgaagagaatcccggtccgatggccctcccagtaactgccctccttttgcccctcgcactccttcttcatgccgctcgccccaactgggtcaacgtgattagcgatttgaagaaaatcgaggaccttatacagtctatgcatattgacgctacactgtatactgagagtgatgtacacccgtcctgtaaggtaacggccatgaaatgctttcttctggagctccaggtcatcagcttggagtctggggacgcaagcatccacgatacggttgaaaacctcatcatccttgcgaacaactctctctcatctaatggaaacgttacagagagtgggtgtaaggagtgcgaagagttggaagaaaaaaacatcaaagaatttcttcaatccttcgttcacatagtgcaaatgttcattaacacgtccactaccacacccgccccgaggccacctacgccggcaccgactatcgccagtcaacccctctctctgcgccccgaggcttgccggcctgcggctggtggggcggtccacacccggggcctggattttgcgtgcgatatatacatctgggcacctcttgccggcacctgcggagtgctgcttctctcactcgttattacgctgtactgctaa

SEQ ID NO: 1202 - DNA, 2037 bp, synthetic construct
  misc_feature 1..2037: note = Synthetic
  source 1..2037: mol_type = other DNA
atggccttaccagtgaccgccttgctcctgccgctggccttgctgctccacgccgccaggccgcaagtgcagctggtggaaagcggaggcggcgtcgtgcaacctggcagaagcctgagactgagctgcgccgccagcggctttaacttcagcaccttcgacatccactgggtgcggcaggcccctggaaaaggcctggagtgggtcgccctgatctggtatgacggcagctacaagtactacgccgatagcgttaagggcaggttcaccatcagcagagataattctaagaacaccctggacctgagaatgaacagcctccgggctgaggacaccgccgtgtactactgcgccagaaatgacaactggaacgacgagcattactatcactactacatggacgtgtggggcaagggcaccaccgtgacagtgtcctctggcggcggcggcagcggcggcggcggcagcggtggaggcggaagcgagatcgtgctgacccagtctcctgatttccagtccgtgacccctaaggaaaaggtgaccatcacctgtagagcttctcagagcatcggcagctctctgcactggtatcagcagaaacctgaccagagcccaaagctgctgatcaaattcgccagccagtccttcagcggcgtgccctcccggtttagcggctccggcagcggaacagacttcaccctgacaattaacagcctggaagccgaggatgccgccacatacttctgccaccagtcttctagcctgccctggacattcggccagggcacaaaggtggagatcaaggagtccaaatatgggcccccatgcccatcatgcccaatctacatctgggcgcccttggccgggacttgtggggtccttctcctgtcactggttatcaccctttactgccggagggaccagaggctgccccccgatgcccacaagccccctgggggaggcagtttccggacccccatccaagaggagcaggccgacgcccactccaccctggccaagatcagagtgaagttcagcaggagcgcagacgcccccgcgtaccagcagggccagaaccagctctataacgagctcaatctaggacgaagagaggagtacgatgttttggacaagagacgtggccgggaccctgagatggggggaaagccgagaaggaagaaccctcaggaaggcctgtacaatgaactgcagaaagataagatggcggaggcctacagtgagattgggatgaaaggcgagcgccggaggggcaaggggcacgatggcctttaccagggtctcagtacagccaccaaggacacctacgacgcccttcacatgcaggccctgccccctcgcggctctggcgagggaaggggttccctgcttacttgcggcgacgtcgaagagaatcccggtccgatggccctcccagtaactgccctccttttgcccctcgcactccttcttcatgccgctcgccccaactgggtcaacgtgattagcgatttgaagaaaatcgaggaccttatacagtctatgcatattgacgctacactgtatactgagagtgatgtacacccgtcctgtaaggtaacggccatgaaatgctttcttctggagctccaggtcatcagcttggagtctggggacgcaagcatccacgatacggttgaaaacctcatcatccttgcgaacaactctctctcatctaatggaaacgttacagagagtgggtgtaaggagtgcgaagagttggaagaaaaaaacatcaaagaatttcttcaatccttcgttcacatagtgcaaatgttcattaacacgtccactaccacacccgccccgaggccacctacgccggcaccgactatcgccagtcaacccctctctctgcgccccgaggcttgccggcctgcggctggtggggcggtccacacccggggcctggattttgcgtgcgatatatacatctgggcacctcttgccggcacctgcggagtgctgcttctctcactcgttattacgctgtactgctaa

SEQ ID NO: 1203 - DNA, 2052 bp, synthetic construct
  misc_feature 1..2052: note = Synthetic
  source 1..2052: mol_type = other DNA
atggccttaccagtgaccgccttgctcctgccgctggccttgctgctccacgccgccaggccggaggtgcacctgctggaaagcggcggcggcctggtgcagcctggaggctctctgcggctgagctgtgccgcctctggttttaccttcagcagctacgccatgaattgggttagacaggcccctggcaagggcctggaatgggtcagcagcatcagcggctccggcagcagctcttactatgctgatagcgtgaagggcagattcaccattagcagagacaatagcaagaacaccctgtacctgcagatgaacagcctgcgggccgaggacaccgccgtgtactactgcgccagccggggcttcaactcccaataccctcctggctactactactactacatggacgtgtggggaaaaggcacgaccgtgaccgtgtcctccggcggcggcggaagcggcggcggcggctctggcggaggcggcagccagaccgtggtgacacaggagcctagcttcagcgtgtctccaggaggaacagtgaccctgacatgcggcctcagcagcggctctgtgtccaccagctatttccccagctggtatcagcagacccctggccaggctcccaggaccctgatctacatcaccaacacaagaagcagcggcgtgcccgacagattttctggcagcatcatcggcaacaaggccgctctgaccatcacaggcgcccaggccgacgacgagagtgattacttctgcgtgctgtacatgggcagcggaacatgggtgttcggcggaggcacaaagctgaccgtcctggagtccaaatatgggcccccatgcccatcatgcccaatctacatctgggcgcccttggccgggacttgtggggtccttctcctgtcactggttatcaccctttactgccggagggaccagaggctgccccccgatgcccacaagccccctgggggaggcagtttccggacccccatccaagaggagcaggccgacgcccactccaccctggccaagatcagagtgaagttcagcaggagcgcagacgcccccgcgtaccagcagggccagaaccagctctataacgagctcaatctaggacgaagagaggagtacgatgttttggacaagagacgtggccgggaccctgagatggggggaaagccgagaaggaagaaccctcaggaaggcctgtacaatgaactgcagaaagataagatggcggaggcctacagtgagattgggatgaaaggcgagcgccggaggggcaaggggcacgatggcctttaccagggtctcagtacagccaccaaggacacctacgacgcccttcacatgcaggccctgccccctcgcggctctggcgagggaaggggttccctgcttacttgcggcgacgtcgaagagaatcccggtccgatggccctcccagtaactgccctccttttgcccctcgcactccttcttcatgccgctcgccccaactgggtcaacgtgattagcgatttgaagaaaatcgaggaccttatacagtctatgcatattgacgctacactgtatactgagagtgatgtacacccgtcctgtaaggtaacggccatgaaatgctttcttctggagctccaggtcatcagcttggagtctggggacgcaagcatccacgatacggttgaaaacctcatcatccttgcgaacaactctctctcatctaatggaaacgttacagagagtgggtgtaaggagtgcgaagagttggaagaaaaaaacatcaaagaatttcttcaatccttcgttcacatagtgcaaatgttcattaacacgtccactaccacacccgccccgaggccacctacgccggcaccgactatcgccagtcaacccctctctctgcgccccgaggcttgccggcctgcggctggtggggcggtccacacccggggcctggattttgcgtgcgatatatacatctgggcacctcttgccggcacctgcggagtgctgcttctctcactcgttattacgctgtactgctaa

SEQ ID NO: 1204 - DNA, 2013 bp, synthetic construct
  misc_feature 1..2013: note = Synthetic
  source 1..2013: mol_type = other DNA
atggccttaccagtgaccgccttgctcctgccgctggccttgctgctccacgccgccaggccggaggtgcagctgctggaaagcggcggcggcctggtgcaacctggcggctccctgaggctgagctgcgccgccagcggcttcacctttagcaactacgctatgacctgggtcagacaggcccctggaaagggcctggagtgggtgtccgccatcagcggatctggtattggaacatactacgccgacagcgtgcaaggcagattcacaacaagcagagataattctaagaacaccctgtacctgcagatgaacagcctgcgggccgaggacaccgccgtgtactattgtgccaagggcggctacaactggaaggacgtgtggggcaagggaaccaccgtgaccgtttcttctggcggcggaggcagcggcggcggaggctccggaggcggaggcagcgagatcgtgctgacacagtctcccgactttcagagcgtgacccctaaagagaaggtgacaatcacctgcagagccagccagtcaatcggctctagcctgcactggtatcagcagaaacctgatcagagccctaagctgctgatcaagttcgcctctcagagcttcagcggcgtgccaagccggttcagcggctccggcagcggcaccgacttcaccctgaccatccacagcctggaggccgaagatgccgctacatactactgccaccagtccagcagcctcccctggaccttcggccagggcacaaaggtggaaatcaaagagtccaaatatgggcccccatgcccatcatgcccaatctacatctgggcgcccttggccgggacttgtggggtccttctcctgtcactggttatcaccctttactgccggagggaccagaggctgccccccgatgcccacaagccccctgggggaggcagtttccggacccccatccaagaggagcaggccgacgcccactccaccctggccaagatcagagtgaagttcagcaggagcgcagacgcccccgcgtaccagcagggccagaaccagctctataacgagctcaatctaggacgaagagaggagtacgatgttttggacaagagacgtggccgggaccctgagatggggggaaagccgagaaggaagaaccctcaggaaggcctgtacaatgaactgcagaaagataagatggcggaggcctacagtgagattgggatgaaaggcgagcgccggaggggcaaggggcacgatggcctttaccagggtctcagtacagccaccaaggacacctacgacgcccttcacatgcaggccctgccccctcgcggctctggcgagggaaggggttccctgcttacttgcggcgacgtcgaagagaatcccggtccgatggccctcccagtaactgccctccttttgcccctcgcactccttcttcatgccgctcgccccaactgggtcaacgtgattagcgatttgaagaaaatcgaggaccttatacagtctatgcatattgacgctacactgtatactgagagtgatgtacacccgtcctgtaaggtaacggccatgaaatgctttcttctggagctccaggtcatcagcttggagtctggggacgcaagcatccacgatacggttgaaaacctcatcatccttgcgaacaactctctctcatctaatggaaacgttacagagagtgggtgtaaggagtgcgaagagttggaagaaaaaaacatcaaagaatttcttcaatccttcgttcacatagtgcaaatgttcattaacacgtccactaccacacccgccccgaggccacctacgccggcaccgactatcgccagtcaacccctctctctgcgccccgaggcttgccggcctgcggctggtggggcggtccacacccggggcctggattttgcgtgcgatatatacatctgggcacctcttgccggcacctgcggagtgctgcttctctcactcgttattacgctgtactgctaa

SEQ ID NO: 1205 - DNA, 2037 bp, synthetic construct
  misc_feature 1..2037: note = Synthetic
  source 1..2037: mol_type = other DNA
atggccttaccagtgaccgccttgctcctgccgctggccttgctgctccacgccgccaggccgcaagtgcagctggtggagagcggcggcggcgtcgtgcagcccggcagaagcctgcggctgtcttgcgctgccagcggcttcacctttacaaactacgacatgcactgggtcagacaggcccctggcaaaggcctggaatgggtgaccatcatctggcacgacggctccaataagtactacctggacagcgtgcggggcagattcacgatcagcagagataattccaagaacaccctgtacctgcagatgaacagcctgagagccgaggacaccgccgtgtactattgcgccagaggcgacaactggaacgacgagcaccactacttctactacatggacgtgtggggcaagggcaccaccgtgaccgtgtccagcggcggaggcggctccggaggaggcggctctggtggcggcggcagcgagatcgtgctgacccagagccctgacttccagtctgtgacacctaaggaaaaggtgacaatcacctgtagggccagccaaagcatcggcagcagcctgcattggtatcagcagaagcccgatcagtctccaaagctgctgatcaaattcgccagccagagcttcagcggagttcctagccggttcagcggctctggcagcggaacagatttcaccctgacaattcactctctggaggccgaggatgccgccacatattactgccaccagtctagcagcctgccttggacctttggacagggcaccaaggtggaaatcaaggagtccaaatatgggcccccatgcccatcatgcccaatctacatctgggcgcccttggccgggacttgtggggtccttctcctgtcactggttatcaccctttactgccggagggaccagaggctgccccccgatgcccacaagccccctgggggaggcagtttccggacccccatccaagaggagcaggccgacgcccactccaccctggccaagatcagagtgaagttcagcaggagcgcagacgcccccgcgtaccagcagggccagaaccagctctataacgagctcaatctaggacgaagagaggagtacgatgttttggacaagagacgtggccgggaccctgagatggggggaaagccgagaaggaagaaccctcaggaaggcctgtacaatgaactgcagaaagataagatggcggaggcctacagtgagattgggatgaaaggcgagcgccggaggggcaaggggcacgatggcctttaccagggtctcagtacagccaccaaggacacctacgacgcccttcacatgcaggccctgccccctcgcggctctggcgagggaaggggttccctgcttacttgcggcgacgtcgaagagaatcccggtccgatggccctcccagtaactgccctccttttgcccctcgcactccttcttcatgccgctcgccccaactgggtcaacgtgattagcgatttgaagaaaatcgaggaccttatacagtctatgcatattgacgctacactgtatactgagagtgatgtacacccgtcctgtaaggtaacggccatgaaatgctttcttctggagctccaggtcatcagcttggagtctggggacgcaagcatccacgatacggttgaaaacctcatcatccttgcgaacaactctctctcatctaatggaaacgttacagagagtgggtgtaaggagtgcgaagagttggaagaaaaaaacatcaaagaatttcttcaatccttcgttcacatagtgcaaatgttcattaacacgtccactaccacacccgccccgaggccacctacgccggcaccgactatcgccagtcaacccctctctctgcgccccgaggcttgccggcctgcggctggtggggcggtccacacccggggcctggattttgcgtgcgatatatacatctgggcacctcttgccggcacctgcggagtgctgcttctctcactcgttattacgctgtactgctaa

SEQ ID NO: 1206 - DNA, 2037 bp, synthetic construct
  misc_feature 1..2037: note = Synthetic
  source 1..2037: mol_type = other DNA
atggccttaccagtgaccgccttgctcctgccgctggccttgctgctccacgccgccaggccgcaggtgcagctggttgagagcggcggaggcgtggtgcaacctggaagatctctgcgcctgagctgcgccgccagcggcttcaccttcagcaactacgatatgcactgggtgcggcaggcccctggcaagggcctggaatgggtcaccattatctggcatgacggcagcaacaagtactacctggacagcgtgaaaggcagattcaccatcagcagagacaatagcaagaacaccctgtacctgcagatgaacagcctgcgggccgaggacaccgccgtgtactattgcgccagaggcgacaactggaacgacgagcaccactacttctactatatggacgtgtggggcaaaggcacaaccgtgaccgtcagcagcggcggcggaggcagcggaggcggaggctctggcggcggtggcagtgaaatcgtgctgacccagagccccgctacactgagcctctcccctggcgagcgggccacactgtcttgtagagcctctcagtccgtgtccagcagcctggcctggtatcagcagaagcccggccaggctccaagactgctgatctacgacgccagcaatagagccaccggcatccccgcccggttttccggcagcggatctggaacagattttaccctgaccatcagcagcctggaacctgaggatttcgccgtgtactactgccagcaaagaagcaactggcctctgacattcggcggcggcacaaaggtggaaatcaaggagtccaaatatgggcccccatgcccatcatgcccaatctacatctgggcgcccttggccgggacttgtggggtccttctcctgtcactggttatcaccctttactgccggagggaccagaggctgccccccgatgcccacaagccccctgggggaggcagtttccggacccccatccaagaggagcaggccgacgcccactccaccctggccaagatcagagtgaagttcagcaggagcgcagacgcccccgcgtaccagcagggccagaaccagctctataacgagctcaatctaggacgaagagaggagtacgatgttttggacaagagacgtggccgggaccctgagatggggggaaagccgagaaggaagaaccctcaggaaggcctgtacaatgaactgcagaaagataagatggcggaggcctacagtgagattgggatgaaaggcgagcgccggaggggcaaggggcacgatggcctttaccagggtctcagtacagccaccaaggacacctacgacgcccttcacatgcaggccctgccccctcgcggctctggcgagggaaggggttccctgcttacttgcggcgacgtcgaagagaatcccggtccgatggccctcccagtaactgccctccttttgcccctcgcactccttcttcatgccgctcgccccaactgggtcaacgtgattagcgatttgaagaaaatcgaggaccttatacagtctatgcatattgacgctacactgtatactgagagtgatgtacacccgtcctgtaaggtaacggccatgaaatgctttcttctggagctccaggtcatcagcttggagtctggggacgcaagcatccacgatacggttgaaaacctcatcatccttgcgaacaactctctctcatctaatggaaacgttacagagagtgggtgtaaggagtgcgaagagttggaagaaaaaaacatcaaagaatttcttcaatccttcgttcacatagtgcaaatgttcattaacacgtccactaccacacccgccccgaggccacctacgccggcaccgactatcgccagtcaacccctctctctgcgccccgaggcttgccggcctgcggctggtggggcggtccacacccggggcctggattttgcgtgcgatatatacatctgggcacctcttgccggcacctgcggagtgctgcttctctcactcgttattacgctgtactgctaa

SEQ ID NO: 1207 - DNA, 2025 bp, synthetic construct
  misc_feature 1..2025: note = Synthetic
  source 1..2025: mol_type = other DNA
atggccttaccagtgaccgccttgctcctgccgctggccttgctgctccacgccgccaggccggaagtgcagctggtcgagagcggcggcggcgtggtgcggcctggcgggtccctgagactgagctgcgccgcctctggcttcaccttcgacgactatggcatgagctgggtcagacaggcccctggaaaaggcctggaatgggtgtccggaatcaactggaatggcggcagtacaggctacgtggacagcgtgaagggcagattcaccatcagccgggacaacgccaagaacagcctgtatctgcagatgaacagcctgcgggccgaggacaccgccctgtaccactgtgccagacctgtgacaaccgactactactactacatggacgtgtggggcaagggcaccaccgtgaccgtgtcttccggcggaggaggcagcggcggcggcggcagcggcggaggcggcagcgagatcgtgctgacacagagccccggaacactgagcctgagccctggcgagcgggctacactgtcttgcagagcttctcagagcgtttcctccagctacctggcctggtatcagcaaaagcccggccaagctccaagactgctgatctacggcgccagctctagggccaccggcattcctgatagattcagcggctctggcagcggaacagattttaccctgaccatcagcagactggagcctgaggatttcgccgtgtactactgccagcagtacggatctagctggacctttggccagggcaccaaggtggaaatcaaagagtccaaatatgggcccccatgcccatcatgcccaatctacatctgggcgcccttggccgggacttgtggggtccttctcctgtcactggttatcaccctttactgccggagggaccagaggctgccccccgatgcccacaagccccctgggggaggcagtttccggacccccatccaagaggagcaggccgacgcccactccaccctggccaagatcagagtgaagttcagcaggagcgcagacgcccccgcgtaccagcagggccagaaccagctctataacgagctcaatctaggacgaagagaggagtacgatgttttggacaagagacgtggccgggaccctgagatggggggaaagccgagaaggaagaaccctcaggaaggcctgtacaatgaactgcagaaagataagatggcggaggcctacagtgagattgggatgaaaggcgagcgccggaggggcaaggggcacgatggcctttaccagggtctcagtacagccaccaaggacacctacgacgcccttcacatgcaggccctgccccctcgcggctctggcgagggaaggggttccctgcttacttgcggcgacgtcgaagagaatcccggtccgatggccctcccagtaactgccctccttttgcccctcgcactccttcttcatgccgctcgccccaactgggtcaacgtgattagcgatttgaagaaaatcgaggaccttatacagtctatgcatattgacgctacactgtatactgagagtgatgtacacccgtcctgtaaggtaacggccatgaaatgctttcttctggagctccaggtcatcagcttggagtctggggacgcaagcatccacgatacggttgaaaacctcatcatccttgcgaacaactctctctcatctaatggaaacgttacagagagtgggtgtaaggagtgcgaagagttggaagaaaaaaacatcaaagaatttcttcaatccttcgttcacatagtgcaaatgttcattaacacgtccactaccacacccgccccgaggccacctacgccggcaccgactatcgccagtcaacccctctctctgcgccccgaggcttgccggcctgcggctggtggggcggtccacacccggggcctggattttgcgtgcgatatatacatctgggcacctcttgccggcacctgcggagtgctgcttctctcactcgttattacgctgtactgctaa

SEQ ID NO: 1208 - DNA, 2049 bp, synthetic construct
  misc_feature 1..2049: note = Synthetic
  source 1..2049: mol_type = other DNA
atggccttaccagtgaccgccttgctcctgccgctggccttgctgctccacgccgccaggccggaggtgcagctgctggagagcggaggaggcctggtgcaacctggcggcagcctgcggctgagctgcgccgcttccggcttcaccttcagcagctacgccatgagctgggtgcggcaggctcctggaaaaggcctggagtgggtcagcgccatcagcggcagcggaggctcaacatactacgccgacagcgtgaagggcagattcaccatcagccgcgacaactctaagaacaccctgtacctgcagatgaactctctgagagccgaggacaccgccgtgtactattgtgccaagaagggcacaagctacaactggaatgatgtgcactactactactactattatatggacgtgtggggcaaaggcacaaccgtgaccgtgtccagcggcggtggaggcagcggaggcggcggaagcggcggcggcggcagtgaaattgtgctgacccagagccccggcaccctgagcctgtctccaggcgagcgggctaccctgtcctgcagagccagccagtctgtttccagctcttacctggcctggtatcagcaaaagcctggacaggcccctagactgctgatctacggcgcctctagcagggctacaggcatccctgatagatttagcggcagcggctctggcaccgacttcaccctgaccatctccagactggaacccgaggatttcgccgtgtactactgccagcagtacggcagcagctggacatttggccagggcacaaaggtggaaatcaaggagtccaaatatgggcccccatgcccatcatgcccaatctacatctgggcgcccttggccgggacttgtggggtccttctcctgtcactggttatcaccctttactgccggagggaccagaggctgccccccgatgcccacaagccccctgggggaggcagtttccggacccccatccaagaggagcaggccgacgcccactccaccctggccaagatcagagtgaagttcagcaggagcgcagacgcccccgcgtaccagcagggccagaaccagctctataacgagctcaatctaggacgaagagaggagtacgatgttttggacaagagacgtggccgggaccctgagatggggggaaagccgagaaggaagaaccctcaggaaggcctgtacaatgaactgcagaaagataagatggcggaggcctacagtgagattgggatgaaaggcgagcgccggaggggcaaggggcacgatggcctttaccagggtctcagtacagccaccaaggacacctacgacgcccttcacatgcaggccctgccccctcgcggctctggcgagggaaggggttccctgcttacttgcggcgacgtcgaagagaatcccggtccgatggccctcccagtaactgccctccttttgcccctcgcactccttcttcatgccgctcgccccaactgggtcaacgtgattagcgatttgaagaaaatcgaggaccttatacagtctatgcatattgacgctacactgtatactgagagtgatgtacacccgtcctgtaaggtaacggccatgaaatgctttcttctggagctccaggtcatcagcttggagtctggggacgcaagcatccacgatacggttgaaaacctcatcatccttgcgaacaactctctctcatctaatggaaacgttacagagagtgggtgtaaggagtgcgaagagttggaagaaaaaaacatcaaagaatttcttcaatccttcgttcacatagtgcaaatgttcattaacacgtccactaccacacccgccccgaggccacctacgccggcaccgactatcgccagtcaacccctctctctgcgccccgaggcttgccggcctgcggctggtggggcggtccacacccggggcctggattttgcgtgcgatatatacatctgggcacctcttgccggcacctgcggagtgctgcttctctcactcgttattacgctgtactgctaa

SEQ ID NO: 1209 - DNA, 2031 bp, synthetic construct
  misc_feature 1..2031: note = Synthetic
  source 1..2031: mol_type = other DNA
atggccttaccagtgaccgccttgctcctgccgctggccttgctgctccacgccgccaggccgcagctgcaactgcaggagagcggtcctggactggtgaagccttctgagacactgagcctgacctgcaccgtgtccggcggctctatcagctcctccagctactactggggctggatcagacagccacctggcaagggcctggaatggatcggcagcatttactattctggctcaacatactacaaccccagccttaaaagcagagtgacaatcagcgtggacaccagcaagaaccagttcagcctgaagctgtcctctgtgaccgccgctgatactgccgtttactactgcaccaccggaacaacagcttattactactactactacatggacgtgtggggaaagggcaccacagtgaccgtgtccagcggcggaggcggcagcggcggaggaggatctggcggcggcggcagcgagatcgtgctgacccagtctccaggcaccctgagcctgagccccggcgagcgggccacactgagctgcagagcctctcagagcgtcagctctagctacctggcctggtatcagcaaaaacctggccaggcccctagactgctgatctacggcgccagcagccgggccaccggcatccctgatagattcagcggatctggcagcggcaccgactttaccctcaccatcagcagactggaacccgaggacttcgccgtgtactattgtcagcagtacggcagcagctggacattcggccagggcaccaaggtggaaatcaaggagtccaaatatgggcccccatgcccatcatgcccaatctacatctgggcgcccttggccgggacttgtggggtccttctcctgtcactggttatcaccctttactgccggagggaccagaggctgccccccgatgcccacaagccccctgggggaggcagtttccggacccccatccaagaggagcaggccgacgcccactccaccctggccaagatcagagtgaagttcagcaggagcgcagacgcccccgcgtaccagcagggccagaaccagctctataacgagctcaatctaggacgaagagaggagtacgatgttttggacaagagacgtggccgggaccctgagatggggggaaagccgagaaggaagaaccctcaggaaggcctgtacaatgaactgcagaaagataagatggcggaggcctacagtgagattgggatgaaaggcgagcgccggaggggcaaggggcacgatggcctttaccagggtctcagtacagccaccaaggacacctacgacgcccttcacatgcaggccctgccccctcgcggctctggcgagggaaggggttccctgcttacttgcggcgacgtcgaagagaatcccggtccgatggccctcccagtaactgccctccttttgcccctcgcactccttcttcatgccgctcgccccaactgggtcaacgtgattagcgatttgaagaaaatcgaggaccttatacagtctatgcatattgacgctacactgtatactgagagtgatgtacacccgtcctgtaaggtaacggccatgaaatgctttcttctggagctccaggtcatcagcttggagtctggggacgcaagcatccacgatacggttgaaaacctcatcatccttgcgaacaactctctctcatctaatggaaacgttacagagagtgggtgtaaggagtgcgaagagttggaagaaaaaaacatcaaagaatttcttcaatccttcgttcacatagtgcaaatgttcattaacacgtccactaccacacccgccccgaggccacctacgccggcaccgactatcgccagtcaacccctctctctgcgccccgaggcttgccggcctgcggctggtggggcggtccacacccggggcctggattttgcgtgcgatatatacatctgggcacctcttgccggcacctgcggagtgctgcttctctcactcgttattacgctgtactgctaa

SEQ ID NO: 1210 - DNA, 2028 bp, synthetic construct
  misc_feature 1..2028: note = Synthetic
  source 1..2028: mol_type = other DNA
atggccttaccagtgaccgccttgctcctgccgctggccttgctgctccacgccgccaggccggaggtgcagctgctggagagcggtggaggcctggtgcaacctggcggctccctgcggctgagctgcgccgccagcggcttcacctttagctcttacgccatgacctgggtcagacaggcccctggcaagggactggaatgggtgtctgccatcagcggcagcggaggatctacatactacgctgatagcgtgaagggcagatttacaatcagccgcgacaatagcaagaacaccctgtacctgcagatgaacagcctgagagccgaggacaccgccgtgtactactgcgctagaggcggctacaactggcactactactactacatggacgtgtggggcaaaggaaccaccgtgaccgtgtccagcggcggcggcggctctggcggaggcggctctggcggcggcggaagcgagatcgtgctgacccagtctcccggaacactctccctgtccccaggcgagcgggctacactgagctgccgggccagccagagcgtgtcctcgtcttatctggcctggtatcagcagaaacctggccaagcccctagactgctgatctacggcgccagcagccgggccacaggcatccccgatagattcagcggcagcggaagcggcaccgacttcaccctgacaatcagcagactggaacctgaggacttcgccgtgtactattgtcagcagtacggcagcagctggaccttcggccagggcaccaaggttgaaattaaggagtccaaatatgggcccccatgcccatcatgcccaatctacatctgggcgcccttggccgggacttgtggggtccttctcctgtcactggttatcaccctttactgccggagggaccagaggctgccccccgatgcccacaagccccctgggggaggcagtttccggacccccatccaagaggagcaggccgacgcccactccaccctggccaagatcagagtgaagttcagcaggagcgcagacgcccccgcgtaccagcagggccagaaccagctctataacgagctcaatctaggacgaagagaggagtacgatgttttggacaagagacgtggccgggaccctgagatggggggaaagccgagaaggaagaaccctcaggaaggcctgtacaatgaactgcagaaagataagatggcggaggcctacagtgagattgggatgaaaggcgagcgccggaggggcaaggggcacgatggcctttaccagggtctcagtacagccaccaaggacacctacgacgcccttcacatgcaggccctgccccctcgcggctctggcgagggaaggggttccctgcttacttgcggcgacgtcgaagagaatcccggtccgatggccctcccagtaactgccctccttttgcccctcgcactccttcttcatgccgctcgccccaactgggtcaacgtgattagcgatttgaagaaaatcgaggaccttatacagtctatgcatattgacgctacactgtatactgagagtgatgtacacccgtcctgtaaggtaacggccatgaaatgctttcttctggagctccaggtcatcagcttggagtctggggacgcaagcatccacgatacggttgaaaacctcatcatccttgcgaacaactctctctcatctaatggaaacgttacagagagtgggtgtaaggagtgcgaagagttggaagaaaaaaacatcaaagaatttcttcaatccttcgttcacatagtgcaaatgttcattaacacgtccactaccacacccgccccgaggccacctacgccggcaccgactatcgccagtcaacccctctctctgcgccccgaggcttgccggcctgcggctggtggggcggtccacacccggggcctggattttgcgtgcgatatatacatctgggcacctcttgccggcacctgcggagtgctgcttctctcactcgttattacgctgtactgctaa

SEQ ID NO: 1211 - DNA, 2040 bp, synthetic construct
  misc_feature 1..2040: note = Synthetic
  source 1..2040: mol_type = other DNA
atggccttaccagtgaccgccttgctcctgccgctggccttgctgctccacgccgccaggccgcaagtgcagctggtggagagcggaggcggagtcgtgcaacctggcagaagcctgagactgagctgcgccgcttctggcttcaccttttctagctacgacatgcactgggtgcggcaggcccctggaaaaggcctggaatgggtcagcgtgatctggtatgacggctccaacaagaagtacggcgacagcgccaagggcaggttcaccattagccgggacaattctaagaacaccctggacctgcagatgaacagcctgcgggctgaggacaccgccgtgtactattgtgccagaggcgataattggaacgacgagggcggctactactactactacatggacgtgtggggcaagggaacaaccgtgacagtgtccagcggcggcggcggaagcggcggcggcggatctggcggaggcggcagcgagatcgtgctgacccagagccccgacttccagtccgtgacccctaaggaaaaggtgaccatcacatgcagagccagccagaacatcggcagcagcctgcactggtatcagcagaaacctgatcagtctccaaagctgctgatcaaattcgcctctcagagcatcagcggtgttcctagcagattcagcggctccggcagcggcactgattttacactgaccatcaacagcctggaggccgaggatgccgctgcctactactgccaccagagctctagcctgccctggaccttcggccagggcacaaaggtggaaatcaaggagtccaaatatgggcccccatgcccatcatgcccaatctacatctgggcgcccttggccgggacttgtggggtccttctcctgtcactggttatcaccctttactgccggagggaccagaggctgccccccgatgcccacaagccccctgggggaggcagtttccggacccccatccaagaggagcaggccgacgcccactccaccctggccaagatcagagtgaagttcagcaggagcgcagacgcccccgcgtaccagcagggccagaaccagctctataacgagctcaatctaggacgaagagaggagtacgatgttttggacaagagacgtggccgggaccctgagatggggggaaagccgagaaggaagaaccctcaggaaggcctgtacaatgaactgcagaaagataagatggcggaggcctacagtgagattgggatgaaaggcgagcgccggaggggcaaggggcacgatggcctttaccagggtctcagtacagccaccaaggacacctacgacgcccttcacatgcaggccctgccccctcgcggctctggcgagggaaggggttccctgcttacttgcggcgacgtcgaagagaatcccggtccgatggccctcccagtaactgccctccttttgcccctcgcactccttcttcatgccgctcgccccaactgggtcaacgtgattagcgatttgaagaaaatcgaggaccttatacagtctatgcatattgacgctacactgtatactgagagtgatgtacacccgtcctgtaaggtaacggccatgaaatgctttcttctggagctccaggtcatcagcttggagtctggggacgcaagcatccacgatacggttgaaaacctcatcatccttgcgaacaactctctctcatctaatggaaacgttacagagagtgggtgtaaggagtgcgaagagttggaagaaaaaaacatcaaagaatttcttcaatccttcgttcacatagtgcaaatgttcattaacacgtccactaccacacccgccccgaggccacctacgccggcaccgactatcgccagtcaacccctctctctgcgccccgaggcttgccggcctgcggctggtggggcggtccacacccggggcctggattttgcgtgcgatatatacatctgggcacctcttgccggcacctgcggagtgctgcttctctcactcgttattacgctgtactgctaa

SEQ ID NO: 1212 - DNA, 2040 bp, synthetic construct
  misc_feature 1..2040: note = Synthetic
  source 1..2040: mol_type = other DNA
atggccttaccagtgaccgccttgctcctgccgctggccttgctgctccacgccgccaggccgcaagtgcagctggtggagagcggcggcggcgtggtgcagcccggacgctccctgcggctgagctgcgccgccagcggctttaccttctctagctacgatatgcactgggtcagacaggctcctggcaaaggcctggaatgggtgtccgtgatctggtacgacggctccaacaagaagtacggcgacagcgccaagggcagattcaccatctctcgggacaatagcaagaacacactggacctgcagatgaactctctgagagccgaggacaccgccgtgtactactgcgccagaggcgataattggaacgacgagggcggttattactactactatatggacgtgtggggaaaaggcacaaccgtgaccgtttccagcggcggaggcggcagcggcggcggcggatctggcggaggcggcagcgacattcagatgacacagagccccagcagcctctccacctctgtgggcgatagagtgaccatcacatgccgggccagccagggcatcagcaactacctggcctggttccagcagaagcctggaaaggcccctaagagcctgatctacgccgccagcagcctgcagagcggagtgccatctaagttcagcggcagcggatctggcaccgacttcagcctgaccatcagctctctgcagcctgaggattttgccacatactactgtcagcagtacaacagctaccctatcacattcggccagggcaccagactggaaatcaaggagtccaaatatgggcccccatgcccatcatgcccaatctacatctgggcgcccttggccgggacttgtggggtccttctcctgtcactggttatcaccctttactgccggagggaccagaggctgccccccgatgcccacaagccccctgggggaggcagtttccggacccccatccaagaggagcaggccgacgcccactccaccctggccaagatcagagtgaagttcagcaggagcgcagacgcccccgcgtaccagcagggccagaaccagctctataacgagctcaatctaggacgaagagaggagtacgatgttttggacaagagacgtggccgggaccctgagatggggggaaagccgagaaggaagaaccctcaggaaggcctgtacaatgaactgcagaaagataagatggcggaggcctacagtgagattgggatgaaaggcgagcgccggaggggcaaggggcacgatggcctttaccagggtctcagtacagccaccaaggacacctacgacgcccttcacatgcaggccctgccccctcgcggctctggcgagggaaggggttccctgcttacttgcggcgacgtcgaagagaatcccggtccgatggccctcccagtaactgccctccttttgcccctcgcactccttcttcatgccgctcgccccaactgggtcaacgtgattagcgatttgaagaaaatcgaggaccttatacagtctatgcatattgacgctacactgtatactgagagtgatgtacacccgtcctgtaaggtaacggccatgaaatgctttcttctggagctccaggtcatcagcttggagtctggggacgcaagcatccacgatacggttgaaaacctcatcatccttgcgaacaactctctctcatctaatggaaacgttacagagagtgggtgtaaggagtgcgaagagttggaagaaaaaaacatcaaagaatttcttcaatccttcgttcacatagtgcaaatgttcattaacacgtccactaccacacccgccccgaggccacctacgccggcaccgactatcgccagtcaacccctctctctgcgccccgaggcttgccggcctgcggctggtggggcggtccacacccggggcctggattttgcgtgcgatatatacatctgggcacctcttgccggcacctgcggagtgctgcttctctcactcgttattacgctgtactgctaa

SEQ ID NO: 1213 - DNA, 2031 bp, synthetic construct
  misc_feature 1..2031: note = Synthetic
  source 1..2031: mol_type = other DNA
atggccttaccagtgaccgccttgctcctgccgctggccttgctgctccacgccgccaggccgcaagtgcagctggtgcagtctggagccgaggtgaaaaagagcggcgcctcagtgaaggtgtcctgcaaggccagcggctacacactgaccagctacggcatctcttgggttagacaggcccctggacaaggcctggaatggatgggctggatcagcgcctacaacggcaacatcaactacgcccagaaattccagggcagagtgacaatgaccacagacaccagcacctccaccgcttacatggaactgcggagcctgagaagcgacgacaccgccgtgtactactgtgtgcgggacggcgatagatacaattggaaccacagctatatggacgtgtggggcaagggcacaacagtcaccgtgtcttctggaggcggaggcagcggaggcggcggcagcggcggcggcggcagcgagatcgtgctgacacagagccctgatttccaaagcgtgacccctaaggaaaaggtgaccatcacatgcagagcctctcagaacattggaagtagcctgcactggtatcagcagaaacccgatcagtccccaaagctgctgatcaagttcgccagccagagcatcagcggagtgcccagccggttcagcggctctggctctggcaccgacttcaccctgaccatcaatagcctggaggccgaggacgccgctgcttattactgccaccagagcagctccctgccttggacctttggccagggcaccaaggtcgagatcaaggagtccaaatatgggcccccatgcccatcatgcccaatctacatctgggcgcccttggccgggacttgtggggtccttctcctgtcactggttatcaccctttactgccggagggaccagaggctgccccccgatgcccacaagccccctgggggaggcagtttccggacccccatccaagaggagcaggccgacgcccactccaccctggccaagatcagagtgaagttcagcaggagcgcagacgcccccgcgtaccagcagggccagaaccagctctataacgagctcaatctaggacgaagagaggagtacgatgttttggacaagagacgtggccgggaccctgagatggggggaaagccgagaaggaagaaccctcaggaaggcctgtacaatgaactgcagaaagataagatggcggaggcctacagtgagattgggatgaaaggcgagcgccggaggggcaaggggcacgatggcctttaccagggtctcagtacagccaccaaggacacctacgacgcccttcacatgcaggccctgccccctcgcggctctggcgagggaaggggttccctgcttacttgcggcgacgtcgaagagaatcccggtccgatggccctcccagtaactgccctccttttgcccctcgcactccttcttcatgccgctcgccccaactgggtcaacgtgattagcgatttgaagaaaatcgaggaccttatacagtctatgcatattgacgctacactgtatactgagagtgatgtacacccgtcctgtaaggtaacggccatgaaatgctttcttctggagctccaggtcatcagcttggagtctggggacgcaagcatccacgatacggttgaaaacctcatcatccttgcgaacaactctctctcatctaatggaaacgttacagagagtgggtgtaaggagtgcgaagagttggaagaaaaaaacatcaaagaatttcttcaatccttcgttcacatagtgcaaatgttcattaacacgtccactaccacacccgccccgaggccacctacgccggcaccgactatcgccagtcaacccctctctctgcgccccgaggcttgccggcctgcggctggtggggcggtccacacccggggcctggattttgcgtgcgatatatacatctgggcacctcttgccggcacctgcggagtgctgcttctctcactcgttattacgctgtactgctaa

SEQ ID NO: 1214 - DNA, 2031 bp, synthetic construct
  misc_feature 1..2031: note = Synthetic
  source 1..2031: mol_type = other DNA
atggccttaccagtgaccgccttgctcctgccgctggccttgctgctccacgccgccaggccgcaagtgcagctggttcagagcggagccgaggtgaaaaagtccggcgccagcgtgaaggtgtcatgcaaggcctctggctacaccctgacctcctacggcatcagctgggtccggcaggcccctggccagggcctggagtggatgggctggatcagcgcttataatggcaacatcaattacgcccagaagttccaaggcagagtgacaatgaccacagataccagcaccagcacagcttacatggaactgagatccctgcggagcgacgacaccgccgtgtactattgtgtgcgggacggcgacagatacaactggaaccacagctacatggacgtgtggggcaagggcaccaccgtgaccgtgtccagcggcggcggcggctctggaggcggcggatctggcggaggaggttccgacatccagatgacacagagccccagcagcctgagcacctctgtgggcgatagagtgaccatcacctgcagagccagccagggcatcagcaactacctggcctggttccagcagaaacctggaaaggcccctaagagcctgatctacgccgcttcttctctgcaaagcggcgtgccaagcaagttcagcggcagcggcagcggaacagacttcagcctgacaatttctagcctccagcctgaggattttgccacatactactgccagcagtacaacagctaccccatcaccttcggccagggcacaagactggaaatcaaggagtccaaatatgggcccccatgcccatcatgcccaatctacatctgggcgcccttggccgggacttgtggggtccttctcctgtcactggttatcaccctttactgccggagggaccagaggctgccccccgatgcccacaagccccctgggggaggcagtttccggacccccatccaagaggagcaggccgacgcccactccaccctggccaagatcagagtgaagttcagcaggagcgcagacgcccccgcgtaccagcagggccagaaccagctctataacgagctcaatctaggacgaagagaggagtacgatgttttggacaagagacgtggccgggaccctgagatggggggaaagccgagaaggaagaaccctcaggaaggcctgtacaatgaactgcagaaagataagatggcggaggcctacagtgagattgggatgaaaggcgagcgccggaggggcaaggggcacgatggcctttaccagggtctcagtacagccaccaaggacacctacgacgcccttcacatgcaggccctgccccctcgcggctctggcgagggaaggggttccctgcttacttgcggcgacgtcgaagagaatcccggtccgatggccctcccagtaactgccctccttttgcccctcgcactccttcttcatgccgctcgccccaactgggtcaacgtgattagcgatttgaagaaaatcgaggaccttatacagtctatgcatattgacgctacactgtatactgagagtgatgtacacccgtcctgtaaggtaacggccatgaaatgctttcttctggagctccaggtcatcagcttggagtctggggacgcaagcatccacgatacggttgaaaacctcatcatccttgcgaacaactctctctcatctaatggaaacgttacagagagtgggtgtaaggagtgcgaagagttggaagaaaaaaacatcaaagaatttcttcaatccttcgttcacatagtgcaaatgttcattaacacgtccactaccacacccgccccgaggccacctacgccggcaccgactatcgccagtcaacccctctctctgcgccccgaggcttgccggcctgcggctggtggggcggtccacacccggggcctggattttgcgtgcgatatatacatctgggcacctcttgccggcacctgcggagtgctgcttctctcactcgttattacgctgtactgctaa

SEQ ID NO: 1215 - DNA, 2028 bp, synthetic construct
  misc_feature 1..2028: note = Synthetic
  source 1..2028: mol_type = other DNA
atggccttaccagtgaccgccttgctcctgccgctggccttgctgctccacgccgccaggccggaggtgcagctgctggaaagcggaggcgacctggtgcaacctggaggcagcctgcggctgagctgcgccgcttctggcttcacctttagcacctacgccatgacatgggttagacaggcccctggcaagggcctggagtgggtcagcgccatcagcggcaccagcggctctacctactacgccgacagcgtgaagggcagattcaccatctccagagataattcaaagagcaccctgtacctgcacatgaacagcctgagaaccgaggacaccgccgtgtactattgcgctagaggcggctacaactggcactactactactacatggacgtgtggggaaaaggcacaacagtgaccgtgtcttctggcggaggaggcagcggcggtggcggcagtggcggaggcggcagcgagatcgtgctgacacagtcccctgacttccagagcgtgacccctaaggaaaaggtgacaatcacctgccgggcctctcagagcatcggcagcagcctgcactggtatcagcagaagcccgatcagtccccaaagctgctgatcaaatacgtgtcccaatctatcagcggcgtgcccagccggttttctggcagcggcagcggaacagacttcaccctgaccattaactccctggaggccgaggatgccgctgcctactattgtcaccagagcagcagcctgccttggacattcggccagggcaccaaggtggaaatcaaggagtccaaatatgggcccccatgcccatcatgcccaatctacatctgggcgcccttggccgggacttgtggggtccttctcctgtcactggttatcaccctttactgccggagggaccagaggctgccccccgatgcccacaagccccctgggggaggcagtttccggacccccatccaagaggagcaggccgacgcccactccaccctggccaagatcagagtgaagttcagcaggagcgcagacgcccccgcgtaccagcagggccagaaccagctctataacgagctcaatctaggacgaagagaggagtacgatgttttggacaagagacgtggccgggaccctgagatggggggaaagccgagaaggaagaaccctcaggaaggcctgtacaatgaactgcagaaagataagatggcggaggcctacagtgagattgggatgaaaggcgagcgccggaggggcaaggggcacgatggcctttaccagggtctcagtacagccaccaaggacacctacgacgcccttcacatgcaggccctgccccctcgcggctctggcgagggaaggggttccctgcttacttgcggcgacgtcgaagagaatcccggtccgatggccctcccagtaactgccctccttttgcccctcgcactccttcttcatgccgctcgccccaactgggtcaacgtgattagcgatttgaagaaaatcgaggaccttatacagtctatgcatattgacgctacactgtatactgagagtgatgtacacccgtcctgtaaggtaacggccatgaaatgctttcttctggagctccaggtcatcagcttggagtctggggacgcaagcatccacgatacggttgaaaacctcatcatccttgcgaacaactctctctcatctaatggaaacgttacagagagtgggtgtaaggagtgcgaagagttggaagaaaaaaacatcaaagaatttcttcaatccttcgttcacatagtgcaaatgttcattaacacgtccactaccacacccgccccgaggccacctacgccggcaccgactatcgccagtcaacccctctctctgcgccccgaggcttgccggcctgcggctggtggggcggtccacacccggggcctggattttgcgtgcgatatatacatctgggcacctcttgccggcacctgcggagtgctgcttctctcactcgttattacgctgtactgctaa

SEQ ID NO: 1216 - DNA, 2031 bp, synthetic construct
  misc_feature 1..2031: note = Synthetic
  source 1..2031: mol_type = other DNA
atggccttaccagtgaccgccttgctcctgccgctggccttgctgctccacgccgccaggccggaggtgcaactgctggaaagcggaggagatctggtgcagcccggcggctccctgcgcctgtcttgcgccgccagcggctttacattcagcacctacgccatgacatgggttagacaggcccctggaaaaggcctggaatgggtgtccgccatcagcggaaccagcggcagcacatactacgccgacagcgtgaagggcagattcaccatcagccgggacaacagcaagtccaccctgtacctgcacatgaacagcctgcggaccgaggacaccgccgtgtactattgcgctagaggcggttataattggcactactactactacatggacgtgtggggcaagggcacgaccgtgacagtgtccagcggcggcggaggcagcggcggaggaggctctggcggcggcggcagcgagatcgtgatgacccagtctcctgctacactgagcctgagccccggcgagcgggccaccctgagttgtagagccagccagagcgtgtcttctagctacctgagctggtatcagcaaaaacctggccttgctccaagactgctgatctacggcgcctctacaagagccaccggcatccccgccagatttagcggctctggcagcggcaccgacttcaccctgaccatctccagcctccagcctgaggatttcgccgtctactactgccagcaggattacaacctgcctcctaccttcggccagggcacaaaggtggaaattaaggagtccaaatatgggcccccatgcccatcatgcccaatctacatctgggcgcccttggccgggacttgtggggtccttctcctgtcactggttatcaccctttactgccggagggaccagaggctgccccccgatgcccacaagccccctgggggaggcagtttccggacccccatccaagaggagcaggccgacgcccactccaccctggccaagatcagagtgaagttcagcaggagcgcagacgcccccgcgtaccagcagggccagaaccagctctataacgagctcaatctaggacgaagagaggagtacgatgttttggacaagagacgtggccgggaccctgagatggggggaaagccgagaaggaagaaccctcaggaaggcctgtacaatgaactgcagaaagataagatggcggaggcctacagtgagattgggatgaaaggcgagcgccggaggggcaaggggcacgatggcctttaccagggtctcagtacagccaccaaggacacctacgacgcccttcacatgcaggccctgccccctcgcggctctggcgagggaaggggttccctgcttacttgcggcgacgtcgaagagaatcccggtccgatggccctcccagtaactgccctccttttgcccctcgcactccttcttcatgccgctcgccccaactgggtcaacgtgattagcgatttgaagaaaatcgaggaccttatacagtctatgcatattgacgctacactgtatactgagagtgatgtacacccgtcctgtaaggtaacggccatgaaatgctttcttctggagctccaggtcatcagcttggagtctggggacgcaagcatccacgatacggttgaaaacctcatcatccttgcgaacaactctctctcatctaatggaaacgttacagagagtgggtgtaaggagtgcgaagagttggaagaaaaaaacatcaaagaatttcttcaatccttcgttcacatagtgcaaatgttcattaacacgtccactaccacacccgccccgaggccacctacgccggcaccgactatcgccagtcaacccctctctctgcgccccgaggcttgccggcctgcggctggtggggcggtccacacccggggcctggattttgcgtgcgatatatacatctgggcacctcttgccggcacctgcggagtgctgcttctctcactcgttattacgctgtactgctaa

SEQ ID NO: 1217 - protein, 546 aa, synthetic construct
  REGION 1..546: note = Synthetic
MALPVTALLLPLALLLHAARPQVQLVESGGGVVQPGRSLRLSCAASGFTFNNYDMYWVRQAPGKGLEWVAVTWYDGSNKYYADSVKGRFTISRDNSKNTLYLQMNSLRAEDTAVYYCARGDNWNDEHHYFYYMDVWGKGTTVTVSSGGGGSGGGGSGGGGSEIVLTQSPDFQSVTPKEKVTITCRASQSIGSSLHWYQQKPDQSPKLLIKFASQSFSGVPSRFSGSGSGTDFTLTIHSLEAEDAATYYCHQSSSLPWTFGQGTKVEIKGSGGGGSCPYSNPRLCSGGGGSELPTQGTFSNVSTNVSPAKPTTTACPYSNPSLCGGGGSTTTPAPRPPTPAPTIASQPLSLRPEACRPAAGGAVHTRGLDFACDIYIWAPLAGTCGVLLLSLVITLYCRRDQRLPPDAHKPPGGGSFRTPIQEEQADAHSTLAKIRVKFSRSADAPAYQQGQNQLYNELNLGRREEYDVLDKRRGRDPEMGGKPRRKNPQEGLYNELQKDKMAEAYSEIGMKGERRRGKGHDGLYQGLSTATKDTYDALHMQALPPR

SEQ ID NO: 1218 - protein, 546 aa, synthetic construct
  REGION 1..546: note = Synthetic
MALPVTALLLPLALLLHAARPQVQLVESGGGVVQPGRSLRLSCAASGFTFSNYDMHWVRQAPGKGLEWVTIIWHDASNKYYLDSVKGRFTISRDNSKNTLYLQMNSLRAEDTAVYYCARGDNWNDEHHYFYYMDVWGKGTTVTVSSGGGGSGGGGSGGGGSEIVLTQSPDFQSVTPKEKVTITCRASQSIGSSLHWYQQKPDQSPKLLIKFASQSFSGVPSRFSGSGSGTDFTLTIHSLEAEDAATYYCHQSSSLPWTFGQGTKVEIKGSGGGGSCPYSNPRLCSGGGGSELPTQGTFSNVSTNVSPAKPTTTACPYSNPSLCGGGGSTTTPAPRPPTPAPTIASQPLSLRPEACRPAAGGAVHTRGLDFACDIYIWAPLAGTCGVLLLSLVITLYCRRDQRLPPDAHKPPGGGSFRTPIQEEQADAHSTLAKIRVKFSRSADAPAYQQGQNQLYNELNLGRREEYDVLDKRRGRDPEMGGKPRRKNPQEGLYNELQKDKMAEAYSEIGMKGERRRGKGHDGLYQGLSTATKDTYDALHMQALPPR

SEQ ID NO: 1219 - protein, 546 aa, synthetic construct
  REGION 1..546: note = Synthetic
MALPVTALLLPLALLLHAARPQVQLVESGGGVVQPGRSLRLSCAASGFTFSNYDMHWVRQAPGKGLEWVTIIWHDGSNKYYLDSVKGRFTISRDNSKNTLYLQMNSLRAEDTAVYYCARGDNWNDEHHYFYYMDVWGKGTTVTVSSGGGGSGGGGSGGGGSEIVLTQSPDFQSVTPKEKVTITCRASQSIGSSLHWYQQKPDQSPKLLIKFASQSFSGVPSRFSGSGSGTDFTLTIHSLEAEDAATYYCHQSSSLPWTFGQGTKVEIKGSGGGGSCPYSNPRLCSGGGGSELPTQGTFSNVSTNVSPAKPTTTACPYSNPSLCGGGGSTTTPAPRPPTPAPTIASQPLSLRPEACRPAAGGAVHTRGLDFACDIYIWAPLAGTCGVLLLSLVITLYCRRDQRLPPDAHKPPGGGSFRTPIQEEQADAHSTLAKIRVKFSRSADAPAYQQGQNQLYNELNLGRREEYDVLDKRRGRDPEMGGKPRRKNPQEGLYNELQKDKMAEAYSEIGMKGERRRGKGHDGLYQGLSTATKDTYDALHMQALPPR

SEQ ID NO: 1220 - protein, 540 aa, synthetic construct
  REGION 1..540: note = Synthetic
MALPVTALLLPLALLLHAARPEVQLLESGGGLVQPGGSLRLSCAASGFTFSIYAMSWVRQAPGKGLEWVSAISGGGDTTYYADSVKGRFTISRDNSKTTLDLQMNSLRAEDTAVYYCAKHTSYYMDVWGKGTTVTVSSGGGGSGGGGSGGGGSQTVVTQEPSLSVSPGGTVTLTCGLSSGSVSTSYYPSWYQQTPGQAPRTLIYSTNIRSSGVPDRFSGSILGNKAALTITGAQADDESDYYCKLYMGSGIIFGSGTKVTVLGSGGGGSCPYSNPRLCSGGGGSELPTQGTFSNVSTNVSPAKPTTTACPYSNPSLCGGGGSTTTPAPRPPTPAPTIASQPLSLRPEACRPAAGGAVHTRGLDFACDIYIWAPLAGTCGVLLLSLVITLYCRRDQRLPPDAHKPPGGGSFRTPIQEEQADAHSTLAKIRVKFSRSADAPAYQQGQNQLYNELNLGRREEYDVLDKRRGRDPEMGGKPRRKNPQEGLYNELQKDKMAEAYSEIGMKGERRRGKGHDGLYQGLSTATKDTYDALHMQALPPR

SEQ ID NO: 1221 - protein, 546 aa, synthetic construct
  REGION 1..546: note = Synthetic
MALPVTALLLPLALLLHAARPQVQLVESGGGVVQPGRSLRLSCAASGFTFSNYDKHWVRQAPGKGLEWVAVIWYDGSNKYYADSVKGRFTISRDNSKNTLYLQMNSLRAEDTAMYYCARGDNWNDEHHYFYYMDVWGKGTTVTVSSGGGGSGGGGSGGGGSEIVLTQSPDFQSVTPKEKVTITCRASQSIGSSLHWYQQKPDQSPKLLIKFASQSFSGVPSRFSGSGSGTDFTLTIHSLEAEDAATYYCHQSSSLPWTFGQGTKVEIKGSGGGGSCPYSNPRLCSGGGGSELPTQGTFSNVSTNVSPAKPTTTACPYSNPSLCGGGGSTTTPAPRPPTPAPTIASQPLSLRPEACRPAAGGAVHTRGLDFACDIYIWAPLAGTCGVLLLSLVITLYCRRDQRLPPDAHKPPGGGSFRTPIQEEQADAHSTLAKIRVKFSRSADAPAYQQGQNQLYNELNLGRREEYDVLDKRRGRDPEMGGKPRRKNPQEGLYNELQKDKMAEAYSEIGMKGERRRGKGHDGLYQGLSTATKDTYDALHMQALPPR

SEQ ID NO: 1222 - protein, 544 aa, synthetic construct
  REGION 1..544: note = Synthetic
MALPVTALLLPLALLLHAARPQVQLVQSGAEVKKPGASVKVSCKASGYTFTNYGFSWVRQAPGQGLDWMGWISAYNGYTNYTQKLQGRVTMTTDTSTTTAYMELRSLRSDDTAVYYCARRGLLYYYYSMDVWGKGTTVTVSSGGGGSGGGGSGGGGSEIVLTQSPATLSLSPGERATLSCGASQSVYNSYLAWYQQKPGLAPRLLIYDASLRATGVPDRFSGSGSGTDFTLTISTLEPEDFAVYYCQQYGGSPMYTFGQGTKLEIKGSGGGGSCPYSNPRLCSGGGGSELPTQGTFSNVSTNVSPAKPTTTACPYSNPSLCGGGGSTTTPAPRPPTPAPTIASQPLSLRPEACRPAAGGAVHTRGLDFACDIYIWAPLAGTCGVLLLSLVITLYCRRDQRLPPDAHKPPGGGSFRTPIQEEQADAHSTLAKIRVKFSRSADAPAYQQGQNQLYNELNLGRREEYDVLDKRRGRDPEMGGKPRRKNPQEGLYNELQKDKMAEAYSEIGMKGERRRGKGHDGLYQGLSTATKDTYDALHMQALPPR

SEQ ID NO: 1223 - protein, 540 aa, synthetic construct
  REGION 1..540: note = Synthetic
MALPVTALLLPLALLLHAARPEVQLLESGGGLVQPGGSLRLSCTASGFTFSSFAMSWVRQAPGKGLEWVSAMSGSGDTTYYADSVKGRFTISRDNSKTTLYLQMNSLRAEDTAVYSCAKHTTYYMDVWGKGTTVTVSSGGGGSGGGGSGGGGSQTVVTQEPSLSVSPGGTVTLTCGLSSGSVSTSDYPSWYQQTPGQAPRTLIYRTNTRSSGVPDRFSGSILGNKAALTITGAQADDESDYYCVLYMDSGIIFGSGTKVTVLGSGGGGSCPYSNPRLCSGGGGSELPTQGTFSNVSTNVSPAKPTTTACPYSNPSLCGGGGSTTTPAPRPPTPAPTIASQPLSLRPEACRPAAGGAVHTRGLDFACDIYIWAPLAGTCGVLLLSLVITLYCRRDQRLPPDAHKPPGGGSFRTPIQEEQADAHSTLAKIRVKFSRSADAPAYQQGQNQLYNELNLGRREEYDVLDKRRGRDPEMGGKPRRKNPQEGLYNELQKDKMAEAYSEIGMKGERRRGKGHDGLYQGLSTATKDTYDALHMQALPPR

SEQ ID NO: 1224 - protein, 540 aa, synthetic construct
  REGION 1..540: note = Synthetic
MALPVTALLLPLALLLHAARPEVQLLESGGGLVQPGGSLRLSCAASGFTFNTYAMSWVRQAPGKGLEWVSAMSGSGDTTYYADSVKGRFTISRDNSKTTLYLQMNSLRAEDTAVYSCAKHTSYYMDVWGKGTTVTVSSGGGGSGGGGSGGGGSQTVVTQEPSLSVSPGGTVTLTCGLSSGSVSTSDYPSWYQQTPGQAPRTLIYRTNTRSSGVPDRFSGSILGNKAALTITGAQADDESDYYCVLYMGSGIIFGSGTKVTVLGSGGGGSCPYSNPRLCSGGGGSELPTQGTFSNVSTNVSPAKPTTTACPYSNPSLCGGGGSTTTPAPRPPTPAPTIASQPLSLRPEACRPAAGGAVHTRGLDFACDIYIWAPLAGTCGVLLLSLVITLYCRRDQRLPPDAHKPPGGGSFRTPIQEEQADAHSTLAKIRVKFSRSADAPAYQQGQNQLYNELNLGRREEYDVLDKRRGRDPEMGGKPRRKNPQEGLYNELQKDKMAEAYSEIGMKGERRRGKGHDGLYQGLSTATKDTYDALHMQALPPR

SEQ ID NO: 1225 - protein, 540 aa, synthetic construct
  REGION 1..540: note = Synthetic
MALPVTALLLPLALLLHAARPEVQLLESGGDLVQPGGSLRLSCAASGFTFSTYAMSWVRQAPGKGLEWVSAISGSGENIYYADSVKGRFTISRDNSKNTLFLQMNSLRAEDTAVYYCAKHTSYYMDVWGKGTTVTVSSGGGGSGGGGSGGGGSQTVVTQEPSFSVSPGGTVTLTCGLYSDSVSTSYYPSWYQQTPGQAPRTLIYNTNTRSSGVPDRFSGSILGNKAALTITGAQADDESDYYCVLYMVSGIVFGSGTKVTVLGSGGGGSCPYSNPRLCSGGGGSELPTQGTFSNVSTNVSPAKPTTTACPYSNPSLCGGGGSTTTPAPRPPTPAPTIASQPLSLRPEACRPAAGGAVHTRGLDFACDIYIWAPLAGTCGVLLLSLVITLYCRRDQRLPPDAHKPPGGGSFRTPIQEEQADAHSTLAKIRVKFSRSADAPAYQQGQNQLYNELNLGRREEYDVLDKRRGRDPEMGGKPRRKNPQEGLYNELQKDKMAEAYSEIGMKGERRRGKGHDGLYQGLSTATKDTYDALHMQALPPR

SEQ ID NO: 1226 - protein, 546 aa, synthetic construct
  REGION 1..546: note = Synthetic
MALPVTALLLPLALLLHAARPQVQLVESGGGVVQPGRSLRLSCAASGFTFSSYGMHWVRQAPGKGLEWVAVIWYDGINKYYADSVKGRFTISRDNSKNTLYLQMNSLRAEDTAVYYCARERLERRYYYYMDVWGKGTTVTVSSGGGGSGGGGSGGGGSQTVVTQEPSFSVSPGGTVTLTCGLSSGSVSTSYYPGWYQQTPGQAPRTLIYSTNTRSSGVPDRFSGSILGNKAALTITGAQADDESDYYCVLYMGSGMFIFGSGTKVTVLGSGGGGSCPYSNPRLCSGGGGSELPTQGTFSNVSTNVSPAKPTTTACPYSNPSLCGGGGSTTTPAPRPPTPAPTIASQPLSLRPEACRPAAGGAVHTRGLDFACDIYIWAPLAGTCGVLLLSLVITLYCRRDQRLPPDAHKPPGGGSFRTPIQEEQADAHSTLAKIRVKFSRSADAPAYQQGQNQLYNELNLGRREEYDVLDKRRGRDPEMGGKPRRKNPQEGLYNELQKDKMAEAYSEIGMKGERRRGKGHDGLYQGLSTATKDTYDALHMQALPPR

SEQ ID NO: 1227 - protein, 540 aa, synthetic construct
  REGION 1..540: note = Synthetic
MALPVTALLLPLALLLHAARPEVQLLESGGGLVQPGGSLRLSCAASGFTFSSFAMSWVRQAPGKGLEWVSAVSGSGDDTYYADSVKGRFTISRDNSKNTLYLQMNSLRAEDTAVYYCAKHTSYYLDVWGKGTTVTVSSGGGGSGGGGSGGGGSQTVVTQEPSFSVSPGGTVTLTCALSSDSVSTSYFPSWYRQTPGQAPRTLIYNTNTRSSGVPDRFSGSILGNKAALTITGAQADDESDYYCVLYMGSGIIFGSGTKVTVLGSGGGGSCPYSNPRLCSGGGGSELPTQGTFSNVSTNVSPAKPTTTACPYSNPSLCGGGGSTTTPAPRPPTPAPTIASQPLSLRPEACRPAAGGAVHTRGLDFACDIYIWAPLAGTCGVLLLSLVITLYCRRDQRLPPDAHKPPGGGSFRTPIQEEQADAHSTLAKIRVKFSRSADAPAYQQGQNQLYNELNLGRREEYDVLDKRRGRDPEMGGKPRRKNPQEGLYNELQKDKMAEAYSEIGMKGERRRGKGHDGLYQGLSTATKDTYDALHMQALPPR

SEQ ID NO: 1228 - protein, 546 aa, synthetic construct
  REGION 1..546: note = Synthetic
MALPVTALLLPLALLLHAARPQVQLVESGGGVVQPGRSLRLSCAASGFNFSTFDIHWVRQAPGKGLEWVALIWYDGSYKYYADSVKGRFTISRDNSKNTLDLRMNSLRAEDTAVYYCARNDNWNDEHYYHYYMDVWGKGTTVTVSSGGGGSGGGGSGGGGSEIVLTQSPDFQSVTPKEKVTITCRASQSIGSSLHWYQQKPDQSPKLLIKFASQSFSGVPSRFSGSGSGTDFTLTINSLEAEDAATYFCHQSSSLPWTFGQGTKVEIKGSGGGGSCPYSNPRLCSGGGGSELPTQGTFSNVSTNVSPAKPTTTACPYSNPSLCGGGGSTTTPAPRPPTPAPTIASQPLSLRPEACRPAAGGAVHTRGLDFACDIYIWAPLAGTCGVLLLSLVITLYCRRDQRLPPDAHKPPGGGSFRTPIQEEQADAHSTLAKIRVKFSRSADAPAYQQGQNQLYNELNLGRREEYDVLDKRRGRDPEMGGKPRRKNPQEGLYNELQKDKMAEAYSEIGMKGERRRGKGHDGLYQGLSTATKDTYDALHMQALPPR

SEQ ID NO: 1229 - protein, 551 aa, synthetic construct
  REGION 1..551: note = Synthetic
MALPVTALLLPLALLLHAARPEVHLLESGGGLVQPGGSLRLSCAASGFTFSSYAMNWVRQAPGKGLEWVSSISGSGSSSYYADSVKGRFTISRDNSKNTLYLQMNSLRAEDTAVYYCASRGFNSQYPPGYYYYYMDVWGKGTTVTVSSGGGGSGGGGSGGGGSQTVVTQEPSFSVSPGGTVTLTCGLSSGSVSTSYFPSWYQQTPGQAPRTLIYITNTRSSGVPDRFSGSIIGNKAALTITGAQADDESDYFCVLYMGSGTWVFGGGTKLTVLGSGGGGSCPYSNPRLCSGGGGSELPTQGTFSNVSTNVSPAKPTTTACPYSNPSLCGGGGSTTTPAPRPPTPAPTIASQPLSLRPEACRPAAGGAVHTRGLDFACDIYIWAPLAGTCGVLLLSLVITLYCRRDQRLPPDAHKPPGGGSFRTPIQEEQADAHSTLAKIRVKFSRSADAPAYQQGQNQLYNELNLGRREEYDVLDKRRGRDPEMGGKPRRKNPQEGLYNELQKDKMAEAYSEIGMKGERRRGKGHDGLYQGLSTATKDTYDALHMQALPPR

SEQ ID NO: 1230 - protein, 538 aa, synthetic construct
  REGION 1..538: note = Synthetic
MALPVTALLLPLALLLHAARPEVQLLESGGGLVQPGGSLRLSCAASGFTFSNYAMTWVRQAPGKGLEWVSAISGSGIGTYYADSVQGRFTTSRDNSKNTLYLQMNSLRAEDTAVYYCAKGGYNWKDVWGKGTTVTVSSGGGGSGGGGSGGGGSEIVLTQSPDFQSVTPKEKVTITCRASQSIGSSLHWYQQKPDQSPKLLIKFASQSFSGVPSRFSGSGSGTDFTLTIHSLEAEDAATYYCHQSSSLPWTFGQGTKVEIKGSGGGGSCPYSNPRLCSGGGGSELPTQGTFSNVSTNVSPAKPTTTACPYSNPSLCGGGGSTTTPAPRPPTPAPTIASQPLSLRPEACRPAAGGAVHTRGLDFACDIYIWAPLAGTCGVLLLSLVITLYCRRDQRLPPDAHKPPGGGSFRTPIQEEQADAHSTLAKIRVKFSRSADAPAYQQGQNQLYNELNLGRREEYDVLDKRRGRDPEMGGKPRRKNPQEGLYNELQKDKMAEAYSEIGMKGERRRGKGHDGLYQGLSTATKDTYDALHMQALPPR

SEQ ID NO: 1231 - protein, 546 aa, synthetic construct
  REGION 1..546: note = Synthetic
MALPVTALLLPLALLLHAARPQVQLVESGGGVVQPGRSLRLSCAASGFTFTNYDMHWVRQAPGKGLEWVTIIWHDGSNKYYLDSVRGRFTISRDNSKNTLYLQMNSLRAEDTAVYYCARGDNWNDEHHYFYYMDVWGKGTTVTVSSGGGGSGGGGSGGGGSEIVLTQSPDFQSVTPKEKVTITCRASQSIGSSLHWYQQKPDQSPKLLIKFASQSFSGVPSRFSGSGSGTDFTLTIHSLEAEDAATYYCHQSSSLPWTFGQGTKVEIKGSGGGGSCPYSNPRLCSGGGGSELPTQGTFSNVSTNVSPAKPTTTACPYSNPSLCGGGGSTTTPAPRPPTPAPTIASQPLSLRPEACRPAAGGAVHTRGLDFACDIYIWAPLAGTCGVLLLSLVITLYCRRDQRLPPDAHKPPGGGSFRTPIQEEQADAHSTLAKIRVKFSRSADAPAYQQGQNQLYNELNLGRREEYDVLDKRRGRDPEMGGKPRRKNPQEGLYNELQKDKMAEAYSEIGMKGERRRGKGHDGLYQGLSTATKDTYDALHMQALPPR

SEQ ID NO: 1232 - protein, 546 aa, synthetic construct
  REGION 1..546: note = Synthetic
MALPVTALLLPLALLLHAARPQVQLVESGGGVVQPGRSLRLSCAASGFTFSNYDMHWVRQAPGKGLEWVTIIWHDGSNKYYLDSVKGRFTISRDNSKNTLYLQMNSLRAEDTAVYYCARGDNWNDEHHYFYYMDVWGKGTTVTVSSGGGGSGGGGSGGGGSEIVLTQSPATLSLSPGERATLSCRASQSVSSSLAWYQQKPGQAPRLLIYDASNRATGIPARFSGSGSGTDFTLTISSLEPEDFAVYYCQQRSNWPLTFGGGTKVEIKGSGGGGSCPYSNPRLCSGGGGSELPTQGTFSNVSTNVSPAKPTTTACPYSNPSLCGGGGSTTTPAPRPPTPAPTIASQPLSLRPEACRPAAGGAVHTRGLDFACDIYIWAPLAGTCGVLLLSLVITLYCRRDQRLPPDAHKPPGGGSFRTPIQEEQADAHSTLAKIRVKFSRSADAPAYQQGQNQLYNELNLGRREEYDVLDKRRGRDPEMGGKPRRKNPQEGLYNELQKDKMAEAYSEIGMKGERRRGKGHDGLYQGLSTATKDTYDALHMQALPPR

SEQ ID NO: 1233 - protein, 542 aa, synthetic construct
  REGION 1..542: note = Synthetic
MALPVTALLLPLALLLHAARPEVQLVESGGGVVRPGGSLRLSCAASGFTFDDYGMSWVRQAPGKGLEWVSGINWNGGSTGYVDSVKGRFTISRDNAKNSLYLQMNSLRAEDTALYHCARPVTTDYYYYMDVWGKGTTVTVSSGGGGSGGGGSGGGGSEIVLTQSPGTLSLSPGERATLSCRASQSVSSSYLAWYQQKPGQAPRLLIYGASSRATGIPDRFSGSGSGTDFTLTISRLEPEDFAVYYCQQYGSSWTFGQGTKVEIKGSGGGGSCPYSNPRLCSGGGGSELPTQGTFSNVSTNVSPAKPTTTACPYSNPSLCGGGGSTTTPAPRPPTPAPTIASQPLSLRPEACRPAAGGAVHTRGLDFACDIYIWAPLAGTCGVLLLSLVITLYCRRDQRLPPDAHKPPGGGSFRTPIQEEQADAHSTLAKIRVKFSRSADAPAYQQGQNQLYNELNLGRREEYDVLDKRRGRDPEMGGKPRRKNPQEGLYNELQKDKMAEAYSEIGMKGERRRGKGHDGLYQGLSTATKDTYDALHMQALPPR

SEQ ID NO: 1234 - protein, 550 aa, synthetic construct
  REGION 1..550: note = Synthetic
MALPVTALLLPLALLLHAARPEVQLLESGGGLVQPGGSLRLSCAASGFTFSSYAMSWVRQAPGKGLEWVSAISGSGGSTYYADSVKGRFTISRDNSKNTLYLQMNSLRAEDTAVYYCAKKGTSYNWNDVHYYYYYYMDVWGKGTTVTVSSGGGGSGGGGSGGGGSEIVLTQSPGTLSLSPGERATLSCRASQSVSSSYLAWYQQKPGQAPRLLIYGASSRATGIPDRFSGSGSGTDFTLTISRLEPEDFAVYYCQQYGSSWTFGQGTKVEIKGSGGGGSCPYSNPRLCSGGGGSELPTQGTFSNVSTNVSPAKPTTTACPYSNPSLCGGGGSTTTPAPRPPTPAPTIASQPLSLRPEACRPAAGGAVHTRGLDFACDIYIWAPLAGTCGVLLLSLVITLYCRRDQRLPPDAHKPPGGGSFRTPIQEEQADAHSTLAKIRVKFSRSADAPAYQQGQNQLYNELNLGRREEYDVLDKRRGRDPEMGGKPRRKNPQEGLYNELQKDKMAEAYSEIGMKGERRRGKGHDGLYQGLSTATKDTYDALHMQALPPR

SEQ ID NO: 1235 - protein, 544 aa, synthetic construct
  REGION 1..544: note = Synthetic
MALPVTALLLPLALLLHAARPQLQLQESGPGLVKPSETLSLTCTVSGGSISSSSYYWGWIRQPPGKGLEWIGSIYYSGSTYYNPSLKSRVTISVDTSKNQFSLKLSSVTAADTAVYYCTTGTTAYYYYYYMDVWGKGTTVTVSSGGGGSGGGGSGGGGSEIVLTQSPGTLSLSPGERATLSCRASQSVSSSYLAWYQQKPGQAPRLLIYGASSRATGIPDRFSGSGSGTDFTLTISRLEPEDFAVYYCQQYGSSWTFGQGTKVEIKGSGGGGSCPYSNPRLCSGGGGSELPTQGTFSNVSTNVSPAKPTTTACPYSNPSLCGGGGSTTTPAPRPPTPAPTIASQPLSLRPEACRPAAGGAVHTRGLDFACDIYIWAPLAGTCGVLLLSLVITLYCRRDQRLPPDAHKPPGGGSFRTPIQEEQADAHSTLAKIRVKFSRSADAPAYQQGQNQLYNELNLGRREEYDVLDKRRGRDPEMGGKPRRKNPQEGLYNELQKDKMAEAYSEIGMKGERRRGKGHDGLYQGLSTATKDTYDALHMQALPPR

SEQ ID NO: 1236 - protein, 543 aa, synthetic construct
  REGION 1..543: note = Synthetic
MALPVTALLLPLALLLHAARPEVQLLESGGGLVQPGGSLRLSCAASGFTFSSYAMTWVRQAPGKGLEWVSAISGSGGSTYYADSVKGRFTISRDNSKNTLYLQMNSLRAEDTAVYYCARGGYNWHYYYYMDVWGKGTTVTVSSGGGGSGGGGSGGGGSEIVLTQSPGTLSLSPGERATLSCRASQSVSSSYLAWYQQKPGQAPRLLIYGASSRATGIPDRFSGSGSGTDFTLTISRLEPEDFAVYYCQQYGSSWTFGQGTKVEIKGSGGGGSCPYSNPRLCSGGGGSELPTQGTFSNVSTNVSPAKPTTTACPYSNPSLCGGGGSTTTPAPRPPTPAPTIASQPLSLRPEACRPAAGGAVHTRGLDFACDIYIWAPLAGTCGVLLLSLVITLYCRRDQRLPPDAHKPPGGGSFRTPIQEEQADAHSTLAKIRVKFSRSADAPAYQQGQNQLYNELNLGRREEYDVLDKRRGRDPEMGGKPRRKNPQEGLYNELQKDKMAEAYSEIGMKGERRRGKGHDGLYQGLSTATKDTYDALHMQALPPR

SEQ ID NO: 1237 - protein, 547 aa, synthetic construct
  REGION 1..547: note = Synthetic
MALPVTALLLPLALLLHAARPQVQLVESGGGVVQPGRSLRLSCAASGFTFSSYDMHWVRQAPGKGLEWVSVIWYDGSNKKYGDSAKGRFTISRDNSKNTLDLQMNSLRAEDTAVYYCARGDNWNDEGGYYYYYMDVWGKGTTVTVSSGGGGSGGGGSGGGGSEIVLTQSPDFQSVTPKEKVTITCRASQNIGSSLHWYQQKPDQSPKLLIKFASQSISGVPSRFSGSGSGTDFTLTINSLEAEDAAAYYCHQSSSLPWTFGQGTKVEIKGSGGGGSCPYSNPRLCSGGGGSELPTQGTFSNVSTNVSPAKPTTTACPYSNPSLCGGGGSTTTPAPRPPTPAPTIASQPLSLRPEACRPAAGGAVHTRGLDFACDIYIWAPLAGTCGVLLLSLVITLYCRRDQRLPPDAHKPPGGGSFRTPIQEEQADAHSTLAKIRVKFSRSADAPAYQQGQNQLYNELNLGRREEYDVLDKRRGRDPEMGGKPRRKNPQEGLYNELQKDKMAEAYSEIGMKGERRRGKGHDGLYQGLSTATKDTYDALHMQALPPR

SEQ ID NO: 1238 - protein, 547 aa, synthetic construct
  REGION 1..547: note = Synthetic
MALPVTALLLPLALLLHAARPQVQLVESGGGVVQPGRSLRLSCAASGFTFSSYDMHWVRQAPGKGLEWVSVIWYDGSNKKYGDSAKGRFTISRDNSKNTLDLQMNSLRAEDTAVYYCARGDNWNDEGGYYYYYMDVWGKGTTVTVSSGGGGSGGGGSGGGGSDIQMTQSPSSLSTSVGDRVTITCRASQGISNYLAWFQQKPGKAPKSLIYAASSLQSGVPSKFSGSGSGTDFSLTISSLQPEDFATYYCQQYNSYPITFGQGTRLEIKGSGGGGSCPYSNPRLCSGGGGSELPTQGTFSNVSTNVSPAKPTTTACPYSNPSLCGGGGSTTTPAPRPPTPAPTIASQPLSLRPEACRPAAGGAVHTRGLDFACDIYIWAPLAGTCGVLLLSLVITLYCRRDQRLPPDAHKPPGGGSFRTPIQEEQADAHSTLAKIRVKFSRSADAPAYQQGQNQLYNELNLGRREEYDVLDKRRGRDPEMGGKPRRKNPQEGLYNELQKDKMAEAYSEIGMKGERRRGKGHDGLYQGLSTATKDTYDALHMQALPPR

SEQ ID NO: 1239 - protein, 544 aa, synthetic construct
  REGION 1..544: note = Synthetic
MALPVTALLLPLALLLHAARPQVQLVQSGAEVKKSGASVKVSCKASGYTLTSYGISWVRQAPGQGLEWMGWISAYNGNINYAQKFQGRVTMTTDTSTSTAYMELRSLRSDDTAVYYCVRDGDRYNWNHSYMDVWGKGTTVTVSSGGGGSGGGGSGGGGSEIVLTQSPDFQSVTPKEKVTITCRASQNIGSSLHWYQQKPDQSPKLLIKFASQSISGVPSRFSGSGSGTDFTLTINSLEAEDAAAYYCHQSSSLPWTFGQGTKVEIKGSGGGGSCPYSNPRLCSGGGGSELPTQGTFSNVSTNVSPAKPTTTACPYSNPSLCGGGGSTTTPAPRPPTPAPTIASQPLSLRPEACRPAAGGAVHTRGLDFACDIYIWAPLAGTCGVLLLSLVITLYCRRDQRLPPDAHKPPGGGSFRTPIQEEQADAHSTLAKIRVKFSRSADAPAYQQGQNQLYNELNLGRREEYDVLDKRRGRDPEMGGKPRRKNPQEGLYNELQKDKMAEAYSEIGMKGERRRGKGHDGLYQGLSTATKDTYDALHMQALPPR

SEQ ID NO: 1240 - protein, 544 aa, synthetic construct
  REGION 1..544: note = Synthetic
MALPVTALLLPLALLLHAARPQVQLVQSGAEVKKSGASVKVSCKASGYTLTSYGISWVRQAPGQGLEWMGWISAYNGNINYAQKFQGRVTMTTDTSTSTAYMELRSLRSDDTAVYYCVRDGDRYNWNHSYMDVWGKGTTVTVSSGGGGSGGGGSGGGGSDIQMTQSPSSLSTSVGDRVTITCRASQGISNYLAWFQQKPGKAPKSLIYAASSLQSGVPSKFSGSGSGTDFSLTISSLQPEDFATYYCQQYNSYPITFGQGTRLEIKGSGGGGSCPYSNPRLCSGGGGSELPTQGTFSNVSTNVSPAKPTTTACPYSNPSLCGGGGSTTTPAPRPPTPAPTIASQPLSLRPEACRPAAGGAVHTRGLDFACDIYIWAPLAGTCGVLLLSLVITLYCRRDQRLPPDAHKPPGGGSFRTPIQEEQADAHSTLAKIRVKFSRSADAPAYQQGQNQLYNELNLGRREEYDVLDKRRGRDPEMGGKPRRKNPQEGLYNELQKDKMAEAYSEIGMKGERRRGKGHDGLYQGLSTATKDTYDALHMQALPPR

SEQ ID NO: 1241 - protein, 543 aa, synthetic construct
  REGION 1..543: note = Synthetic
MALPVTALLLPLALLLHAARPEVQLLESGGDLVQPGGSLRLSCAASGFTFSTYAMTWVRQAPGKGLEWVSAISGTSGSTYYADSVKGRFTISRDNSKSTLYLHMNSLRTEDTAVYYCARGGYNWHYYYYMDVWGKGTTVTVSSGGGGSGGGGSGGGGSEIVLTQSPDFQSVTPKEKVTITCRASQSIGSSLHWYQQKPDQSPKLLIKYVSQSISGVPSRFSGSGSGTDFTLTINSLEAEDAAAYYCHQSSSLPWTFGQGTKVEIKGSGGGGSCPYSNPRLCSGGGGSELPTQGTFSNVSTNVSPAKPTTTACPYSNPSLCGGGGSTTTPAPRPPTPAPTIASQPLSLRPEACRPAAGGAVHTRGLDFACDIYIWAPLAGTCGVLLLSLVITLYCRRDQRLPPDAHKPPGGGSFRTPIQEEQADAHSTLAKIRVKFSRSADAPAYQQGQNQLYNELNLGRREEYDVLDKRRGRDPEMGGKPRRKNPQEGLYNELQKDKMAEAYSEIGMKGERRRGKGHDGLYQGLSTATKDTYDALHMQALPPR

SEQ ID NO: 1242 - protein, 544 aa, synthetic construct
  REGION 1..544: note = Synthetic
MALPVTALLLPLALLLHAARPEVQLLESGGDLVQPGGSLRLSCAASGFTFSTYAMTWVRQAPGKGLEWVSAISGTSGSTYYADSVKGRFTISRDNSKSTLYLHMNSLRTEDTAVYYCARGGYNWHYYYYMDVWGKGTTVTVSSGGGGSGGGGSGGGGSEIVMTQSPATLSLSPGERATLSCRASQSVSSSYLSWYQQKPGLAPRLLIYGASTRATGIPARFSGSGSGTDFTLTISSLQPEDFAVYYCQQDYNLPPTFGQGTKVEIKGSGGGGSCPYSNPRLCSGGGGSELPTQGTFSNVSTNVSPAKPTTTACPYSNPSLCGGGGSTTTPAPRPPTPAPTIASQPLSLRPEACRPAAGGAVHTRGLDFACDIYIWAPLAGTCGVLLLSLVITLYCRRDQRLPPDAHKPPGGGSFRTPIQEEQADAHSTLAKIRVKFSRSADAPAYQQGQNQLYNELNLGRREEYDVLDKRRGRDPEMGGKPRRKNPQEGLYNELQKDKMAEAYSEIGMKGERRRGKGHDGLYQGLSTATKDTYDALHMQALPPR

SEQ ID NO: 1243 - DNA, 1640 bp, synthetic construct
  misc_feature 1..1640: note = Synthetic
  source 1..1640: mol_type = other DNA
atggccttaccagtgaccgccttgctcctgccgctggccttgctgctccacgccgccaggccgcaggtgcagctggtggagtctgggggaggcgtggtccagcctgggaggtccctgagactctcctgtgcagcgtctggattcaccttcaataattatgacatgtactgggtccgccaggccccaggcaaggggctggagtgggtggcagttacatggtatgatggaagtaataaatactatgcagactccgtgaagggccgattcaccatctccagagacaattccaagaacacgctgtatctgcaaatgaacagcctgagagccgaggacacggctgtgtattactgtgcgagaggtgacaactggaatgacgaacaccactatttttactacatggacgtctggggcaaagggaccacggtcaccgtctcctcaggtggaggcggttcaggcggaggtggctctggcggtggcggatcggaaattgtgctgactcagtctccagactttcagtctgtgactccaaaggagaaagtcaccatcacctgccgggccagtcagagcattggtagtagcttacactggtaccagcagaaaccagatcagtctccaaagctcctcatcaagtttgcttcccagtccttctcaggggtcccctcgaggttcagtggcagtggatctgggacagatttcaccctcaccatccatagcctggaagctgaagatgctgcaacgtattactgtcatcagagtagtagtttaccgtggacgttcggccaagggaccaaggtggaaatcaaaggctctggcggcggcggcagctgcccttattctaaccctaggctctgcagcggaggcggcggcagcgagctgcctacccaaggcacatttagcaacgtctccaccaacgtgtcccctgccaaacccaccaccacagcttgtccttacagcaatcctagcctgtgcggcggcggcggcagcaccacgacgccagcgccgcggccaccaacaccggcgcccaccatcgcgtcgcagcccctgtccctgcgcccagaggcgtgccggccagcggcggggggcgcagtgcacacgagggggctggacttcgcctgtgatatctacatctgggcgcccttggccgggacttgtggggtccttctcctgtcactggttatcaccctttactgccggagggaccagaggctgccccccgatgcccacaagccccctgggggaggcagtttccggacccccatccaagaggagcaggccgacgcccactccaccctggccaagatcagagtgaagttcagcaggagcgcagacgcccccgcgtaccagcagggccagaaccagctctataacgagctcaatctaggacgaagagaggagtacgatgttttggacaagagacgtggccgggaccctgagatggggggaaagccgagaaggaagaaccctcaggaaggcctgtacaatgaactgcagaaagataagatggcggaggcctacagtgagattgggatgaaaggcgagcgccggaggggcaaggggcacgatggcctttaccagggtctcagtacagccaccaaggacacctacgacgcccttcacatgcaggccctgccccctcgcgg

SEQ ID NO: 1244 - DNA, 1640 bp, synthetic construct
  misc_feature 1..1640: note = Synthetic
  source 1..1640: mol_type = other DNA
atggccttaccagtgaccgccttgctcctgccgctggccttgctgctccacgccgccaggccgcaggtgcagctggtggagtctgggggaggcgtggtccagcctgggaggtccctgagactctcctgtgcagcgtctgggttcaccttcagtaactatgacatgcactgggtccgccaggccccaggcaaggggctggagtgggtgacaattatatggcatgatgcaagtaataaatattatttagactccgtgaagggccgattcaccatctccagagacaattccaagaacacgctgtatctgcaaatgaacagcctgagagccgaggacacggctgtgtattactgtgcgagaggtgacaactggaacgacgaacaccactacttctactacatggacgtctggggcaaagggaccacggtcaccgtctcctcaggtggaggcggttcaggcggaggtggctctggcggtggcggatcggaaattgtgctgactcagtctccagactttcagtctgtgactccaaaggagaaagtcaccatcacctgccgggccagtcagagcattggtagtagcttacactggtaccagcagaaaccagatcagtctccaaagctcctcatcaagtttgcttcccagtccttctcaggggtcccctcgaggttcagtggcagtggatctgggacagatttcaccctcaccatccatagcctggaagctgaagatgctgcaacgtattactgtcatcagagtagtagtttaccgtggacgttcggccaagggaccaaggtggaaatcaaaggctctggcggcggcggcagctgcccttattctaaccctaggctctgcagcggaggcggcggcagcgagctgcctacccaaggcacatttagcaacgtctccaccaacgtgtcccctgccaaacccaccaccacagcttgtccttacagcaatcctagcctgtgcggcggcggcggcagcaccacgacgccagcgccgcggccaccaacaccggcgcccaccatcgcgtcgcagcccctgtccctgcgcccagaggcgtgccggccagcggcggggggcgcagtgcacacgagggggctggacttcgcctgtgatatctacatctgggcgcccttggccgggacttgtggggtccttctcctgtcactggttatcaccctttactgccggagggaccagaggctgccccccgatgcccacaagccccctgggggaggcagtttccggacccccatccaagaggagcaggccgacgcccactccaccctggccaagatcagagtgaagttcagcaggagcgcagacgcccccgcgtaccagcagggccagaaccagctctataacgagctcaatctaggacgaagagaggagtacgatgttttggacaagagacgtggccgggaccctgagatggggggaaagccgagaaggaagaaccctcaggaaggcctgtacaatgaactgcagaaagataagatggcggaggcctacagtgagattgggatgaaaggcgagcgccggaggggcaaggggcacgatggcctttaccagggtctcagtacagccaccaaggacacctacgacgcccttcacatgcaggccctgccccctcgcgg

SEQ ID NO: 1245 - DNA, 1640 bp, synthetic construct
  misc_feature 1..1640: note = Synthetic
  source 1..1640: mol_type = other DNA
atggccttaccagtgaccgccttgctcctgccgctggccttgctgctccacgccgccaggccgcaggtgcagctggtggagtctgggggaggcgtggtccagcctgggaggtccctgagactctcctgtgcagcgtctgggttcaccttcagtaactatgacatgcactgggtccgccaggccccaggcaaggggctggagtgggtgacaattatatggcatgatggaagtaataaatattatttagactccgtgaagggccgattcaccatctccagagacaattccaagaacacgctgtatctgcaaatgaacagcctgagagccgaggacacggctgtgtattactgtgcgagaggtgacaactggaacgacgaacaccactacttctactacatggacgtctggggcaaagggaccacggtcaccgtctcctcaggtggaggcggttcaggcggaggtggctctggcggtggcggatcggaaattgtgctgactcagtctccagactttcagtctgtgactccaaaggagaaagtcaccatcacctgccgggccagtcagagcattggtagtagcttacactggtaccagcagaaaccagatcagtctccaaagctcctcatcaagtttgcttcccagtccttctcaggggtcccctcgaggttcagtggcagtggatctgggacagatttcaccctcaccatccatagcctggaagctgaagatgctgcaacgtattactgtcatcagagtagtagtttaccgtggacgttcggccaagggaccaaggtggaaatcaaaggctctggcggcggcggcagctgcccttattctaaccctaggctctgcagcggaggcggcggcagcgagctgcctacccaaggcacatttagcaacgtctccaccaacgtgtcccctgccaaacccaccaccacagcttgtccttacagcaatcctagcctgtgcggcggcggcggcagcaccacgacgccagcgccgcggccaccaacaccggcgcccaccatcgcgtcgcagcccctgtccctgcgcccagaggcgtgccggccagcggcggggggcgcagtgcacacgagggggctggacttcgcctgtgatatctacatctgggcgcccttggccgggacttgtggggtccttctcctgtcactggttatcaccctttactgccggagggaccagaggctgccccccgatgcccacaagccccctgggggaggcagtttccggacccccatccaagaggagcaggccgacgcccactccaccctggccaagatcagagtgaagttcagcaggagcgcagacgcccccgcgtaccagcagggccagaaccagctctataacgagctcaatctaggacgaagagaggagtacgatgttttggacaagagacgtggccgggaccctgagatggggggaaagccgagaaggaagaaccctcaggaaggcctgtacaatgaactgcagaaagataagatggcggaggcctacagtgagattgggatgaaaggcgagcgccggaggggcaaggggcacgatggcctttaccagggtctcagtacagccaccaaggacacctacgacgcccttcacatgcaggccctgccccctcgcgg

SEQ ID NO: 1246 - DNA, 1622 bp, synthetic construct
  misc_feature 1..1622: note = Synthetic
  source 1..1622: mol_type = other DNA
atggccttaccagtgaccgccttgctcctgccgctggccttgctgctccacgccgccaggccggaggtgcagctgctggagtctgggggaggcttggtacagcctggggggtccctgagactctcctgtgcagcctctggattcacctttagcatctatgccatgagctgggtccgccaggctccagggaaggggctggagtgggtctcagctattagtggtggtggtgataccacatactacgcagactccgtgaagggccggttcaccatctccagagacaattccaagaccacgctggatctgcaaatgaacagcctgagagccgaggacacggccgtatattactgtgcgaaacacactagctactacatggacgtctggggcaaagggaccacggtcaccgtctcctcaggtggaggcggttcaggcggaggtggctctggcggtggcggatcgcagactgtggtgacccaggagccatcgctctcagtgtcccctggagggacagtcacactcacttgtggcttgagctctggctcagtctctactagttactaccccagctggtaccagcagaccccaggccaggctccacgcacgctcatctacagcacaaatattcggtcttctggggtccctgatcgcttctctggctccatccttgggaacaaagctgccctcaccatcacgggggcccaggcagatgatgaatctgattattattgtaagctgtatatgggaagtggcattattttcggcagtggaaccaaggtcactgtcctaggctctggcggcggcggcagctgcccttattctaaccctaggctctgcagcggaggcggcggcagcgagctgcctacccaaggcacatttagcaacgtctccaccaacgtgtcccctgccaaacccaccaccacagcttgtccttacagcaatcctagcctgtgcggcggcggcggcagcaccacgacgccagcgccgcggccaccaacaccggcgcccaccatcgcgtcgcagcccctgtccctgcgcccagaggcgtgccggccagcggcggggggcgcagtgcacacgagggggctggacttcgcctgtgatatctacatctgggcgcccttggccgggacttgtggggtccttctcctgtcactggttatcaccctttactgccggagggaccagaggctgccccccgatgcccacaagccccctgggggaggcagtttccggacccccatccaagaggagcaggccgacgcccactccaccctggccaagatcagagtgaagttcagcaggagcgcagacgcccccgcgtaccagcagggccagaaccagctctataacgagctcaatctaggacgaagagaggagtacgatgttttggacaagagacgtggccgggaccctgagatggggggaaagccgagaaggaagaaccctcaggaaggcctgtacaatgaactgcagaaagataagatggcggaggcctacagtgagattgggatgaaaggcgagcgccggaggggcaaggggcacgatggcctttaccagggtctcagtacagccaccaaggacacctacgacgcccttcacatgcaggccctgccccctcgcgg

SEQ ID NO: 1247 - DNA, 1640 bp, synthetic construct
  misc_feature 1..1640: note = Synthetic
  source 1..1640: mol_type = other DNA
atggccttaccagtgaccgccttgctcctgccgctggccttgctgctccacgccgccaggccgcaggtgcagctggtggagtctgggggaggcgtggtccagcctgggaggtccctgagactctcctgtgcagcgtctggattcaccttcagtaactatgacaagcactgggtccgccaggccccaggcaaggggctggagtgggtggcagttatatggtatgatggaagtaataagtactatgcagactccgtgaagggccgattcaccatttccagagacaattccaagaacacgctgtatctacaaatgaacagcctgagagccgaggacacggctatgtattactgtgcgagaggtgacaactggaacgacgaacaccactacttctactacatggacgtctggggcaaagggaccacggtcaccgtctcctcaggtggaggcggttcaggcggaggtggctctggcggtggcggatcggaaattgtgctgactcagtctccagactttcagtctgtgactccaaaggagaaagtcaccatcacctgccgggccagtcagagcattggtagtagcttacactggtaccagcagaaaccagatcagtctccaaagctcctcatcaagtttgcttcccagtccttctcaggggtcccctcgaggttcagtggcagtggatctgggacagatttcaccctcaccatccatagcctggaagctgaagatgctgcaacgtattactgtcatcagagtagtagtttaccgtggacgttcggccaagggaccaaggtggaaatcaaaggctctggcggcggcggcagctgcccttattctaaccctaggctctgcagcggaggcggcggcagcgagctgcctacccaaggcacatttagcaacgtctccaccaacgtgtcccctgccaaacccaccaccacagcttgtccttacagcaatcctagcctgtgcggcggcggcggcagcaccacgacgccagcgccgcggccaccaacaccggcgcccaccatcgcgtcgcagcccctgtccctgcgcccagaggcgtgccggccagcggcggggggcgcagtgcacacgagggggctggacttcgcctgtgatatctacatctgggcgcccttggccgggacttgtggggtccttctcctgtcactggttatcaccctttactgccggagggaccagaggctgccccccgatgcccacaagccccctgggggaggcagtttccggacccccatccaagaggagcaggccgacgcccactccaccctggccaagatcagagtgaagttcagcaggagcgcagacgcccccgcgtaccagcagggccagaaccagctctataacgagctcaatctaggacgaagagaggagtacgatgttttggacaagagacgtggccgggaccctgagatggggggaaagccgagaaggaagaaccctcaggaaggcctgtacaatgaactgcagaaagataagatggcggaggcctacagtgagattgggatgaaaggcgagcgccggaggggcaaggggcacgatggcctttaccagggtctcagtacagccaccaaggacacctacgacgcccttcacatgcaggccctgccccctcgcgg

SEQ ID NO: 1248 - DNA, 1634 bp, synthetic construct
  misc_feature 1..1634: note = Synthetic
  source 1..1634: mol_type = other DNA
atggccttaccagtgaccgccttgctcctgccgctggccttgctgctccacgccgccaggccgcaggttcagttggtacagtctggagctgaggtgaagaagcctggggcctcagtgaaggtctcctgtaaggcttctggttacacctttaccaactatggtttcagctgggtgcgacaggcccctggacaagggcttgactggatgggatggatcagcgcttacaatggttacacaaattatacacagaaactccagggcagagtcaccatgaccactgacacatccacgaccacagcctacatggagctgaggagcctgagatctgacgacacggccgtctattactgtgcgagaagaggactactctactactactactccatggacgtctggggcaaagggaccacggtcaccgtctcctcaggtggaggcggttcaggcggaggtggctctggcggtggcggatcggaaattgtgttgacgcagtctccagccaccctgtctttgtctccaggggaaagagccaccctctcctgcggggccagtcagagtgtttacaacagttacttagcctggtaccagcagaaacctggcctggcgcccaggctcctcatctatgatgcatccctcagggccactggcgtcccagacaggttcagtggcagtgggtctgggacagacttcactctcaccatcagcacactggagcctgaagattttgcagtgtattactgtcagcagtatggtggctcacccatgtacacttttggccaggggaccaagctggagatcaaaggctctggcggcggcggcagctgcccttattctaaccctaggctctgcagcggaggcggcggcagcgagctgcctacccaaggcacatttagcaacgtctccaccaacgtgtcccctgccaaacccaccaccacagcttgtccttacagcaatcctagcctgtgcggcggcggcggcagcaccacgacgccagcgccgcggccaccaacaccggcgcccaccatcgcgtcgcagcccctgtccctgcgcccagaggcgtgccggccagcggcggggggcgcagtgcacacgagggggctggacttcgcctgtgatatctacatctgggcgcccttggccgggacttgtggggtccttctcctgtcactggttatcaccctttactgccggagggaccagaggctgccccccgatgcccacaagccccctgggggaggcagtttccggacccccatccaagaggagcaggccgacgcccactccaccctggccaagatcagagtgaagttcagcaggagcgcagacgcccccgcgtaccagcagggccagaaccagctctataacgagctcaatctaggacgaagagaggagtacgatgttttggacaagagacgtggccgggaccctgagatggggggaaagccgagaaggaagaaccctcaggaaggcctgtacaatgaactgcagaaagataagatggcggaggcctacagtgagattgggatgaaaggcgagcgccggaggggcaaggggcacgatggcctttaccagggtctcagtacagccaccaaggacacctacgacgcccttcacatgcaggccctgccccctcgcgg

SEQ ID NO: 1249 - DNA, 1622 bp, synthetic construct
  misc_feature 1..1622: note = Synthetic
  source 1..1622: mol_type = other DNA
atggccttaccagtgaccgccttgctcctgccgctggccttgctgctccacgccgccaggccggaggtgcagctgctggagtctgggggaggcctggtacagcctggggggtccctgagactctcctgtacagcctctggattcacctttagcagctttgccatgagctgggtccgccaggctccagggaaggggctggagtgggtctcagctatgagtggtagtggtgataccacatactacgcagactccgtgaagggccggttcaccatctcccgagacaattccaagaccacgctgtatctgcaaatgaacagcctgagagccgaggacacggccgtatattcctgtgcgaagcacactacctactacatggacgtctggggcaaagggaccacggtcaccgtctcctcaggtggaggcggttcaggcggaggtggctctggcggtggcggatcgcagactgtggtgacccaggagccatcgctctcagtgtcccctggagggacagtcacactcacttgtggcttgagctctggctcagtctctactagtgactaccccagctggtaccagcagaccccaggccaggctccacgcacgctcatctacagaacaaacactcgctcttctggggtccctgatcgcttctctggctccatccttgggaacaaagctgccctcaccatcacgggggcccaggcagatgatgaatctgattattactgtgtgctgtatatggatagtggcattattttcggcagtggaaccaaggtcactgtcctaggctctggcggcggcggcagctgcccttattctaaccctaggctctgcagcggaggcggcggcagcgagctgcctacccaaggcacatttagcaacgtctccaccaacgtgtcccctgccaaacccaccaccacagcttgtccttacagcaatcctagcctgtgcggcggcggcggcagcaccacgacgccagcgccgcggccaccaacaccggcgcccaccatcgcgtcgcagcccctgtccctgcgcccagaggcgtgccggccagcggcggggggcgcagtgcacacgagggggctggacttcgcctgtgatatctacatctgggcgcccttggccgggacttgtggggtccttctcctgtcactggttatcaccctttactgccggagggaccagaggctgccccccgatgcccacaagccccctgggggaggcagtttccggacccccatccaagaggagcaggccgacgcccactccaccctggccaagatcagagtgaagttcagcaggagcgcagacgcccccgcgtaccagcagggccagaaccagctctataacgagctcaatctaggacgaagagaggagtacgatgttttggacaagagacgtggccgggaccctgagatggggggaaagccgagaaggaagaaccctcaggaaggcctgtacaatgaactgcagaaagataagatggcggaggcctacagtgagattgggatgaaaggcgagcgccggaggggcaaggggcacgatggcctttaccagggtctcagtacagccaccaaggacacctacgacgcccttcacatgcaggccctgccccctcgcgg

SEQ ID NO: 1250 - DNA, 1622 bp, synthetic construct
  misc_feature 1..1622: note = Synthetic
  source 1..1622: mol_type = other DNA
atggccttaccagtgaccgccttgctcctgccgctggccttgctgctccacgccgccaggccggaggtgcagctgctggagtctgggggaggcttggtacagcctggggggtccctgagactctcctgtgcagcctctggattcacctttaacacctatgccatgagctgggtccgccaggctccagggaaggggctggagtgggtctcagctatgagtggtagtggtgataccacatactacgcagactccgtgaagggccggttcaccatctccagagacaattccaagaccactctgtatctgcaaatgaacagcctgagagccgaggacacggccgtatattcctgtgcgaaacacacttcctactacatggacgtctggggcaaagggaccacggtcaccgtctcctcaggtggaggcggttcaggcggaggtggctctggcggtggcggatcgcagactgtggtgacccaggagccatcgctctcagtgtcccctggagggacagtcacactcacttgtggcttgagctctggctcagtctctactagtgactaccccagttggtaccagcagaccccaggccaggctccacgcacgctcatctacagaacaaacactcgctcttctggggtccctgatcgcttctctggctccatccttgggaacaaagctgccctcaccatcacgggggcccaggcagatgatgaatctgattattactgtgtgctgtatatgggtagtggcattattttcggcagtggaaccaaggtcactgtcctaggctctggcggcggcggcagctgcccttattctaaccctaggctctgcagcggaggcggcggcagcgagctgcctacccaaggcacatttagcaacgtctccaccaacgtgtcccctgccaaacccaccaccacagcttgtccttacagcaatcctagcctgtgcggcggcggcggcagcaccacgacgccagcgccgcggccaccaacaccggcgcccaccatcgcgtcgcagcccctgtccctgcgcccagaggcgtgccggccagcggcggggggcgcagtgcacacgagggggctggacttcgcctgtgatatctacatctgggcgcccttggccgggacttgtggggtccttctcctgtcactggttatcaccctttactgccggagggaccagaggctgccccccgatgcccacaagccccctgggggaggcagtttccggacccccatccaagaggagcaggccgacgcccactccaccctggccaagatcagagtgaagttcagcaggagcgcagacgcccccgcgtaccagcagggccagaaccagctctataacgagctcaatctaggacgaagagaggagtacgatgttttggacaagagacgtggccgggaccctgagatggggggaaagccgagaaggaagaaccctcaggaaggcctgtacaatgaactgcagaaagataagatggcggaggcctacagtgagattgggatgaaaggcgagcgccggaggggcaaggggcacgatggcctttaccagggtctcagtacagccaccaaggacacctacgacgcccttcacatgcaggccctgccccctcgcgg

SEQ ID NO: 1251 - DNA, 1622 bp, synthetic construct
  misc_feature 1..1622: note = Synthetic
  source 1..1622: mol_type = other DNA
atggccttaccagtgaccgccttgctcctgccgctggccttgctgctccacgccgccaggccggaggtccaattattggagtctgggggagacttggtacagcctggggggtccctgagactctcctgtgcagcctctggattcacctttagcacctatgccatgagctgggtccgccaggctccagggaaggggctggaatgggtctcagctattagtggtagtggtgaaaacatatactacgcagactccgtgaagggccggttcaccatctccagagacaattccaagaacacgctatttctacaaatgaacagcctgagagccgaggacacggccgtatattactgtgcgaaacacactagctattacatggacgtctggggcaaagggaccacggtcaccgtctcctcaggtggaggcggttcaggcggaggtggctctggcggtggcggatcgcagactgtggtgacccaggagccatcgttctcagtgtcccctggagggacagtcacactcacttgtggcttatactctgactcagtctctactagttactaccccagctggtaccagcagaccccaggccaggctccacgcacgctcatctacaacacaaacactcgctcttctggggtccctgatcgcttctctggctccatccttgggaacaaagctgccctcaccatcacgggggcccaggcagatgatgaatctgattattactgtgtactatatatggttagtggcattgttttcggcagtggaaccaaggtcactgtcctgggctctggcggcggcggcagctgcccttattctaaccctaggctctgcagcggaggcggcggcagcgagctgcctacccaaggcacatttagcaacgtctccaccaacgtgtcccctgccaaacccaccaccacagcttgtccttacagcaatcctagcctgtgcggcggcggcggcagcaccacgacgccagcgccgcggccaccaacaccggcgcccaccatcgcgtcgcagcccctgtccctgcgcccagaggcgtgccggccagcggcggggggcgcagtgcacacgagggggctggacttcgcctgtgatatctacatctgggcgcccttggccgggacttgtggggtccttctcctgtcactggttatcaccctttactgccggagggaccagaggctgccccccgatgcccacaagccccctgggggaggcagtttccggacccccatccaagaggagcaggccgacgcccactccaccctggccaagatcagagtgaagttcagcaggagcgcagacgcccccgcgtaccagcagggccagaaccagctctataacgagctcaatctaggacgaagagaggagtacgatgttttggacaagagacgtggccgggaccctgagatggggggaaagccgagaaggaagaaccctcaggaaggcctgtacaatgaactgcagaaagataagatggcggaggcctacagtgagattgggatgaaaggcgagcgccggaggggcaaggggcacgatggcctttaccagggtctcagtacagccaccaaggacacctacgacgcccttcacatgcaggccctgccccctcgcgg

SEQ ID NO: 1252 - DNA, 1640 bp, synthetic construct
  misc_feature 1..1640: note = Synthetic
  source 1..1640: mol_type = other DNA
atggccttaccagtgaccgccttgctcctgccgctggccttgctgctccacgccgccaggccgcaggtgcagctggtggagtctgggggaggcgtggtccagcctgggaggtccctgagactctcctgtgcagcgtctggattcaccttcagtagttatggcatgcactgggtccgccaggctccaggcaaggggctggagtgggtggcagttatatggtatgatggaattaataaatactatgcagactccgtgaagggccgattcaccatctccagagacaattccaagaacacgctgtatctgcaaatgaacagcctgagagccgaagacacggctgtgtattactgtgcgagagaacggctggaacgaaggtactactactacatggacgtctggggcaaagggaccacggtcaccgtctcctcaggtggaggcggttcaggcggaggtggctctggcggtggcggatcgcagactgtggtgacccaggagccatcgttctcagtgtcccctggagggacagtcacactcacttgtggcttgagctctggctcagtctctactagttactaccccggctggtaccagcagaccccaggccaggctccacgcacgctcatctacagcacaaacactcgctcttctggggtccctgatcgcttctctggctccatccttgggaacaaagctgccctcaccatcacgggggcccaggcagatgatgaatctgattattactgtgtgctatatatgggtagtggcatgtttattttcggcagtggaaccaaggtcactgtcctaggctctggcggcggcggcagctgcccttattctaaccctaggctctgcagcggaggcggcggcagcgagctgcctacccaaggcacatttagcaacgtctccaccaacgtgtcccctgccaaacccaccaccacagcttgtccttacagcaatcctagcctgtgcggcggcggcggcagcaccacgacgccagcgccgcggccaccaacaccggcgcccaccatcgcgtcgcagcccctgtccctgcgcccagaggcgtgccggccagcggcggggggcgcagtgcacacgagggggctggacttcgcctgtgatatctacatctgggcgcccttggccgggacttgtggggtccttctcctgtcactggttatcaccctttactgccggagggaccagaggctgccccccgatgcccacaagccccctgggggaggcagtttccggacccccatccaagaggagcaggccgacgcccactccaccctggccaagatcagagtgaagttcagcaggagcgcagacgcccccgcgtaccagcagggccagaaccagctctataacgagctcaatctaggacgaagagaggagtacgatgttttggacaagagacgtggccgggaccctgagatggggggaaagccgagaaggaagaaccctcaggaaggcctgtacaatgaactgcagaaagataagatggcggaggcctacagtgagattgggatgaaaggcgagcgccggaggggcaaggggcacgatggcctttaccagggtctcagtacagccaccaaggacacctacgacgcccttcacatgcaggccctgccccctcgcgg

SEQ ID NO: 1253 - DNA, 1622 bp, synthetic construct
  misc_feature 1..1622: note = Synthetic
  source 1..1622: mol_type = other DNA
atggccttaccagtgaccgccttgctcctgccgctggccttgctgctccacgccgccaggccggaggtgcagttgttggagtctgggggaggcttggtacagcctggggggtccctgagactctcctgtgcagcctctggattcacctttagcagctttgccatgagctgggtccgccaggctccagggaaggggctggaatgggtctcagctgttagtggtagtggtgatgacacatactacgcagactccgtgaagggccggttcaccatctccagagacaattccaagaacacgctgtatctgcaaatgaacagcctgagagccgaggacacggccgtatattactgtgcgaaacacactagctactacctggacgtctggggcaaagggaccacggtcaccgtctcctcaggtggaggcggttcaggcggaggtggctctggcggtggcggatcgcagactgtggtgacccaggagccatcgttctcagtgtcccctggagggacagtcacactcacttgtgccttgagctctgactcagtctctactagttactttcccagctggtaccggcagaccccaggccaggctccacgcacgctcatctacaacacaaacactcgctcttctggggtccctgatcgcttctctggctccatccttgggaacaaagctgccctcaccatcacgggggcccaggcagatgatgaatctgattattactgtgtgctatatatgggtagtggcattattttcggcagtggaaccaaggtcactgtcctaggctctggcggcggcggcagctgcccttattctaaccctaggctctgcagcggaggcggcggcagcgagctgcctacccaaggcacatttagcaacgtctccaccaacgtgtcccctgccaaacccaccaccacagcttgtccttacagcaatcctagcctgtgcggcggcggcggcagcaccacgacgccagcgccgcggccaccaacaccggcgcccaccatcgcgtcgcagcccctgtccctgcgcccagaggcgtgccggccagcggcggggggcgcagtgcacacgagggggctggacttcgcctgtgatatctacatctgggcgcccttggccgggacttgtggggtccttctcctgtcactggttatcaccctttactgccggagggaccagaggctgccccccgatgcccacaagccccctgggggaggcagtttccggacccccatccaagaggagcaggccgacgcccactccaccctggccaagatcagagtgaagttcagcaggagcgcagacgcccccgcgtaccagcagggccagaaccagctctataacgagctcaatctaggacgaagagaggagtacgatgttttggacaagagacgtggccgggaccctgagatggggggaaagccgagaaggaagaaccctcaggaaggcctgtacaatgaactgcagaaagataagatggcggaggcctacagtgagattgggatgaaaggcgagcgccggaggggcaaggggcacgatggcctttaccagggtctcagtacagccaccaaggacacctacgacgcccttcacatgcaggccctgccccctcgcgg

SEQ ID NO: 1254 - DNA, 1640 bp, synthetic construct
  misc_feature 1..1640: note = Synthetic
  source 1..1640: mol_type = other DNA
atggccttaccagtgaccgccttgctcctgccgctggccttgctgctccacgccgccaggccgcaggtgcagctggtggagtctgggggaggcgtggtccagcctgggaggtccctgagactctcctgtgcagcgtctggattcaacttcagtacctttgacatacactgggtccgccaggctccaggcaaggggctggagtgggtggcacttatatggtatgatggaagttataaatactatgcagactccgtgaagggccgattcaccatttccagagacaattccaagaacacgctggatctgcgaatgaacagcctgagagccgaggacacggctgtgtattactgtgcgcgaaatgacaactggaacgacgaacactactaccactattacatggacgtctggggcaaagggaccacggtcaccgtctcctcaggtggaggcggttcaggcggaggtggctctggcggtggcggatcggaaattgtcctgactcagtctccagactttcagtctgtgactccaaaggagaaagtcaccatcacctgccgggccagtcagagtattggtagtagcttacactggtaccagcagaaaccagatcagtctccaaagctcctcatcaagtttgcttcccagtccttctcaggggtcccctcgaggttcagtggcagtggatctgggacagatttcaccctcaccatcaatagcctggaagctgaagatgctgcaacgtatttctgtcatcagagtagtagtttaccgtggacgttcggccaagggaccaaggtggaaatcaaaggctctggcggcggcggcagctgcccttattctaaccctaggctctgcagcggaggcggcggcagcgagctgcctacccaaggcacatttagcaacgtctccaccaacgtgtcccctgccaaacccaccaccacagcttgtccttacagcaatcctagcctgtgcggcggcggcggcagcaccacgacgccagcgccgcggccaccaacaccggcgcccaccatcgcgtcgcagcccctgtccctgcgcccagaggcgtgccggccagcggcggggggcgcagtgcacacgagggggctggacttcgcctgtgatatctacatctgggcgcccttggccgggacttgtggggtccttctcctgtcactggttatcaccctttactgccggagggaccagaggctgccccccgatgcccacaagccccctgggggaggcagtttccggacccccatccaagaggagcaggccgacgcccactccaccctggccaagatcagagtgaagttcagcaggagcgcagacgcccccgcgtaccagcagggccagaaccagctctataacgagctcaatctaggacgaagagaggagtacgatgttttggacaagagacgtggccgggaccctgagatggggggaaagccgagaaggaagaaccctcaggaaggcctgtacaatgaactgcagaaagataagatggcggaggcctacagtgagattgggatgaaaggcgagcgccggaggggcaaggggcacgatggcctttaccagggtctcagtacagccaccaaggacacctacgacgcccttcacatgcaggccctgccccctcgcgg

SEQ ID NO: 1255 - DNA, 1655 bp, synthetic construct
  misc_feature 1..1655: note = Synthetic
  source 1..1655: mol_type = other DNA
atggccttaccagtgaccgccttgctcctgccgctggccttgctgctccacgccgccaggccggaagtgcacctgttggagtctgggggaggcttggtccagcctggggggtccctgagactctcctgtgcggcctctggattcacctttagcagctatgccatgaactgggtccgccaggctccagggaaggggctggagtgggtctcttctattagtggtagtggtagtagctcatactacgcagactccgtgaagggccggttcaccatctccagagacaattccaagaacacgctgtatctgcaaatgaacagcctgagagccgaggacacggccgtatattactgtgcgtctcgtggattcaactcccagtatcctcccggatactactactactacatggacgtctggggcaaagggaccacggtcaccgtctcctcaggtggaggcggttcaggcggaggtggctctggcggtggcggatcgcagactgtggtgacccaggagccatcgttctcagtgtcccctggagggacagtcacactcacttgtggcttgagctctggctcagtctccactagttacttccccagctggtaccagcagacccccggccaggctccacgcacgctcatctacatcacaaacactcgctcttcaggggtccctgatcgcttctctggctccattattgggaacaaagctgccctcaccatcacgggggcccaggcagatgatgaatctgattatttctgtgtactatatatgggtagtggcacttgggtgttcggtggaggaaccaagctgactgtcctaggctctggcggcggcggcagctgcccttattctaaccctaggctctgcagcggaggcggcggcagcgagctgcctacccaaggcacatttagcaacgtctccaccaacgtgtcccctgccaaacccaccaccacagcttgtccttacagcaatcctagcctgtgcggcggcggcggcagcaccacgacgccagcgccgcggccaccaacaccggcgcccaccatcgcgtcgcagcccctgtccctgcgcccagaggcgtgccggccagcggcggggggcgcagtgcacacgagggggctggacttcgcctgtgatatctacatctgggcgcccttggccgggacttgtggggtccttctcctgtcactggttatcaccctttactgccggagggaccagaggctgccccccgatgcccacaagccccctgggggaggcagtttccggacccccatccaagaggagcaggccgacgcccactccaccctggccaagatcagagtgaagttcagcaggagcgcagacgcccccgcgtaccagcagggccagaaccagctctataacgagctcaatctaggacgaagagaggagtacgatgttttggacaagagacgtggccgggaccctgagatggggggaaagccgagaaggaagaaccctcaggaaggcctgtacaatgaactgcagaaagataagatggcggaggcctacagtgagattgggatgaaaggcgagcgccggaggggcaaggggcacgatggcctttaccagggtctcagtacagccaccaaggacacctacgacgcccttcacatgcaggccctgccccctcgcgg

SEQ ID NO: 1256 - DNA, 1616 bp, synthetic construct
  misc_feature 1..1616: note = Synthetic
  source 1..1616: mol_type = other DNA
atggccttaccagtgaccgccttgctcctgccgctggccttgctgctccacgccgccaggccggaggtgcagctgttggagtctgggggaggcttggtacagcctggggggtccctgagactctcctgtgcagcctctggattcaccttcagcaactatgccatgacctgggtccgccaggctccagggaaggggctggagtgggtctcagctattagtggtagtggtattggcacatactacgcagactccgtgcagggccggttcaccacctccagagacaattccaagaacacgctgtatctgcaaatgaacagcctgagagccgaggacacggccgtttattactgtgcgaaaggggggtacaactggaaggacgtctggggcaaagggaccacggtcaccgtctcctcaggtggaggcggttcaggcggaggtggctctggcggtggcggatcggaaattgtgctgactcagtctccagactttcagtctgtgactccaaaggagaaagtcaccatcacctgccgggccagtcagagcattggtagtagcttacactggtaccagcagaaaccagatcagtctccaaagctcctcatcaagtttgcttcccagtccttctcaggggtcccctcgaggttcagtggcagtggatctgggacagatttcaccctcaccatccatagcctggaagctgaagatgctgcaacgtattactgtcatcagagtagtagtttaccgtggacgttcggccaagggaccaaggtggaaatcaaaggctctggcggcggcggcagctgcccttattctaaccctaggctctgcagcggaggcggcggcagcgagctgcctacccaaggcacatttagcaacgtctccaccaacgtgtcccctgccaaacccaccaccacagcttgtccttacagcaatcctagcctgtgcggcggcggcggcagcaccacgacgccagcgccgcggccaccaacaccggcgcccaccatcgcgtcgcagcccctgtccctgcgcccagaggcgtgccggccagcggcggggggcgcagtgcacacgagggggctggacttcgcctgtgatatctacatctgggcgcccttggccgggacttgtggggtccttctcctgtcactggttatcaccctttactgccggagggaccagaggctgccccccgatgcccacaagccccctgggggaggcagtttccggacccccatccaagaggagcaggccgacgcccactccaccctggccaagatcagagtgaagttcagcaggagcgcagacgcccccgcgtaccagcagggccagaaccagctctataacgagctcaatctaggacgaagagaggagtacgatgttttggacaagagacgtggccgggaccctgagatggggggaaagccgagaaggaagaaccctcaggaaggcctgtacaatgaactgcagaaagataagatggcggaggcctacagtgagattgggatgaaaggcgagcgccggaggggcaaggggcacgatggcctttaccagggtctcagtacagccaccaaggacacctacgacgcccttcacatgcaggccctgccccctcgcgg

SEQ ID NO: 1257 - DNA, 1640 bp, synthetic construct
  misc_feature 1..1640: note = Synthetic
  source 1..1640: mol_type = other DNA
atggccttaccagtgaccgccttgctcctgccgctggccttgctgctccacgccgccaggccgcaggtgcagctggtggagtctgggggaggcgtggtccagcctgggaggtccctgagactctcctgtgcagcgtctgggttcaccttcactaactatgacatgcactgggtccgccaggccccaggcaaggggctggagtgggtgacaattatatggcatgatggaagtaataaatattatttagactccgtgaggggccgattcaccatctccagagacaattccaagaacacgctgtatctgcaaatgaacagcctgagagccgaggacacggctgtgtattactgtgcgagaggtgacaactggaacgacgaacaccactacttctactacatggacgtctggggcaaagggaccacggtcaccgtctcctcaggtggaggcggttcaggcggaggtggctctggcggtggcggatcggaaattgtgctgactcagtctccagactttcagtctgtgactccaaaggagaaagtcaccatcacctgccgggccagtcagagcattggtagtagcttacactggtaccagcagaaaccagatcagtctccaaagctcctcatcaagtttgcttcccagtccttctcaggggtcccctcgaggttcagtggcagtggatctgggacagatttcaccctcaccatccatagcctggaagctgaagatgctgcaacgtattactgtcatcagagtagtagtttaccgtggacgttcggccaagggaccaaggtggaaatcaaaggctctggcggcggcggcagctgcccttattctaaccctaggctctgcagcggaggcggcggcagcgagctgcctacccaaggcacatttagcaacgtctccaccaacgtgtcccctgccaaacccaccaccacagcttgtccttacagcaatcctagcctgtgcggcggcggcggcagcaccacgacgccagcgccgcggccaccaacaccggcgcccaccatcgcgtcgcagcccctgtccctgcgcccagaggcgtgccggccagcggcggggggcgcagtgcacacgagggggctggacttcgcctgtgatatctacatctgggcgcccttggccgggacttgtggggtccttctcctgtcactggttatcaccctttactgccggagggaccagaggctgccccccgatgcccacaagccccctgggggaggcagtttccggacccccatccaagaggagcaggccgacgcccactccaccctggccaagatcagagtgaagttcagcaggagcgcagacgcccccgcgtaccagcagggccagaaccagctctataacgagctcaatctaggacgaagagaggagtacgatgttttggacaagagacgtggccgggaccctgagatggggggaaagccgagaaggaagaaccctcaggaaggcctgtacaatgaactgcagaaagataagatggcggaggcctacagtgagattgggatgaaaggcgagcgccggaggggcaaggggcacgatggcctttaccagggtctcagtacagccaccaaggacacctacgacgcccttcacatgcaggccctgccccctcgcgg

SEQ ID NO: 1258 - DNA, 1640 bp, synthetic construct
  misc_feature 1..1640: note = Synthetic
  source 1..1640: mol_type = other DNA
atggccttaccagtgaccgccttgctcctgccgctggccttgctgctccacgccgccaggccgcaggtgcagctggtggagtctgggggaggcgtggtccagcctgggaggtccctgagactctcctgtgcagcgtctgggttcaccttcagtaactatgacatgcactgggtccgccaggccccaggcaaggggctggagtgggtgacaattatatggcatgatggaagtaataaatattatttagactccgtgaagggccgattcaccatctccagagacaattccaagaacacgctgtatctgcaaatgaacagcctgagagccgaggacacggctgtgtattactgtgcgagaggtgacaactggaacgacgaacaccactacttctactacatggacgtctggggcaaagggaccacggtcaccgtctcctcaggtggaggcggttcaggcggaggtggctctggcggtggcggatcggaaattgtgttgacacagtctccagccaccctgtctttgtctccaggggaaagagccaccctctcctgcagggccagtcagagtgttagcagctccttagcctggtaccaacagaaacctggccaggctccccggctcctcatctatgatgcatccaacagggccactggcatcccagccaggttcagtggcagtgggtctgggacagacttcactctcaccatcagcagcctagagcctgaagattttgcagtttattactgtcagcagcgtagcaactggcctctcactttcggcggagggaccaaggtggagatcaaaggctctggcggcggcggcagctgcccttattctaaccctaggctctgcagcggaggcggcggcagcgagctgcctacccaaggcacatttagcaacgtctccaccaacgtgtcccctgccaaacccaccaccacagcttgtccttacagcaatcctagcctgtgcggcggcggcggcagcaccacgacgccagcgccgcggccaccaacaccggcgcccaccatcgcgtcgcagcccctgtccctgcgcccagaggcgtgccggccagcggcggggggcgcagtgcacacgagggggctggacttcgcctgtgatatctacatctgggcgcccttggccgggacttgtggggtccttctcctgtcactggttatcaccctttactgccggagggaccagaggctgccccccgatgcccacaagccccctgggggaggcagtttccggacccccatccaagaggagcaggccgacgcccactccaccctggccaagatcagagtgaagttcagcaggagcgcagacgcccccgcgtaccagcagggccagaaccagctctataacgagctcaatctaggacgaagagaggagtacgatgttttggacaagagacgtggccgggaccctgagatggggggaaagccgagaaggaagaaccctcaggaaggcctgtacaatgaactgcagaaagataagatggcggaggcctacagtgagattgggatgaaaggcgagcgccggaggggcaaggggcacgatggcctttaccagggtctcagtacagccaccaaggacacctacgacgcccttcacatgcaggccctgccccctcgcgg

SEQ ID NO: 1259 - DNA, 1628 bp, synthetic construct
  misc_feature 1..1628: note = Synthetic
  source 1..1628: mol_type = other DNA
atggccttaccagtgaccgccttgctcctgccgctggccttgctgctccacgccgccaggccggaggtgcagctggtggagtctgggggaggtgtggtacggcctggggggtccctgagactctcctgtgcagcctctggattcacctttgatgattatggcatgagctgggtccgccaagctccagggaaggggctggagtgggtctctggtattaattggaatggtggtagcacaggttatgtagactctgtgaagggccgattcaccatctccagagacaacgccaagaactccctgtatctgcaaatgaacagtctgagagccgaggacacggccttgtatcactgtgcgagaccagtaactacggactactactactacatggacgtctggggcaaagggaccacggtcaccgtctcctcaggtggaggcggttcaggcggaggtggctctggcggtggcggatcggaaattgtgttgacgcagtctccaggcaccctgtctttgtctccaggggaaagagccaccctctcctgcagggccagtcagagtgttagcagcagctacttagcctggtaccagcagaaacctggccaggctcccaggctcctcatctatggtgcatccagcagggccactggcatcccagacaggttcagtggcagtgggtctgggacagacttcactctcaccatcagcagactggagcctgaagattttgcagtgtattactgtcagcagtatggtagctcgtggacgttcggccaagggaccaaggtggaaatcaaaggctctggcggcggcggcagctgcccttattctaaccctaggctctgcagcggaggcggcggcagcgagctgcctacccaaggcacatttagcaacgtctccaccaacgtgtcccctgccaaacccaccaccacagcttgtccttacagcaatcctagcctgtgcggcggcggcggcagcaccacgacgccagcgccgcggccaccaacaccggcgcccaccatcgcgtcgcagcccctgtccctgcgcccagaggcgtgccggccagcggcggggggcgcagtgcacacgagggggctggacttcgcctgtgatatctacatctgggcgcccttggccgggacttgtggggtccttctcctgtcactggttatcaccctttactgccggagggaccagaggctgccccccgatgcccacaagccccctgggggaggcagtttccggacccccatccaagaggagcaggccgacgcccactccaccctggccaagatcagagtgaagttcagcaggagcgcagacgcccccgcgtaccagcagggccagaaccagctctataacgagctcaatctaggacgaagagaggagtacgatgttttggacaagagacgtggccgggaccctgagatggggggaaagccgagaaggaagaaccctcaggaaggcctgtacaatgaactgcagaaagataagatggcggaggcctacagtgagattgggatgaaaggcgagcgccggaggggcaaggggcacgatggcctttaccagggtctcagtacagccaccaaggacacctacgacgcccttcacatgcaggccctgccccctcgcgg

SEQ ID NO: 1260 - DNA, 1652 bp, synthetic construct
  misc_feature 1..1652: note = Synthetic
  source 1..1652: mol_type = other DNA
atggccttaccagtgaccgccttgctcctgccgctggccttgctgctccacgccgccaggccggaggtgcagctgttggagtctgggggaggcttggtacagcctggggggtccctgagactctcctgtgcagcctctggattcacctttagcagctatgccatgagctgggtccgccaggctccagggaaggggctggagtgggtctcagctattagtggtagtggtggtagcacatactacgcagactccgtgaagggccggttcaccatctccagagacaattccaagaacacgctgtatctgcaaatgaacagcctgagagccgaggacacggccgtatattactgtgcgaaaaaggggacgtcgtacaactggaacgacgtccattactactactactactacatggacgtctggggcaaagggaccacggtcaccgtctcctcaggtggaggcggttcaggcggaggtggctctggcggtggcggatcggaaattgtgttgacgcagtctccaggcaccctgtctttgtctccaggggaaagagccaccctctcctgcagggccagtcagagtgttagcagcagctacttagcctggtaccagcagaaacctggccaggctcccaggctcctcatctatggtgcatccagcagggccactggcatcccagacaggttcagtggcagtgggtctgggacagacttcactctcaccatcagcagactggagcctgaagattttgcagtgtattactgtcagcagtatggtagctcgtggacgttcggccaagggaccaaggtggaaatcaaaggctctggcggcggcggcagctgcccttattctaaccctaggctctgcagcggaggcggcggcagcgagctgcctacccaaggcacatttagcaacgtctccaccaacgtgtcccctgccaaacccaccaccacagcttgtccttacagcaatcctagcctgtgcggcggcggcggcagcaccacgacgccagcgccgcggccaccaacaccggcgcccaccatcgcgtcgcagcccctgtccctgcgcccagaggcgtgccggccagcggcggggggcgcagtgcacacgagggggctggacttcgcctgtgatatctacatctgggcgcccttggccgggacttgtggggtccttctcctgtcactggttatcaccctttactgccggagggaccagaggctgccccccgatgcccacaagccccctgggggaggcagtttccggacccccatccaagaggagcaggccgacgcccactccaccctggccaagatcagagtgaagttcagcaggagcgcagacgcccccgcgtaccagcagggccagaaccagctctataacgagctcaatctaggacgaagagaggagtacgatgttttggacaagagacgtggccgggaccctgagatggggggaaagccgagaaggaagaaccctcaggaaggcctgtacaatgaactgcagaaagataagatggcggaggcctacagtgagattgggatgaaaggcgagcgccggaggggcaaggggcacgatggcctttaccagggtctcagtacagccaccaaggacacctacgacgcccttcacatgcaggccctgccccctcgcgg

SEQ ID NO: 1261 - DNA, 1634 bp, synthetic construct
  misc_feature 1..1634: note = Synthetic
  source 1..1634: mol_type = other DNA
atggccttaccagtgaccgccttgctcctgccgctggccttgctgctccacgccgccaggccgcagctgcagctgcaggagtcgggcccaggactggtgaagccttcggagaccctgtccctcacctgcactgtctctggtggctccatcagcagtagtagttactactggggctggatccgccagcccccagggaaggggctggagtggattgggagtatctattatagtgggagcacctactacaacccgtccctcaagagtcgagtcaccatatccgtagacacgtccaagaaccagttctccctgaagctgagctctgtgaccgccgcagacacggctgtgtattactgcacaactggaacgacggcttactactactactactacatggacgtctggggcaaagggaccacggtcaccgtctcctcaggtggaggcggttcaggcggaggtggctctggcggtggcggatcggaaattgtgttgacgcagtctccaggcaccctgtctttgtctccaggggaaagagccaccctctcctgcagggccagtcagagtgttagcagcagctacttagcctggtaccagcagaaacctggccaggctcccaggctcctcatctatggtgcatccagcagggccactggcatcccagacaggttcagtggcagtgggtctgggacagacttcactctcaccatcagcagactggagcctgaagattttgcagtgtattactgtcagcagtatggtagctcgtggacgttcggccaagggaccaaggtggaaatcaaaggctctggcggcggcggcagctgcccttattctaaccctaggctctgcagcggaggcggcggcagcgagctgcctacccaaggcacatttagcaacgtctccaccaacgtgtcccctgccaaacccaccaccacagcttgtccttacagcaatcctagcctgtgcggcggcggcggcagcaccacgacgccagcgccgcggccaccaacaccggcgcccaccatcgcgtcgcagcccctgtccctgcgcccagaggcgtgccggccagcggcggggggcgcagtgcacacgagggggctggacttcgcctgtgatatctacatctgggcgcccttggccgggacttgtggggtccttctcctgtcactggttatcaccctttactgccggagggaccagaggctgccccccgatgcccacaagccccctgggggaggcagtttccggacccccatccaagaggagcaggccgacgcccactccaccctggccaagatcagagtgaagttcagcaggagcgcagacgcccccgcgtaccagcagggccagaaccagctctataacgagctcaatctaggacgaagagaggagtacgatgttttggacaagagacgtggccgggaccctgagatggggggaaagccgagaaggaagaaccctcaggaaggcctgtacaatgaactgcagaaagataagatggcggaggcctacagtgagattgggatgaaaggcgagcgccggaggggcaaggggcacgatggcctttaccagggtctcagtacagccaccaaggacacctacgacgcccttcacatgcaggccctgccccctcgcgg

SEQ ID NO: 1262 - DNA, 1631 bp, synthetic construct
  misc_feature 1..1631: note = Synthetic
  source 1..1631: mol_type = other DNA
atggccttaccagtgaccgccttgctcctgccgctggccttgctgctccacgccgccaggccggaggtgcagctgttggagtctgggggaggcttggtgcagcctggggggtccctgagactctcctgtgcagcctctggattcacctttagcagctatgccatgacctgggtccgccaggctccagggaaggggctggagtgggtctcagctattagtggtagtggtggtagcacatactacgcagactccgtgaagggccggttcaccatctccagagacaattccaagaacacgctgtatctgcaaatgaacagcctgagagccgaggacacggccgtatattactgtgcgagaggcgggtataactggcactactactactacatggacgtctggggcaaagggaccacggtcaccgtctcctcaggtggaggcggttcaggcggaggtggctctggcggtggcggatcggaaattgtgttgacgcagtctccaggcaccctgtctttgtctccaggggaaagagccaccctctcctgcagggccagtcagagtgttagcagcagctacttagcctggtaccagcagaaacctggccaggctcccaggctcctcatctatggtgcatccagcagggccactggcatcccagacaggttcagtggcagtgggtctgggacagacttcactctcaccatcagcagactggagcctgaagattttgcagtgtattactgtcagcagtatggtagctcgtggacgttcggccaagggaccaaggtggaaatcaaaggctctggcggcggcggcagctgcccttattctaaccctaggctctgcagcggaggcggcggcagcgagctgcctacccaaggcacatttagcaacgtctccaccaacgtgtcccctgccaaacccaccaccacagcttgtccttacagcaatcctagcctgtgcggcggcggcggcagcaccacgacgccagcgccgcggccaccaacaccggcgcccaccatcgcgtcgcagcccctgtccctgcgcccagaggcgtgccggccagcggcggggggcgcagtgcacacgagggggctggacttcgcctgtgatatctacatctgggcgcccttggccgggacttgtggggtccttctcctgtcactggttatcaccctttactgccggagggaccagaggctgccccccgatgcccacaagccccctgggggaggcagtttccggacccccatccaagaggagcaggccgacgcccactccaccctggccaagatcagagtgaagttcagcaggagcgcagacgcccccgcgtaccagcagggccagaaccagctctataacgagctcaatctaggacgaagagaggagtacgatgttttggacaagagacgtggccgggaccctgagatggggggaaagccgagaaggaagaaccctcaggaaggcctgtacaatgaactgcagaaagataagatggcggaggcctacagtgagattgggatgaaaggcgagcgccggaggggcaaggggcacgatggcctttaccagggtctcagtacagccaccaaggacacctacgacgcccttcacatgcaggccctgccccctcgcgg

SEQ ID NO: 1263 - DNA, 1643 bp, synthetic construct
  misc_feature 1..1643: note = Synthetic
  source 1..1643: mol_type = other DNA
atggccttaccagtgaccgccttgctcctgccgctggccttgctgctccacgccgccaggccgcaggtgcagctggtggagtctgggggaggcgtggtccagcctgggaggtccctgagactctcctgtgcagcgtctggattcaccttcagtagctatgacatgcactgggtccgccaggctccaggcaaggggctggagtgggtgtcagttatatggtatgatggaagtaataaaaagtatggagactccgcgaagggccgattcaccatctccagagacaattccaagaacacgctggatctgcaaatgaacagcctgagagccgaggacacggctgtgtattactgtgcgagaggcgacaactggaacgacgaaggtggctactactactactacatggacgtctggggcaaagggaccacggtcaccgtctcctcaggtggaggcggttcaggcggaggtggctctggcggtggcggatcggaaattgtgctgactcagtctccagactttcagtctgtgactccaaaggagaaagtcaccatcacctgccgggccagtcagaacattggtagtagcttacactggtaccagcagaaaccagatcagtctccaaagctcctcatcaagtttgcttcccagtccatctcaggggtcccctcgaggttcagtggcagtggatctgggacagatttcaccctcaccatcaatagcctggaagctgaagatgctgcagcgtattactgtcatcagagtagtagtttaccgtggacgttcggccaagggaccaaggtggaaatcaaaggctctggcggcggcggcagctgcccttattctaaccctaggctctgcagcggaggcggcggcagcgagctgcctacccaaggcacatttagcaacgtctccaccaacgtgtcccctgccaaacccaccaccacagcttgtccttacagcaatcctagcctgtgcggcggcggcggcagcaccacgacgccagcgccgcggccaccaacaccggcgcccaccatcgcgtcgcagcccctgtccctgcgcccagaggcgtgccggccagcggcggggggcgcagtgcacacgagggggctggacttcgcctgtgatatctacatctgggcgcccttggccgggacttgtggggtccttctcctgtcactggttatcaccctttactgccggagggaccagaggctgccccccgatgcccacaagccccctgggggaggcagtttccggacccccatccaagaggagcaggccgacgcccactccaccctggccaagatcagagtgaagttcagcaggagcgcagacgcccccgcgtaccagcagggccagaaccagctctataacgagctcaatctaggacgaagagaggagtacgatgttttggacaagagacgtggccgggaccctgagatggggggaaagccgagaaggaagaaccctcaggaaggcctgtacaatgaactgcagaaagataagatggcggaggcctacagtgagattgggatgaaaggcgagcgccggaggggcaaggggcacgatggcctttaccagggtctcagtacagccaccaaggacacctacgacgcccttcacatgcaggccctgccccctcgcgg

SEQ ID NO: 1264 - DNA, 1643 bp, synthetic construct
  misc_feature 1..1643: note = Synthetic
  source 1..1643: mol_type = other DNA
atggccttaccagtgaccgccttgctcctgccgctggccttgctgctccacgccgccaggccgcaggtgcagctggtggagtctgggggaggcgtggtccagcctgggaggtccctgagactctcctgtgcagcgtctggattcaccttcagtagctatgacatgcactgggtccgccaggctccaggcaaggggctggagtgggtgtcagttatatggtatgatggaagtaataaaaagtatggagactccgcgaagggccgattcaccatctccagagacaattccaagaacacgctggatctgcaaatgaacagcctgagagccgaggacacggctgtgtattactgtgcgagaggcgacaactggaacgacgaaggtggctactactactactacatggacgtctggggcaaagggaccacggtcaccgtctcctcaggtggaggcggttcaggcggaggtggctctggcggtggcggatcggacatccagatgacccagtctccatcctcactgtctacatctgtaggagacagagtcaccatcacttgtcgggcgagtcagggcattagcaattatttagcctggtttcagcagaaaccagggaaagcccctaagtccctgatctatgctgcatccagtttgcaaagtggggtcccatcaaagttcagcggcagtggatctgggacagatttctctctcaccattagcagcctgcagcctgaagattttgcaacttattactgccaacagtataatagttacccgatcaccttcggccaagggacacgactggagattaaaggctctggcggcggcggcagctgcccttattctaaccctaggctctgcagcggaggcggcggcagcgagctgcctacccaaggcacatttagcaacgtctccaccaacgtgtcccctgccaaacccaccaccacagcttgtccttacagcaatcctagcctgtgcggcggcggcggcagcaccacgacgccagcgccgcggccaccaacaccggcgcccaccatcgcgtcgcagcccctgtccctgcgcccagaggcgtgccggccagcggcggggggcgcagtgcacacgagggggctggacttcgcctgtgatatctacatctgggcgcccttggccgggacttgtggggtccttctcctgtcactggttatcaccctttactgccggagggaccagaggctgccccccgatgcccacaagccccctgggggaggcagtttccggacccccatccaagaggagcaggccgacgcccactccaccctggccaagatcagagtgaagttcagcaggagcgcagacgcccccgcgtaccagcagggccagaaccagctctataacgagctcaatctaggacgaagagaggagtacgatgttttggacaagagacgtggccgggaccctgagatggggggaaagccgagaaggaagaaccctcaggaaggcctgtacaatgaactgcagaaagataagatggcggaggcctacagtgagattgggatgaaaggcgagcgccggaggggcaaggggcacgatggcctttaccagggtctcagtacagccaccaaggacacctacgacgcccttcacatgcaggccctgccccctcgcgg

SEQ ID NO: 1265 - DNA, 1634 bp, synthetic construct
  misc_feature 1..1634: note = Synthetic
  source 1..1634: mol_type = other DNA
atggccttaccagtgaccgccttgctcctgccgctggccttgctgctccacgccgccaggccgcaggttcagctggtacagtctggagctgaggtgaagaagtctggggcctcagtgaaggtctcctgcaaggcttctggttacaccttaaccagctatggcatcagctgggtgcgacaggcccctggacaagggcttgagtggatgggatggatcagcgcttacaatggtaacataaactatgcacagaagttccagggcagagtcaccatgaccacagacacatccacgagcacagcctacatggagctgaggagcctgagatctgacgacacggccgtgtattactgtgtgagagatggggaccggtacaactggaaccacagctacatggacgtctggggcaaagggaccacggtcaccgtctcctcaggtggaggcggttcaggcggaggtggctctggcggtggcggatcggaaattgtgctgactcagtctccagactttcagtctgtgactccaaaggagaaagtcaccatcacctgccgggccagtcagaacattggtagtagcttacactggtaccagcagaaaccagatcagtctccaaagctcctcatcaagtttgcttcccagtccatctcaggggtcccctcgaggttcagtggcagtggatctgggacagatttcaccctcaccatcaatagcctggaagctgaagatgctgcagcgtattactgtcatcagagtagtagtttaccgtggacgttcggccaagggaccaaggtggaaatcaaaggctctggcggcggcggcagctgcccttattctaaccctaggctctgcagcggaggcggcggcagcgagctgcctacccaaggcacatttagcaacgtctccaccaacgtgtcccctgccaaacccaccaccacagcttgtccttacagcaatcctagcctgtgcggcggcggcggcagcaccacgacgccagcgccgcggccaccaacaccggcgcccaccatcgcgtcgcagcccctgtccctgcgcccagaggcgtgccggccagcggcggggggcgcagtgcacacgagggggctggacttcgcctgtgatatctacatctgggcgcccttggccgggacttgtggggtccttctcctgtcactggttatcaccctttactgccggagggaccagaggctgccccccgatgcccacaagccccctgggggaggcagtttccggacccccatccaagaggagcaggccgacgcccactccaccctggccaagatcagagtgaagttcagcaggagcgcagacgcccccgcgtaccagcagggccagaaccagctctataacgagctcaatctaggacgaagagaggagtacgatgttttggacaagagacgtggccgggaccctgagatggggggaaagccgagaaggaagaaccctcaggaaggcctgtacaatgaactgcagaaagataagatggcggaggcctacagtgagattgggatgaaaggcgagcgccggaggggcaaggggcacgatggcctttaccagggtctcagtacagccaccaaggacacctacgacgcccttcacatgcaggccctgccccctcgcgg

SEQ ID NO: 1266 - DNA, 1634 bp, synthetic construct
  misc_feature 1..1634: note = Synthetic
  source 1..1634: mol_type = other DNA
atggccttaccagtgaccgccttgctcctgccgctggccttgctgctccacgccgccaggccgcaggttcagctggtacagtctggagctgaggtgaagaagtctggggcctcagtgaaggtctcctgcaaggcttctggttacaccttaaccagctatggcatcagctgggtgcgacaggcccctggacaagggcttgagtggatgggatggatcagcgcttacaatggtaacataaactatgcacagaagttccagggcagagtcaccatgaccacagacacatccacgagcacagcctacatggagctgaggagcctgagatctgacgacacggccgtgtattactgtgtgagagatggggaccggtacaactggaaccacagctacatggacgtctggggcaaagggaccacggtcaccgtctcctcaggtggaggcggttcaggcggaggtggctctggcggtggcggatcggacatccagatgacccagtctccatcctcactgtctacatctgtaggagacagagtcaccatcacttgtcgggcgagtcagggcattagcaattatttagcctggtttcagcagaaaccagggaaagcccctaagtccctgatctatgctgcatccagtttgcaaagtggggtcccatcaaagttcagcggcagtggatctgggacagatttctctctcaccattagcagcctgcagcctgaagattttgcaacttattactgccaacagtataatagttacccgatcaccttcggccaagggacacgactggagattaaaggctctggcggcggcggcagctgcccttattctaaccctaggctctgcagcggaggcggcggcagcgagctgcctacccaaggcacatttagcaacgtctccaccaacgtgtcccctgccaaacccaccaccacagcttgtccttacagcaatcctagcctgtgcggcggcggcggcagcaccacgacgccagcgccgcggccaccaacaccggcgcccaccatcgcgtcgcagcccctgtccctgcgcccagaggcgtgccggccagcggcggggggcgcagtgcacacgagggggctggacttcgcctgtgatatctacatctgggcgcccttggccgggacttgtggggtccttctcctgtcactggttatcaccctttactgccggagggaccagaggctgccccccgatgcccacaagccccctgggggaggcagtttccggacccccatccaagaggagcaggccgacgcccactccaccctggccaagatcagagtgaagttcagcaggagcgcagacgcccccgcgtaccagcagggccagaaccagctctataacgagctcaatctaggacgaagagaggagtacgatgttttggacaagagacgtggccgggaccctgagatggggggaaagccgagaaggaagaaccctcaggaaggcctgtacaatgaactgcagaaagataagatggcggaggcctacagtgagattgggatgaaaggcgagcgccggaggggcaaggggcacgatggcctttaccagggtctcagtacagccaccaaggacacctacgacgcccttcacatgcaggccctgccccctcgcgg

SEQ ID NO: 1267 - DNA, 1631 bp, synthetic construct
  misc_feature 1..1631: note = Synthetic
  source 1..1631: mol_type = other DNA
atggccttaccagtgaccgccttgctcctgccgctggccttgctgctccacgccgccaggccggaggtgcagctgttggagtctgggggagacttggtacagcctggggggtccctgcgactctcctgtgcagcctctggattcacctttagcacctatgccatgacctgggtccgccaggctccagggaaggggctggagtgggtctcagctattagtggtactagtggtagcacatactacgcagactccgtgaagggccggttcaccatctccagagacaattccaagagcacgctgtatctgcacatgaacagcctgagaaccgaggacacggccgtatattactgtgcgagaggcggatataactggcactactactactacatggacgtctggggcaaagggaccacggtcaccgtctcctcaggtggaggcggttcaggcggaggtggctctggcggtggcggatcggaaattgtgctgactcagtctccagactttcagtctgtgactccaaaggagaaagtcaccatcacctgccgggccagtcagagcattggaagtagcttacactggtaccagcagaaaccagatcagtctccaaagctcctcatcaagtatgtttcccagtccatctcaggggtcccctcgaggttcagtggcagtggatctgggacagatttcaccctcaccatcaatagcctggaagctgaagatgctgcagcgtattactgtcatcagagtagtagtttaccgtggacgttcggccaagggaccaaggtggaaatcaaaggctctggcggcggcggcagctgcccttattctaaccctaggctctgcagcggaggcggcggcagcgagctgcctacccaaggcacatttagcaacgtctccaccaacgtgtcccctgccaaacccaccaccacagcttgtccttacagcaatcctagcctgtgcggcggcggcggcagcaccacgacgccagcgccgcggccaccaacaccggcgcccaccatcgcgtcgcagcccctgtccctgcgcccagaggcgtgccggccagcggcggggggcgcagtgcacacgagggggctggacttcgcctgtgatatctacatctgggcgcccttggccgggacttgtggggtccttctcctgtcactggttatcaccctttactgccggagggaccagaggctgccccccgatgcccacaagccccctgggggaggcagtttccggacccccatccaagaggagcaggccgacgcccactccaccctggccaagatcagagtgaagttcagcaggagcgcagacgcccccgcgtaccagcagggccagaaccagctctataacgagctcaatctaggacgaagagaggagtacgatgttttggacaagagacgtggccgggaccctgagatggggggaaagccgagaaggaagaaccctcaggaaggcctgtacaatgaactgcagaaagataagatggcggaggcctacagtgagattgggatgaaaggcgagcgccggaggggcaaggggcacgatggcctttaccagggtctcagtacagccaccaaggacacctacgacgcccttcacatgcaggccctgccccctcgcgg

SEQ ID NO: 1268 - DNA, 1634 bp, synthetic construct
  misc_feature 1..1634: note = Synthetic
  source 1..1634: mol_type = other DNA
atggccttaccagtgaccgccttgctcctgccgctggccttgctgctccacgccgccaggccggaggtgcagctgttggagtctgggggagacttggtacagcctggggggtccctgcgactctcctgtgcagcctctggattcacctttagcacctatgccatgacctgggtccgccaggctccagggaaggggctggagtgggtctcagctattagtggtactagtggtagcacatactacgcagactccgtgaagggccggttcaccatctccagagacaattccaagagcacgctgtatctgcacatgaacagcctgagaaccgaggacacggccgtatattactgtgcgagaggcggatataactggcactactactactacatggacgtctggggcaaagggaccacggtcaccgtctcctcaggtggaggcggttcaggcggaggtggctctggcggtggcggatcggaaattgtaatgacacagtctccagccaccctgtctttgtctccaggggaaagagccaccctctcctgcagggccagtcagagtgttagcagcagctacttatcctggtaccagcagaaacctgggctggctcccaggctcctcatctatggtgcatccaccagggccactggcatcccagccaggttcagtggcagtgggtctgggacagacttcactctcaccatcagcagcctgcagcctgaagattttgcagtttattactgtcagcaggattataacttacctccgacgttcggccaagggaccaaggtggaaatcaaaggctctggcggcggcggcagctgcccttattctaaccctaggctctgcagcggaggcggcggcagcgagctgcctacccaaggcacatttagcaacgtctccaccaacgtgtcccctgccaaacccaccaccacagcttgtccttacagcaatcctagcctgtgcggcggcggcggcagcaccacgacgccagcgccgcggccaccaacaccggcgcccaccatcgcgtcgcagcccctgtccctgcgcccagaggcgtgccggccagcggcggggggcgcagtgcacacgagggggctggacttcgcctgtgatatctacatctgggcgcccttggccgggacttgtggggtccttctcctgtcactggttatcaccctttactgccggagggaccagaggctgccccccgatgcccacaagccccctgggggaggcagtttccggacccccatccaagaggagcaggccgacgcccactccaccctggccaagatcagagtgaagttcagcaggagcgcagacgcccccgcgtaccagcagggccagaaccagctctataacgagctcaatctaggacgaagagaggagtacgatgttttggacaagagacgtggccgggaccctgagatggggggaaagccgagaaggaagaaccctcaggaaggcctgtacaatgaactgcagaaagataagatggcggaggcctacagtgagattgggatgaaaggcgagcgccggaggggcaaggggcacgatggcctttaccagggtctcagtacagccaccaaggacacctacgacgcccttcacatgcaggccctgccccctcgcgg

SEQ ID NO: 1269 - DNA, 1640 bp, synthetic construct
  misc_feature 1..1640: note = Synthetic
  source 1..1640: mol_type = other DNA
atggccttaccagtgaccgccttgctcctgccgctggccttgctgctccacgccgccaggccgcaagtgcagctggtggagagcggcggaggagtggtgcaacctggccggagcctgagactgagctgcgctgccagcggcttcaccttcaacaactacgacatgtactgggtgcggcaggcccctggcaagggcctggaatgggtcgccgtgacatggtatgacggctccaacaagtactacgccgacagcgtgaagggcagattcaccatcagcagagataatagcaagaacaccctgtacctgcagatgaacagcctgcgggccgaggacaccgccgtgtactactgcgctagaggcgacaattggaacgacgagcaccattacttctactacatggacgtgtggggcaaaggcaccaccgtgaccgtgtccagcggcggcggtggatctggaggcggaggctctggaggcggcggctccgagatcgtgctgacacagtctccagatttccagtctgtgacccctaaggaaaaggttacaattacatgcagagcctctcagagcatcggaagctctctgcactggtatcagcagaaacctgatcagagccccaagctgctgatcaaattcgccagccagtccttcagcggcgtccccagccgcttcagcggcagcggcagcggcactgattttacactgaccatccacagcctggaggccgaggacgccgccacctactattgtcaccagagcagctccctgccttggacctttggccagggcacaaaggtggaaatcaagggctctggcggcggcggcagctgcccttattctaaccctaggctctgcagcggaggcggcggcagcgagctgcctacccaaggcacatttagcaacgtctccaccaacgtgtcccctgccaaacccaccaccacagcttgtccttacagcaatcctagcctgtgcggcggcggcggcagcaccacgacgccagcgccgcggccaccaacaccggcgcccaccatcgcgtcgcagcccctgtccctgcgcccagaggcgtgccggccagcggcggggggcgcagtgcacacgagggggctggacttcgcctgtgatatctacatctgggcgcccttggccgggacttgtggggtccttctcctgtcactggttatcaccctttactgccggagggaccagaggctgccccccgatgcccacaagccccctgggggaggcagtttccggacccccatccaagaggagcaggccgacgcccactccaccctggccaagatcagagtgaagttcagcaggagcgcagacgcccccgcgtaccagcagggccagaaccagctctataacgagctcaatctaggacgaagagaggagtacgatgttttggacaagagacgtggccgggaccctgagatggggggaaagccgagaaggaagaaccctcaggaaggcctgtacaatgaactgcagaaagataagatggcggaggcctacagtgagattgggatgaaaggcgagcgccggaggggcaaggggcacgatggcctttaccagggtctcagtacagccaccaaggacacctacgacgcccttcacatgcaggccctgccccctcgcgg

SEQ ID NO: 1270 - DNA, 1640 bp, synthetic construct
  misc_feature 1..1640: note = Synthetic
  source 1..1640: mol_type = other DNA
atggccttaccagtgaccgccttgctcctgccgctggccttgctgctccacgccgccaggccgcaagtgcagctggtggagtctggcggcggagtggtgcaacctggaaggagcctgcggctgagctgcgctgccagcggcttcaccttcagcaattacgacatgcactgggtgcggcaggcccctggcaaaggcctggaatgggtcacaatcatctggcatgatgccagcaacaagtactacctggacagcgtcaagggcagattcacaatcagccgggacaacagcaagaacaccctgtacctgcagatgaacagcctgagagccgaggacaccgctgtgtactattgtgccagaggagataattggaacgacgagcaccactacttctactacatggacgtgtggggcaagggcaccaccgtgaccgtttctagcggcggaggcggctccggcggtggaggctccggaggcggcggctctgagatcgtgctgacacagagccctgattttcagagcgtgacacctaaagagaaggtgaccatcacctgcagagccagccagagcatcggctccagcctgcactggtatcagcagaagcccgaccagagcccaaagctgctgatcaagttcgcctcccagtctttttccggcgtgcccagcagattcagcgggagcggctctggcaccgacttcacactgaccatccactctctggaagccgaggatgccgccacctactattgccaccagagcagctctctcccttggaccttcggccagggcacaaaagtggaaattaagggctctggcggcggcggcagctgcccttattctaaccctaggctctgcagcggaggcggcggcagcgagctgcctacccaaggcacatttagcaacgtctccaccaacgtgtcccctgccaaacccaccaccacagcttgtccttacagcaatcctagcctgtgcggcggcggcggcagcaccacgacgccagcgccgcggccaccaacaccggcgcccaccatcgcgtcgcagcccctgtccctgcgcccagaggcgtgccggccagcggcggggggcgcagtgcacacgagggggctggacttcgcctgtgatatctacatctgggcgcccttggccgggacttgtggggtccttctcctgtcactggttatcaccctttactgccggagggaccagaggctgccccccgatgcccacaagccccctgggggaggcagtttccggacccccatccaagaggagcaggccgacgcccactccaccctggccaagatcagagtgaagttcagcaggagcgcagacgcccccgcgtaccagcagggccagaaccagctctataacgagctcaatctaggacgaagagaggagtacgatgttttggacaagagacgtggccgggaccctgagatggggggaaagccgagaaggaagaaccctcaggaaggcctgtacaatgaactgcagaaagataagatggcggaggcctacagtgagattgggatgaaaggcgagcgccggaggggcaaggggcacgatggcctttaccagggtctcagtacagccaccaaggacacctacgacgcccttcacatgcaggccctgccccctcgcgg

SEQ ID NO: 1271 - DNA, 1640 bp, synthetic construct
  misc_feature 1..1640: note = Synthetic
  source 1..1640: mol_type = other DNA
atggccttaccagtgaccgccttgctcctgccgctggccttgctgctccacgccgccaggccgcaagtgcagctggtcgaaagcggcggaggcgtggtgcaacctggaagaagcctgagactgagctgcgccgcctctggcttcaccttttctaattacgacatgcactgggtgcggcaggcccctggcaagggtcttgagtgggttaccatcatctggcacgacggcagcaacaagtactacctggacagcgtgaagggcagatttacaatcagcagagataatagcaagaacaccctgtacctgcagatgaacagcctgcgggccgaggacaccgccgtgtactattgtgccagaggcgacaactggaacgacgagcaccactacttctactacatggacgtgtggggcaaaggcaccacagtgaccgtgtccagcggcggcggcggcagcggcggaggaggctctggcggaggcggcagcgagatcgtgctgacccagagccctgacttccagagcgtgacccctaaggaaaaggtgacaattacatgcagggccagccagtccatcggctcttctctgcattggtatcagcagaagcccgatcagtctccaaagctgctgatcaaattcgccagccagagcttcagcggagtccccagccggttcagcggatctggctccggcactgatttcaccctgaccatccacagcctggaggccgaagatgccgctacatactattgccaccagtcctccagcctgccttggacattcggccagggcaccaaggtggagatcaaaggctctggcggcggcggcagctgcccttattctaaccctaggctctgcagcggaggcggcggcagcgagctgcctacccaaggcacatttagcaacgtctccaccaacgtgtcccctgccaaacccaccaccacagcttgtccttacagcaatcctagcctgtgcggcggcggcggcagcaccacgacgccagcgccgcggccaccaacaccggcgcccaccatcgcgtcgcagcccctgtccctgcgcccagaggcgtgccggccagcggcggggggcgcagtgcacacgagggggctggacttcgcctgtgatatctacatctgggcgcccttggccgggacttgtggggtccttctcctgtcactggttatcaccctttactgccggagggaccagaggctgccccccgatgcccacaagccccctgggggaggcagtttccggacccccatccaagaggagcaggccgacgcccactccaccctggccaagatcagagtgaagttcagcaggagcgcagacgcccccgcgtaccagcagggccagaaccagctctataacgagctcaatctaggacgaagagaggagtacgatgttttggacaagagacgtggccgggaccctgagatggggggaaagccgagaaggaagaaccctcaggaaggcctgtacaatgaactgcagaaagataagatggcggaggcctacagtgagattgggatgaaaggcgagcgccggaggggcaaggggcacgatggcctttaccagggtctcagtacagccaccaaggacacctacgacgcccttcacatgcaggccctgccccctcgcgg

SEQ ID NO: 1272 - DNA, 1622 bp, synthetic construct
  misc_feature 1..1622: note = Synthetic
  source 1..1622: mol_type = other DNA
atggccttaccagtgaccgccttgctcctgccgctggccttgctgctccacgccgccaggccggaggtgcagctgctggaaagcggcggcggactcgtgcaacctggcggctccctgcggctgtcttgcgccgcttctggcttcacattcagcatctacgccatgagctgggtcagacaggcccccggcaaaggcctggaatgggtgtccgccatcagcggcggcggagataccacctactacgccgacagcgtgaagggcagattcaccattagcagagataatagcaagaccacactggacctgcaaatgaacagcctgcgggccgaggacaccgccgtgtactactgtgctaagcacacctcttattacatggacgtgtggggaaaaggcacaaccgtgaccgtgtccagcggcggaggcggctctggcggcggcggcagcggcggtggcggaagccagaccgtggtgacacaggagccttctctgagcgtgagccccggcggcaccgtgaccctgacatgcggcctgagcagcggctccgtctccaccagctactatcctagctggtatcagcagacccctggccaggcccctagaaccctgatctacagcacaaacatccggagctctggagtgccagacagatttagcggaagcatcctgggcaacaaggccgccctgaccatcaccggcgcccaggctgacgacgagagtgattactactgcaagctgtacatgggctctggcatcatcttcggcagcggaacaaaggtgacagttctgggctctggcggcggcggcagctgcccttattctaaccctaggctctgcagcggaggcggcggcagcgagctgcctacccaaggcacatttagcaacgtctccaccaacgtgtcccctgccaaacccaccaccacagcttgtccttacagcaatcctagcctgtgcggcggcggcggcagcaccacgacgccagcgccgcggccaccaacaccggcgcccaccatcgcgtcgcagcccctgtccctgcgcccagaggcgtgccggccagcggcggggggcgcagtgcacacgagggggctggacttcgcctgtgatatctacatctgggcgcccttggccgggacttgtggggtccttctcctgtcactggttatcaccctttactgccggagggaccagaggctgccccccgatgcccacaagccccctgggggaggcagtttccggacccccatccaagaggagcaggccgacgcccactccaccctggccaagatcagagtgaagttcagcaggagcgcagacgcccccgcgtaccagcagggccagaaccagctctataacgagctcaatctaggacgaagagaggagtacgatgttttggacaagagacgtggccgggaccctgagatggggggaaagccgagaaggaagaaccctcaggaaggcctgtacaatgaactgcagaaagataagatggcggaggcctacagtgagattgggatgaaaggcgagcgccggaggggcaaggggcacgatggcctttaccagggtctcagtacagccaccaaggacacctacgacgcccttcacatgcaggccctgccccctcgcgg

SEQ ID NO: 1273 - DNA, 1640 bp, synthetic construct
  misc_feature 1..1640: note = Synthetic
  source 1..1640: mol_type = other DNA
atggccttaccagtgaccgccttgctcctgccgctggccttgctgctccacgccgccaggccgcaagtgcagctggtggaaagcggcggtggagtggtgcaacctggcagaagcctgcggctgagctgcgccgcttctggcttcacattttctaattacgacaagcactgggtgcggcaggcccctggcaaaggcctggagtgggtcgctgtgatctggtatgacggcagcaacaagtactacgccgacagcgtgaagggcagattcaccatcagcagagacaacagcaagaacaccctgtacctgcagatgaacagcctgcgggctgaagataccgccatgtactattgtgccaggggcgataattggaacgacgagcaccactacttctactacatggacgtgtggggaaagggcaccacagtgaccgtgtccagcggcggcggcggcagcggcggcggcggcagcggcggcggcggcagcgagatcgtgctgacacagtcccctgactttcagagcgtgacccctaaggaaaaggtcacaattacatgcagagcctctcagagcatcggcagctctctgcactggtatcagcagaaacctgatcagagccccaagctgctgatcaaattcgccagccagagcttctccggcgtgccaagcagattcagcggcagcggcagcggaaccgatttcaccctgaccatccattctctggaggccgaggacgccgccacctactactgccaccagtctagcagcctgccctggaccttcggccagggcacaaaggttgagatcaagggctctggcggcggcggcagctgcccttattctaaccctaggctctgcagcggaggcggcggcagcgagctgcctacccaaggcacatttagcaacgtctccaccaacgtgtcccctgccaaacccaccaccacagcttgtccttacagcaatcctagcctgtgcggcggcggcggcagcaccacgacgccagcgccgcggccaccaacaccggcgcccaccatcgcgtcgcagcccctgtccctgcgcccagaggcgtgccggccagcggcggggggcgcagtgcacacgagggggctggacttcgcctgtgatatctacatctgggcgcccttggccgggacttgtggggtccttctcctgtcactggttatcaccctttactgccggagggaccagaggctgccccccgatgcccacaagccccctgggggaggcagtttccggacccccatccaagaggagcaggccgacgcccactccaccctggccaagatcagagtgaagttcagcaggagcgcagacgcccccgcgtaccagcagggccagaaccagctctataacgagctcaatctaggacgaagagaggagtacgatgttttggacaagagacgtggccgggaccctgagatggggggaaagccgagaaggaagaaccctcaggaaggcctgtacaatgaactgcagaaagataagatggcggaggcctacagtgagattgggatgaaaggcgagcgccggaggggcaaggggcacgatggcctttaccagggtctcagtacagccaccaaggacacctacgacgcccttcacatgcaggccctgccccctcgcgg

SEQ ID NO: 1274 - DNA, 1634 bp, synthetic construct
  misc_feature 1..1634: note = Synthetic
  source 1..1634: mol_type = other DNA
atggccttaccagtgaccgccttgctcctgccgctggccttgctgctccacgccgccaggccgcaagtgcagctggtccagtctggagctgaggtgaagaagcccggcgccagcgtgaaggtgtcctgtaaagcctctggttatacattcacaaactatggcttcagctgggttagacaggcccctggacagggcctggactggatgggatggatcagcgcctacaacggctacaccaactacacccagaagctgcagggcagagtgacaatgaccacagataccagcaccaccacagcttacatggaactgaggtccctgcggagcgacgacaccgccgtgtactactgcgccagacggggcctgctgtactactactacagcatggacgtgtggggcaagggcaccaccgtgaccgtgtcttctggcggcggcggaagcggcggcggaggaagcggcggcggcggcagcgagatcgtgctgacccaatctcctgccacactgagcctctccccaggcgagcgggccaccctgagctgcggcgcttctcagagcgtgtacaatagctacctggcctggtatcagcagaaacccggcctggctcctagactgctgatctacgacgccagcctgagagccaccggcgtgcctgatagattcagcggcagcggcagcggaaccgacttcaccctgacaatcagcacactggaacccgaggattttgccgtgtactattgccagcagtacggcggcagccctatgtacacattcggccagggcaccaagctggaaatcaagggctctggcggcggcggcagctgcccttattctaaccctaggctctgcagcggaggcggcggcagcgagctgcctacccaaggcacatttagcaacgtctccaccaacgtgtcccctgccaaacccaccaccacagcttgtccttacagcaatcctagcctgtgcggcggcggcggcagcaccacgacgccagcgccgcggccaccaacaccggcgcccaccatcgcgtcgcagcccctgtccctgcgcccagaggcgtgccggccagcggcggggggcgcagtgcacacgagggggctggacttcgcctgtgatatctacatctgggcgcccttggccgggacttgtggggtccttctcctgtcactggttatcaccctttactgccggagggaccagaggctgccccccgatgcccacaagccccctgggggaggcagtttccggacccccatccaagaggagcaggccgacgcccactccaccctggccaagatcagagtgaagttcagcaggagcgcagacgcccccgcgtaccagcagggccagaaccagctctataacgagctcaatctaggacgaagagaggagtacgatgttttggacaagagacgtggccgggaccctgagatggggggaaagccgagaaggaagaaccctcaggaaggcctgtacaatgaactgcagaaagataagatggcggaggcctacagtgagattgggatgaaaggcgagcgccggaggggcaaggggcacgatggcctttaccagggtctcagtacagccaccaaggacacctacgacgcccttcacatgcaggccctgccccctcgcgg

SEQ ID NO: 1275 - DNA, 1622 bp, synthetic construct
  misc_feature 1..1622: note = Synthetic
  source 1..1622: mol_type = other DNA
atggccttaccagtgaccgccttgctcctgccgctggccttgctgctccacgccgccaggccggaggtgcagctgctggaaagcggcggcggactggtgcaacctggcggctctctgcggctgtcctgtaccgccagcggcttcaccttcagcagcttcgccatgagctgggtcagacaggctccaggaaaaggcctggaatgggtgtctgccatgagcggatctggcgacaccacatactacgccgattccgtgaagggcagatttaccatcagcagagataatagcaagacaacactgtatctgcagatgaacagcctgagggccgaggacacagccgtgtacagctgcgccaagcacaccacctactacatggacgtgtggggcaaaggcaccaccgtcacagtgtccagcggcggaggcggcagcggaggcggcggcagcggcggaggaggctctcagaccgtggtgacccaggagcctagcctgtccgtgtcccctggcggcaccgtgaccctcacatgcggcctgagcagcggctcagtttccacgagcgactaccccagctggtatcagcaaacccctggacaggctcctcggaccctgatctacagaaccaacacccggagcagcggcgtgcccgatagattctctggctctatcctgggcaacaaggccgctctgaccattacaggcgcccaggccgacgacgagagcgattattactgcgtgctgtacatggacagcggcatcatcttcggctctggaacaaaggtgacagtgctgggctctggcggcggcggcagctgcccttattctaaccctaggctctgcagcggaggcggcggcagcgagctgcctacccaaggcacatttagcaacgtctccaccaacgtgtcccctgccaaacccaccaccacagcttgtccttacagcaatcctagcctgtgcggcggcggcggcagcaccacgacgccagcgccgcggccaccaacaccggcgcccaccatcgcgtcgcagcccctgtccctgcgcccagaggcgtgccggccagcggcggggggcgcagtgcacacgagggggctggacttcgcctgtgatatctacatctgggcgcccttggccgggacttgtggggtccttctcctgtcactggttatcaccctttactgccggagggaccagaggctgccccccgatgcccacaagccccctgggggaggcagtttccggacccccatccaagaggagcaggccgacgcccactccaccctggccaagatcagagtgaagttcagcaggagcgcagacgcccccgcgtaccagcagggccagaaccagctctataacgagctcaatctaggacgaagagaggagtacgatgttttggacaagagacgtggccgggaccctgagatggggggaaagccgagaaggaagaaccctcaggaaggcctgtacaatgaactgcagaaagataagatggcggaggcctacagtgagattgggatgaaaggcgagcgccggaggggcaaggggcacgatggcctttaccagggtctcagtacagccaccaaggacacctacgacgcccttcacatgcaggccctgccccctcgcgg

SEQ ID NO: 1276 - DNA, 1622 bp, synthetic construct
  misc_feature 1..1622: note = Synthetic
  source 1..1622: mol_type = other DNA
atggccttaccagtgaccgccttgctcctgccgctggccttgctgctccacgccgccaggccggaggtgcagctgctggaaagcggcggcggcctggtgcaacctggcggaagtctgcggctgtcttgtgccgcttctggattcaccttcaacacctacgccatgagctgggtgcggcaggcccctggcaaaggcctggaatgggtctccgccatgagcggctctggcgacacaacctactatgccgacagcgtgaagggcagatttacaatcagcagggataacagcaagaccaccctgtacctgcagatgaacagcctccgggccgaggacaccgccgtgtacagctgcgccaagcacaccagctactacatggacgtgtggggcaaaggcaccaccgtgaccgtgtccagcggaggtggcggcagcggcggcggaggctccggcggcggaggctcacagaccgtcgtgacccaggagccttctctgagcgtgtctccaggaggcacagttactctgacatgcggcctgtctagcggcagcgtgtccaccagcgactaccccagctggtatcagcaaacacctggccaggctcctagaaccctgatctatagaacaaataccagaagcagcggcgtgcccgatagattcagcggaagcatcctgggcaacaaggccgccctgaccatcaccggcgcccaggctgacgacgagtctgattactactgcgtgctgtacatgggcagcggcatcattttcggcagcggaacaaaggtgacagtgctgggctctggcggcggcggcagctgcccttattctaaccctaggctctgcagcggaggcggcggcagcgagctgcctacccaaggcacatttagcaacgtctccaccaacgtgtcccctgccaaacccaccaccacagcttgtccttacagcaatcctagcctgtgcggcggcggcggcagcaccacgacgccagcgccgcggccaccaacaccggcgcccaccatcgcgtcgcagcccctgtccctgcgcccagaggcgtgccggccagcggcggggggcgcagtgcacacgagggggctggacttcgcctgtgatatctacatctgggcgcccttggccgggacttgtggggtccttctcctgtcactggttatcaccctttactgccggagggaccagaggctgccccccgatgcccacaagccccctgggggaggcagtttccggacccccatccaagaggagcaggccgacgcccactccaccctggccaagatcagagtgaagttcagcaggagcgcagacgcccccgcgtaccagcagggccagaaccagctctataacgagctcaatctaggacgaagagaggagtacgatgttttggacaagagacgtggccgggaccctgagatggggggaaagccgagaaggaagaaccctcaggaaggcctgtacaatgaactgcagaaagataagatggcggaggcctacagtgagattgggatgaaaggcgagcgccggaggggcaaggggcacgatggcctttaccagggtctcagtacagccaccaaggacacctacgacgcccttcacatgcaggccctgccccctcgcgg

SEQ ID NO: 1277 - DNA, 1622 bp, synthetic construct
  misc_feature 1..1622: note = Synthetic
  source 1..1622: mol_type = other DNA
atggccttaccagtgaccgccttgctcctgccgctggccttgctgctccacgccgccaggccggaagtgcagctgctggaaagcggcggcgacctggtgcaacctggcggctccctgagactgagctgcgccgcttctggctttaccttcagcacctacgccatgagctgggtgcggcaggcccctggcaaaggactggagtgggtctccgccatcagcggcagcggcgagaatatctactacgctgatagcgtgaagggcagattcaccattagcagagataattctaagaacaccctgttcctgcagatgaacagcctgcgggccgaagataccgccgtgtactactgcgccaagcacacatcttactacatggacgtgtggggcaaaggcaccaccgtcacagtgtccagcggaggcggcggcagcggcggaggcggcagcggaggaggcggctcacagaccgtggtgacccaagagcccagcttctctgtgtccccaggtggcaccgtgacactgacatgcggcctgtacagcgacagcgtgtctacaagctactatcctagctggtatcagcagacacctggccaggctcctagaaccctgatctacaacaccaacacaagaagcagcggcgtgcccgaccggtttagcggaagcatcctgggcaacaaggccgccctgaccatcaccggcgcccaggccgacgacgagagcgactactattgtgtgctgtacatggtgtccggcatcgtgttcggctctggaacaaaggtgaccgttctgggctctggcggcggcggcagctgcccttattctaaccctaggctctgcagcggaggcggcggcagcgagctgcctacccaaggcacatttagcaacgtctccaccaacgtgtcccctgccaaacccaccaccacagcttgtccttacagcaatcctagcctgtgcggcggcggcggcagcaccacgacgccagcgccgcggccaccaacaccggcgcccaccatcgcgtcgcagcccctgtccctgcgcccagaggcgtgccggccagcggcggggggcgcagtgcacacgagggggctggacttcgcctgtgatatctacatctgggcgcccttggccgggacttgtggggtccttctcctgtcactggttatcaccctttactgccggagggaccagaggctgccccccgatgcccacaagccccctgggggaggcagtttccggacccccatccaagaggagcaggccgacgcccactccaccctggccaagatcagagtgaagttcagcaggagcgcagacgcccccgcgtaccagcagggccagaaccagctctataacgagctcaatctaggacgaagagaggagtacgatgttttggacaagagacgtggccgggaccctgagatggggggaaagccgagaaggaagaaccctcaggaaggcctgtacaatgaactgcagaaagataagatggcggaggcctacagtgagattgggatgaaaggcgagcgccggaggggcaaggggcacgatggcctttaccagggtctcagtacagccaccaaggacacctacgacgcccttcacatgcaggccctgccccctcgcgg

SEQ ID NO: 1278 - DNA, 1640 bp, synthetic construct
  misc_feature 1..1640: note = Synthetic
  source 1..1640: mol_type = other DNA
atggccttaccagtgaccgccttgctcctgccgctggccttgctgctccacgccgccaggccgcaagtgcagctggtggaaagcggaggcggagttgtgcaacctggcagatctctgcgcctgtcatgcgccgccagcggctttacattctccagctacggcatgcactgggtgcggcaggcccctggcaaaggcctggaatgggtcgctgtgatctggtacgacggcatcaacaaatactacgccgacagcgtgaagggcagattcaccatcagcagagataatagcaagaacaccctgtacctgcagatgaacagcctgcgggccgaggacactgccgtgtactactgcgccagagagcggctggaacggagatactactactacatggacgtgtggggcaagggcaccaccgtgaccgtgtccagtggtggcggaggatctggcggaggcggctctggcggcggcggcagccagaccgtggtgacccaggagcctagcttcagcgtgtcccccggaggcacagtgaccctgacatgcggcctcagctctggctccgtcagcacctcttactatcctggatggtatcagcagacacctggccaggccccaagaaccctgatctacagcacaaacaccagaagcagcggcgtgcccgatagatttagcggcagcatcctgggcaacaaggccgccctgaccattacaggcgcccaggctgatgacgagagcgactactactgtgtgctgtacatgggcagcggcatgttcatcttcggctctggaaccaaggtgacagtgctgggctctggcggcggcggcagctgcccttattctaaccctaggctctgcagcggaggcggcggcagcgagctgcctacccaaggcacatttagcaacgtctccaccaacgtgtcccctgccaaacccaccaccacagcttgtccttacagcaatcctagcctgtgcggcggcggcggcagcaccacgacgccagcgccgcggccaccaacaccggcgcccaccatcgcgtcgcagcccctgtccctgcgcccagaggcgtgccggccagcggcggggggcgcagtgcacacgagggggctggacttcgcctgtgatatctacatctgggcgcccttggccgggacttgtggggtccttctcctgtcactggttatcaccctttactgccggagggaccagaggctgccccccgatgcccacaagccccctgggggaggcagtttccggacccccatccaagaggagcaggccgacgcccactccaccctggccaagatcagagtgaagttcagcaggagcgcagacgcccccgcgtaccagcagggccagaaccagctctataacgagctcaatctaggacgaagagaggagtacgatgttttggacaagagacgtggccgggaccctgagatggggggaaagccgagaaggaagaaccctcaggaaggcctgtacaatgaactgcagaaagataagatggcggaggcctacagtgagattgggatgaaaggcgagcgccggaggggcaaggggcacgatggcctttaccagggtctcagtacagccaccaaggacacctacgacgcccttcacatgcaggccctgccccctcgcgg

SEQ ID NO: 1279 - DNA, 1622 bp, synthetic construct
  misc_feature 1..1622: note = Synthetic
  source 1..1622: mol_type = other DNA
atggccttaccagtgaccgccttgctcctgccgctggccttgctgctccacgccgccaggccggaggtgcagctgctggaatctggaggcggcctcgtgcagcctggaggcagcctgaggctgagctgcgctgcttctggcttcaccttcagcagcttcgccatgagctgggtcagacaagctcccggcaaaggcctggaatgggtgtccgccgtgtctggcagcggcgacgatacctactacgccgatagcgtgaaaggaagatttacaatcagccgggacaacagcaagaataccctgtacctgcagatgaactctctgcgggccgaggacaccgccgtgtactattgcgccaagcacaccagctactacctggacgtgtggggcaagggcaccaccgtgaccgtttccagcggcggcggcggcagcggcggaggtggaagcggcggaggcggatctcagacagtggtgacacaggagcctagcttttctgtgtcccctggcggcaccgtgacactgacatgcgccctgagctccgatagcgtgtcaacatcttacttccccagctggtatcggcagacccctggacaggcccctagaaccctgatctacaacaccaacaccagaagcagcggcgtgccagatagattcagcggctccatcctgggcaacaaggccgccctgaccattacaggcgcccaggccgacgacgagagcgactactactgtgtgctgtacatgggcagcggcatcatcttcggctctggcacaaaggtgaccgtcctgggctctggcggcggcggcagctgcccttattctaaccctaggctctgcagcggaggcggcggcagcgagctgcctacccaaggcacatttagcaacgtctccaccaacgtgtcccctgccaaacccaccaccacagcttgtccttacagcaatcctagcctgtgcggcggcggcggcagcaccacgacgccagcgccgcggccaccaacaccggcgcccaccatcgcgtcgcagcccctgtccctgcgcccagaggcgtgccggccagcggcggggggcgcagtgcacacgagggggctggacttcgcctgtgatatctacatctgggcgcccttggccgggacttgtggggtccttctcctgtcactggttatcaccctttactgccggagggaccagaggctgccccccgatgcccacaagccccctgggggaggcagtttccggacccccatccaagaggagcaggccgacgcccactccaccctggccaagatcagagtgaagttcagcaggagcgcagacgcccccgcgtaccagcagggccagaaccagctctataacgagctcaatctaggacgaagagaggagtacgatgttttggacaagagacgtggccgggaccctgagatggggggaaagccgagaaggaagaaccctcaggaaggcctgtacaatgaactgcagaaagataagatggcggaggcctacagtgagattgggatgaaaggcgagcgccggaggggcaaggggcacgatggcctttaccagggtctcagtacagccaccaaggacacctacgacgcccttcacatgcaggccctgccccctcgcgg

SEQ ID NO: 1280 - DNA, 1640 bp, synthetic construct
  misc_feature 1..1640: note = Synthetic
  source 1..1640: mol_type = other DNA
atggccttaccagtgaccgccttgctcctgccgctggccttgctgctccacgccgccaggccgcaagtgcagctggtggaaagcggaggcggcgtcgtgcaacctggcagaagcctgagactgagctgcgccgccagcggctttaacttcagcaccttcgacatccactgggtgcggcaggcccctggaaaaggcctggagtgggtcgccctgatctggtatgacggcagctacaagtactacgccgatagcgttaagggcaggttcaccatcagcagagataattctaagaacaccctggacctgagaatgaacagcctccgggctgaggacaccgccgtgtactactgcgccagaaatgacaactggaacgacgagcattactatcactactacatggacgtgtggggcaagggcaccaccgtgacagtgtcctctggcggcggcggcagcggcggcggcggcagcggtggaggcggaagcgagatcgtgctgacccagtctcctgatttccagtccgtgacccctaaggaaaaggtgaccatcacctgtagagcttctcagagcatcggcagctctctgcactggtatcagcagaaacctgaccagagcccaaagctgctgatcaaattcgccagccagtccttcagcggcgtgccctcccggtttagcggctccggcagcggaacagacttcaccctgacaattaacagcctggaagccgaggatgccgccacatacttctgccaccagtcttctagcctgccctggacattcggccagggcacaaaggtggagatcaagggctctggcggcggcggcagctgcccttattctaaccctaggctctgcagcggaggcggcggcagcgagctgcctacccaaggcacatttagcaacgtctccaccaacgtgtcccctgccaaacccaccaccacagcttgtccttacagcaatcctagcctgtgcggcggcggcggcagcaccacgacgccagcgccgcggccaccaacaccggcgcccaccatcgcgtcgcagcccctgtccctgcgcccagaggcgtgccggccagcggcggggggcgcagtgcacacgagggggctggacttcgcctgtgatatctacatctgggcgcccttggccgggacttgtggggtccttctcctgtcactggttatcaccctttactgccggagggaccagaggctgccccccgatgcccacaagccccctgggggaggcagtttccggacccccatccaagaggagcaggccgacgcccactccaccctggccaagatcagagtgaagttcagcaggagcgcagacgcccccgcgtaccagcagggccagaaccagctctataacgagctcaatctaggacgaagagaggagtacgatgttttggacaagagacgtggccgggaccctgagatggggggaaagccgagaaggaagaaccctcaggaaggcctgtacaatgaactgcagaaagataagatggcggaggcctacagtgagattgggatgaaaggcgagcgccggaggggcaaggggcacgatggcctttaccagggtctcagtacagccaccaaggacacctacgacgcccttcacatgcaggccctgccccctcgcgg

SEQ ID NO: 1281 - DNA, 1655 bp, synthetic construct
  misc_feature 1..1655: note = Synthetic
  source 1..1655: mol_type = other DNA
atggccttaccagtgaccgccttgctcctgccgctggccttgctgctccacgccgccaggccggaggtgcacctgctggaaagcggcggcggcctggtgcagcctggaggctctctgcggctgagctgtgccgcctctggttttaccttcagcagctacgccatgaattgggttagacaggcccctggcaagggcctggaatgggtcagcagcatcagcggctccggcagcagctcttactatgctgatagcgtgaagggcagattcaccattagcagagacaatagcaagaacaccctgtacctgcagatgaacagcctgcgggccgaggacaccgccgtgtactactgcgccagccggggcttcaactcccaataccctcctggctactactactactacatggacgtgtggggaaaaggcacgaccgtgaccgtgtcctccggcggcggcggaagcggcggcggcggctctggcggaggcggcagccagaccgtggtgacacaggagcctagcttcagcgtgtctccaggaggaacagtgaccctgacatgcggcctcagcagcggctctgtgtccaccagctatttccccagctggtatcagcagacccctggccaggctcccaggaccctgatctacatcaccaacacaagaagcagcggcgtgcccgacagattttctggcagcatcatcggcaacaaggccgctctgaccatcacaggcgcccaggccgacgacgagagtgattacttctgcgtgctgtacatgggcagcggaacatgggtgttcggcggaggcacaaagctgaccgtcctgggctctggcggcggcggcagctgcccttattctaaccctaggctctgcagcggaggcggcggcagcgagctgcctacccaaggcacatttagcaacgtctccaccaacgtgtcccctgccaaacccaccaccacagcttgtccttacagcaatcctagcctgtgcggcggcggcggcagcaccacgacgccagcgccgcggccaccaacaccggcgcccaccatcgcgtcgcagcccctgtccctgcgcccagaggcgtgccggccagcggcggggggcgcagtgcacacgagggggctggacttcgcctgtgatatctacatctgggcgcccttggccgggacttgtggggtccttctcctgtcactggttatcaccctttactgccggagggaccagaggctgccccccgatgcccacaagccccctgggggaggcagtttccggacccccatccaagaggagcaggccgacgcccactccaccctggccaagatcagagtgaagttcagcaggagcgcagacgcccccgcgtaccagcagggccagaaccagctctataacgagctcaatctaggacgaagagaggagtacgatgttttggacaagagacgtggccgggaccctgagatggggggaaagccgagaaggaagaaccctcaggaaggcctgtacaatgaactgcagaaagataagatggcggaggcctacagtgagattgggatgaaaggcgagcgccggaggggcaaggggcacgatggcctttaccagggtctcagtacagccaccaaggacacctacgacgcccttcacatgcaggccctgccccctcgcgg

SEQ ID NO: 1282 - DNA, 1616 bp, synthetic construct
  misc_feature 1..1616: note = Synthetic
  source 1..1616: mol_type = other DNA
atggccttaccagtgaccgccttgctcctgccgctggccttgctgctccacgccgccaggccggaggtgcagctgctggaaagcggcggcggcctggtgcaacctggcggctccctgaggctgagctgcgccgccagcggcttcacctttagcaactacgctatgacctgggtcagacaggcccctggaaagggcctggagtgggtgtccgccatcagcggatctggtattggaacatactacgccgacagcgtgcaaggcagattcacaacaagcagagataattctaagaacaccctgtacctgcagatgaacagcctgcgggccgaggacaccgccgtgtactattgtgccaagggcggctacaactggaaggacgtgtggggcaagggaaccaccgtgaccgtttcttctggcggcggaggcagcggcggcggaggctccggaggcggaggcagcgagatcgtgctgacacagtctcccgactttcagagcgtgacccctaaagagaaggtgacaatcacctgcagagccagccagtcaatcggctctagcctgcactggtatcagcagaaacctgatcagagccctaagctgctgatcaagttcgcctctcagagcttcagcggcgtgccaagccggttcagcggctccggcagcggcaccgacttcaccctgaccatccacagcctggaggccgaagatgccgctacatactactgccaccagtccagcagcctcccctggaccttcggccagggcacaaaggtggaaatcaaaggctctggcggcggcggcagctgcccttattctaaccctaggctctgcagcggaggcggcggcagcgagctgcctacccaaggcacatttagcaacgtctccaccaacgtgtcccctgccaaacccaccaccacagcttgtccttacagcaatcctagcctgtgcggcggcggcggcagcaccacgacgccagcgccgcggccaccaacaccggcgcccaccatcgcgtcgcagcccctgtccctgcgcccagaggcgtgccggccagcggcggggggcgcagtgcacacgagggggctggacttcgcctgtgatatctacatctgggcgcccttggccgggacttgtggggtccttctcctgtcactggttatcaccctttactgccggagggaccagaggctgccccccgatgcccacaagccccctgggggaggcagtttccggacccccatccaagaggagcaggccgacgcccactccaccctggccaagatcagagtgaagttcagcaggagcgcagacgcccccgcgtaccagcagggccagaaccagctctataacgagctcaatctaggacgaagagaggagtacgatgttttggacaagagacgtggccgggaccctgagatggggggaaagccgagaaggaagaaccctcaggaaggcctgtacaatgaactgcagaaagataagatggcggaggcctacagtgagattgggatgaaaggcgagcgccggaggggcaaggggcacgatggcctttaccagggtctcagtacagccaccaaggacacctacgacgcccttcacatgcaggccctgccccctcgcgg

SEQ ID NO: 1283 - DNA, 1640 bp, synthetic construct
  misc_feature 1..1640: note = Synthetic
  source 1..1640: mol_type = other DNA
atggccttaccagtgaccgccttgctcctgccgctggccttgctgctccacgccgccaggccgcaagtgcagctggtggagagcggcggcggcgtcgtgcagcccggcagaagcctgcggctgtcttgcgctgccagcggcttcacctttacaaactacgacatgcactgggtcagacaggcccctggcaaaggcctggaatgggtgaccatcatctggcacgacggctccaataagtactacctggacagcgtgcggggcagattcacgatcagcagagataattccaagaacaccctgtacctgcagatgaacagcctgagagccgaggacaccgccgtgtactattgcgccagaggcgacaactggaacgacgagcaccactacttctactacatggacgtgtggggcaagggcaccaccgtgaccgtgtccagcggcggaggcggctccggaggaggcggctctggtggcggcggcagcgagatcgtgctgacccagagccctgacttccagtctgtgacacctaaggaaaaggtgacaatcacctgtagggccagccaaagcatcggcagcagcctgcattggtatcagcagaagcccgatcagtctccaaagctgctgatcaaattcgccagccagagcttcagcggagttcctagccggttcagcggctctggcagcggaacagatttcaccctgacaattcactctctggaggccgaggatgccgccacatattactgccaccagtctagcagcctgccttggacctttggacagggcaccaaggtggaaatcaagggctctggcggcggcggcagctgcccttattctaaccctaggctctgcagcggaggcggcggcagcgagctgcctacccaaggcacatttagcaacgtctccaccaacgtgtcccctgccaaacccaccaccacagcttgtccttacagcaatcctagcctgtgcggcggcggcggcagcaccacgacgccagcgccgcggccaccaacaccggcgcccaccatcgcgtcgcagcccctgtccctgcgcccagaggcgtgccggccagcggcggggggcgcagtgcacacgagggggctggacttcgcctgtgatatctacatctgggcgcccttggccgggacttgtggggtccttctcctgtcactggttatcaccctttactgccggagggaccagaggctgccccccgatgcccacaagccccctgggggaggcagtttccggacccccatccaagaggagcaggccgacgcccactccaccctggccaagatcagagtgaagttcagcaggagcgcagacgcccccgcgtaccagcagggccagaaccagctctataacgagctcaatctaggacgaagagaggagtacgatgttttggacaagagacgtggccgggaccctgagatggggggaaagccgagaaggaagaaccctcaggaaggcctgtacaatgaactgcagaaagataagatggcggaggcctacagtgagattgggatgaaaggcgagcgccggaggggcaaggggcacgatggcctttaccagggtctcagtacagccaccaaggacacctacgacgcccttcacatgcaggccctgccccctcgcgg

SEQ ID NO: 1284 - DNA, 1640 bp, synthetic construct
  misc_feature 1..1640: note = Synthetic
  source 1..1640: mol_type = other DNA
atggccttaccagtgaccgccttgctcctgccgctggccttgctgctccacgccgccaggccgcaggtgcagctggttgagagcggcggaggcgtggtgcaacctggaagatctctgcgcctgagctgcgccgccagcggcttcaccttcagcaactacgatatgcactgggtgcggcaggcccctggcaagggcctggaatgggtcaccattatctggcatgacggcagcaacaagtactacctggacagcgtgaaaggcagattcaccatcagcagagacaatagcaagaacaccctgtacctgcagatgaacagcctgcgggccgaggacaccgccgtgtactattgcgccagaggcgacaactggaacgacgagcaccactacttctactatatggacgtgtggggcaaaggcacaaccgtgaccgtcagcagcggcggcggaggcagcggaggcggaggctctggcggcggtggcagtgaaatcgtgctgacccagagccccgctacactgagcctctcccctggcgagcgggccacactgtcttgtagagcctctcagtccgtgtccagcagcctggcctggtatcagcagaagcccggccaggctccaagactgctgatctacgacgccagcaatagagccaccggcatccccgcccggttttccggcagcggatctggaacagattttaccctgaccatcagcagcctggaacctgaggatttcgccgtgtactactgccagcaaagaagcaactggcctctgacattcggcggcggcacaaaggtggaaatcaagggctctggcggcggcggcagctgcccttattctaaccctaggctctgcagcggaggcggcggcagcgagctgcctacccaaggcacatttagcaacgtctccaccaacgtgtcccctgccaaacccaccaccacagcttgtccttacagcaatcctagcctgtgcggcggcggcggcagcaccacgacgccagcgccgcggccaccaacaccggcgcccaccatcgcgtcgcagcccctgtccctgcgcccagaggcgtgccggccagcggcggggggcgcagtgcacacgagggggctggacttcgcctgtgatatctacatctgggcgcccttggccgggacttgtggggtccttctcctgtcactggttatcaccctttactgccggagggaccagaggctgccccccgatgcccacaagccccctgggggaggcagtttccggacccccatccaagaggagcaggccgacgcccactccaccctggccaagatcagagtgaagttcagcaggagcgcagacgcccccgcgtaccagcagggccagaaccagctctataacgagctcaatctaggacgaagagaggagtacgatgttttggacaagagacgtggccgggaccctgagatggggggaaagccgagaaggaagaaccctcaggaaggcctgtacaatgaactgcagaaagataagatggcggaggcctacagtgagattgggatgaaaggcgagcgccggaggggcaaggggcacgatggcctttaccagggtctcagtacagccaccaaggacacctacgacgcccttcacatgcaggccctgccccctcgcgg

SEQ ID NO: 1285 - DNA, 1628 bp, synthetic construct
  misc_feature 1..1628: note = Synthetic
  source 1..1628: mol_type = other DNA
atggccttaccagtgaccgccttgctcctgccgctggccttgctgctccacgccgccaggccggaagtgcagctggtcgagagcggcggcggcgtggtgcggcctggcgggtccctgagactgagctgcgccgcctctggcttcaccttcgacgactatggcatgagctgggtcagacaggcccctggaaaaggcctggaatgggtgtccggaatcaactggaatggcggcagtacaggctacgtggacagcgtgaagggcagattcaccatcagccgggacaacgccaagaacagcctgtatctgcagatgaacagcctgcgggccgaggacaccgccctgtaccactgtgccagacctgtgacaaccgactactactactacatggacgtgtggggcaagggcaccaccgtgaccgtgtcttccggcggaggaggcagcggcggcggcggcagcggcggaggcggcagcgagatcgtgctgacacagagccccggaacactgagcctgagccctggcgagcgggctacactgtcttgcagagcttctcagagcgtttcctccagctacctggcctggtatcagcaaaagcccggccaagctccaagactgctgatctacggcgccagctctagggccaccggcattcctgatagattcagcggctctggcagcggaacagattttaccctgaccatcagcagactggagcctgaggatttcgccgtgtactactgccagcagtacggatctagctggacctttggccagggcaccaaggtggaaatcaaaggctctggcggcggcggcagctgcccttattctaaccctaggctctgcagcggaggcggcggcagcgagctgcctacccaaggcacatttagcaacgtctccaccaacgtgtcccctgccaaacccaccaccacagcttgtccttacagcaatcctagcctgtgcggcggcggcggcagcaccacgacgccagcgccgcggccaccaacaccggcgcccaccatcgcgtcgcagcccctgtccctgcgcccagaggcgtgccggccagcggcggggggcgcagtgcacacgagggggctggacttcgcctgtgatatctacatctgggcgcccttggccgggacttgtggggtccttctcctgtcactggttatcaccctttactgccggagggaccagaggctgccccccgatgcccacaagccccctgggggaggcagtttccggacccccatccaagaggagcaggccgacgcccactccaccctggccaagatcagagtgaagttcagcaggagcgcagacgcccccgcgtaccagcagggccagaaccagctctataacgagctcaatctaggacgaagagaggagtacgatgttttggacaagagacgtggccgggaccctgagatggggggaaagccgagaaggaagaaccctcaggaaggcctgtacaatgaactgcagaaagataagatggcggaggcctacagtgagattgggatgaaaggcgagcgccggaggggcaaggggcacgatggcctttaccagggtctcagtacagccaccaaggacacctacgacgcccttcacatgcaggccctgccccctcgcgg

SEQ ID NO: 1286 - DNA, 1652 bp, synthetic construct
  misc_feature 1..1652: note = Synthetic
  source 1..1652: mol_type = other DNA
atggccttaccagtgaccgccttgctcctgccgctggccttgctgctccacgccgccaggccggaggtgcagctgctggagagcggaggaggcctggtgcaacctggcggcagcctgcggctgagctgcgccgcttccggcttcaccttcagcagctacgccatgagctgggtgcggcaggctcctggaaaaggcctggagtgggtcagcgccatcagcggcagcggaggctcaacatactacgccgacagcgtgaagggcagattcaccatcagccgcgacaactctaagaacaccctgtacctgcagatgaactctctgagagccgaggacaccgccgtgtactattgtgccaagaagggcacaagctacaactggaatgatgtgcactactactactactattatatggacgtgtggggcaaaggcacaaccgtgaccgtgtccagcggcggtggaggcagcggaggcggcggaagcggcggcggcggcagtgaaattgtgctgacccagagccccggcaccctgagcctgtctccaggcgagcgggctaccctgtcctgcagagccagccagtctgtttccagctcttacctggcctggtatcagcaaaagcctggacaggcccctagactgctgatctacggcgcctctagcagggctacaggcatccctgatagatttagcggcagcggctctggcaccgacttcaccctgaccatctccagactggaacccgaggatttcgccgtgtactactgccagcagtacggcagcagctggacatttggccagggcacaaaggtggaaatcaagggctctggcggcggcggcagctgcccttattctaaccctaggctctgcagcggaggcggcggcagcgagctgcctacccaaggcacatttagcaacgtctccaccaacgtgtcccctgccaaacccaccaccacagcttgtccttacagcaatcctagcctgtgcggcggcggcggcagcaccacgacgccagcgccgcggccaccaacaccggcgcccaccatcgcgtcgcagcccctgtccctgcgcccagaggcgtgccggccagcggcggggggcgcagtgcacacgagggggctggacttcgcctgtgatatctacatctgggcgcccttggccgggacttgtggggtccttctcctgtcactggttatcaccctttactgccggagggaccagaggctgccccccgatgcccacaagccccctgggggaggcagtttccggacccccatccaagaggagcaggccgacgcccactccaccctggccaagatcagagtgaagttcagcaggagcgcagacgcccccgcgtaccagcagggccagaaccagctctataacgagctcaatctaggacgaagagaggagtacgatgttttggacaagagacgtggccgggaccctgagatggggggaaagccgagaaggaagaaccctcaggaaggcctgtacaatgaactgcagaaagataagatggcggaggcctacagtgagattgggatgaaaggcgagcgccggaggggcaaggggcacgatggcctttaccagggtctcagtacagccaccaaggacacctacgacgcccttcacatgcaggccctgccccctcgcgg

SEQ ID NO: 1287 - DNA, 1634 bp, synthetic construct
  misc_feature 1..1634: note = Synthetic
  source 1..1634: mol_type = other DNA
atggccttaccagtgaccgccttgctcctgccgctggccttgctgctccacgccgccaggccgcagctgcaactgcaggagagcggtcctggactggtgaagccttctgagacactgagcctgacctgcaccgtgtccggcggctctatcagctcctccagctactactggggctggatcagacagccacctggcaagggcctggaatggatcggcagcatttactattctggctcaacatactacaaccccagccttaaaagcagagtgacaatcagcgtggacaccagcaagaaccagttcagcctgaagctgtcctctgtgaccgccgctgatactgccgtttactactgcaccaccggaacaacagcttattactactactactacatggacgtgtggggaaagggcaccacagtgaccgtgtccagcggcggaggcggcagcggcggaggaggatctggcggcggcggcagcgagatcgtgctgacccagtctccaggcaccctgagcctgagccccggcgagcgggccacactgagctgcagagcctctcagagcgtcagctctagctacctggcctggtatcagcaaaaacctggccaggcccctagactgctgatctacggcgccagcagccgggccaccggcatccctgatagattcagcggatctggcagcggcaccgactttaccctcaccatcagcagactggaacccgaggacttcgccgtgtactattgtcagcagtacggcagcagctggacattcggccagggcaccaaggtggaaatcaagggctctggcggcggcggcagctgcccttattctaaccctaggctctgcagcggaggcggcggcagcgagctgcctacccaaggcacatttagcaacgtctccaccaacgtgtcccctgccaaacccaccaccacagcttgtccttacagcaatcctagcctgtgcggcggcggcggcagcaccacgacgccagcgccgcggccaccaacaccggcgcccaccatcgcgtcgcagcccctgtccctgcgcccagaggcgtgccggccagcggcggggggcgcagtgcacacgagggggctggacttcgcctgtgatatctacatctgggcgcccttggccgggacttgtggggtccttctcctgtcactggttatcaccctttactgccggagggaccagaggctgccccccgatgcccacaagccccctgggggaggcagtttccggacccccatccaagaggagcaggccgacgcccactccaccctggccaagatcagagtgaagttcagcaggagcgcagacgcccccgcgtaccagcagggccagaaccagctctataacgagctcaatctaggacgaagagaggagtacgatgttttggacaagagacgtggccgggaccctgagatggggggaaagccgagaaggaagaaccctcaggaaggcctgtacaatgaactgcagaaagataagatggcggaggcctacagtgagattgggatgaaaggcgagcgccggaggggcaaggggcacgatggcctttaccagggtctcagtacagccaccaaggacacctacgacgcccttcacatgcaggccctgccccctcgcgg

SEQ ID NO: 1288 - DNA, 1631 bp, synthetic construct
  misc_feature 1..1631: note = Synthetic
  source 1..1631: mol_type = other DNA
atggccttaccagtgaccgccttgctcctgccgctggccttgctgctccacgccgccaggccggaggtgcagctgctggagagcggtggaggcctggtgcaacctggcggctccctgcggctgagctgcgccgccagcggcttcacctttagctcttacgccatgacctgggtcagacaggcccctggcaagggactggaatgggtgtctgccatcagcggcagcggaggatctacatactacgctgatagcgtgaagggcagatttacaatcagccgcgacaatagcaagaacaccctgtacctgcagatgaacagcctgagagccgaggacaccgccgtgtactactgcgctagaggcggctacaactggcactactactactacatggacgtgtggggcaaaggaaccaccgtgaccgtgtccagcggcggcggcggctctggcggaggcggctctggcggcggcggaagcgagatcgtgctgacccagtctcccggaacactctccctgtccccaggcgagcgggctacactgagctgccgggccagccagagcgtgtcctcgtcttatctggcctggtatcagcagaaacctggccaagcccctagactgctgatctacggcgccagcagccgggccacaggcatccccgatagattcagcggcagcggaagcggcaccgacttcaccctgacaatcagcagactggaacctgaggacttcgccgtgtactattgtcagcagtacggcagcagctggaccttcggccagggcaccaaggttgaaattaagggctctggcggcggcggcagctgcccttattctaaccctaggctctgcagcggaggcggcggcagcgagctgcctacccaaggcacatttagcaacgtctccaccaacgtgtcccctgccaaacccaccaccacagcttgtccttacagcaatcctagcctgtgcggcggcggcggcagcaccacgacgccagcgccgcggccaccaacaccggcgcccaccatcgcgtcgcagcccctgtccctgcgcccagaggcgtgccggccagcggcggggggcgcagtgcacacgagggggctggacttcgcctgtgatatctacatctgggcgcccttggccgggacttgtggggtccttctcctgtcactggttatcaccctttactgccggagggaccagaggctgccccccgatgcccacaagccccctgggggaggcagtttccggacccccatccaagaggagcaggccgacgcccactccaccctggccaagatcagagtgaagttcagcaggagcgcagacgcccccgcgtaccagcagggccagaaccagctctataacgagctcaatctaggacgaagagaggagtacgatgttttggacaagagacgtggccgggaccctgagatggggggaaagccgagaaggaagaaccctcaggaaggcctgtacaatgaactgcagaaagataagatggcggaggcctacagtgagattgggatgaaaggcgagcgccggaggggcaaggggcacgatggcctttaccagggtctcagtacagccaccaaggacacctacgacgcccttcacatgcaggccctgccccctcgcgg

SEQ ID NO: 1289 - DNA, 1643 bp, synthetic construct
  misc_feature 1..1643: note = Synthetic
  source 1..1643: mol_type = other DNA
atggccttaccagtgaccgccttgctcctgccgctggccttgctgctccacgccgccaggccgcaagtgcagctggtggagagcggaggcggagtcgtgcaacctggcagaagcctgagactgagctgcgccgcttctggcttcaccttttctagctacgacatgcactgggtgcggcaggcccctggaaaaggcctggaatgggtcagcgtgatctggtatgacggctccaacaagaagtacggcgacagcgccaagggcaggttcaccattagccgggacaattctaagaacaccctggacctgcagatgaacagcctgcgggctgaggacaccgccgtgtactattgtgccagaggcgataattggaacgacgagggcggctactactactactacatggacgtgtggggcaagggaacaaccgtgacagtgtccagcggcggcggcggaagcggcggcggcggatctggcggaggcggcagcgagatcgtgctgacccagagccccgacttccagtccgtgacccctaaggaaaaggtgaccatcacatgcagagccagccagaacatcggcagcagcctgcactggtatcagcagaaacctgatcagtctccaaagctgctgatcaaattcgcctctcagagcatcagcggtgttcctagcagattcagcggctccggcagcggcactgattttacactgaccatcaacagcctggaggccgaggatgccgctgcctactactgccaccagagctctagcctgccctggaccttcggccagggcacaaaggtggaaatcaagggctctggcggcggcggcagctgcccttattctaaccctaggctctgcagcggaggcggcggcagcgagctgcctacccaaggcacatttagcaacgtctccaccaacgtgtcccctgccaaacccaccaccacagcttgtccttacagcaatcctagcctgtgcggcggcggcggcagcaccacgacgccagcgccgcggccaccaacaccggcgcccaccatcgcgtcgcagcccctgtccctgcgcccagaggcgtgccggccagcggcggggggcgcagtgcacacgagggggctggacttcgcctgtgatatctacatctgggcgcccttggccgggacttgtggggtccttctcctgtcactggttatcaccctttactgccggagggaccagaggctgccccccgatgcccacaagccccctgggggaggcagtttccggacccccatccaagaggagcaggccgacgcccactccaccctggccaagatcagagtgaagttcagcaggagcgcagacgcccccgcgtaccagcagggccagaaccagctctataacgagctcaatctaggacgaagagaggagtacgatgttttggacaagagacgtggccgggaccctgagatggggggaaagccgagaaggaagaaccctcaggaaggcctgtacaatgaactgcagaaagataagatggcggaggcctacagtgagattgggatgaaaggcgagcgccggaggggcaaggggcacgatggcctttaccagggtctcagtacagccaccaaggacacctacgacgcccttcacatgcaggccctgccccctcgcgg

SEQ ID NO: 1290 - DNA, 1643 bp, synthetic construct
  misc_feature 1..1643: note = Synthetic
  source 1..1643: mol_type = other DNA
atggccttaccagtgaccgccttgctcctgccgctggccttgctgctccacgccgccaggccgcaagtgcagctggtggagagcggcggcggcgtggtgcagcccggacgctccctgcggctgagctgcgccgccagcggctttaccttctctagctacgatatgcactgggtcagacaggctcctggcaaaggcctggaatgggtgtccgtgatctggtacgacggctccaacaagaagtacggcgacagcgccaagggcagattcaccatctctcgggacaatagcaagaacacactggacctgcagatgaactctctgagagccgaggacaccgccgtgtactactgcgccagaggcgataattggaacgacgagggcggttattactactactatatggacgtgtggggaaaaggcacaaccgtgaccgtttccagcggcggaggcggcagcggcggcggcggatctggcggaggcggcagcgacattcagatgacacagagccccagcagcctctccacctctgtgggcgatagagtgaccatcacatgccgggccagccagggcatcagcaactacctggcctggttccagcagaagcctggaaaggcccctaagagcctgatctacgccgccagcagcctgcagagcggagtgccatctaagttcagcggcagcggatctggcaccgacttcagcctgaccatcagctctctgcagcctgaggattttgccacatactactgtcagcagtacaacagctaccctatcacattcggccagggcaccagactggaaatcaagggctctggcggcggcggcagctgcccttattctaaccctaggctctgcagcggaggcggcggcagcgagctgcctacccaaggcacatttagcaacgtctccaccaacgtgtcccctgccaaacccaccaccacagcttgtccttacagcaatcctagcctgtgcggcggcggcggcagcaccacgacgccagcgccgcggccaccaacaccggcgcccaccatcgcgtcgcagcccctgtccctgcgcccagaggcgtgccggccagcggcggggggcgcagtgcacacgagggggctggacttcgcctgtgatatctacatctgggcgcccttggccgggacttgtggggtccttctcctgtcactggttatcaccctttactgccggagggaccagaggctgccccccgatgcccacaagccccctgggggaggcagtttccggacccccatccaagaggagcaggccgacgcccactccaccctggccaagatcagagtgaagttcagcaggagcgcagacgcccccgcgtaccagcagggccagaaccagctctataacgagctcaatctaggacgaagagaggagtacgatgttttggacaagagacgtggccgggaccctgagatggggggaaagccgagaaggaagaaccctcaggaaggcctgtacaatgaactgcagaaagataagatggcggaggcctacagtgagattgggatgaaaggcgagcgccggaggggcaaggggcacgatggcctttaccagggtctcagtacagccaccaaggacacctacgacgcccttcacatgcaggccctgccccctcgcgg

SEQ ID NO: 1291 - DNA, 1634 bp, synthetic construct
  misc_feature 1..1634: note = Synthetic
  source 1..1634: mol_type = other DNA
atggccttaccagtgaccgccttgctcctgccgctggccttgctgctccacgccgccaggccgcaagtgcagctggtgcagtctggagccgaggtgaaaaagagcggcgcctcagtgaaggtgtcctgcaaggccagcggctacacactgaccagctacggcatctcttgggttagacaggcccctggacaaggcctggaatggatgggctggatcagcgcctacaacggcaacatcaactacgcccagaaattccagggcagagtgacaatgaccacagacaccagcacctccaccgcttacatggaactgcggagcctgagaagcgacgacaccgccgtgtactactgtgtgcgggacggcgatagatacaattggaaccacagctatatggacgtgtggggcaagggcacaacagtcaccgtgtcttctggaggcggaggcagcggaggcggcggcagcggcggcggcggcagcgagatcgtgctgacacagagccctgatttccaaagcgtgacccctaaggaaaaggtgaccatcacatgcagagcctctcagaacattggaagtagcctgcactggtatcagcagaaacccgatcagtccccaaagctgctgatcaagttcgccagccagagcatcagcggagtgcccagccggttcagcggctctggctctggcaccgacttcaccctgaccatcaatagcctggaggccgaggacgccgctgcttattactgccaccagagcagctccctgccttggacctttggccagggcaccaaggtcgagatcaagggctctggcggcggcggcagctgcccttattctaaccctaggctctgcagcggaggcggcggcagcgagctgcctacccaaggcacatttagcaacgtctccaccaacgtgtcccctgccaaacccaccaccacagcttgtccttacagcaatcctagcctgtgcggcggcggcggcagcaccacgacgccagcgccgcggccaccaacaccggcgcccaccatcgcgtcgcagcccctgtccctgcgcccagaggcgtgccggccagcggcggggggcgcagtgcacacgagggggctggacttcgcctgtgatatctacatctgggcgcccttggccgggacttgtggggtccttctcctgtcactggttatcaccctttactgccggagggaccagaggctgccccccgatgcccacaagccccctgggggaggcagtttccggacccccatccaagaggagcaggccgacgcccactccaccctggccaagatcagagtgaagttcagcaggagcgcagacgcccccgcgtaccagcagggccagaaccagctctataacgagctcaatctaggacgaagagaggagtacgatgttttggacaagagacgtggccgggaccctgagatggggggaaagccgagaaggaagaaccctcaggaaggcctgtacaatgaactgcagaaagataagatggcggaggcctacagtgagattgggatgaaaggcgagcgccggaggggcaaggggcacgatggcctttaccagggtctcagtacagccaccaaggacacctacgacgcccttcacatgcaggccctgccccctcgcgg

SEQ ID NO: 1292 - DNA, 1634 bp, synthetic construct
  misc_feature 1..1634: note = Synthetic
  source 1..1634: mol_type = other DNA
atggccttaccagtgaccgccttgctcctgccgctggccttgctgctccacgccgccaggccgcaagtgcagctggttcagagcggagccgaggtgaaaaagtccggcgccagcgtgaaggtgtcatgcaaggcctctggctacaccctgacctcctacggcatcagctgggtccggcaggcccctggccagggcctggagtggatgggctggatcagcgcttataatggcaacatcaattacgcccagaagttccaaggcagagtgacaatgaccacagataccagcaccagcacagcttacatggaactgagatccctgcggagcgacgacaccgccgtgtactattgtgtgcgggacggcgacagatacaactggaaccacagctacatggacgtgtggggcaagggcaccaccgtgaccgtgtccagcggcggcggcggctctggaggcggcggatctggcggaggaggttccgacatccagatgacacagagccccagcagcctgagcacctctgtgggcgatagagtgaccatcacctgcagagccagccagggcatcagcaactacctggcctggttccagcagaaacctggaaaggcccctaagagcctgatctacgccgcttcttctctgcaaagcggcgtgccaagcaagttcagcggcagcggcagcggaacagacttcagcctgacaatttctagcctccagcctgaggattttgccacatactactgccagcagtacaacagctaccccatcaccttcggccagggcacaagactggaaatcaagggctctggcggcggcggcagctgcccttattctaaccctaggctctgcagcggaggcggcggcagcgagctgcctacccaaggcacatttagcaacgtctccaccaacgtgtcccctgccaaacccaccaccacagcttgtccttacagcaatcctagcctgtgcggcggcggcggcagcaccacgacgccagcgccgcggccaccaacaccggcgcccaccatcgcgtcgcagcccctgtccctgcgcccagaggcgtgccggccagcggcggggggcgcagtgcacacgagggggctggacttcgcctgtgatatctacatctgggcgcccttggccgggacttgtggggtccttctcctgtcactggttatcaccctttactgccggagggaccagaggctgccccccgatgcccacaagccccctgggggaggcagtttccggacccccatccaagaggagcaggccgacgcccactccaccctggccaagatcagagtgaagttcagcaggagcgcagacgcccccgcgtaccagcagggccagaaccagctctataacgagctcaatctaggacgaagagaggagtacgatgttttggacaagagacgtggccgggaccctgagatggggggaaagccgagaaggaagaaccctcaggaaggcctgtacaatgaactgcagaaagataagatggcggaggcctacagtgagattgggatgaaaggcgagcgccggaggggcaaggggcacgatggcctttaccagggtctcagtacagccaccaaggacacctacgacgcccttcacatgcaggccctgccccctcgcgg

SEQ ID NO: 1293 - DNA, 1631 bp, synthetic construct
  misc_feature 1..1631: note = Synthetic
  source 1..1631: mol_type = other DNA
atggccttaccagtgaccgccttgctcctgccgctggccttgctgctccacgccgccaggccggaggtgcagctgctggaaagcggaggcgacctggtgcaacctggaggcagcctgcggctgagctgcgccgcttctggcttcacctttagcacctacgccatgacatgggttagacaggcccctggcaagggcctggagtgggtcagcgccatcagcggcaccagcggctctacctactacgccgacagcgtgaagggcagattcaccatctccagagataattcaaagagcaccctgtacctgcacatgaacagcctgagaaccgaggacaccgccgtgtactattgcgctagaggcggctacaactggcactactactactacatggacgtgtggggaaaaggcacaacagtgaccgtgtcttctggcggaggaggcagcggcggtggcggcagtggcggaggcggcagcgagatcgtgctgacacagtcccctgacttccagagcgtgacccctaaggaaaaggtgacaatcacctgccgggcctctcagagcatcggcagcagcctgcactggtatcagcagaagcccgatcagtccccaaagctgctgatcaaatacgtgtcccaatctatcagcggcgtgcccagccggttttctggcagcggcagcggaacagacttcaccctgaccattaactccctggaggccgaggatgccgctgcctactattgtcaccagagcagcagcctgccttggacattcggccagggcaccaaggtggaaatcaagggctctggcggcggcggcagctgcccttattctaaccctaggctctgcagcggaggcggcggcagcgagctgcctacccaaggcacatttagcaacgtctccaccaacgtgtcccctgccaaacccaccaccacagcttgtccttacagcaatcctagcctgtgcggcggcggcggcagcaccacgacgccagcgccgcggccaccaacaccggcgcccaccatcgcgtcgcagcccctgtccctgcgcccagaggcgtgccggccagcggcggggggcgcagtgcacacgagggggctggacttcgcctgtgatatctacatctgggcgcccttggccgggacttgtggggtccttctcctgtcactggttatcaccctttactgccggagggaccagaggctgccccccgatgcccacaagccccctgggggaggcagtttccggacccccatccaagaggagcaggccgacgcccactccaccctggccaagatcagagtgaagttcagcaggagcgcagacgcccccgcgtaccagcagggccagaaccagctctataacgagctcaatctaggacgaagagaggagtacgatgttttggacaagagacgtggccgggaccctgagatggggggaaagccgagaaggaagaaccctcaggaaggcctgtacaatgaactgcagaaagataagatggcggaggcctacagtgagattgggatgaaaggcgagcgccggaggggcaaggggcacgatggcctttaccagggtctcagtacagccaccaaggacacctacgacgcccttcacatgcaggccctgccccctcgcgg

SEQ ID NO: 1294 - DNA, 1634 bp, synthetic construct
  misc_feature 1..1634: note = Synthetic
  source 1..1634: mol_type = other DNA
atggccttaccagtgaccgccttgctcctgccgctggccttgctgctccacgccgccaggccggaggtgcaactgctggaaagcggaggagatctggtgcagcccggcggctccctgcgcctgtcttgcgccgccagcggctttacattcagcacctacgccatgacatgggttagacaggcccctggaaaaggcctggaatgggtgtccgccatcagcggaaccagcggcagcacatactacgccgacagcgtgaagggcagattcaccatcagccgggacaacagcaagtccaccctgtacctgcacatgaacagcctgcggaccgaggacaccgccgtgtactattgcgctagaggcggttataattggcactactactactacatggacgtgtggggcaagggcacgaccgtgacagtgtccagcggcggcggaggcagcggcggaggaggctctggcggcggcggcagcgagatcgtgatgacccagtctcctgctacactgagcctgagccccggcgagcgggccaccctgagttgtagagccagccagagcgtgtcttctagctacctgagctggtatcagcaaaaacctggccttgctccaagactgctgatctacggcgcctctacaagagccaccggcatccccgccagatttagcggctctggcagcggcaccgacttcaccctgaccatctccagcctccagcctgaggatttcgccgtctactactgccagcaggattacaacctgcctcctaccttcggccagggcacaaaggtggaaattaagggctctggcggcggcggcagctgcccttattctaaccctaggctctgcagcggaggcggcggcagcgagctgcctacccaaggcacatttagcaacgtctccaccaacgtgtcccctgccaaacccaccaccacagcttgtccttacagcaatcctagcctgtgcggcggcggcggcagcaccacgacgccagcgccgcggccaccaacaccggcgcccaccatcgcgtcgcagcccctgtccctgcgcccagaggcgtgccggccagcggcggggggcgcagtgcacacgagggggctggacttcgcctgtgatatctacatctgggcgcccttggccgggacttgtggggtccttctcctgtcactggttatcaccctttactgccggagggaccagaggctgccccccgatgcccacaagccccctgggggaggcagtttccggacccccatccaagaggagcaggccgacgcccactccaccctggccaagatcagagtgaagttcagcaggagcgcagacgcccccgcgtaccagcagggccagaaccagctctataacgagctcaatctaggacgaagagaggagtacgatgttttggacaagagacgtggccgggaccctgagatggggggaaagccgagaaggaagaaccctcaggaaggcctgtacaatgaactgcagaaagataagatggcggaggcctacagtgagattgggatgaaaggcgagcgccggaggggcaaggggcacgatggcctttaccagggtctcagtacagccaccaaggacacctacgacgcccttcacatgcaggccctgccccctcgcgg

SEQ ID NO: 1295 - protein, 771 aa, synthetic construct
  REGION 1..771: note = Synthetic
MALPVTALLLPLALLLHAARPQVQLVESGGGVVQPGRSLRLSCAASGFTFNNYDMYWVRQAPGKGLEWVAVTWYDGSNKYYADSVKGRFTISRDNSKNTLYLQMNSLRAEDTAVYYCARGDNWNDEHHYFYYMDVWGKGTTVTVSSGGGGSGGGGSGGGGSEIVLTQSPDFQSVTPKEKVTITCRASQSIGSSLHWYQQKPDQSPKLLIKFASQSFSGVPSRFSGSGSGTDFTLTIHSLEAEDAATYYCHQSSSLPWTFGQGTKVEIKGSGGGGSCPYSNPRLCSGGGGSELPTQGTFSNVSTNVSPAKPTTTACPYSNPSLCGGGGSTTTPAPRPPTPAPTIASQPLSLRPEACRPAAGGAVHTRGLDFACDIYIWAPLAGTCGVLLLSLVITLYCRRDQRLPPDAHKPPGGGSFRTPIQEEQADAHSTLAKIRVKFSRSADAPAYQQGQNQLYNELNLGRREEYDVLDKRRGRDPEMGGKPRRKNPQEGLYNELQKDKMAEAYSEIGMKGERRRGKGHDGLYQGLSTATKDTYDALHMQALPPRGSGEGRGSLLTCGDVEENPGPMALPVTALLLPLALLLHAARPNWVNVISDLKKIEDLIQSMHIDATLYTESDVHPSCKVTAMKCFLLELQVISLESGDASIHDTVENLIILANNSLSSNGNVTESGCKECEELEEKNIKEFLQSFVHIVQMFINTSTTTPAPRPPTPAPTIASQPLSLRPEACRPAAGGAVHTRGLDFACDIYIWAPLAGTCGVLLLSLVITLYC

SEQ ID NO: 1296 - protein, 771 aa, synthetic construct
  REGION 1..771: note = Synthetic
MALPVTALLLPLALLLHAARPQVQLVESGGGVVQPGRSLRLSCAASGFTFSNYDMHWVRQAPGKGLEWVTIIWHDASNKYYLDSVKGRFTISRDNSKNTLYLQMNSLRAEDTAVYYCARGDNWNDEHHYFYYMDVWGKGTTVTVSSGGGGSGGGGSGGGGSEIVLTQSPDFQSVTPKEKVTITCRASQSIGSSLHWYQQKPDQSPKLLIKFASQSFSGVPSRFSGSGSGTDFTLTIHSLEAEDAATYYCHQSSSLPWTFGQGTKVEIKGSGGGGSCPYSNPRLCSGGGGSELPTQGTFSNVSTNVSPAKPTTTACPYSNPSLCGGGGSTTTPAPRPPTPAPTIASQPLSLRPEACRPAAGGAVHTRGLDFACDIYIWAPLAGTCGVLLLSLVITLYCRRDQRLPPDAHKPPGGGSFRTPIQEEQADAHSTLAKIRVKFSRSADAPAYQQGQNQLYNELNLGRREEYDVLDKRRGRDPEMGGKPRRKNPQEGLYNELQKDKMAEAYSEIGMKGERRRGKGHDGLYQGLSTATKDTYDALHMQALPPRGSGEGRGSLLTCGDVEENPGPMALPVTALLLPLALLLHAARPNWVNVISDLKKIEDLIQSMHIDATLYTESDVHPSCKVTAMKCFLLELQVISLESGDASIHDTVENLIILANNSLSSNGNVTESGCKECEELEEKNIKEFLQSFVHIVQMFINTSTTTPAPRPPTPAPTIASQPLSLRPEACRPAAGGAVHTRGLDFACDIYIWAPLAGTCGVLLLSLVITLYC

SEQ ID NO: 1297 - protein, 771 aa, synthetic construct
  REGION 1..771: note = Synthetic
MALPVTALLLPLALLLHAARPQVQLVESGGGVVQPGRSLRLSCAASGFTFSNYDMHWVRQAPGKGLEWVTIIWHDGSNKYYLDSVKGRFTISRDNSKNTLYLQMNSLRAEDTAVYYCARGDNWNDEHHYFYYMDVWGKGTTVTVSSGGGGSGGGGSGGGGSEIVLTQSPDFQSVTPKEKVTITCRASQSIGSSLHWYQQKPDQSPKLLIKFASQSFSGVPSRFSGSGSGTDFTLTIHSLEAEDAATYYCHQSSSLPWTFGQGTKVEIKGSGGGGSCPYSNPRLCSGGGGSELPTQGTFSNVSTNVSPAKPTTTACPYSNPSLCGGGGSTTTPAPRPPTPAPTIASQPLSLRPEACRPAAGGAVHTRGLDFACDIYIWAPLAGTCGVLLLSLVITLYCRRDQRLPPDAHKPPGGGSFRTPIQEEQADAHSTLAKIRVKFSRSADAPAYQQGQNQLYNELNLGRREEYDVLDKRRGRDPEMGGKPRRKNPQEGLYNELQKDKMAEAYSEIGMKGERRRGKGHDGLYQGLSTATKDTYDALHMQALPPRGSGEGRGSLLTCGDVEENPGPMALPVTALLLPLALLLHAARPNWVNVISDLKKIEDLIQSMHIDATLYTESDVHPSCKVTAMKCFLLELQVISLESGDASIHDTVENLIILANNSLSSNGNVTESGCKECEELEEKNIKEFLQSFVHIVQMFINTSTTTPAPRPPTPAPTIASQPLSLRPEACRPAAGGAVHTRGLDFACDIYIWAPLAGTCGVLLLSLVITLYC

SEQ ID NO: 1298 - protein, 765 aa, synthetic construct
  REGION 1..765: note = Synthetic
MALPVTALLLPLALLLHAARPEVQLLESGGGLVQPGGSLRLSCAASGFTFSIYAMSWVRQAPGKGLEWVSAISGGGDTTYYADSVKGRFTISRDNSKTTLDLQMNSLRAEDTAVYYCAKHTSYYMDVWGKGTTVTVSSGGGGSGGGGSGGGGSQTVVTQEPSLSVSPGGTVTLTCGLSSGSVSTSYYPSWYQQTPGQAPRTLIYSTNIRSSGVPDRFSGSILGNKAALTITGAQADDESDYYCKLYMGSGIIFGSGTKVTVLGSGGGGSCPYSNPRLCSGGGGSELPTQGTFSNVSTNVSPAKPTTTACPYSNPSLCGGGGSTTTPAPRPPTPAPTIASQPLSLRPEACRPAAGGAVHTRGLDFACDIYIWAPLAGTCGVLLLSLVITLYCRRDQRLPPDAHKPPGGGSFRTPIQEEQADAHSTLAKIRVKFSRSADAPAYQQGQNQLYNELNLGRREEYDVLDKRRGRDPEMGGKPRRKNPQEGLYNELQKDKMAEAYSEIGMKGERRRGKGHDGLYQGLSTATKDTYDALHMQALPPRGSGEGRGSLLTCGDVEENPGPMALPVTALLLPLALLLHAARPNWVNVISDLKKIEDLIQSMHIDATLYTESDVHPSCKVTAMKCFLLELQVISLESGDASIHDTVENLIILANNSLSSNGNVTESGCKECEELEEKNIKEFLQSFVHIVQMFINTSTTTPAPRPPTPAPTIASQPLSLRPEACRPAAGGAVHTRGLDFACDIYIWAPLAGTCGVLLLSLVITLYC

SEQ ID NO: 1299 - protein, 771 aa, synthetic construct
  REGION 1..771: note = Synthetic
MALPVTALLLPLALLLHAARPQVQLVESGGGVVQPGRSLRLSCAASGFTFSNYDKHWVRQAPGKGLEWVAVIWYDGSNKYYADSVKGRFTISRDNSKNTLYLQMNSLRAEDTAMYYCARGDNWNDEHHYFYYMDVWGKGTTVTVSSGGGGSGGGGSGGGGSEIVLTQSPDFQSVTPKEKVTITCRASQSIGSSLHWYQQKPDQSPKLLIKFASQSFSGVPSRFSGSGSGTDFTLTIHSLEAEDAATYYCHQSSSLPWTFGQGTKVEIKGSGGGGSCPYSNPRLCSGGGGSELPTQGTFSNVSTNVSPAKPTTTACPYSNPSLCGGGGSTTTPAPRPPTPAPTIASQPLSLRPEACRPAAGGAVHTRGLDFACDIYIWAPLAGTCGVLLLSLVITLYCRRDQRLPPDAHKPPGGGSFRTPIQEEQADAHSTLAKIRVKFSRSADAPAYQQGQNQLYNELNLGRREEYDVLDKRRGRDPEMGGKPRRKNPQEGLYNELQKDKMAEAYSEIGMKGERRRGKGHDGLYQGLSTATKDTYDALHMQALPPRGSGEGRGSLLTCGDVEENPGPMALPVTALLLPLALLLHAARPNWVNVISDLKKIEDLIQSMHIDATLYTESDVHPSCKVTAMKCFLLELQVISLESGDASIHDTVENLIILANNSLSSNGNVTESGCKECEELEEKNIKEFLQSFVHIVQMFINTSTTTPAPRPPTPAPTIASQPLSLRPEACRPAAGGAVHTRGLDFACDIYIWAPLAGTCGVLLLSLVITLYC

SEQ ID NO: 1300 - protein, 769 aa, synthetic construct
  REGION 1..769: note = Synthetic
MALPVTALLLPLALLLHAARPQVQLVQSGAEVKKPGASVKVSCKASGYTFTNYGFSWVRQAPGQGLDWMGWISAYNGYTNYTQKLQGRVTMTTDTSTTTAYMELRSLRSDDTAVYYCARRGLLYYYYSMDVWGKGTTVTVSSGGGGSGGGGSGGGGSEIVLTQSPATLSLSPGERATLSCGASQSVYNSYLAWYQQKPGLAPRLLIYDASLRATGVPDRFSGSGSGTDFTLTISTLEPEDFAVYYCQQYGGSPMYTFGQGTKLEIKGSGGGGSCPYSNPRLCSGGGGSELPTQGTFSNVSTNVSPAKPTTTACPYSNPSLCGGGGSTTTPAPRPPTPAPTIASQPLSLRPEACRPAAGGAVHTRGLDFACDIYIWAPLAGTCGVLLLSLVITLYCRRDQRLPPDAHKPPGGGSFRTPIQEEQADAHSTLAKIRVKFSRSADAPAYQQGQNQLYNELNLGRREEYDVLDKRRGRDPEMGGKPRRKNPQEGLYNELQKDKMAEAYSEIGMKGERRRGKGHDGLYQGLSTATKDTYDALHMQALPPRGSGEGRGSLLTCGDVEENPGPMALPVTALLLPLALLLHAARPNWVNVISDLKKIEDLIQSMHIDATLYTESDVHPSCKVTAMKCFLLELQVISLESGDASIHDTVENLIILANNSLSSNGNVTESGCKECEELEEKNIKEFLQSFVHIVQMFINTSTTTPAPRPPTPAPTIASQPLSLRPEACRPAAGGAVHTRGLDFACDIYIWAPLAGTCGVLLLSLVITLYC

SEQ ID NO: 1301 - protein, 765 aa, synthetic construct
  REGION 1..765: note = Synthetic
MALPVTALLLPLALLLHAARPEVQLLESGGGLVQPGGSLRLSCTASGFTFSSFAMSWVRQAPGKGLEWVSAMSGSGDTTYYADSVKGRFTISRDNSKTTLYLQMNSLRAEDTAVYSCAKHTTYYMDVWGKGTTVTVSSGGGGSGGGGSGGGGSQTVVTQEPSLSVSPGGTVTLTCGLSSGSVSTSDYPSWYQQTPGQAPRTLIYRTNTRSSGVPDRFSGSILGNKAALTITGAQADDESDYYCVLYMDSGIIFGSGTKVTVLGSGGGGSCPYSNPRLCSGGGGSELPTQGTFSNVSTNVSPAKPTTTACPYSNPSLCGGGGSTTTPAPRPPTPAPTIASQPLSLRPEACRPAAGGAVHTRGLDFACDIYIWAPLAGTCGVLLLSLVITLYCRRDQRLPPDAHKPPGGGSFRTPIQEEQADAHSTLAKIRVKFSRSADAPAYQQGQNQLYNELNLGRREEYDVLDKRRGRDPEMGGKPRRKNPQEGLYNELQKDKMAEAYSEIGMKGERRRGKGHDGLYQGLSTATKDTYDALHMQALPPRGSGEGRGSLLTCGDVEENPGPMALPVTALLLPLALLLHAARPNWVNVISDLKKIEDLIQSMHIDATLYTESDVHPSCKVTAMKCFLLELQVISLESGDASIHDTVENLIILANNSLSSNGNVTESGCKECEELEEKNIKEFLQSFVHIVQMFINTSTTTPAPRPPTPAPTIASQPLSLRPEACRPAAGGAVHTRGLDFACDIYIWAPLAGTCGVLLLSLVITLYC

SEQ ID NO: 1302 - protein, 765 aa, synthetic construct
  REGION 1..765: note = Synthetic
MALPVTALLLPLALLLHAARPEVQLLESGGGLVQPGGSLRLSCAASGFTFNTYAMSWVRQAPGKGLEWVSAMSGSGDTTYYADSVKGRFTISRDNSKTTLYLQMNSLRAEDTAVYSCAKHTSYYMDVWGKGTTVTVSSGGGGSGGGGSGGGGSQTVVTQEPSLSVSPGGTVTLTCGLSSGSVSTSDYPSWYQQTPGQAPRTLIYRTNTRSSGVPDRFSGSILGNKAALTITGAQADDESDYYCVLYMGSGIIFGSGTKVTVLGSGGGGSCPYSNPRLCSGGGGSELPTQGTFSNVSTNVSPAKPTTTACPYSNPSLCGGGGSTTTPAPRPPTPAPTIASQPLSLRPEACRPAAGGAVHTRGLDFACDIYIWAPLAGTCGVLLLSLVITLYCRRDQRLPPDAHKPPGGGSFRTPIQEEQADAHSTLAKIRVKFSRSADAPAYQQGQNQLYNELNLGRREEYDVLDKRRGRDPEMGGKPRRKNPQEGLYNELQKDKMAEAYSEIGMKGERRRGKGHDGLYQGLSTATKDTYDALHMQALPPRGSGEGRGSLLTCGDVEENPGPMALPVTALLLPLALLLHAARPNWVNVISDLKKIEDLIQSMHIDATLYTESDVHPSCKVTAMKCFLLELQVISLESGDASIHDTVENLIILANNSLSSNGNVTESGCKECEELEEKNIKEFLQSFVHIVQMFINTSTTTPAPRPPTPAPTIASQPLSLRPEACRPAAGGAVHTRGLDFACDIYIWAPLAGTCGVLLLSLVITLYC

SEQ ID NO: 1303 - protein, 765 aa, synthetic construct
  REGION 1..765: note = Synthetic
MALPVTALLLPLALLLHAARPEVQLLESGGDLVQPGGSLRLSCAASGFTFSTYAMSWVRQAPGKGLEWVSAISGSGENIYYADSVKGRFTISRDNSKNTLFLQMNSLRAEDTAVYYCAKHTSYYMDVWGKGTTVTVSSGGGGSGGGGSGGGGSQTVVTQEPSFSVSPGGTVTLTCGLYSDSVSTSYYPSWYQQTPGQAPRTLIYNTNTRSSGVPDRFSGSILGNKAALTITGAQADDESDYYCVLYMVSGIVFGSGTKVTVLGSGGGGSCPYSNPRLCSGGGGSELPTQGTFSNVSTNVSPAKPTTTACPYSNPSLCGGGGSTTTPAPRPPTPAPTIASQPLSLRPEACRPAAGGAVHTRGLDFACDIYIWAPLAGTCGVLLLSLVITLYCRRDQRLPPDAHKPPGGGSFRTPIQEEQADAHSTLAKIRVKFSRSADAPAYQQGQNQLYNELNLGRREEYDVLDKRRGRDPEMGGKPRRKNPQEGLYNELQKDKMAEAYSEIGMKGERRRGKGHDGLYQGLSTATKDTYDALHMQALPPRGSGEGRGSLLTCGDVEENPGPMALPVTALLLPLALLLHAARPNWVNVISDLKKIEDLIQSMHIDATLYTESDVHPSCKVTAMKCFLLELQVISLESGDASIHDTVENLIILANNSLSSNGNVTESGCKECEELEEKNIKEFLQSFVHIVQMFINTSTTTPAPRPPTPAPTIASQPLSLRPEACRPAAGGAVHTRGLDFACDIYIWAPLAGTCGVLLLSLVITLYC

SEQ ID NO: 1304 - protein, 771 aa, synthetic construct
  REGION 1..771: note = Synthetic
MALPVTALLLPLALLLHAARPQVQLVESGGGVVQPGRSLRLSCAASGFTFSSYGMHWVRQAPGKGLEWVAVIWYDGINKYYADSVKGRFTISRDNSKNTLYLQMNSLRAEDTAVYYCARERLERRYYYYMDVWGKGTTVTVSSGGGGSGGGGSGGGGSQTVVTQEPSFSVSPGGTVTLTCGLSSGSVSTSYYPGWYQQTPGQAPRTLIYSTNTRSSGVPDRFSGSILGNKAALTITGAQADDESDYYCVLYMGSGMFIFGSGTKVTVLGSGGGGSCPYSNPRLCSGGGGSELPTQGTFSNVSTNVSPAKPTTTACPYSNPSLCGGGGSTTTPAPRPPTPAPTIASQPLSLRPEACRPAAGGAVHTRGLDFACDIYIWAPLAGTCGVLLLSLVITLYCRRDQRLPPDAHKPPGGGSFRTPIQEEQADAHSTLAKIRVKFSRSADAPAYQQGQNQLYNELNLGRREEYDVLDKRRGRDPEMGGKPRRKNPQEGLYNELQKDKMAEAYSEIGMKGERRRGKGHDGLYQGLSTATKDTYDALHMQALPPRGSGEGRGSLLTCGDVEENPGPMALPVTALLLPLALLLHAARPNWVNVISDLKKIEDLIQSMHIDATLYTESDVHPSCKVTAMKCFLLELQVISLESGDASIHDTVENLIILANNSLSSNGNVTESGCKECEELEEKNIKEFLQSFVHIVQMFINTSTTTPAPRPPTPAPTIASQPLSLRPEACRPAAGGAVHTRGLDFACDIYIWAPLAGTCGVLLLSLVITLYC

SEQ ID NO: 1305 - protein, 765 aa, synthetic construct
  REGION 1..765: note = Synthetic
MALPVTALLLPLALLLHAARPEVQLLESGGGLVQPGGSLRLSCAASGFTFSSFAMSWVRQAPGKGLEWVSAVSGSGDDTYYADSVKGRFTISRDNSKNTLYLQMNSLRAEDTAVYYCAKHTSYYLDVWGKGTTVTVSSGGGGSGGGGSGGGGSQTVVTQEPSFSVSPGGTVTLTCALSSDSVSTSYFPSWYRQTPGQAPRTLIYNTNTRSSGVPDRFSGSILGNKAALTITGAQADDESDYYCVLYMGSGIIFGSGTKVTVLGSGGGGSCPYSNPRLCSGGGGSELPTQGTFSNVSTNVSPAKPTTTACPYSNPSLCGGGGSTTTPAPRPPTPAPTIASQPLSLRPEACRPAAGGAVHTRGLDFACDIYIWAPLAGTCGVLLLSLVITLYCRRDQRLPPDAHKPPGGGSFRTPIQEEQADAHSTLAKIRVKFSRSADAPAYQQGQNQLYNELNLGRREEYDVLDKRRGRDPEMGGKPRRKNPQEGLYNELQKDKMAEAYSEIGMKGERRRGKGHDGLYQGLSTATKDTYDALHMQALPPRGSGEGRGSLLTCGDVEENPGPMALPVTALLLPLALLLHAARPNWVNVISDLKKIEDLIQSMHIDATLYTESDVHPSCKVTAMKCFLLELQVISLESGDASIHDTVENLIILANNSLSSNGNVTESGCKECEELEEKNIKEFLQSFVHIVQMFINTSTTTPAPRPPTPAPTIASQPLSLRPEACRPAAGGAVHTRGLDFACDIYIWAPLAGTCGVLLLSLVITLYC

SEQ ID NO: 1306 - protein, 771 aa, synthetic construct
  REGION 1..771: note = Synthetic
MALPVTALLLPLALLLHAARPQVQLVESGGGVVQPGRSLRLSCAASGFNFSTFDIHWVRQAPGKGLEWVALIWYDGSYKYYADSVKGRFTISRDNSKNTLDLRMNSLRAEDTAVYYCARNDNWNDEHYYHYYMDVWGKGTTVTVSSGGGGSGGGGSGGGGSEIVLTQSPDFQSVTPKEKVTITCRASQSIGSSLHWYQQKPDQSPKLLIKFASQSFSGVPSRFSGSGSGTDFTLTINSLEAEDAATYFCHQSSSLPWTFGQGTKVEIKGSGGGGSCPYSNPRLCSGGGGSELPTQGTFSNVSTNVSPAKPTTTACPYSNPSLCGGGGSTTTPAPRPPTPAPTIASQPLSLRPEACRPAAGGAVHTRGLDFACDIYIWAPLAGTCGVLLLSLVITLYCRRDQRLPPDAHKPPGGGSFRTPIQEEQADAHSTLAKIRVKFSRSADAPAYQQGQNQLYNELNLGRREEYDVLDKRRGRDPEMGGKPRRKNPQEGLYNELQKDKMAEAYSEIGMKGERRRGKGHDGLYQGLSTATKDTYDALHMQALPPRGSGEGRGSLLTCGDVEENPGPMALPVTALLLPLALLLHAARPNWVNVISDLKKIEDLIQSMHIDATLYTESDVHPSCKVTAMKCFLLELQVISLESGDASIHDTVENLIILANNSLSSNGNVTESGCKECEELEEKNIKEFLQSFVHIVQMFINTSTTTPAPRPPTPAPTIASQPLSLRPEACRPAAGGAVHTRGLDFACDIYIWAPLAGTCGVLLLSLVITLYC

SEQ ID NO: 1307 - protein, 776 aa, synthetic construct
  REGION 1..776: note = Synthetic
MALPVTALLLPLALLLHAARPEVHLLESGGGLVQPGGSLRLSCAASGFTFSSYAMNWVRQAPGKGLEWVSSISGSGSSSYYADSVKGRFTISRDNSKNTLYLQMNSLRAEDTAVYYCASRGFNSQYPPGYYYYYMDVWGKGTTVTVSSGGGGSGGGGSGGGGSQTVVTQEPSFSVSPGGTVTLTCGLSSGSVSTSYFPSWYQQTPGQAPRTLIYITNTRSSGVPDRFSGSIIGNKAALTITGAQADDESDYFCVLYMGSGTWVFGGGTKLTVLGSGGGGSCPYSNPRLCSGGGGSELPTQGTFSNVSTNVSPAKPTTTACPYSNPSLCGGGGSTTTPAPRPPTPAPTIASQPLSLRPEACRPAAGGAVHTRGLDFACDIYIWAPLAGTCGVLLLSLVITLYCRRDQRLPPDAHKPPGGGSFRTPIQEEQADAHSTLAKIRVKFSRSADAPAYQQGQNQLYNELNLGRREEYDVLDKRRGRDPEMGGKPRRKNPQEGLYNELQKDKMAEAYSEIGMKGERRRGKGHDGLYQGLSTATKDTYDALHMQALPPRGSGEGRGSLLTCGDVEENPGPMALPVTALLLPLALLLHAARPNWVNVISDLKKIEDLIQSMHIDATLYTESDVHPSCKVTAMKCFLLELQVISLESGDASIHDTVENLIILANNSLSSNGNVTESGCKECEELEEKNIKEFLQSFVHIVQMFINTSTTTPAPRPPTPAPTIASQPLSLRPEACRPAAGGAVHTRGLDFACDIYIWAPLAGTCGVLLLSLVITLYC

SEQ ID NO: 1308 - protein, 763 aa, synthetic construct
  REGION 1..763: note = Synthetic
MALPVTALLLPLALLLHAARPEVQLLESGGGLVQPGGSLRLSCAASGFTFSNYAMTWVRQAPGKGLEWVSAISGSGIGTYYADSVQGRFTTSRDNSKNTLYLQMNSLRAEDTAVYYCAKGGYNWKDVWGKGTTVTVSSGGGGSGGGGSGGGGSEIVLTQSPDFQSVTPKEKVTITCRASQSIGSSLHWYQQKPDQSPKLLIKFASQSFSGVPSRFSGSGSGTDFTLTIHSLEAEDAATYYCHQSSSLPWTFGQGTKVEIKGSGGGGSCPYSNPRLCSGGGGSELPTQGTFSNVSTNVSPAKPTTTACPYSNPSLCGGGGSTTTPAPRPPTPAPTIASQPLSLRPEACRPAAGGAVHTRGLDFACDIYIWAPLAGTCGVLLLSLVITLYCRRDQRLPPDAHKPPGGGSFRTPIQEEQADAHSTLAKIRVKFSRSADAPAYQQGQNQLYNELNLGRREEYDVLDKRRGRDPEMGGKPRRKNPQEGLYNELQKDKMAEAYSEIGMKGERRRGKGHDGLYQGLSTATKDTYDALHMQALPPRGSGEGRGSLLTCGDVEENPGPMALPVTALLLPLALLLHAARPNWVNVISDLKKIEDLIQSMHIDATLYTESDVHPSCKVTAMKCFLLELQVISLESGDASIHDTVENLIILANNSLSSNGNVTESGCKECEELEEKNIKEFLQSFVHIVQMFINTSTTTPAPRPPTPAPTIASQPLSLRPEACRPAAGGAVHTRGLDFACDIYIWAPLAGTCGVLLLSLVITLYC

SEQ ID NO: 1309 - protein, 771 aa, synthetic construct
  REGION 1..771: note = Synthetic
MALPVTALLLPLALLLHAARPQVQLVESGGGVVQPGRSLRLSCAASGFTFTNYDMHWVRQAPGKGLEWVTIIWHDGSNKYYLDSVRGRFTISRDNSKNTLYLQMNSLRAEDTAVYYCARGDNWNDEHHYFYYMDVWGKGTTVTVSSGGGGSGGGGSGGGGSEIVLTQSPDFQSVTPKEKVTITCRASQSIGSSLHWYQQKPDQSPKLLIKFASQSFSGVPSRFSGSGSGTDFTLTIHSLEAEDAATYYCHQSSSLPWTFGQGTKVEIKGSGGGGSCPYSNPRLCSGGGGSELPTQGTFSNVSTNVSPAKPTTTACPYSNPSLCGGGGSTTTPAPRPPTPAPTIASQPLSLRPEACRPAAGGAVHTRGLDFACDIYIWAPLAGTCGVLLLSLVITLYCRRDQRLPPDAHKPPGGGSFRTPIQEEQADAHSTLAKIRVKFSRSADAPAYQQGQNQLYNELNLGRREEYDVLDKRRGRDPEMGGKPRRKNPQEGLYNELQKDKMAEAYSEIGMKGERRRGKGHDGLYQGLSTATKDTYDALHMQALPPRGSGEGRGSLLTCGDVEENPGPMALPVTALLLPLALLLHAARPNWVNVISDLKKIEDLIQSMHIDATLYTESDVHPSCKVTAMKCFLLELQVISLESGDASIHDTVENLIILANNSLSSNGNVTESGCKECEELEEKNIKEFLQSFVHIVQMFINTSTTTPAPRPPTPAPTIASQPLSLRPEACRPAAGGAVHTRGLDFACDIYIWAPLAGTCGVLLLSLVITLYC

SEQ ID NO: 1310 - protein, 771 aa, synthetic construct
  REGION 1..771: note = Synthetic
MALPVTALLLPLALLLHAARPQVQLVESGGGVVQPGRSLRLSCAASGFTFSNYDMHWVRQAPGKGLEWVTIIWHDGSNKYYLDSVKGRFTISRDNSKNTLYLQMNSLRAEDTAVYYCARGDNWNDEHHYFYYMDVWGKGTTVTVSSGGGGSGGGGSGGGGSEIVLTQSPATLSLSPGERATLSCRASQSVSSSLAWYQQKPGQAPRLLIYDASNRATGIPARFSGSGSGTDFTLTISSLEPEDFAVYYCQQRSNWPLTFGGGTKVEIKGSGGGGSCPYSNPRLCSGGGGSELPTQGTFSNVSTNVSPAKPTTTACPYSNPSLCGGGGSTTTPAPRPPTPAPTIASQPLSLRPEACRPAAGGAVHTRGLDFACDIYIWAPLAGTCGVLLLSLVITLYCRRDQRLPPDAHKPPGGGSFRTPIQEEQADAHSTLAKIRVKFSRSADAPAYQQGQNQLYNELNLGRREEYDVLDKRRGRDPEMGGKPRRKNPQEGLYNELQKDKMAEAYSEIGMKGERRRGKGHDGLYQGLSTATKDTYDALHMQALPPRGSGEGRGSLLTCGDVEENPGPMALPVTALLLPLALLLHAARPNWVNVISDLKKIEDLIQSMHIDATLYTESDVHPSCKVTAMKCFLLELQVISLESGDASIHDTVENLIILANNSLSSNGNVTESGCKECEELEEKNIKEFLQSFVHIVQMFINTSTTTPAPRPPTPAPTIASQPLSLRPEACRPAAGGAVHTRGLDFACDIYIWAPLAGTCGVLLLSLVITLYC

SEQ ID NO: 1311 - protein, 767 aa, synthetic construct
  REGION 1..767: note = Synthetic
MALPVTALLLPLALLLHAARPEVQLVESGGGVVRPGGSLRLSCAASGFTFDDYGMSWVRQAPGKGLEWVSGINWNGGSTGYVDSVKGRFTISRDNAKNSLYLQMNSLRAEDTALYHCARPVTTDYYYYMDVWGKGTTVTVSSGGGGSGGGGSGGGGSEIVLTQSPGTLSLSPGERATLSCRASQSVSSSYLAWYQQKPGQAPRLLIYGASSRATGIPDRFSGSGSGTDFTLTISRLEPEDFAVYYCQQYGSSWTFGQGTKVEIKGSGGGGSCPYSNPRLCSGGGGSELPTQGTFSNVSTNVSPAKPTTTACPYSNPSLCGGGGSTTTPAPRPPTPAPTIASQPLSLRPEACRPAAGGAVHTRGLDFACDIYIWAPLAGTCGVLLLSLVITLYCRRDQRLPPDAHKPPGGGSFRTPIQEEQADAHSTLAKIRVKFSRSADAPAYQQGQNQLYNELNLGRREEYDVLDKRRGRDPEMGGKPRRKNPQEGLYNELQKDKMAEAYSEIGMKGERRRGKGHDGLYQGLSTATKDTYDALHMQALPPRGSGEGRGSLLTCGDVEENPGPMALPVTALLLPLALLLHAARPNWVNVISDLKKIEDLIQSMHIDATLYTESDVHPSCKVTAMKCFLLELQVISLESGDASIHDTVENLIILANNSLSSNGNVTESGCKECEELEEKNIKEFLQSFVHIVQMFINTSTTTPAPRPPTPAPTIASQPLSLRPEACRPAAGGAVHTRGLDFACDIYIWAPLAGTCGVLLLSLVITLYC

SEQ ID NO: 1312 - protein, 775 aa, synthetic construct
  REGION 1..775: note = Synthetic
MALPVTALLLPLALLLHAARPEVQLLESGGGLVQPGGSLRLSCAASGFTFSSYAMSWVRQAPGKGLEWVSAISGSGGSTYYADSVKGRFTISRDNSKNTLYLQMNSLRAEDTAVYYCAKKGTSYNWNDVHYYYYYYMDVWGKGTTVTVSSGGGGSGGGGSGGGGSEIVLTQSPGTLSLSPGERATLSCRASQSVSSSYLAWYQQKPGQAPRLLIYGASSRATGIPDRFSGSGSGTDFTLTISRLEPEDFAVYYCQQYGSSWTFGQGTKVEIKGSGGGGSCPYSNPRLCSGGGGSELPTQGTFSNVSTNVSPAKPTTTACPYSNPSLCGGGGSTTTPAPRPPTPAPTIASQPLSLRPEACRPAAGGAVHTRGLDFACDIYIWAPLAGTCGVLLLSLVITLYCRRDQRLPPDAHKPPGGGSFRTPIQEEQADAHSTLAKIRVKFSRSADAPAYQQGQNQLYNELNLGRREEYDVLDKRRGRDPEMGGKPRRKNPQEGLYNELQKDKMAEAYSEIGMKGERRRGKGHDGLYQGLSTATKDTYDALHMQALPPRGSGEGRGSLLTCGDVEENPGPMALPVTALLLPLALLLHAARPNWVNVISDLKKIEDLIQSMHIDATLYTESDVHPSCKVTAMKCFLLELQVISLESGDASIHDTVENLIILANNSLSSNGNVTESGCKECEELEEKNIKEFLQSFVHIVQMFINTSTTTPAPRPPTPAPTIASQPLSLRPEACRPAAGGAVHTRGLDFACDIYIWAPLAGTCGVLLLSLVITLYC

SEQ ID NO: 1313 - protein, 769 aa, synthetic construct
  REGION 1..769: note = Synthetic
MALPVTALLLPLALLLHAARPQLQLQESGPGLVKPSETLSLTCTVSGGSISSSSYYWGWIRQPPGKGLEWIGSIYYSGSTYYNPSLKSRVTISVDTSKNQFSLKLSSVTAADTAVYYCTTGTTAYYYYYYMDVWGKGTTVTVSSGGGGSGGGGSGGGGSEIVLTQSPGTLSLSPGERATLSCRASQSVSSSYLAWYQQKPGQAPRLLIYGASSRATGIPDRFSGSGSGTDFTLTISRLEPEDFAVYYCQQYGSSWTFGQGTKVEIKGSGGGGSCPYSNPRLCSGGGGSELPTQGTFSNVSTNVSPAKPTTTACPYSNPSLCGGGGSTTTPAPRPPTPAPTIASQPLSLRPEACRPAAGGAVHTRGLDFACDIYIWAPLAGTCGVLLLSLVITLYCRRDQRLPPDAHKPPGGGSFRTPIQEEQADAHSTLAKIRVKFSRSADAPAYQQGQNQLYNELNLGRREEYDVLDKRRGRDPEMGGKPRRKNPQEGLYNELQKDKMAEAYSEIGMKGERRRGKGHDGLYQGLSTATKDTYDALHMQALPPRGSGEGRGSLLTCGDVEENPGPMALPVTALLLPLALLLHAARPNWVNVISDLKKIEDLIQSMHIDATLYTESDVHPSCKVTAMKCFLLELQVISLESGDASIHDTVENLIILANNSLSSNGNVTESGCKECEELEEKNIKEFLQSFVHIVQMFINTSTTTPAPRPPTPAPTIASQPLSLRPEACRPAAGGAVHTRGLDFACDIYIWAPLAGTCGVLLLSLVITLYC

SEQ ID NO: 1314 - protein, 768 aa, synthetic construct
  REGION 1..768: note = Synthetic
MALPVTALLLPLALLLHAARPEVQLLESGGGLVQPGGSLRLSCAASGFTFSSYAMTWVRQAPGKGLEWVSAISGSGGSTYYADSVKGRFTISRDNSKNTLYLQMNSLRAEDTAVYYCARGGYNWHYYYYMDVWGKGTTVTVSSGGGGSGGGGSGGGGSEIVLTQSPGTLSLSPGERATLSCRASQSVSSSYLAWYQQKPGQAPRLLIYGASSRATGIPDRFSGSGSGTDFTLTISRLEPEDFAVYYCQQYGSSWTFGQGTKVEIKGSGGGGSCPYSNPRLCSGGGGSELPTQGTFSNVSTNVSPAKPTTTACPYSNPSLCGGGGSTTTPAPRPPTPAPTIASQPLSLRPEACRPAAGGAVHTRGLDFACDIYIWAPLAGTCGVLLLSLVITLYCRRDQRLPPDAHKPPGGGSFRTPIQEEQADAHSTLAKIRVKFSRSADAPAYQQGQNQLYNELNLGRREEYDVLDKRRGRDPEMGGKPRRKNPQEGLYNELQKDKMAEAYSEIGMKGERRRGKGHDGLYQGLSTATKDTYDALHMQALPPRGSGEGRGSLLTCGDVEENPGPMALPVTALLLPLALLLHAARPNWVNVISDLKKIEDLIQSMHIDATLYTESDVHPSCKVTAMKCFLLELQVISLESGDASIHDTVENLIILANNSLSSNGNVTESGCKECEELEEKNIKEFLQSFVHIVQMFINTSTTTPAPRPPTPAPTIASQPLSLRPEACRPAAGGAVHTRGLDFACDIYIWAPLAGTCGVLLLSLVITLYC

SEQ ID NO: 1315 - protein, 772 aa, synthetic construct
  REGION 1..772: note = Synthetic
MALPVTALLLPLALLLHAARPQVQLVESGGGVVQPGRSLRLSCAASGFTFSSYDMHWVRQAPGKGLEWVSVIWYDGSNKKYGDSAKGRFTISRDNSKNTLDLQMNSLRAEDTAVYYCARGDNWNDEGGYYYYYMDVWGKGTTVTVSSGGGGSGGGGSGGGGSEIVLTQSPDFQSVTPKEKVTITCRASQNIGSSLHWYQQKPDQSPKLLIKFASQSISGVPSRFSGSGSGTDFTLTINSLEAEDAAAYYCHQSSSLPWTFGQGTKVEIKGSGGGGSCPYSNPRLCSGGGGSELPTQGTFSNVSTNVSPAKPTTTACPYSNPSLCGGGGSTTTPAPRPPTPAPTIASQPLSLRPEACRPAAGGAVHTRGLDFACDIYIWAPLAGTCGVLLLSLVITLYCRRDQRLPPDAHKPPGGGSFRTPIQEEQADAHSTLAKIRVKFSRSADAPAYQQGQNQLYNELNLGRREEYDVLDKRRGRDPEMGGKPRRKNPQEGLYNELQKDKMAEAYSEIGMKGERRRGKGHDGLYQGLSTATKDTYDALHMQALPPRGSGEGRGSLLTCGDVEENPGPMALPVTALLLPLALLLHAARPNWVNVISDLKKIEDLIQSMHIDATLYTESDVHPSCKVTAMKCFLLELQVISLESGDASIHDTVENLIILANNSLSSNGNVTESGCKECEELEEKNIKEFLQSFVHIVQMFINTSTTTPAPRPPTPAPTIASQPLSLRPEACRPAAGGAVHTRGLDFACDIYIWAPLAGTCGVLLLSLVITLYC

SEQ ID NO: 1316 - protein, 772 aa, synthetic construct
  REGION 1..772: note = Synthetic
MALPVTALLLPLALLLHAARPQVQLVESGGGVVQPGRSLRLSCAASGFTFSSYDMHWVRQAPGKGLEWVSVIWYDGSNKKYGDSAKGRFTISRDNSKNTLDLQMNSLRAEDTAVYYCARGDNWNDEGGYYYYYMDVWGKGTTVTVSSGGGGSGGGGSGGGGSDIQMTQSPSSLSTSVGDRVTITCRASQGISNYLAWFQQKPGKAPKSLIYAASSLQSGVPSKFSGSGSGTDFSLTISSLQPEDFATYYCQQYNSYPITFGQGTRLEIKGSGGGGSCPYSNPRLCSGGGGSELPTQGTFSNVSTNVSPAKPTTTACPYSNPSLCGGGGSTTTPAPRPPTPAPTIASQPLSLRPEACRPAAGGAVHTRGLDFACDIYIWAPLAGTCGVLLLSLVITLYCRRDQRLPPDAHKPPGGGSFRTPIQEEQADAHSTLAKIRVKFSRSADAPAYQQGQNQLYNELNLGRREEYDVLDKRRGRDPEMGGKPRRKNPQEGLYNELQKDKMAEAYSEIGMKGERRRGKGHDGLYQGLSTATKDTYDALHMQALPPRGSGEGRGSLLTCGDVEENPGPMALPVTALLLPLALLLHAARPNWVNVISDLKKIEDLIQSMHIDATLYTESDVHPSCKVTAMKCFLLELQVISLESGDASIHDTVENLIILANNSLSSNGNVTESGCKECEELEEKNIKEFLQSFVHIVQMFINTSTTTPAPRPPTPAPTIASQPLSLRPEACRPAAGGAVHTRGLDFACDIYIWAPLAGTCGVLLLSLVITLYC

SEQ ID NO: 1317 - protein, 769 aa, synthetic construct
  REGION 1..769: note = Synthetic
MALPVTALLLPLALLLHAARPQVQLVQSGAEVKKSGASVKVSCKASGYTLTSYGISWVRQAPGQGLEWMGWISAYNGNINYAQKFQGRVTMTTDTSTSTAYMELRSLRSDDTAVYYCVRDGDRYNWNHSYMDVWGKGTTVTVSSGGGGSGGGGSGGGGSEIVLTQSPDFQSVTPKEKVTITCRASQNIGSSLHWYQQKPDQSPKLLIKFASQSISGVPSRFSGSGSGTDFTLTINSLEAEDAAAYYCHQSSSLPWTFGQGTKVEIKGSGGGGSCPYSNPRLCSGGGGSELPTQGTFSNVSTNVSPAKPTTTACPYSNPSLCGGGGSTTTPAPRPPTPAPTIASQPLSLRPEACRPAAGGAVHTRGLDFACDIYIWAPLAGTCGVLLLSLVITLYCRRDQRLPPDAHKPPGGGSFRTPIQEEQADAHSTLAKIRVKFSRSADAPAYQQGQNQLYNELNLGRREEYDVLDKRRGRDPEMGGKPRRKNPQEGLYNELQKDKMAEAYSEIGMKGERRRGKGHDGLYQGLSTATKDTYDALHMQALPPRGSGEGRGSLLTCGDVEENPGPMALPVTALLLPLALLLHAARPNWVNVISDLKKIEDLIQSMHIDATLYTESDVHPSCKVTAMKCFLLELQVISLESGDASIHDTVENLIILANNSLSSNGNVTESGCKECEELEEKNIKEFLQSFVHIVQMFINTSTTTPAPRPPTPAPTIASQPLSLRPEACRPAAGGAVHTRGLDFACDIYIWAPLAGTCGVLLLSLVITLYC

SEQ ID NO: 1318 - protein, 769 aa, synthetic construct
  REGION 1..769: note = Synthetic
MALPVTALLLPLALLLHAARPQVQLVQSGAEVKKSGASVKVSCKASGYTLTSYGISWVRQAPGQGLEWMGWISAYNGNINYAQKFQGRVTMTTDTSTSTAYMELRSLRSDDTAVYYCVRDGDRYNWNHSYMDVWGKGTTVTVSSGGGGSGGGGSGGGGSDIQMTQSPSSLSTSVGDRVTITCRASQGISNYLAWFQQKPGKAPKSLIYAASSLQSGVPSKFSGSGSGTDFSLTISSLQPEDFATYYCQQYNSYPITFGQGTRLEIKGSGGGGSCPYSNPRLCSGGGGSELPTQGTFSNVSTNVSPAKPTTTACPYSNPSLCGGGGSTTTPAPRPPTPAPTIASQPLSLRPEACRPAAGGAVHTRGLDFACDIYIWAPLAGTCGVLLLSLVITLYCRRDQRLPPDAHKPPGGGSFRTPIQEEQADAHSTLAKIRVKFSRSADAPAYQQGQNQLYNELNLGRREEYDVLDKRRGRDPEMGGKPRRKNPQEGLYNELQKDKMAEAYSEIGMKGERRRGKGHDGLYQGLSTATKDTYDALHMQALPPRGSGEGRGSLLTCGDVEENPGPMALPVTALLLPLALLLHAARPNWVNVISDLKKIEDLIQSMHIDATLYTESDVHPSCKVTAMKCFLLELQVISLESGDASIHDTVENLIILANNSLSSNGNVTESGCKECEELEEKNIKEFLQSFVHIVQMFINTSTTTPAPRPPTPAPTIASQPLSLRPEACRPAAGGAVHTRGLDFACDIYIWAPLAGTCGVLLLSLVITLYC

SEQ ID NO: 1319 - protein, 768 aa, synthetic construct
  REGION 1..768: note = Synthetic
MALPVTALLLPLALLLHAARPEVQLLESGGDLVQPGGSLRLSCAASGFTFSTYAMTWVRQAPGKGLEWVSAISGTSGSTYYADSVKGRFTISRDNSKSTLYLHMNSLRTEDTAVYYCARGGYNWHYYYYMDVWGKGTTVTVSSGGGGSGGGGSGGGGSEIVLTQSPDFQSVTPKEKVTITCRASQSIGSSLHWYQQKPDQSPKLLIKYVSQSISGVPSRFSGSGSGTDFTLTINSLEAEDAAAYYCHQSSSLPWTFGQGTKVEIKGSGGGGSCPYSNPRLCSGGGGSELPTQGTFSNVSTNVSPAKPTTTACPYSNPSLCGGGGSTTTPAPRPPTPAPTIASQPLSLRPEACRPAAGGAVHTRGLDFACDIYIWAPLAGTCGVLLLSLVITLYCRRDQRLPPDAHKPPGGGSFRTPIQEEQADAHSTLAKIRVKFSRSADAPAYQQGQNQLYNELNLGRREEYDVLDKRRGRDPEMGGKPRRKNPQEGLYNELQKDKMAEAYSEIGMKGERRRGKGHDGLYQGLSTATKDTYDALHMQALPPRGSGEGRGSLLTCGDVEENPGPMALPVTALLLPLALLLHAARPNWVNVISDLKKIEDLIQSMHIDATLYTESDVHPSCKVTAMKCFLLELQVISLESGDASIHDTVENLIILANNSLSSNGNVTESGCKECEELEEKNIKEFLQSFVHIVQMFINTSTTTPAPRPPTPAPTIASQPLSLRPEACRPAAGGAVHTRGLDFACDIYIWAPLAGTCGVLLLSLVITLYC

SEQ ID NO: 1320 - protein, 769 aa, synthetic construct
  REGION 1..769: note = Synthetic
MALPVTALLLPLALLLHAARPEVQLLESGGDLVQPGGSLRLSCAASGFTFSTYAMTWVRQAPGKGLEWVSAISGTSGSTYYADSVKGRFTISRDNSKSTLYLHMNSLRTEDTAVYYCARGGYNWHYYYYMDVWGKGTTVTVSSGGGGSGGGGSGGGGSEIVMTQSPATLSLSPGERATLSCRASQSVSSSYLSWYQQKPGLAPRLLIYGASTRATGIPARFSGSGSGTDFTLTISSLQPEDFAVYYCQQDYNLPPTFGQGTKVEIKGSGGGGSCPYSNPRLCSGGGGSELPTQGTFSNVSTNVSPAKPTTTACPYSNPSLCGGGGSTTTPAPRPPTPAPTIASQPLSLRPEACRPAAGGAVHTRGLDFACDIYIWAPLAGTCGVLLLSLVITLYCRRDQRLPPDAHKPPGGGSFRTPIQEEQADAHSTLAKIRVKFSRSADAPAYQQGQNQLYNELNLGRREEYDVLDKRRGRDPEMGGKPRRKNPQEGLYNELQKDKMAEAYSEIGMKGERRRGKGHDGLYQGLSTATKDTYDALHMQALPPRGSGEGRGSLLTCGDVEENPGPMALPVTALLLPLALLLHAARPNWVNVISDLKKIEDLIQSMHIDATLYTESDVHPSCKVTAMKCFLLELQVISLESGDASIHDTVENLIILANNSLSSNGNVTESGCKECEELEEKNIKEFLQSFVHIVQMFINTSTTTPAPRPPTPAPTIASQPLSLRPEACRPAAGGAVHTRGLDFACDIYIWAPLAGTCGVLLLSLVITLYC

SEQ ID NO: 1321 - DNA, 2316 bp, synthetic construct
  misc_feature 1..2316: note = Synthetic
  source 1..2316: mol_type = other DNA
atggccttaccagtgaccgccttgctcctgccgctggccttgctgctccacgccgccaggccgcaggtgcagctggtggagtctgggggaggcgtggtccagcctgggaggtccctgagactctcctgtgcagcgtctggattcaccttcaataattatgacatgtactgggtccgccaggccccaggcaaggggctggagtgggtggcagttacatggtatgatggaagtaataaatactatgcagactccgtgaagggccgattcaccatctccagagacaattccaagaacacgctgtatctgcaaatgaacagcctgagagccgaggacacggctgtgtattactgtgcgagaggtgacaactggaatgacgaacaccactatttttactacatggacgtctggggcaaagggaccacggtcaccgtctcctcaggtggaggcggttcaggcggaggtggctctggcggtggcggatcggaaattgtgctgactcagtctccagactttcagtctgtgactccaaaggagaaagtcaccatcacctgccgggccagtcagagcattggtagtagcttacactggtaccagcagaaaccagatcagtctccaaagctcctcatcaagtttgcttcccagtccttctcaggggtcccctcgaggttcagtggcagtggatctgggacagatttcaccctcaccatccatagcctggaagctgaagatgctgcaacgtattactgtcatcagagtagtagtttaccgtggacgttcggccaagggaccaaggtggaaatcaaaggctctggcggcggcggcagctgcccttattctaaccctaggctctgcagcggaggcggcggcagcgagctgcctacccaaggcacatttagcaacgtctccaccaacgtgtcccctgccaaacccaccaccacagcttgtccttacagcaatcctagcctgtgcggcggcggcggcagcaccacgacgccagcgccgcggccaccaacaccggcgcccaccatcgcgtcgcagcccctgtccctgcgcccagaggcgtgccggccagcggcggggggcgcagtgcacacgagggggctggacttcgcctgtgatatctacatctgggcgcccttggccgggacttgtggggtccttctcctgtcactggttatcaccctttactgccggagggaccagaggctgccccccgatgcccacaagccccctgggggaggcagtttccggacccccatccaagaggagcaggccgacgcccactccaccctggccaagatcagagtgaagttcagcaggagcgcagacgcccccgcgtaccagcagggccagaaccagctctataacgagctcaatctaggacgaagagaggagtacgatgttttggacaagagacgtggccgggaccctgagatggggggaaagccgagaaggaagaaccctcaggaaggcctgtacaatgaactgcagaaagataagatggcggaggcctacagtgagattgggatgaaaggcgagcgccggaggggcaaggggcacgatggcctttaccagggtctcagtacagccaccaaggacacctacgacgcccttcacatgcaggccctgccccctcgcggctctggcgagggaaggggttccctgcttacttgcggcgacgtcgaagagaatcccggtccgatggccctcccagtaactgccctccttttgcccctcgcactccttcttcatgccgctcgccccaactgggtcaacgtgattagcgatttgaagaaaatcgaggaccttatacagtctatgcatattgacgctacactgtatactgagagtgatgtacacccgtcctgtaaggtaacggccatgaaatgctttcttctggagctccaggtcatcagcttggagtctggggacgcaagcatccacgatacggttgaaaacctcatcatccttgcgaacaactctctctcatctaatggaaacgttacagagagtgggtgtaaggagtgcgaagagttggaagaaaaaaacatcaaagaatttcttcaatccttcgttcacatagtgcaaatgttcattaacacgtccactaccacacccgccccgaggccacctacgccggcaccgactatcgccagtcaacccctctctctgcgccccgaggcttgccggcctgcggctggtggggcggtccacacccggggcctggattttgcgtgcgatatatacatctgggcacctcttgccggcacctgcggagtgctgcttctctcactcgttattacgctgtactgctaa

SEQ ID NO: 1322 - DNA, 2316 bp, synthetic construct
  misc_feature 1..2316: note = Synthetic
  source 1..2316: mol_type = other DNA
atggccttaccagtgaccgccttgctcctgccgctggccttgctgctccacgccgccaggccgcaggtgcagctggtggagtctgggggaggcgtggtccagcctgggaggtccctgagactctcctgtgcagcgtctgggttcaccttcagtaactatgacatgcactgggtccgccaggccccaggcaaggggctggagtgggtgacaattatatggcatgatgcaagtaataaatattatttagactccgtgaagggccgattcaccatctccagagacaattccaagaacacgctgtatctgcaaatgaacagcctgagagccgaggacacggctgtgtattactgtgcgagaggtgacaactggaacgacgaacaccactacttctactacatggacgtctggggcaaagggaccacggtcaccgtctcctcaggtggaggcggttcaggcggaggtggctctggcggtggcggatcggaaattgtgctgactcagtctccagactttcagtctgtgactccaaaggagaaagtcaccatcacctgccgggccagtcagagcattggtagtagcttacactggtaccagcagaaaccagatcagtctccaaagctcctcatcaagtttgcttcccagtccttctcaggggtcccctcgaggttcagtggcagtggatctgggacagatttcaccctcaccatccatagcctggaagctgaagatgctgcaacgtattactgtcatcagagtagtagtttaccgtggacgttcggccaagggaccaaggtggaaatcaaaggctctggcggcggcggcagctgcccttattctaaccctaggctctgcagcggaggcggcggcagcgagctgcctacccaaggcacatttagcaacgtctccaccaacgtgtcccctgccaaacccaccaccacagcttgtccttacagcaatcctagcctgtgcggcggcggcggcagcaccacgacgccagcgccgcggccaccaacaccggcgcccaccatcgcgtcgcagcccctgtccctgcgcccagaggcgtgccggccagcggcggggggcgcagtgcacacgagggggctggacttcgcctgtgatatctacatctgggcgcccttggccgggacttgtggggtccttctcctgtcactggttatcaccctttactgccggagggaccagaggctgccccccgatgcccacaagccccctgggggaggcagtttccggacccccatccaagaggagcaggccgacgcccactccaccctggccaagatcagagtgaagttcagcaggagcgcagacgcccccgcgtaccagcagggccagaaccagctctataacgagctcaatctaggacgaagagaggagtacgatgttttggacaagagacgtggccgggaccctgagatggggggaaagccgagaaggaagaaccctcaggaaggcctgtacaatgaactgcagaaagataagatggcggaggcctacagtgagattgggatgaaaggcgagcgccggaggggcaaggggcacgatggcctttaccagggtctcagtacagccaccaaggacacctacgacgcccttcacatgcaggccctgccccctcgcggctctggcgagggaaggggttccctgcttacttgcggcgacgtcgaagagaatcccggtccgatggccctcccagtaactgccctccttttgcccctcgcactccttcttcatgccgctcgccccaactgggtcaacgtgattagcgatttgaagaaaatcgaggaccttatacagtctatgcatattgacgctacactgtatactgagagtgatgtacacccgtcctgtaaggtaacggccatgaaatgctttcttctggagctccaggtcatcagcttggagtctggggacgcaagcatccacgatacggttgaaaacctcatcatccttgcgaacaactctctctcatctaatggaaacgttacagagagtgggtgtaaggagtgcgaagagttggaagaaaaaaacatcaaagaatttcttcaatccttcgttcacatagtgcaaatgttcattaacacgtccactaccacacccgccccgaggccacctacgccggcaccgactatcgccagtcaacccctctctctgcgccccgaggcttgccggcctgcggctggtggggcggtccacacccggggcctggattttgcgtgcgatatatacatctgggcacctcttgccggcacctgcggagtgctgcttctctcactcgttattacgctgtactgctaa

SEQ ID NO: 1323 - DNA, 2316 bp, synthetic construct
  misc_feature 1..2316: note = Synthetic
  source 1..2316: mol_type = other DNA
atggccttaccagtgaccgccttgctcctgccgctggccttgctgctccacgccgccaggccgcaggtgcagctggtggagtctgggggaggcgtggtccagcctgggaggtccctgagactctcctgtgcagcgtctgggttcaccttcagtaactatgacatgcactgggtccgccaggccccaggcaaggggctggagtgggtgacaattatatggcatgatggaagtaataaatattatttagactccgtgaagggccgattcaccatctccagagacaattccaagaacacgctgtatctgcaaatgaacagcctgagagccgaggacacggctgtgtattactgtgcgagaggtgacaactggaacgacgaacaccactacttctactacatggacgtctggggcaaagggaccacggtcaccgtctcctcaggtggaggcggttcaggcggaggtggctctggcggtggcggatcggaaattgtgctgactcagtctccagactttcagtctgtgactccaaaggagaaagtcaccatcacctgccgggccagtcagagcattggtagtagcttacactggtaccagcagaaaccagatcagtctccaaagctcctcatcaagtttgcttcccagtccttctcaggggtcccctcgaggttcagtggcagtggatctgggacagatttcaccctcaccatccatagcctggaagctgaagatgctgcaacgtattactgtcatcagagtagtagtttaccgtggacgttcggccaagggaccaaggtggaaatcaaaggctctggcggcggcggcagctgcccttattctaaccctaggctctgcagcggaggcggcggcagcgagctgcctacccaaggcacatttagcaacgtctccaccaacgtgtcccctgccaaacccaccaccacagcttgtccttacagcaatcctagcctgtgcggcggcggcggcagcaccacgacgccagcgccgcggccaccaacaccggcgcccaccatcgcgtcgcagcccctgtccctgcgcccagaggcgtgccggccagcggcggggggcgcagtgcacacgagggggctggacttcgcctgtgatatctacatctgggcgcccttggccgggacttgtggggtccttctcctgtcactggttatcaccctttactgccggagggaccagaggctgccccccgatgcccacaagccccctgggggaggcagtttccggacccccatccaagaggagcaggccgacgcccactccaccctggccaagatcagagtgaagttcagcaggagcgcagacgcccccgcgtaccagcagggccagaaccagctctataacgagctcaatctaggacgaagagaggagtacgatgttttggacaagagacgtggccgggaccctgagatggggggaaagccgagaaggaagaaccctcaggaaggcctgtacaatgaactgcagaaagataagatggcggaggcctacagtgagattgggatgaaaggcgagcgccggaggggcaaggggcacgatggcctttaccagggtctcagtacagccaccaaggacacctacgacgcccttcacatgcaggccctgccccctcgcggctctggcgagggaaggggttccctgcttacttgcggcgacgtcgaagagaatcccggtccgatggccctcccagtaactgccctccttttgcccctcgcactccttcttcatgccgctcgccccaactgggtcaacgtgattagcgatttgaagaaaatcgaggaccttatacagtctatgcatattgacgctacactgtatactgagagtgatgtacacccgtcctgtaaggtaacggccatgaaatgctttcttctggagctccaggtcatcagcttggagtctggggacgcaagcatccacgatacggttgaaaacctcatcatccttgcgaacaactctctctcatctaatggaaacgttacagagagtgggtgtaaggagtgcgaagagttggaagaaaaaaacatcaaagaatttcttcaatccttcgttcacatagtgcaaatgttcattaacacgtccactaccacacccgccccgaggccacctacgccggcaccgactatcgccagtcaacccctctctctgcgccccgaggcttgccggcctgcggctggtggggcggtccacacccggggcctggattttgcgtgcgatatatacatctgggcacctcttgccggcacctgcggagtgctgcttctctcactcgttattacgctgtactgctaa

SEQ ID NO: 1324 - DNA, 2298 bp, synthetic construct
  misc_feature 1..2298: note = Synthetic
  source 1..2298: mol_type = other DNA
atggccttaccagtgaccgccttgctcctgccgctggccttgctgctccacgccgccaggccggaggtgcagctgctggagtctgggggaggcttggtacagcctggggggtccctgagactctcctgtgcagcctctggattcacctttagcatctatgccatgagctgggtccgccaggctccagggaaggggctggagtgggtctcagctattagtggtggtggtgataccacatactacgcagactccgtgaagggccggttcaccatctccagagacaattccaagaccacgctggatctgcaaatgaacagcctgagagccgaggacacggccgtatattactgtgcgaaacacactagctactacatggacgtctggggcaaagggaccacggtcaccgtctcctcaggtggaggcggttcaggcggaggtggctctggcggtggcggatcgcagactgtggtgacccaggagccatcgctctcagtgtcccctggagggacagtcacactcacttgtggcttgagctctggctcagtctctactagttactaccccagctggtaccagcagaccccaggccaggctccacgcacgctcatctacagcacaaatattcggtcttctggggtccctgatcgcttctctggctccatccttgggaacaaagctgccctcaccatcacgggggcccaggcagatgatgaatctgattattattgtaagctgtatatgggaagtggcattattttcggcagtggaaccaaggtcactgtcctaggctctggcggcggcggcagctgcccttattctaaccctaggctctgcagcggaggcggcggcagcgagctgcctacccaaggcacatttagcaacgtctccaccaacgtgtcccctgccaaacccaccaccacagcttgtccttacagcaatcctagcctgtgcggcggcggcggcagcaccacgacgccagcgccgcggccaccaacaccggcgcccaccatcgcgtcgcagcccctgtccctgcgcccagaggcgtgccggccagcggcggggggcgcagtgcacacgagggggctggacttcgcctgtgatatctacatctgggcgcccttggccgggacttgtggggtccttctcctgtcactggttatcaccctttactgccggagggaccagaggctgccccccgatgcccacaagccccctgggggaggcagtttccggacccccatccaagaggagcaggccgacgcccactccaccctggccaagatcagagtgaagttcagcaggagcgcagacgcccccgcgtaccagcagggccagaaccagctctataacgagctcaatctaggacgaagagaggagtacgatgttttggacaagagacgtggccgggaccctgagatggggggaaagccgagaaggaagaaccctcaggaaggcctgtacaatgaactgcagaaagataagatggcggaggcctacagtgagattgggatgaaaggcgagcgccggaggggcaaggggcacgatggcctttaccagggtctcagtacagccaccaaggacacctacgacgcccttcacatgcaggccctgccccctcgcggctctggcgagggaaggggttccctgcttacttgcggcgacgtcgaagagaatcccggtccgatggccctcccagtaactgccctccttttgcccctcgcactccttcttcatgccgctcgccccaactgggtcaacgtgattagcgatttgaagaaaatcgaggaccttatacagtctatgcatattgacgctacactgtatactgagagtgatgtacacccgtcctgtaaggtaacggccatgaaatgctttcttctggagctccaggtcatcagcttggagtctggggacgcaagcatccacgatacggttgaaaacctcatcatccttgcgaacaactctctctcatctaatggaaacgttacagagagtgggtgtaaggagtgcgaagagttggaagaaaaaaacatcaaagaatttcttcaatccttcgttcacatagtgcaaatgttcattaacacgtccactaccacacccgccccgaggccacctacgccggcaccgactatcgccagtcaacccctctctctgcgccccgaggcttgccggcctgcggctggtggggcggtccacacccggggcctggattttgcgtgcgatatatacatctgggcacctcttgccggcacctgcggagtgctgcttctctcactcgttattacgctgtactgctaa

SEQ ID NO: 1325 - DNA, 2316 bp, synthetic construct
  misc_feature 1..2316: note = Synthetic
  source 1..2316: mol_type = other DNA
atggccttaccagtgaccgccttgctcctgccgctggccttgctgctccacgccgccaggccgcaggtgcagctggtggagtctgggggaggcgtggtccagcctgggaggtccctgagactctcctgtgcagcgtctggattcaccttcagtaactatgacaagcactgggtccgccaggccccaggcaaggggctggagtgggtggcagttatatggtatgatggaagtaataagtactatgcagactccgtgaagggccgattcaccatttccagagacaattccaagaacacgctgtatctacaaatgaacagcctgagagccgaggacacggctatgtattactgtgcgagaggtgacaactggaacgacgaacaccactacttctactacatggacgtctggggcaaagggaccacggtcaccgtctcctcaggtggaggcggttcaggcggaggtggctctggcggtggcggatcggaaattgtgctgactcagtctccagactttcagtctgtgactccaaaggagaaagtcaccatcacctgccgggccagtcagagcattggtagtagcttacactggtaccagcagaaaccagatcagtctccaaagctcctcatcaagtttgcttcccagtccttctcaggggtcccctcgaggttcagtggcagtggatctgggacagatttcaccctcaccatccatagcctggaagctgaagatgctgcaacgtattactgtcatcagagtagtagtttaccgtggacgttcggccaagggaccaaggtggaaatcaaaggctctggcggcggcggcagctgcccttattctaaccctaggctctgcagcggaggcggcggcagcgagctgcctacccaaggcacatttagcaacgtctccaccaacgtgtcccctgccaaacccaccaccacagcttgtccttacagcaatcctagcctgtgcggcggcggcggcagcaccacgacgccagcgccgcggccaccaacaccggcgcccaccatcgcgtcgcagcccctgtccctgcgcccagaggcgtgccggccagcggcggggggcgcagtgcacacgagggggctggacttcgcctgtgatatctacatctgggcgcccttggccgggacttgtggggtccttctcctgtcactggttatcaccctttactgccggagggaccagaggctgccccccgatgcccacaagccccctgggggaggcagtttccggacccccatccaagaggagcaggccgacgcccactccaccctggccaagatcagagtgaagttcagcaggagcgcagacgcccccgcgtaccagcagggccagaaccagctctataacgagctcaatctaggacgaagagaggagtacgatgttttggacaagagacgtggccgggaccctgagatggggggaaagccgagaaggaagaaccctcaggaaggcctgtacaatgaactgcagaaagataagatggcggaggcctacagtgagattgggatgaaaggcgagcgccggaggggcaaggggcacgatggcctttaccagggtctcagtacagccaccaaggacacctacgacgcccttcacatgcaggccctgccccctcgcggctctggcgagggaaggggttccctgcttacttgcggcgacgtcgaagagaatcccggtccgatggccctcccagtaactgccctccttttgcccctcgcactccttcttcatgccgctcgccccaactgggtcaacgtgattagcgatttgaagaaaatcgaggaccttatacagtctatgcatattgacgctacactgtatactgagagtgatgtacacccgtcctgtaaggtaacggccatgaaatgctttcttctggagctccaggtcatcagcttggagtctggggacgcaagcatccacgatacggttgaaaacctcatcatccttgcgaacaactctctctcatctaatggaaacgttacagagagtgggtgtaaggagtgcgaagagttggaagaaaaaaacatcaaagaatttcttcaatccttcgttcacatagtgcaaatgttcattaacacgtccactaccacacccgccccgaggccacctacgccggcaccgactatcgccagtcaacccctctctctgcgccccgaggcttgccggcctgcggctggtggggcggtccacacccggggcctggattttgcgtgcgatatatacatctgggcacctcttgccggcacctgcggagtgctgcttctctcactcgttattacgctgtactgctaa

SEQ ID NO: 1326 - DNA, 2310 bp, synthetic construct
  misc_feature 1..2310: note = Synthetic
  source 1..2310: mol_type = other DNA
atggccttaccagtgaccgccttgctcctgccgctggccttgctgctccacgccgccaggccgcaggttcagttggtacagtctggagctgaggtgaagaagcctggggcctcagtgaaggtctcctgtaaggcttctggttacacctttaccaactatggtttcagctgggtgcgacaggcccctggacaagggcttgactggatgggatggatcagcgcttacaatggttacacaaattatacacagaaactccagggcagagtcaccatgaccactgacacatccacgaccacagcctacatggagctgaggagcctgagatctgacgacacggccgtctattactgtgcgagaagaggactactctactactactactccatggacgtctggggcaaagggaccacggtcaccgtctcctcaggtggaggcggttcaggcggaggtggctctggcggtggcggatcggaaattgtgttgacgcagtctccagccaccctgtctttgtctccaggggaaagagccaccctctcctgcggggccagtcagagtgtttacaacagttacttagcctggtaccagcagaaacctggcctggcgcccaggctcctcatctatgatgcatccctcagggccactggcgtcccagacaggttcagtggcagtgggtctgggacagacttcactctcaccatcagcacactggagcctgaagattttgcagtgtattactgtcagcagtatggtggctcacccatgtacacttttggccaggggaccaagctggagatcaaaggctctggcggcggcggcagctgcccttattctaaccctaggctctgcagcggaggcggcggcagcgagctgcctacccaaggcacatttagcaacgtctccaccaacgtgtcccctgccaaacccaccaccacagcttgtccttacagcaatcctagcctgtgcggcggcggcggcagcaccacgacgccagcgccgcggccaccaacaccggcgcccaccatcgcgtcgcagcccctgtccctgcgcccagaggcgtgccggccagcggcggggggcgcagtgcacacgagggggctggacttcgcctgtgatatctacatctgggcgcccttggccgggacttgtggggtccttctcctgtcactggttatcaccctttactgccggagggaccagaggctgccccccgatgcccacaagccccctgggggaggcagtttccggacccccatccaagaggagcaggccgacgcccactccaccctggccaagatcagagtgaagttcagcaggagcgcagacgcccccgcgtaccagcagggccagaaccagctctataacgagctcaatctaggacgaagagaggagtacgatgttttggacaagagacgtggccgggaccctgagatggggggaaagccgagaaggaagaaccctcaggaaggcctgtacaatgaactgcagaaagataagatggcggaggcctacagtgagattgggatgaaaggcgagcgccggaggggcaaggggcacgatggcctttaccagggtctcagtacagccaccaaggacacctacgacgcccttcacatgcaggccctgccccctcgcggctctggcgagggaaggggttccctgcttacttgcggcgacgtcgaagagaatcccggtccgatggccctcccagtaactgccctccttttgcccctcgcactccttcttcatgccgctcgccccaactgggtcaacgtgattagcgatttgaagaaaatcgaggaccttatacagtctatgcatattgacgctacactgtatactgagagtgatgtacacccgtcctgtaaggtaacggccatgaaatgctttcttctggagctccaggtcatcagcttggagtctggggacgcaagcatccacgatacggttgaaaacctcatcatccttgcgaacaactctctctcatctaatggaaacgttacagagagtgggtgtaaggagtgcgaagagttggaagaaaaaaacatcaaagaatttcttcaatccttcgttcacatagtgcaaatgttcattaacacgtccactaccacacccgccccgaggccacctacgccggcaccgactatcgccagtcaacccctctctctgcgccccgaggcttgccggcctgcggctggtggggcggtccacacccggggcctggattttgcgtgcgatatatacatctgggcacctcttgccggcacctgcggagtgctgcttctctcactcgttattacgctgtactgctaa

SEQ ID NO: 1327 - DNA, 2298 bp, synthetic construct
  misc_feature 1..2298: note = Synthetic
  source 1..2298: mol_type = other DNA
atggccttaccagtgaccgccttgctcctgccgctggccttgctgctccacgccgccaggccggaggtgcagctgctggagtctgggggaggcctggtacagcctggggggtccctgagactctcctgtacagcctctggattcacctttagcagctttgccatgagctgggtccgccaggctccagggaaggggctggagtgggtctcagctatgagtggtagtggtgataccacatactacgcagactccgtgaagggccggttcaccatctcccgagacaattccaagaccacgctgtatctgcaaatgaacagcctgagagccgaggacacggccgtatattcctgtgcgaagcacactacctactacatggacgtctggggcaaagggaccacggtcaccgtctcctcaggtggaggcggttcaggcggaggtggctctggcggtggcggatcgcagactgtggtgacccaggagccatcgctctcagtgtcccctggagggacagtcacactcacttgtggcttgagctctggctcagtctctactagtgactaccccagctggtaccagcagaccccaggccaggctccacgcacgctcatctacagaacaaacactcgctcttctggggtccctgatcgcttctctggctccatccttgggaacaaagctgccctcaccatcacgggggcccaggcagatgatgaatctgattattactgtgtgctgtatatggatagtggcattattttcggcagtggaaccaaggtcactgtcctaggctctggcggcggcggcagctgcccttattctaaccctaggctctgcagcggaggcggcggcagcgagctgcctacccaaggcacatttagcaacgtctccaccaacgtgtcccctgccaaacccaccaccacagcttgtccttacagcaatcctagcctgtgcggcggcggcggcagcaccacgacgccagcgccgcggccaccaacaccggcgcccaccatcgcgtcgcagcccctgtccctgcgcccagaggcgtgccggccagcggcggggggcgcagtgcacacgagggggctggacttcgcctgtgatatctacatctgggcgcccttggccgggacttgtggggtccttctcctgtcactggttatcaccctttactgccggagggaccagaggctgccccccgatgcccacaagccccctgggggaggcagtttccggacccccatccaagaggagcaggccgacgcccactccaccctggccaagatcagagtgaagttcagcaggagcgcagacgcccccgcgtaccagcagggccagaaccagctctataacgagctcaatctaggacgaagagaggagtacgatgttttggacaagagacgtggccgggaccctgagatggggggaaagccgagaaggaagaaccctcaggaaggcctgtacaatgaactgcagaaagataagatggcggaggcctacagtgagattgggatgaaaggcgagcgccggaggggcaaggggcacgatggcctttaccagggtctcagtacagccaccaaggacacctacgacgcccttcacatgcaggccctgccccctcgcggctctggcgagggaaggggttccctgcttacttgcggcgacgtcgaagagaatcccggtccgatggccctcccagtaactgccctccttttgcccctcgcactccttcttcatgccgctcgccccaactgggtcaacgtgattagcgatttgaagaaaatcgaggaccttatacagtctatgcatattgacgctacactgtatactgagagtgatgtacacccgtcctgtaaggtaacggccatgaaatgctttcttctggagctccaggtcatcagcttggagtctggggacgcaagcatccacgatacggttgaaaacctcatcatccttgcgaacaactctctctcatctaatggaaacgttacagagagtgggtgtaaggagtgcgaagagttggaagaaaaaaacatcaaagaatttcttcaatccttcgttcacatagtgcaaatgttcattaacacgtccactaccacacccgccccgaggccacctacgccggcaccgactatcgccagtcaacccctctctctgcgccccgaggcttgccggcctgcggctggtggggcggtccacacccggggcctggattttgcgtgcgatatatacatctgggcacctcttgccggcacctgcggagtgctgcttctctcactcgttattacgctgtactgctaa

SEQ ID NO: 1328 - DNA, 2298 bp, synthetic construct
  misc_feature 1..2298: note = Synthetic
  source 1..2298: mol_type = other DNA
atggccttaccagtgaccgccttgctcctgccgctggccttgctgctccacgccgccaggccggaggtgcagctgctggagtctgggggaggcttggtacagcctggggggtccctgagactctcctgtgcagcctctggattcacctttaacacctatgccatgagctgggtccgccaggctccagggaaggggctggagtgggtctcagctatgagtggtagtggtgataccacatactacgcagactccgtgaagggccggttcaccatctccagagacaattccaagaccactctgtatctgcaaatgaacagcctgagagccgaggacacggccgtatattcctgtgcgaaacacacttcctactacatggacgtctggggcaaagggaccacggtcaccgtctcctcaggtggaggcggttcaggcggaggtggctctggcggtggcggatcgcagactgtggtgacccaggagccatcgctctcagtgtcccctggagggacagtcacactcacttgtggcttgagctctggctcagtctctactagtgactaccccagttggtaccagcagaccccaggccaggctccacgcacgctcatctacagaacaaacactcgctcttctggggtccctgatcgcttctctggctccatccttgggaacaaagctgccctcaccatcacgggggcccaggcagatgatgaatctgattattactgtgtgctgtatatgggtagtggcattattttcggcagtggaaccaaggtcactgtcctaggctctggcggcggcggcagctgcccttattctaaccctaggctctgcagcggaggcggcggcagcgagctgcctacccaaggcacatttagcaacgtctccaccaacgtgtcccctgccaaacccaccaccacagcttgtccttacagcaatcctagcctgtgcggcggcggcggcagcaccacgacgccagcgccgcggccaccaacaccggcgcccaccatcgcgtcgcagcccctgtccctgcgcccagaggcgtgccggccagcggcggggggcgcagtgcacacgagggggctggacttcgcctgtgatatctacatctgggcgcccttggccgggacttgtggggtccttctcctgtcactggttatcaccctttactgccggagggaccagaggctgccccccgatgcccacaagccccctgggggaggcagtttccggacccccatccaagaggagcaggccgacgcccactccaccctggccaagatcagagtgaagttcagcaggagcgcagacgcccccgcgtaccagcagggccagaaccagctctataacgagctcaatctaggacgaagagaggagtacgatgttttggacaagagacgtggccgggaccctgagatggggggaaagccgagaaggaagaaccctcaggaaggcctgtacaatgaactgcagaaagataagatggcggaggcctacagtgagattgggatgaaaggcgagcgccggaggggcaaggggcacgatggcctttaccagggtctcagtacagccaccaaggacacctacgacgcccttcacatgcaggccctgccccctcgcggctctggcgagggaaggggttccctgcttacttgcggcgacgtcgaagagaatcccggtccgatggccctcccagtaactgccctccttttgcccctcgcactccttcttcatgccgctcgccccaactgggtcaacgtgattagcgatttgaagaaaatcgaggaccttatacagtctatgcatattgacgctacactgtatactgagagtgatgtacacccgtcctgtaaggtaacggccatgaaatgctttcttctggagctccaggtcatcagcttggagtctggggacgcaagcatccacgatacggttgaaaacctcatcatccttgcgaacaactctctctcatctaatggaaacgttacagagagtgggtgtaaggagtgcgaagagttggaagaaaaaaacatcaaagaatttcttcaatccttcgttcacatagtgcaaatgttcattaacacgtccactaccacacccgccccgaggccacctacgccggcaccgactatcgccagtcaacccctctctctgcgccccgaggcttgccggcctgcggctggtggggcggtccacacccggggcctggattttgcgtgcgatatatacatctgggcacctcttgccggcacctgcggagtgctgcttctctcactcgttattacgctgtactgctaa

SEQ ID NO: 1329 - DNA, 2298 bp, synthetic construct
  misc_feature 1..2298: note = Synthetic
  source 1..2298: mol_type = other DNA
atggccttaccagtgaccgccttgctcctgccgctggccttgctgctccacgccgccaggccggaggtccaattattggagtctgggggagacttggtacagcctggggggtccctgagactctcctgtgcagcctctggattcacctttagcacctatgccatgagctgggtccgccaggctccagggaaggggctggaatgggtctcagctattagtggtagtggtgaaaacatatactacgcagactccgtgaagggccggttcaccatctccagagacaattccaagaacacgctatttctacaaatgaacagcctgagagccgaggacacggccgtatattactgtgcgaaacacactagctattacatggacgtctggggcaaagggaccacggtcaccgtctcctcaggtggaggcggttcaggcggaggtggctctggcggtggcggatcgcagactgtggtgacccaggagccatcgttctcagtgtcccctggagggacagtcacactcacttgtggcttatactctgactcagtctctactagttactaccccagctggtaccagcagaccccaggccaggctccacgcacgctcatctacaacacaaacactcgctcttctggggtccctgatcgcttctctggctccatccttgggaacaaagctgccctcaccatcacgggggcccaggcagatgatgaatctgattattactgtgtactatatatggttagtggcattgttttcggcagtggaaccaaggtcactgtcctgggctctggcggcggcggcagctgcccttattctaaccctaggctctgcagcggaggcggcggcagcgagctgcctacccaaggcacatttagcaacgtctccaccaacgtgtcccctgccaaacccaccaccacagcttgtccttacagcaatcctagcctgtgcggcggcggcggcagcaccacgacgccagcgccgcggccaccaacaccggcgcccaccatcgcgtcgcagcccctgtccctgcgcccagaggcgtgccggccagcggcggggggcgcagtgcacacgagggggctggacttcgcctgtgatatctacatctgggcgcccttggccgggacttgtggggtccttctcctgtcactggttatcaccctttactgccggagggaccagaggctgccccccgatgcccacaagccccctgggggaggcagtttccggacccccatccaagaggagcaggccgacgcccactccaccctggccaagatcagagtgaagttcagcaggagcgcagacgcccccgcgtaccagcagggccagaaccagctctataacgagctcaatctaggacgaagagaggagtacgatgttttggacaagagacgtggccgggaccctgagatggggggaaagccgagaaggaagaaccctcaggaaggcctgtacaatgaactgcagaaagataagatggcggaggcctacagtgagattgggatgaaaggcgagcgccggaggggcaaggggcacgatggcctttaccagggtctcagtacagccaccaaggacacctacgacgcccttcacatgcaggccctgccccctcgcggctctggcgagggaaggggttccctgcttacttgcggcgacgtcgaagagaatcccggtccgatggccctcccagtaactgccctccttttgcccctcgcactccttcttcatgccgctcgccccaactgggtcaacgtgattagcgatttgaagaaaatcgaggaccttatacagtctatgcatattgacgctacactgtatactgagagtgatgtacacccgtcctgtaaggtaacggccatgaaatgctttcttctggagctccaggtcatcagcttggagtctggggacgcaagcatccacgatacggttgaaaacctcatcatccttgcgaacaactctctctcatctaatggaaacgttacagagagtgggtgtaaggagtgcgaagagttggaagaaaaaaacatcaaagaatttcttcaatccttcgttcacatagtgcaaatgttcattaacacgtccactaccacacccgccccgaggccacctacgccggcaccgactatcgccagtcaacccctctctctgcgccccgaggcttgccggcctgcggctggtggggcggtccacacccggggcctggattttgcgtgcgatatatacatctgggcacctcttgccggcacctgcggagtgctgcttctctcactcgttattacgctgtactgctaa

SEQ ID NO: 1330 - DNA, 2316 bp, synthetic construct
  misc_feature 1..2316: note = Synthetic
  source 1..2316: mol_type = other DNA
atggccttaccagtgaccgccttgctcctgccgctggccttgctgctccacgccgccaggccgcaggtgcagctggtggagtctgggggaggcgtggtccagcctgggaggtccctgagactctcctgtgcagcgtctggattcaccttcagtagttatggcatgcactgggtccgccaggctccaggcaaggggctggagtgggtggcagttatatggtatgatggaattaataaatactatgcagactccgtgaagggccgattcaccatctccagagacaattccaagaacacgctgtatctgcaaatgaacagcctgagagccgaagacacggctgtgtattactgtgcgagagaacggctggaacgaaggtactactactacatggacgtctggggcaaagggaccacggtcaccgtctcctcaggtggaggcggttcaggcggaggtggctctggcggtggcggatcgcagactgtggtgacccaggagccatcgttctcagtgtcccctggagggacagtcacactcacttgtggcttgagctctggctcagtctctactagttactaccccggctggtaccagcagaccccaggccaggctccacgcacgctcatctacagcacaaacactcgctcttctggggtccctgatcgcttctctggctccatccttgggaacaaagctgccctcaccatcacgggggcccaggcagatgatgaatctgattattactgtgtgctatatatgggtagtggcatgtttattttcggcagtggaaccaaggtcactgtcctaggctctggcggcggcggcagctgcccttattctaaccctaggctctgcagcggaggcggcggcagcgagctgcctacccaaggcacatttagcaacgtctccaccaacgtgtcccctgccaaacccaccaccacagcttgtccttacagcaatcctagcctgtgcggcggcggcggcagcaccacgacgccagcgccgcggccaccaacaccggcgcccaccatcgcgtcgcagcccctgtccctgcgcccagaggcgtgccggccagcggcggggggcgcagtgcacacgagggggctggacttcgcctgtgatatctacatctgggcgcccttggccgggacttgtggggtccttctcctgtcactggttatcaccctttactgccggagggaccagaggctgccccccgatgcccacaagccccctgggggaggcagtttccggacccccatccaagaggagcaggccgacgcccactccaccctggccaagatcagagtgaagttcagcaggagcgcagacgcccccgcgtaccagcagggccagaaccagctctataacgagctcaatctaggacgaagagaggagtacgatgttttggacaagagacgtggccgggaccctgagatggggggaaagccgagaaggaagaaccctcaggaaggcctgtacaatgaactgcagaaagataagatggcggaggcctacagtgagattgggatgaaaggcgagcgccggaggggcaaggggcacgatggcctttaccagggtctcagtacagccaccaaggacacctacgacgcccttcacatgcaggccctgccccctcgcggctctggcgagggaaggggttccctgcttacttgcggcgacgtcgaagagaatcccggtccgatggccctcccagtaactgccctccttttgcccctcgcactccttcttcatgccgctcgccccaactgggtcaacgtgattagcgatttgaagaaaatcgaggaccttatacagtctatgcatattgacgctacactgtatactgagagtgatgtacacccgtcctgtaaggtaacggccatgaaatgctttcttctggagctccaggtcatcagcttggagtctggggacgcaagcatccacgatacggttgaaaacctcatcatccttgcgaacaactctctctcatctaatggaaacgttacagagagtgggtgtaaggagtgcgaagagttggaagaaaaaaacatcaaagaatttcttcaatccttcgttcacatagtgcaaatgttcattaacacgtccactaccacacccgccccgaggccacctacgccggcaccgactatcgccagtcaacccctctctctgcgccccgaggcttgccggcctgcggctggtggggcggtccacacccggggcctggattttgcgtgcgatatatacatctgggcacctcttgccggcacctgcggagtgctgcttctctcactcgttattacgctgtactgctaa

SEQ ID NO: 1331 - DNA, 2298 bp, synthetic construct
  misc_feature 1..2298: note = Synthetic
  source 1..2298: mol_type = other DNA
atggccttaccagtgaccgccttgctcctgccgctggccttgctgctccacgccgccaggccggaggtgcagttgttggagtctgggggaggcttggtacagcctggggggtccctgagactctcctgtgcagcctctggattcacctttagcagctttgccatgagctgggtccgccaggctccagggaaggggctggaatgggtctcagctgttagtggtagtggtgatgacacatactacgcagactccgtgaagggccggttcaccatctccagagacaattccaagaacacgctgtatctgcaaatgaacagcctgagagccgaggacacggccgtatattactgtgcgaaacacactagctactacctggacgtctggggcaaagggaccacggtcaccgtctcctcaggtggaggcggttcaggcggaggtggctctggcggtggcggatcgcagactgtggtgacccaggagccatcgttctcagtgtcccctggagggacagtcacactcacttgtgccttgagctctgactcagtctctactagttactttcccagctggtaccggcagaccccaggccaggctccacgcacgctcatctacaacacaaacactcgctcttctggggtccctgatcgcttctctggctccatccttgggaacaaagctgccctcaccatcacgggggcccaggcagatgatgaatctgattattactgtgtgctatatatgggtagtggcattattttcggcagtggaaccaaggtcactgtcctaggctctggcggcggcggcagctgcccttattctaaccctaggctctgcagcggaggcggcggcagcgagctgcctacccaaggcacatttagcaacgtctccaccaacgtgtcccctgccaaacccaccaccacagcttgtccttacagcaatcctagcctgtgcggcggcggcggcagcaccacgacgccagcgccgcggccaccaacaccggcgcccaccatcgcgtcgcagcccctgtccctgcgcccagaggcgtgccggccagcggcggggggcgcagtgcacacgagggggctggacttcgcctgtgatatctacatctgggcgcccttggccgggacttgtggggtccttctcctgtcactggttatcaccctttactgccggagggaccagaggctgccccccgatgcccacaagccccctgggggaggcagtttccggacccccatccaagaggagcaggccgacgcccactccaccctggccaagatcagagtgaagttcagcaggagcgcagacgcccccgcgtaccagcagggccagaaccagctctataacgagctcaatctaggacgaagagaggagtacgatgttttggacaagagacgtggccgggaccctgagatggggggaaagccgagaaggaagaaccctcaggaaggcctgtacaatgaactgcagaaagataagatggcggaggcctacagtgagattgggatgaaaggcgagcgccggaggggcaaggggcacgatggcctttaccagggtctcagtacagccaccaaggacacctacgacgcccttcacatgcaggccctgccccctcgcggctctggcgagggaaggggttccctgcttacttgcggcgacgtcgaagagaatcccggtccgatggccctcccagtaactgccctccttttgcccctcgcactccttcttcatgccgctcgccccaactgggtcaacgtgattagcgatttgaagaaaatcgaggaccttatacagtctatgcatattgacgctacactgtatactgagagtgatgtacacccgtcctgtaaggtaacggccatgaaatgctttcttctggagctccaggtcatcagcttggagtctggggacgcaagcatccacgatacggttgaaaacctcatcatccttgcgaacaactctctctcatctaatggaaacgttacagagagtgggtgtaaggagtgcgaagagttggaagaaaaaaacatcaaagaatttcttcaatccttcgttcacatagtgcaaatgttcattaacacgtccactaccacacccgccccgaggccacctacgccggcaccgactatcgccagtcaacccctctctctgcgccccgaggcttgccggcctgcggctggtggggcggtccacacccggggcctggattttgcgtgcgatatatacatctgggcacctcttgccggcacctgcggagtgctgcttctctcactcgttattacgctgtactgctaa

SEQ ID NO: 1332 - DNA, 2316 bp, synthetic construct
  misc_feature 1..2316: note = Synthetic
  source 1..2316: mol_type = other DNA
atggccttaccagtgaccgccttgctcctgccgctggccttgctgctccacgccgccaggccgcaggtgcagctggtggagtctgggggaggcgtggtccagcctgggaggtccctgagactctcctgtgcagcgtctggattcaacttcagtacctttgacatacactgggtccgccaggctccaggcaaggggctggagtgggtggcacttatatggtatgatggaagttataaatactatgcagactccgtgaagggccgattcaccatttccagagacaattccaagaacacgctggatctgcgaatgaacagcctgagagccgaggacacggctgtgtattactgtgcgcgaaatgacaactggaacgacgaacactactaccactattacatggacgtctggggcaaagggaccacggtcaccgtctcctcaggtggaggcggttcaggcggaggtggctctggcggtggcggatcggaaattgtcctgactcagtctccagactttcagtctgtgactccaaaggagaaagtcaccatcacctgccgggccagtcagagtattggtagtagcttacactggtaccagcagaaaccagatcagtctccaaagctcctcatcaagtttgcttcccagtccttctcaggggtcccctcgaggttcagtggcagtggatctgggacagatttcaccctcaccatcaatagcctggaagctgaagatgctgcaacgtatttctgtcatcagagtagtagtttaccgtggacgttcggccaagggaccaaggtggaaatcaaaggctctggcggcggcggcagctgcccttattctaaccctaggctctgcagcggaggcggcggcagcgagctgcctacccaaggcacatttagcaacgtctccaccaacgtgtcccctgccaaacccaccaccacagcttgtccttacagcaatcctagcctgtgcggcggcggcggcagcaccacgacgccagcgccgcggccaccaacaccggcgcccaccatcgcgtcgcagcccctgtccctgcgcccagaggcgtgccggccagcggcggggggcgcagtgcacacgagggggctggacttcgcctgtgatatctacatctgggcgcccttggccgggacttgtggggtccttctcctgtcactggttatcaccctttactgccggagggaccagaggctgccccccgatgcccacaagccccctgggggaggcagtttccggacccccatccaagaggagcaggccgacgcccactccaccctggccaagatcagagtgaagttcagcaggagcgcagacgcccccgcgtaccagcagggccagaaccagctctataacgagctcaatctaggacgaagagaggagtacgatgttttggacaagagacgtggccgggaccctgagatggggggaaagccgagaaggaagaaccctcaggaaggcctgtacaatgaactgcagaaagataagatggcggaggcctacagtgagattgggatgaaaggcgagcgccggaggggcaaggggcacgatggcctttaccagggtctcagtacagccaccaaggacacctacgacgcccttcacatgcaggccctgccccctcgcggctctggcgagggaaggggttccctgcttacttgcggcgacgtcgaagagaatcccggtccgatggccctcccagtaactgccctccttttgcccctcgcactccttcttcatgccgctcgccccaactgggtcaacgtgattagcgatttgaagaaaatcgaggaccttatacagtctatgcatattgacgctacactgtatactgagagtgatgtacacccgtcctgtaaggtaacggccatgaaatgctttcttctggagctccaggtcatcagcttggagtctggggacgcaagcatccacgatacggttgaaaacctcatcatccttgcgaacaactctctctcatctaatggaaacgttacagagagtgggtgtaaggagtgcgaagagttggaagaaaaaaacatcaaagaatttcttcaatccttcgttcacatagtgcaaatgttcattaacacgtccactaccacacccgccccgaggccacctacgccggcaccgactatcgccagtcaacccctctctctgcgccccgaggcttgccggcctgcggctggtggggcggtccacacccggggcctggattttgcgtgcgatatatacatctgggcacctcttgccggcacctgcggagtgctgcttctctcactcgttattacgctgtactgctaa

SEQ ID NO: 1333 - DNA, 2331 bp, synthetic construct
  misc_feature 1..2331: note = Synthetic
  source 1..2331: mol_type = other DNA
atggccttaccagtgaccgccttgctcctgccgctggccttgctgctccacgccgccaggccggaagtgcacctgttggagtctgggggaggcttggtccagcctggggggtccctgagactctcctgtgcggcctctggattcacctttagcagctatgccatgaactgggtccgccaggctccagggaaggggctggagtgggtctcttctattagtggtagtggtagtagctcatactacgcagactccgtgaagggccggttcaccatctccagagacaattccaagaacacgctgtatctgcaaatgaacagcctgagagccgaggacacggccgtatattactgtgcgtctcgtggattcaactcccagtatcctcccggatactactactactacatggacgtctggggcaaagggaccacggtcaccgtctcctcaggtggaggcggttcaggcggaggtggctctggcggtggcggatcgcagactgtggtgacccaggagccatcgttctcagtgtcccctggagggacagtcacactcacttgtggcttgagctctggctcagtctccactagttacttccccagctggtaccagcagacccccggccaggctccacgcacgctcatctacatcacaaacactcgctcttcaggggtccctgatcgcttctctggctccattattgggaacaaagctgccctcaccatcacgggggcccaggcagatgatgaatctgattatttctgtgtactatatatgggtagtggcacttgggtgttcggtggaggaaccaagctgactgtcctaggctctggcggcggcggcagctgcccttattctaaccctaggctctgcagcggaggcggcggcagcgagctgcctacccaaggcacatttagcaacgtctccaccaacgtgtcccctgccaaacccaccaccacagcttgtccttacagcaatcctagcctgtgcggcggcggcggcagcaccacgacgccagcgccgcggccaccaacaccggcgcccaccatcgcgtcgcagcccctgtccctgcgcccagaggcgtgccggccagcggcggggggcgcagtgcacacgagggggctggacttcgcctgtgatatctacatctgggcgcccttggccgggacttgtggggtccttctcctgtcactggttatcaccctttactgccggagggaccagaggctgccccccgatgcccacaagccccctgggggaggcagtttccggacccccatccaagaggagcaggccgacgcccactccaccctggccaagatcagagtgaagttcagcaggagcgcagacgcccccgcgtaccagcagggccagaaccagctctataacgagctcaatctaggacgaagagaggagtacgatgttttggacaagagacgtggccgggaccctgagatggggggaaagccgagaaggaagaaccctcaggaaggcctgtacaatgaactgcagaaagataagatggcggaggcctacagtgagattgggatgaaaggcgagcgccggaggggcaaggggcacgatggcctttaccagggtctcagtacagccaccaaggacacctacgacgcccttcacatgcaggccctgccccctcgcggctctggcgagggaaggggttccctgcttacttgcggcgacgtcgaagagaatcccggtccgatggccctcccagtaactgccctccttttgcccctcgcactccttcttcatgccgctcgccccaactgggtcaacgtgattagcgatttgaagaaaatcgaggaccttatacagtctatgcatattgacgctacactgtatactgagagtgatgtacacccgtcctgtaaggtaacggccatgaaatgctttcttctggagctccaggtcatcagcttggagtctggggacgcaagcatccacgatacggttgaaaacctcatcatccttgcgaacaactctctctcatctaatggaaacgttacagagagtgggtgtaaggagtgcgaagagttggaagaaaaaaacatcaaagaatttcttcaatccttcgttcacatagtgcaaatgttcattaacacgtccactaccacacccgccccgaggccacctacgccggcaccgactatcgccagtcaacccctctctctgcgccccgaggcttgccggcctgcggctggtggggcggtccacacccggggcctggattttgcgtgcgatatatacatctgggcacctcttgccggcacctgcggagtgctgcttctctcactcgttattacgctgtactgctaa

SEQ ID NO: 1334 - DNA, 2292 bp, synthetic construct
  misc_feature 1..2292: note = Synthetic
  source 1..2292: mol_type = other DNA
atggccttaccagtgaccgccttgctcctgccgctggccttgctgctccacgccgccaggccggaggtgcagctgttggagtctgggggaggcttggtacagcctggggggtccctgagactctcctgtgcagcctctggattcaccttcagcaactatgccatgacctgggtccgccaggctccagggaaggggctggagtgggtctcagctattagtggtagtggtattggcacatactacgcagactccgtgcagggccggttcaccacctccagagacaattccaagaacacgctgtatctgcaaatgaacagcctgagagccgaggacacggccgtttattactgtgcgaaaggggggtacaactggaaggacgtctggggcaaagggaccacggtcaccgtctcctcaggtggaggcggttcaggcggaggtggctctggcggtggcggatcggaaattgtgctgactcagtctccagactttcagtctgtgactccaaaggagaaagtcaccatcacctgccgggccagtcagagcattggtagtagcttacactggtaccagcagaaaccagatcagtctccaaagctcctcatcaagtttgcttcccagtccttctcaggggtcccctcgaggttcagtggcagtggatctgggacagatttcaccctcaccatccatagcctggaagctgaagatgctgcaacgtattactgtcatcagagtagtagtttaccgtggacgttcggccaagggaccaaggtggaaatcaaaggctctggcggcggcggcagctgcccttattctaaccctaggctctgcagcggaggcggcggcagcgagctgcctacccaaggcacatttagcaacgtctccaccaacgtgtcccctgccaaacccaccaccacagcttgtccttacagcaatcctagcctgtgcggcggcggcggcagcaccacgacgccagcgccgcggccaccaacaccggcgcccaccatcgcgtcgcagcccctgtccctgcgcccagaggcgtgccggccagcggcggggggcgcagtgcacacgagggggctggacttcgcctgtgatatctacatctgggcgcccttggccgggacttgtggggtccttctcctgtcactggttatcaccctttactgccggagggaccagaggctgccccccgatgcccacaagccccctgggggaggcagtttccggacccccatccaagaggagcaggccgacgcccactccaccctggccaagatcagagtgaagttcagcaggagcgcagacgcccccgcgtaccagcagggccagaaccagctctataacgagctcaatctaggacgaagagaggagtacgatgttttggacaagagacgtggccgggaccctgagatggggggaaagccgagaaggaagaaccctcaggaaggcctgtacaatgaactgcagaaagataagatggcggaggcctacagtgagattgggatgaaaggcgagcgccggaggggcaaggggcacgatggcctttaccagggtctcagtacagccaccaaggacacctacgacgcccttcacatgcaggccctgccccctcgcggctctggcgagggaaggggttccctgcttacttgcggcgacgtcgaagagaatcccggtccgatggccctcccagtaactgccctccttttgcccctcgcactccttcttcatgccgctcgccccaactgggtcaacgtgattagcgatttgaagaaaatcgaggaccttatacagtctatgcatattgacgctacactgtatactgagagtgatgtacacccgtcctgtaaggtaacggccatgaaatgctttcttctggagctccaggtcatcagcttggagtctggggacgcaagcatccacgatacggttgaaaacctcatcatccttgcgaacaactctctctcatctaatggaaacgttacagagagtgggtgtaaggagtgcgaagagttggaagaaaaaaacatcaaagaatttcttcaatccttcgttcacatagtgcaaatgttcattaacacgtccactaccacacccgccccgaggccacctacgccggcaccgactatcgccagtcaacccctctctctgcgccccgaggcttgccggcctgcggctggtggggcggtccacacccggggcctggattttgcgtgcgatatatacatctgggcacctcttgccggcacctgcggagtgctgcttctctcactcgttattacgctgtactgctaa

SEQ ID NO: 1335 - DNA, 2316 bp, synthetic construct
  misc_feature 1..2316: note = Synthetic
  source 1..2316: mol_type = other DNA
atggccttaccagtgaccgccttgctcctgccgctggccttgctgctccacgccgccaggccgcaggtgcagctggtggagtctgggggaggcgtggtccagcctgggaggtccctgagactctcctgtgcagcgtctgggttcaccttcactaactatgacatgcactgggtccgccaggccccaggcaaggggctggagtgggtgacaattatatggcatgatggaagtaataaatattatttagactccgtgaggggccgattcaccatctccagagacaattccaagaacacgctgtatctgcaaatgaacagcctgagagccgaggacacggctgtgtattactgtgcgagaggtgacaactggaacgacgaacaccactacttctactacatggacgtctggggcaaagggaccacggtcaccgtctcctcaggtggaggcggttcaggcggaggtggctctggcggtggcggatcggaaattgtgctgactcagtctccagactttcagtctgtgactccaaaggagaaagtcaccatcacctgccgggccagtcagagcattggtagtagcttacactggtaccagcagaaaccagatcagtctccaaagctcctcatcaagtttgcttcccagtccttctcaggggtcccctcgaggttcagtggcagtggatctgggacagatttcaccctcaccatccatagcctggaagctgaagatgctgcaacgtattactgtcatcagagtagtagtttaccgtggacgttcggccaagggaccaaggtggaaatcaaaggctctggcggcggcggcagctgcccttattctaaccctaggctctgcagcggaggcggcggcagcgagctgcctacccaaggcacatttagcaacgtctccaccaacgtgtcccctgccaaacccaccaccacagcttgtccttacagcaatcctagcctgtgcggcggcggcggcagcaccacgacgccagcgccgcggccaccaacaccggcgcccaccatcgcgtcgcagcccctgtccctgcgcccagaggcgtgccggccagcggcggggggcgcagtgcacacgagggggctggacttcgcctgtgatatctacatctgggcgcccttggccgggacttgtggggtccttctcctgtcactggttatcaccctttactgccggagggaccagaggctgccccccgatgcccacaagccccctgggggaggcagtttccggacccccatccaagaggagcaggccgacgcccactccaccctggccaagatcagagtgaagttcagcaggagcgcagacgcccccgcgtaccagcagggccagaaccagctctataacgagctcaatctaggacgaagagaggagtacgatgttttggacaagagacgtggccgggaccctgagatggggggaaagccgagaaggaagaaccctcaggaaggcctgtacaatgaactgcagaaagataagatggcggaggcctacagtgagattgggatgaaaggcgagcgccggaggggcaaggggcacgatggcctttaccagggtctcagtacagccaccaaggacacctacgacgcccttcacatgcaggccctgccccctcgcggctctggcgagggaaggggttccctgcttacttgcggcgacgtcgaagagaatcccggtccgatggccctcccagtaactgccctccttttgcccctcgcactccttcttcatgccgctcgccccaactgggtcaacgtgattagcgatttgaagaaaatcgaggaccttatacagtctatgcatattgacgctacactgtatactgagagtgatgtacacccgtcctgtaaggtaacggccatgaaatgctttcttctggagctccaggtcatcagcttggagtctggggacgcaagcatccacgatacggttgaaaacctcatcatccttgcgaacaactctctctcatctaatggaaacgttacagagagtgggtgtaaggagtgcgaagagttggaagaaaaaaacatcaaagaatttcttcaatccttcgttcacatagtgcaaatgttcattaacacgtccactaccacacccgccccgaggccacctacgccggcaccgactatcgccagtcaacccctctctctgcgccccgaggcttgccggcctgcggctggtggggcggtccacacccggggcctggattttgcgtgcgatatatacatctgggcacctcttgccggcacctgcggagtgctgcttctctcactcgttattacgctgtactgctaa

SEQ ID NO: 1336 - DNA, 2316 bp, synthetic construct
  misc_feature 1..2316: note = Synthetic
  source 1..2316: mol_type = other DNA
atggccttaccagtgaccgccttgctcctgccgctggccttgctgctccacgccgccaggccgcaggtgcagctggtggagtctgggggaggcgtggtccagcctgggaggtccctgagactctcctgtgcagcgtctgggttcaccttcagtaactatgacatgcactgggtccgccaggccccaggcaaggggctggagtgggtgacaattatatggcatgatggaagtaataaatattatttagactccgtgaagggccgattcaccatctccagagacaattccaagaacacgctgtatctgcaaatgaacagcctgagagccgaggacacggctgtgtattactgtgcgagaggtgacaactggaacgacgaacaccactacttctactacatggacgtctggggcaaagggaccacggtcaccgtctcctcaggtggaggcggttcaggcggaggtggctctggcggtggcggatcggaaattgtgttgacacagtctccagccaccctgtctttgtctccaggggaaagagccaccctctcctgcagggccagtcagagtgttagcagctccttagcctggtaccaacagaaacctggccaggctccccggctcctcatctatgatgcatccaacagggccactggcatcccagccaggttcagtggcagtgggtctgggacagacttcactctcaccatcagcagcctagagcctgaagattttgcagtttattactgtcagcagcgtagcaactggcctctcactttcggcggagggaccaaggtggagatcaaaggctctggcggcggcggcagctgcccttattctaaccctaggctctgcagcggaggcggcggcagcgagctgcctacccaaggcacatttagcaacgtctccaccaacgtgtcccctgccaaacccaccaccacagcttgtccttacagcaatcctagcctgtgcggcggcggcggcagcaccacgacgccagcgccgcggccaccaacaccggcgcccaccatcgcgtcgcagcccctgtccctgcgcccagaggcgtgccggccagcggcggggggcgcagtgcacacgagggggctggacttcgcctgtgatatctacatctgggcgcccttggccgggacttgtggggtccttctcctgtcactggttatcaccctttactgccggagggaccagaggctgccccccgatgcccacaagccccctgggggaggcagtttccggacccccatccaagaggagcaggccgacgcccactccaccctggccaagatcagagtgaagttcagcaggagcgcagacgcccccgcgtaccagcagggccagaaccagctctataacgagctcaatctaggacgaagagaggagtacgatgttttggacaagagacgtggccgggaccctgagatggggggaaagccgagaaggaagaaccctcaggaaggcctgtacaatgaactgcagaaagataagatggcggaggcctacagtgagattgggatgaaaggcgagcgccggaggggcaaggggcacgatggcctttaccagggtctcagtacagccaccaaggacacctacgacgcccttcacatgcaggccctgccccctcgcggctctggcgagggaaggggttccctgcttacttgcggcgacgtcgaagagaatcccggtccgatggccctcccagtaactgccctccttttgcccctcgcactccttcttcatgccgctcgccccaactgggtcaacgtgattagcgatttgaagaaaatcgaggaccttatacagtctatgcatattgacgctacactgtatactgagagtgatgtacacccgtcctgtaaggtaacggccatgaaatgctttcttctggagctccaggtcatcagcttggagtctggggacgcaagcatccacgatacggttgaaaacctcatcatccttgcgaacaactctctctcatctaatggaaacgttacagagagtgggtgtaaggagtgcgaagagttggaagaaaaaaacatcaaagaatttcttcaatccttcgttcacatagtgcaaatgttcattaacacgtccactaccacacccgccccgaggccacctacgccggcaccgactatcgccagtcaacccctctctctgcgccccgaggcttgccggcctgcggctggtggggcggtccacacccggggcctggattttgcgtgcgatatatacatctgggcacctcttgccggcacctgcggagtgctgcttctctcactcgttattacgctgtactgctaa

SEQ ID NO: 1337 - DNA, 2304 bp, synthetic construct
  misc_feature 1..2304: note = Synthetic
  source 1..2304: mol_type = other DNA
atggccttaccagtgaccgccttgctcctgccgctggccttgctgctccacgccgccaggccggaggtgcagctggtggagtctgggggaggtgtggtacggcctggggggtccctgagactctcctgtgcagcctctggattcacctttgatgattatggcatgagctgggtccgccaagctccagggaaggggctggagtgggtctctggtattaattggaatggtggtagcacaggttatgtagactctgtgaagggccgattcaccatctccagagacaacgccaagaactccctgtatctgcaaatgaacagtctgagagccgaggacacggccttgtatcactgtgcgagaccagtaactacggactactactactacatggacgtctggggcaaagggaccacggtcaccgtctcctcaggtggaggcggttcaggcggaggtggctctggcggtggcggatcggaaattgtgttgacgcagtctccaggcaccctgtctttgtctccaggggaaagagccaccctctcctgcagggccagtcagagtgttagcagcagctacttagcctggtaccagcagaaacctggccaggctcccaggctcctcatctatggtgcatccagcagggccactggcatcccagacaggttcagtggcagtgggtctgggacagacttcactctcaccatcagcagactggagcctgaagattttgcagtgtattactgtcagcagtatggtagctcgtggacgttcggccaagggaccaaggtggaaatcaaaggctctggcggcggcggcagctgcccttattctaaccctaggctctgcagcggaggcggcggcagcgagctgcctacccaaggcacatttagcaacgtctccaccaacgtgtcccctgccaaacccaccaccacagcttgtccttacagcaatcctagcctgtgcggcggcggcggcagcaccacgacgccagcgccgcggccaccaacaccggcgcccaccatcgcgtcgcagcccctgtccctgcgcccagaggcgtgccggccagcggcggggggcgcagtgcacacgagggggctggacttcgcctgtgatatctacatctgggcgcccttggccgggacttgtggggtccttctcctgtcactggttatcaccctttactgccggagggaccagaggctgccccccgatgcccacaagccccctgggggaggcagtttccggacccccatccaagaggagcaggccgacgcccactccaccctggccaagatcagagtgaagttcagcaggagcgcagacgcccccgcgtaccagcagggccagaaccagctctataacgagctcaatctaggacgaagagaggagtacgatgttttggacaagagacgtggccgggaccctgagatggggggaaagccgagaaggaagaaccctcaggaaggcctgtacaatgaactgcagaaagataagatggcggaggcctacagtgagattgggatgaaaggcgagcgccggaggggcaaggggcacgatggcctttaccagggtctcagtacagccaccaaggacacctacgacgcccttcacatgcaggccctgccccctcgcggctctggcgagggaaggggttccctgcttacttgcggcgacgtcgaagagaatcccggtccgatggccctcccagtaactgccctccttttgcccctcgcactccttcttcatgccgctcgccccaactgggtcaacgtgattagcgatttgaagaaaatcgaggaccttatacagtctatgcatattgacgctacactgtatactgagagtgatgtacacccgtcctgtaaggtaacggccatgaaatgctttcttctggagctccaggtcatcagcttggagtctggggacgcaagcatccacgatacggttgaaaacctcatcatccttgcgaacaactctctctcatctaatggaaacgttacagagagtgggtgtaaggagtgcgaagagttggaagaaaaaaacatcaaagaatttcttcaatccttcgttcacatagtgcaaatgttcattaacacgtccactaccacacccgccccgaggccacctacgccggcaccgactatcgccagtcaacccctctctctgcgccccgaggcttgccggcctgcggctggtggggcggtccacacccggggcctggattttgcgtgcgatatatacatctgggcacctcttgccggcacctgcggagtgctgcttctctcactcgttattacgctgtactgctaa

SEQ ID NO: 1338 - DNA, 2328 bp, synthetic construct
  misc_feature 1..2328: note = Synthetic
  source 1..2328: mol_type = other DNA
atggccttaccagtgaccgccttgctcctgccgctggccttgctgctccacgccgccaggccggaggtgcagctgttggagtctgggggaggcttggtacagcctggggggtccctgagactctcctgtgcagcctctggattcacctttagcagctatgccatgagctgggtccgccaggctccagggaaggggctggagtgggtctcagctattagtggtagtggtggtagcacatactacgcagactccgtgaagggccggttcaccatctccagagacaattccaagaacacgctgtatctgcaaatgaacagcctgagagccgaggacacggccgtatattactgtgcgaaaaaggggacgtcgtacaactggaacgacgtccattactactactactactacatggacgtctggggcaaagggaccacggtcaccgtctcctcaggtggaggcggttcaggcggaggtggctctggcggtggcggatcggaaattgtgttgacgcagtctccaggcaccctgtctttgtctccaggggaaagagccaccctctcctgcagggccagtcagagtgttagcagcagctacttagcctggtaccagcagaaacctggccaggctcccaggctcctcatctatggtgcatccagcagggccactggcatcccagacaggttcagtggcagtgggtctgggacagacttcactctcaccatcagcagactggagcctgaagattttgcagtgtattactgtcagcagtatggtagctcgtggacgttcggccaagggaccaaggtggaaatcaaaggctctggcggcggcggcagctgcccttattctaaccctaggctctgcagcggaggcggcggcagcgagctgcctacccaaggcacatttagcaacgtctccaccaacgtgtcccctgccaaacccaccaccacagcttgtccttacagcaatcctagcctgtgcggcggcggcggcagcaccacgacgccagcgccgcggccaccaacaccggcgcccaccatcgcgtcgcagcccctgtccctgcgcccagaggcgtgccggccagcggcggggggcgcagtgcacacgagggggctggacttcgcctgtgatatctacatctgggcgcccttggccgggacttgtggggtccttctcctgtcactggttatcaccctttactgccggagggaccagaggctgccccccgatgcccacaagccccctgggggaggcagtttccggacccccatccaagaggagcaggccgacgcccactccaccctggccaagatcagagtgaagttcagcaggagcgcagacgcccccgcgtaccagcagggccagaaccagctctataacgagctcaatctaggacgaagagaggagtacgatgttttggacaagagacgtggccgggaccctgagatggggggaaagccgagaaggaagaaccctcaggaaggcctgtacaatgaactgcagaaagataagatggcggaggcctacagtgagattgggatgaaaggcgagcgccggaggggcaaggggcacgatggcctttaccagggtctcagtacagccaccaaggacacctacgacgcccttcacatgcaggccctgccccctcgcggctctggcgagggaaggggttccctgcttacttgcggcgacgtcgaagagaatcccggtccgatggccctcccagtaactgccctccttttgcccctcgcactccttcttcatgccgctcgccccaactgggtcaacgtgattagcgatttgaagaaaatcgaggaccttatacagtctatgcatattgacgctacactgtatactgagagtgatgtacacccgtcctgtaaggtaacggccatgaaatgctttcttctggagctccaggtcatcagcttggagtctggggacgcaagcatccacgatacggttgaaaacctcatcatccttgcgaacaactctctctcatctaatggaaacgttacagagagtgggtgtaaggagtgcgaagagttggaagaaaaaaacatcaaagaatttcttcaatccttcgttcacatagtgcaaatgttcattaacacgtccactaccacacccgccccgaggccacctacgccggcaccgactatcgccagtcaacccctctctctgcgccccgaggcttgccggcctgcggctggtggggcggtccacacccggggcctggattttgcgtgcgatatatacatctgggcacctcttgccggcacctgcggagtgctgcttctctcactcgttattacgctgtactgctaa

SEQ ID NO: 1339 - DNA, 2310 bp, synthetic construct
  misc_feature 1..2310: note = Synthetic
  source 1..2310: mol_type = other DNA
atggccttaccagtgaccgccttgctcctgccgctggccttgctgctccacgccgccaggccgcagctgcagctgcaggagtcgggcccaggactggtgaagccttcggagaccctgtccctcacctgcactgtctctggtggctccatcagcagtagtagttactactggggctggatccgccagcccccagggaaggggctggagtggattgggagtatctattatagtgggagcacctactacaacccgtccctcaagagtcgagtcaccatatccgtagacacgtccaagaaccagttctccctgaagctgagctctgtgaccgccgcagacacggctgtgtattactgcacaactggaacgacggcttactactactactactacatggacgtctggggcaaagggaccacggtcaccgtctcctcaggtggaggcggttcaggcggaggtggctctggcggtggcggatcggaaattgtgttgacgcagtctccaggcaccctgtctttgtctccaggggaaagagccaccctctcctgcagggccagtcagagtgttagcagcagctacttagcctggtaccagcagaaacctggccaggctcccaggctcctcatctatggtgcatccagcagggccactggcatcccagacaggttcagtggcagtgggtctgggacagacttcactctcaccatcagcagactggagcctgaagattttgcagtgtattactgtcagcagtatggtagctcgtggacgttcggccaagggaccaaggtggaaatcaaaggctctggcggcggcggcagctgcccttattctaaccctaggctctgcagcggaggcggcggcagcgagctgcctacccaaggcacatttagcaacgtctccaccaacgtgtcccctgccaaacccaccaccacagcttgtccttacagcaatcctagcctgtgcggcggcggcggcagcaccacgacgccagcgccgcggccaccaacaccggcgcccaccatcgcgtcgcagcccctgtccctgcgcccagaggcgtgccggccagcggcggggggcgcagtgcacacgagggggctggacttcgcctgtgatatctacatctgggcgcccttggccgggacttgtggggtccttctcctgtcactggttatcaccctttactgccggagggaccagaggctgccccccgatgcccacaagccccctgggggaggcagtttccggacccccatccaagaggagcaggccgacgcccactccaccctggccaagatcagagtgaagttcagcaggagcgcagacgcccccgcgtaccagcagggccagaaccagctctataacgagctcaatctaggacgaagagaggagtacgatgttttggacaagagacgtggccgggaccctgagatggggggaaagccgagaaggaagaaccctcaggaaggcctgtacaatgaactgcagaaagataagatggcggaggcctacagtgagattgggatgaaaggcgagcgccggaggggcaaggggcacgatggcctttaccagggtctcagtacagccaccaaggacacctacgacgcccttcacatgcaggccctgccccctcgcggctctggcgagggaaggggttccctgcttacttgcggcgacgtcgaagagaatcccggtccgatggccctcccagtaactgccctccttttgcccctcgcactccttcttcatgccgctcgccccaactgggtcaacgtgattagcgatttgaagaaaatcgaggaccttatacagtctatgcatattgacgctacactgtatactgagagtgatgtacacccgtcctgtaaggtaacggccatgaaatgctttcttctggagctccaggtcatcagcttggagtctggggacgcaagcatccacgatacggttgaaaacctcatcatccttgcgaacaactctctctcatctaatggaaacgttacagagagtgggtgtaaggagtgcgaagagttggaagaaaaaaacatcaaagaatttcttcaatccttcgttcacatagtgcaaatgttcattaacacgtccactaccacacccgccccgaggccacctacgccggcaccgactatcgccagtcaacccctctctctgcgccccgaggcttgccggcctgcggctggtggggcggtccacacccggggcctggattttgcgtgcgatatatacatctgggcacctcttgccggcacctgcggagtgctgcttctctcactcgttattacgctgtactgctaa

SEQ ID NO: 1340 - DNA, 2307 bp, synthetic construct
  misc_feature 1..2307: note = Synthetic
  source 1..2307: mol_type = other DNA
atggccttaccagtgaccgccttgctcctgccgctggccttgctgctccacgccgccaggccggaggtgcagctgttggagtctgggggaggcttggtgcagcctggggggtccctgagactctcctgtgcagcctctggattcacctttagcagctatgccatgacctgggtccgccaggctccagggaaggggctggagtgggtctcagctattagtggtagtggtggtagcacatactacgcagactccgtgaagggccggttcaccatctccagagacaattccaagaacacgctgtatctgcaaatgaacagcctgagagccgaggacacggccgtatattactgtgcgagaggcgggtataactggcactactactactacatggacgtctggggcaaagggaccacggtcaccgtctcctcaggtggaggcggttcaggcggaggtggctctggcggtggcggatcggaaattgtgttgacgcagtctccaggcaccctgtctttgtctccaggggaaagagccaccctctcctgcagggccagtcagagtgttagcagcagctacttagcctggtaccagcagaaacctggccaggctcccaggctcctcatctatggtgcatccagcagggccactggcatcccagacaggttcagtggcagtgggtctgggacagacttcactctcaccatcagcagactggagcctgaagattttgcagtgtattactgtcagcagtatggtagctcgtggacgttcggccaagggaccaaggtggaaatcaaaggctctggcggcggcggcagctgcccttattctaaccctaggctctgcagcggaggcggcggcagcgagctgcctacccaaggcacatttagcaacgtctccaccaacgtgtcccctgccaaacccaccaccacagcttgtccttacagcaatcctagcctgtgcggcggcggcggcagcaccacgacgccagcgccgcggccaccaacaccggcgcccaccatcgcgtcgcagcccctgtccctgcgcccagaggcgtgccggccagcggcggggggcgcagtgcacacgagggggctggacttcgcctgtgatatctacatctgggcgcccttggccgggacttgtggggtccttctcctgtcactggttatcaccctttactgccggagggaccagaggctgccccccgatgcccacaagccccctgggggaggcagtttccggacccccatccaagaggagcaggccgacgcccactccaccctggccaagatcagagtgaagttcagcaggagcgcagacgcccccgcgtaccagcagggccagaaccagctctataacgagctcaatctaggacgaagagaggagtacgatgttttggacaagagacgtggccgggaccctgagatggggggaaagccgagaaggaagaaccctcaggaaggcctgtacaatgaactgcagaaagataagatggcggaggcctacagtgagattgggatgaaaggcgagcgccggaggggcaaggggcacgatggcctttaccagggtctcagtacagccaccaaggacacctacgacgcccttcacatgcaggccctgccccctcgcggctctggcgagggaaggggttccctgcttacttgcggcgacgtcgaagagaatcccggtccgatggccctcccagtaactgccctccttttgcccctcgcactccttcttcatgccgctcgccccaactgggtcaacgtgattagcgatttgaagaaaatcgaggaccttatacagtctatgcatattgacgctacactgtatactgagagtgatgtacacccgtcctgtaaggtaacggccatgaaatgctttcttctggagctccaggtcatcagcttggagtctggggacgcaagcatccacgatacggttgaaaacctcatcatccttgcgaacaactctctctcatctaatggaaacgttacagagagtgggtgtaaggagtgcgaagagttggaagaaaaaaacatcaaagaatttcttcaatccttcgttcacatagtgcaaatgttcattaacacgtccactaccacacccgccccgaggccacctacgccggcaccgactatcgccagtcaacccctctctctgcgccccgaggcttgccggcctgcggctggtggggcggtccacacccggggcctggattttgcgtgcgatatatacatctgggcacctcttgccggcacctgcggagtgctgcttctctcactcgttattacgctgtactgctaa

SEQ ID NO: 1341 - DNA, 2319 bp, synthetic construct
  misc_feature 1..2319: note = Synthetic
  source 1..2319: mol_type = other DNA
atggccttaccagtgaccgccttgctcctgccgctggccttgctgctccacgccgccaggccgcaggtgcagctggtggagtctgggggaggcgtggtccagcctgggaggtccctgagactctcctgtgcagcgtctggattcaccttcagtagctatgacatgcactgggtccgccaggctccaggcaaggggctggagtgggtgtcagttatatggtatgatggaagtaataaaaagtatggagactccgcgaagggccgattcaccatctccagagacaattccaagaacacgctggatctgcaaatgaacagcctgagagccgaggacacggctgtgtattactgtgcgagaggcgacaactggaacgacgaaggtggctactactactactacatggacgtctggggcaaagggaccacggtcaccgtctcctcaggtggaggcggttcaggcggaggtggctctggcggtggcggatcggaaattgtgctgactcagtctccagactttcagtctgtgactccaaaggagaaagtcaccatcacctgccgggccagtcagaacattggtagtagcttacactggtaccagcagaaaccagatcagtctccaaagctcctcatcaagtttgcttcccagtccatctcaggggtcccctcgaggttcagtggcagtggatctgggacagatttcaccctcaccatcaatagcctggaagctgaagatgctgcagcgtattactgtcatcagagtagtagtttaccgtggacgttcggccaagggaccaaggtggaaatcaaaggctctggcggcggcggcagctgcccttattctaaccctaggctctgcagcggaggcggcggcagcgagctgcctacccaaggcacatttagcaacgtctccaccaacgtgtcccctgccaaacccaccaccacagcttgtccttacagcaatcctagcctgtgcggcggcggcggcagcaccacgacgccagcgccgcggccaccaacaccggcgcccaccatcgcgtcgcagcccctgtccctgcgcccagaggcgtgccggccagcggcggggggcgcagtgcacacgagggggctggacttcgcctgtgatatctacatctgggcgcccttggccgggacttgtggggtccttctcctgtcactggttatcaccctttactgccggagggaccagaggctgccccccgatgcccacaagccccctgggggaggcagtttccggacccccatccaagaggagcaggccgacgcccactccaccctggccaagatcagagtgaagttcagcaggagcgcagacgcccccgcgtaccagcagggccagaaccagctctataacgagctcaatctaggacgaagagaggagtacgatgttttggacaagagacgtggccgggaccctgagatggggggaaagccgagaaggaagaaccctcaggaaggcctgtacaatgaactgcagaaagataagatggcggaggcctacagtgagattgggatgaaaggcgagcgccggaggggcaaggggcacgatggcctttaccagggtctcagtacagccaccaaggacacctacgacgcccttcacatgcaggccctgccccctcgcggctctggcgagggaaggggttccctgcttacttgcggcgacgtcgaagagaatcccggtccgatggccctcccagtaactgccctccttttgcccctcgcactccttcttcatgccgctcgccccaactgggtcaacgtgattagcgatttgaagaaaatcgaggaccttatacagtctatgcatattgacgctacactgtatactgagagtgatgtacacccgtcctgtaaggtaacggccatgaaatgctttcttctggagctccaggtcatcagcttggagtctggggacgcaagcatccacgatacggttgaaaacctcatcatccttgcgaacaactctctctcatctaatggaaacgttacagagagtgggtgtaaggagtgcgaagagttggaagaaaaaaacatcaaagaatttcttcaatccttcgttcacatagtgcaaatgttcattaacacgtccactaccacacccgccccgaggccacctacgccggcaccgactatcgccagtcaacccctctctctgcgccccgaggcttgccggcctgcggctggtggggcggtccacacccggggcctggattttgcgtgcgatatatacatctgggcacctcttgccggcacctgcggagtgctgcttctctcactcgttattacgctgtactgctaa

SEQ ID NO: 1342 - DNA, 2319 bp, synthetic construct
  misc_feature 1..2319: note = Synthetic
  source 1..2319: mol_type = other DNA
atggccttaccagtgaccgccttgctcctgccgctggccttgctgctccacgccgccaggccgcaggtgcagctggtggagtctgggggaggcgtggtccagcctgggaggtccctgagactctcctgtgcagcgtctggattcaccttcagtagctatgacatgcactgggtccgccaggctccaggcaaggggctggagtgggtgtcagttatatggtatgatggaagtaataaaaagtatggagactccgcgaagggccgattcaccatctccagagacaattccaagaacacgctggatctgcaaatgaacagcctgagagccgaggacacggctgtgtattactgtgcgagaggcgacaactggaacgacgaaggtggctactactactactacatggacgtctggggcaaagggaccacggtcaccgtctcctcaggtggaggcggttcaggcggaggtggctctggcggtggcggatcggacatccagatgacccagtctccatcctcactgtctacatctgtaggagacagagtcaccatcacttgtcgggcgagtcagggcattagcaattatttagcctggtttcagcagaaaccagggaaagcccctaagtccctgatctatgctgcatccagtttgcaaagtggggtcccatcaaagttcagcggcagtggatctgggacagatttctctctcaccattagcagcctgcagcctgaagattttgcaacttattactgccaacagtataatagttacccgatcaccttcggccaagggacacgactggagattaaaggctctggcggcggcggcagctgcccttattctaaccctaggctctgcagcggaggcggcggcagcgagctgcctacccaaggcacatttagcaacgtctccaccaacgtgtcccctgccaaacccaccaccacagcttgtccttacagcaatcctagcctgtgcggcggcggcggcagcaccacgacgccagcgccgcggccaccaacaccggcgcccaccatcgcgtcgcagcccctgtccctgcgcccagaggcgtgccggccagcggcggggggcgcagtgcacacgagggggctggacttcgcctgtgatatctacatctgggcgcccttggccgggacttgtggggtccttctcctgtcactggttatcaccctttactgccggagggaccagaggctgccccccgatgcccacaagccccctgggggaggcagtttccggacccccatccaagaggagcaggccgacgcccactccaccctggccaagatcagagtgaagttcagcaggagcgcagacgcccccgcgtaccagcagggccagaaccagctctataacgagctcaatctaggacgaagagaggagtacgatgttttggacaagagacgtggccgggaccctgagatggggggaaagccgagaaggaagaaccctcaggaaggcctgtacaatgaactgcagaaagataagatggcggaggcctacagtgagattgggatgaaaggcgagcgccggaggggcaaggggcacgatggcctttaccagggtctcagtacagccaccaaggacacctacgacgcccttcacatgcaggccctgccccctcgcggctctggcgagggaaggggttccctgcttacttgcggcgacgtcgaagagaatcccggtccgatggccctcccagtaactgccctccttttgcccctcgcactccttcttcatgccgctcgccccaactgggtcaacgtgattagcgatttgaagaaaatcgaggaccttatacagtctatgcatattgacgctacactgtatactgagagtgatgtacacccgtcctgtaaggtaacggccatgaaatgctttcttctggagctccaggtcatcagcttggagtctggggacgcaagcatccacgatacggttgaaaacctcatcatccttgcgaacaactctctctcatctaatggaaacgttacagagagtgggtgtaaggagtgcgaagagttggaagaaaaaaacatcaaagaatttcttcaatccttcgttcacatagtgcaaatgttcattaacacgtccactaccacacccgccccgaggccacctacgccggcaccgactatcgccagtcaacccctctctctgcgccccgaggcttgccggcctgcggctggtggggcggtccacacccggggcctggattttgcgtgcgatatatacatctgggcacctcttgccggcacctgcggagtgctgcttctctcactcgttattacgctgtactgctaa

SEQ ID NO: 1343 - DNA, 2310 bp, synthetic construct
  misc_feature 1..2310: note = Synthetic
  source 1..2310: mol_type = other DNA
atggccttaccagtgaccgccttgctcctgccgctggccttgctgctccacgccgccaggccgcaggttcagctggtacagtctggagctgaggtgaagaagtctggggcctcagtgaaggtctcctgcaaggcttctggttacaccttaaccagctatggcatcagctgggtgcgacaggcccctggacaagggcttgagtggatgggatggatcagcgcttacaatggtaacataaactatgcacagaagttccagggcagagtcaccatgaccacagacacatccacgagcacagcctacatggagctgaggagcctgagatctgacgacacggccgtgtattactgtgtgagagatggggaccggtacaactggaaccacagctacatggacgtctggggcaaagggaccacggtcaccgtctcctcaggtggaggcggttcaggcggaggtggctctggcggtggcggatcggaaattgtgctgactcagtctccagactttcagtctgtgactccaaaggagaaagtcaccatcacctgccgggccagtcagaacattggtagtagcttacactggtaccagcagaaaccagatcagtctccaaagctcctcatcaagtttgcttcccagtccatctcaggggtcccctcgaggttcagtggcagtggatctgggacagatttcaccctcaccatcaatagcctggaagctgaagatgctgcagcgtattactgtcatcagagtagtagtttaccgtggacgttcggccaagggaccaaggtggaaatcaaaggctctggcggcggcggcagctgcccttattctaaccctaggctctgcagcggaggcggcggcagcgagctgcctacccaaggcacatttagcaacgtctccaccaacgtgtcccctgccaaacccaccaccacagcttgtccttacagcaatcctagcctgtgcggcggcggcggcagcaccacgacgccagcgccgcggccaccaacaccggcgcccaccatcgcgtcgcagcccctgtccctgcgcccagaggcgtgccggccagcggcggggggcgcagtgcacacgagggggctggacttcgcctgtgatatctacatctgggcgcccttggccgggacttgtggggtccttctcctgtcactggttatcaccctttactgccggagggaccagaggctgccccccgatgcccacaagccccctgggggaggcagtttccggacccccatccaagaggagcaggccgacgcccactccaccctggccaagatcagagtgaagttcagcaggagcgcagacgcccccgcgtaccagcagggccagaaccagctctataacgagctcaatctaggacgaagagaggagtacgatgttttggacaagagacgtggccgggaccctgagatggggggaaagccgagaaggaagaaccctcaggaaggcctgtacaatgaactgcagaaagataagatggcggaggcctacagtgagattgggatgaaaggcgagcgccggaggggcaaggggcacgatggcctttaccagggtctcagtacagccaccaaggacacctacgacgcccttcacatgcaggccctgccccctcgcggctctggcgagggaaggggttccctgcttacttgcggcgacgtcgaagagaatcccggtccgatggccctcccagtaactgccctccttttgcccctcgcactccttcttcatgccgctcgccccaactgggtcaacgtgattagcgatttgaagaaaatcgaggaccttatacagtctatgcatattgacgctacactgtatactgagagtgatgtacacccgtcctgtaaggtaacggccatgaaatgctttcttctggagctccaggtcatcagcttggagtctggggacgcaagcatccacgatacggttgaaaacctcatcatccttgcgaacaactctctctcatctaatggaaacgttacagagagtgggtgtaaggagtgcgaagagttggaagaaaaaaacatcaaagaatttcttcaatccttcgttcacatagtgcaaatgttcattaacacgtccactaccacacccgccccgaggccacctacgccggcaccgactatcgccagtcaacccctctctctgcgccccgaggcttgccggcctgcggctggtggggcggtccacacccggggcctggattttgcgtgcgatatatacatctgggcacctcttgccggcacctgcggagtgctgcttctctcactcgttattacgctgtactgctaa

SEQ ID NO: 1344 - DNA, 2310 bp, synthetic construct
  misc_feature 1..2310: note = Synthetic
  source 1..2310: mol_type = other DNA
atggccttaccagtgaccgccttgctcctgccgctggccttgctgctccacgccgccaggccgcaggttcagctggtacagtctggagctgaggtgaagaagtctggggcctcagtgaaggtctcctgcaaggcttctggttacaccttaaccagctatggcatcagctgggtgcgacaggcccctggacaagggcttgagtggatgggatggatcagcgcttacaatggtaacataaactatgcacagaagttccagggcagagtcaccatgaccacagacacatccacgagcacagcctacatggagctgaggagcctgagatctgacgacacggccgtgtattactgtgtgagagatggggaccggtacaactggaaccacagctacatggacgtctggggcaaagggaccacggtcaccgtctcctcaggtggaggcggttcaggcggaggtggctctggcggtggcggatcggacatccagatgacccagtctccatcctcactgtctacatctgtaggagacagagtcaccatcacttgtcgggcgagtcagggcattagcaattatttagcctggtttcagcagaaaccagggaaagcccctaagtccctgatctatgctgcatccagtttgcaaagtggggtcccatcaaagttcagcggcagtggatctgggacagatttctctctcaccattagcagcctgcagcctgaagattttgcaacttattactgccaacagtataatagttacccgatcaccttcggccaagggacacgactggagattaaaggctctggcggcggcggcagctgcccttattctaaccctaggctctgcagcggaggcggcggcagcgagctgcctacccaaggcacatttagcaacgtctccaccaacgtgtcccctgccaaacccaccaccacagcttgtccttacagcaatcctagcctgtgcggcggcggcggcagcaccacgacgccagcgccgcggccaccaacaccggcgcccaccatcgcgtcgcagcccctgtccctgcgcccagaggcgtgccggccagcggcggggggcgcagtgcacacgagggggctggacttcgcctgtgatatctacatctgggcgcccttggccgggacttgtggggtccttctcctgtcactggttatcaccctttactgccggagggaccagaggctgccccccgatgcccacaagccccctgggggaggcagtttccggacccccatccaagaggagcaggccgacgcccactccaccctggccaagatcagagtgaagttcagcaggagcgcagacgcccccgcgtaccagcagggccagaaccagctctataacgagctcaatctaggacgaagagaggagtacgatgttttggacaagagacgtggccgggaccctgagatggggggaaagccgagaaggaagaaccctcaggaaggcctgtacaatgaactgcagaaagataagatggcggaggcctacagtgagattgggatgaaaggcgagcgccggaggggcaaggggcacgatggcctttaccagggtctcagtacagccaccaaggacacctacgacgcccttcacatgcaggccctgccccctcgcggctctggcgagggaaggggttccctgcttacttgcggcgacgtcgaagagaatcccggtccgatggccctcccagtaactgccctccttttgcccctcgcactccttcttcatgccgctcgccccaactgggtcaacgtgattagcgatttgaagaaaatcgaggaccttatacagtctatgcatattgacgctacactgtatactgagagtgatgtacacccgtcctgtaaggtaacggccatgaaatgctttcttctggagctccaggtcatcagcttggagtctggggacgcaagcatccacgatacggttgaaaacctcatcatccttgcgaacaactctctctcatctaatggaaacgttacagagagtgggtgtaaggagtgcgaagagttggaagaaaaaaacatcaaagaatttcttcaatccttcgttcacatagtgcaaatgttcattaacacgtccactaccacacccgccccgaggccacctacgccggcaccgactatcgccagtcaacccctctctctgcgccccgaggcttgccggcctgcggctggtggggcggtccacacccggggcctggattttgcgtgcgatatatacatctgggcacctcttgccggcacctgcggagtgctgcttctctcactcgttattacgctgtactgctaa

SEQ ID NO: 1345 - DNA, 2307 bp, synthetic construct
  misc_feature 1..2307: note = Synthetic
  source 1..2307: mol_type = other DNA
atggccttaccagtgaccgccttgctcctgccgctggccttgctgctccacgccgccaggccggaggtgcagctgttggagtctgggggagacttggtacagcctggggggtccctgcgactctcctgtgcagcctctggattcacctttagcacctatgccatgacctgggtccgccaggctccagggaaggggctggagtgggtctcagctattagtggtactagtggtagcacatactacgcagactccgtgaagggccggttcaccatctccagagacaattccaagagcacgctgtatctgcacatgaacagcctgagaaccgaggacacggccgtatattactgtgcgagaggcggatataactggcactactactactacatggacgtctggggcaaagggaccacggtcaccgtctcctcaggtggaggcggttcaggcggaggtggctctggcggtggcggatcggaaattgtgctgactcagtctccagactttcagtctgtgactccaaaggagaaagtcaccatcacctgccgggccagtcagagcattggaagtagcttacactggtaccagcagaaaccagatcagtctccaaagctcctcatcaagtatgtttcccagtccatctcaggggtcccctcgaggttcagtggcagtggatctgggacagatttcaccctcaccatcaatagcctggaagctgaagatgctgcagcgtattactgtcatcagagtagtagtttaccgtggacgttcggccaagggaccaaggtggaaatcaaaggctctggcggcggcggcagctgcccttattctaaccctaggctctgcagcggaggcggcggcagcgagctgcctacccaaggcacatttagcaacgtctccaccaacgtgtcccctgccaaacccaccaccacagcttgtccttacagcaatcctagcctgtgcggcggcggcggcagcaccacgacgccagcgccgcggccaccaacaccggcgcccaccatcgcgtcgcagcccctgtccctgcgcccagaggcgtgccggccagcggcggggggcgcagtgcacacgagggggctggacttcgcctgtgatatctacatctgggcgcccttggccgggacttgtggggtccttctcctgtcactggttatcaccctttactgccggagggaccagaggctgccccccgatgcccacaagccccctgggggaggcagtttccggacccccatccaagaggagcaggccgacgcccactccaccctggccaagatcagagtgaagttcagcaggagcgcagacgcccccgcgtaccagcagggccagaaccagctctataacgagctcaatctaggacgaagagaggagtacgatgttttggacaagagacgtggccgggaccctgagatggggggaaagccgagaaggaagaaccctcaggaaggcctgtacaatgaactgcagaaagataagatggcggaggcctacagtgagattgggatgaaaggcgagcgccggaggggcaaggggcacgatggcctttaccagggtctcagtacagccaccaaggacacctacgacgcccttcacatgcaggccctgccccctcgcggctctggcgagggaaggggttccctgcttacttgcggcgacgtcgaagagaatcccggtccgatggccctcccagtaactgccctccttttgcccctcgcactccttcttcatgccgctcgccccaactgggtcaacgtgattagcgatttgaagaaaatcgaggaccttatacagtctatgcatattgacgctacactgtatactgagagtgatgtacacccgtcctgtaaggtaacggccatgaaatgctttcttctggagctccaggtcatcagcttggagtctggggacgcaagcatccacgatacggttgaaaacctcatcatccttgcgaacaactctctctcatctaatggaaacgttacagagagtgggtgtaaggagtgcgaagagttggaagaaaaaaacatcaaagaatttcttcaatccttcgttcacatagtgcaaatgttcattaacacgtccactaccacacccgccccgaggccacctacgccggcaccgactatcgccagtcaacccctctctctgcgccccgaggcttgccggcctgcggctggtggggcggtccacacccggggcctggattttgcgtgcgatatatacatctgggcacctcttgccggcacctgcggagtgctgcttctctcactcgttattacgctgtactgctaa

SEQ ID NO: 1346 - DNA, 2310 bp, synthetic construct
  misc_feature 1..2310: note = Synthetic
  source 1..2310: mol_type = other DNA
atggccttaccagtgaccgccttgctcctgccgctggccttgctgctccacgccgccaggccggaggtgcagctgttggagtctgggggagacttggtacagcctggggggtccctgcgactctcctgtgcagcctctggattcacctttagcacctatgccatgacctgggtccgccaggctccagggaaggggctggagtgggtctcagctattagtggtactagtggtagcacatactacgcagactccgtgaagggccggttcaccatctccagagacaattccaagagcacgctgtatctgcacatgaacagcctgagaaccgaggacacggccgtatattactgtgcgagaggcggatataactggcactactactactacatggacgtctggggcaaagggaccacggtcaccgtctcctcaggtggaggcggttcaggcggaggtggctctggcggtggcggatcggaaattgtaatgacacagtctccagccaccctgtctttgtctccaggggaaagagccaccctctcctgcagggccagtcagagtgttagcagcagctacttatcctggtaccagcagaaacctgggctggctcccaggctcctcatctatggtgcatccaccagggccactggcatcccagccaggttcagtggcagtgggtctgggacagacttcactctcaccatcagcagcctgcagcctgaagattttgcagtttattactgtcagcaggattataacttacctccgacgttcggccaagggaccaaggtggaaatcaaaggctctggcggcggcggcagctgcccttattctaaccctaggctctgcagcggaggcggcggcagcgagctgcctacccaaggcacatttagcaacgtctccaccaacgtgtcccctgccaaacccaccaccacagcttgtccttacagcaatcctagcctgtgcggcggcggcggcagcaccacgacgccagcgccgcggccaccaacaccggcgcccaccatcgcgtcgcagcccctgtccctgcgcccagaggcgtgccggccagcggcggggggcgcagtgcacacgagggggctggacttcgcctgtgatatctacatctgggcgcccttggccgggacttgtggggtccttctcctgtcactggttatcaccctttactgccggagggaccagaggctgccccccgatgcccacaagccccctgggggaggcagtttccggacccccatccaagaggagcaggccgacgcccactccaccctggccaagatcagagtgaagttcagcaggagcgcagacgcccccgcgtaccagcagggccagaaccagctctataacgagctcaatctaggacgaagagaggagtacgatgttttggacaagagacgtggccgggaccctgagatggggggaaagccgagaaggaagaaccctcaggaaggcctgtacaatgaactgcagaaagataagatggcggaggcctacagtgagattgggatgaaaggcgagcgccggaggggcaaggggcacgatggcctttaccagggtctcagtacagccaccaaggacacctacgacgcccttcacatgcaggccctgccccctcgcggctctggcgagggaaggggttccctgcttacttgcggcgacgtcgaagagaatcccggtccgatggccctcccagtaactgccctccttttgcccctcgcactccttcttcatgccgctcgccccaactgggtcaacgtgattagcgatttgaagaaaatcgaggaccttatacagtctatgcatattgacgctacactgtatactgagagtgatgtacacccgtcctgtaaggtaacggccatgaaatgctttcttctggagctccaggtcatcagcttggagtctggggacgcaagcatccacgatacggttgaaaacctcatcatccttgcgaacaactctctctcatctaatggaaacgttacagagagtgggtgtaaggagtgcgaagagttggaagaaaaaaacatcaaagaatttcttcaatccttcgttcacatagtgcaaatgttcattaacacgtccactaccacacccgccccgaggccacctacgccggcaccgactatcgccagtcaacccctctctctgcgccccgaggcttgccggcctgcggctggtggggcggtccacacccggggcctggattttgcgtgcgatatatacatctgggcacctcttgccggcacctgcggagtgctgcttctctcactcgttattacgctgtactgctaa

SEQ ID NO: 1347 - DNA, 2316 bp, synthetic construct
  misc_feature 1..2316: note = Synthetic
  source 1..2316: mol_type = other DNA
atggccttaccagtgaccgccttgctcctgccgctggccttgctgctccacgccgccaggccgcaagtgcagctggtggagagcggcggaggagtggtgcaacctggccggagcctgagactgagctgcgctgccagcggcttcaccttcaacaactacgacatgtactgggtgcggcaggcccctggcaagggcctggaatgggtcgccgtgacatggtatgacggctccaacaagtactacgccgacagcgtgaagggcagattcaccatcagcagagataatagcaagaacaccctgtacctgcagatgaacagcctgcgggccgaggacaccgccgtgtactactgcgctagaggcgacaattggaacgacgagcaccattacttctactacatggacgtgtggggcaaaggcaccaccgtgaccgtgtccagcggcggcggtggatctggaggcggaggctctggaggcggcggctccgagatcgtgctgacacagtctccagatttccagtctgtgacccctaaggaaaaggttacaattacatgcagagcctctcagagcatcggaagctctctgcactggtatcagcagaaacctgatcagagccccaagctgctgatcaaattcgccagccagtccttcagcggcgtccccagccgcttcagcggcagcggcagcggcactgattttacactgaccatccacagcctggaggccgaggacgccgccacctactattgtcaccagagcagctccctgccttggacctttggccagggcacaaaggtggaaatcaagggctctggcggcggcggcagctgcccttattctaaccctaggctctgcagcggaggcggcggcagcgagctgcctacccaaggcacatttagcaacgtctccaccaacgtgtcccctgccaaacccaccaccacagcttgtccttacagcaatcctagcctgtgcggcggcggcggcagcaccacgacgccagcgccgcggccaccaacaccggcgcccaccatcgcgtcgcagcccctgtccctgcgcccagaggcgtgccggccagcggcggggggcgcagtgcacacgagggggctggacttcgcctgtgatatctacatctgggcgcccttggccgggacttgtggggtccttctcctgtcactggttatcaccctttactgccggagggaccagaggctgccccccgatgcccacaagccccctgggggaggcagtttccggacccccatccaagaggagcaggccgacgcccactccaccctggccaagatcagagtgaagttcagcaggagcgcagacgcccccgcgtaccagcagggccagaaccagctctataacgagctcaatctaggacgaagagaggagtacgatgttttggacaagagacgtggccgggaccctgagatggggggaaagccgagaaggaagaaccctcaggaaggcctgtacaatgaactgcagaaagataagatggcggaggcctacagtgagattgggatgaaaggcgagcgccggaggggcaaggggcacgatggcctttaccagggtctcagtacagccaccaaggacacctacgacgcccttcacatgcaggccctgccccctcgcggctctggcgagggaaggggttccctgcttacttgcggcgacgtcgaagagaatcccggtccgatggccctcccagtaactgccctccttttgcccctcgcactccttcttcatgccgctcgccccaactgggtcaacgtgattagcgatttgaagaaaatcgaggaccttatacagtctatgcatattgacgctacactgtatactgagagtgatgtacacccgtcctgtaaggtaacggccatgaaatgctttcttctggagctccaggtcatcagcttggagtctggggacgcaagcatccacgatacggttgaaaacctcatcatccttgcgaacaactctctctcatctaatggaaacgttacagagagtgggtgtaaggagtgcgaagagttggaagaaaaaaacatcaaagaatttcttcaatccttcgttcacatagtgcaaatgttcattaacacgtccactaccacacccgccccgaggccacctacgccggcaccgactatcgccagtcaacccctctctctgcgccccgaggcttgccggcctgcggctggtggggcggtccacacccggggcctggattttgcgtgcgatatatacatctgggcacctcttgccggcacctgcggagtgctgcttctctcactcgttattacgctgtactgctaa

SEQ ID NO: 1348 - DNA, 2316 bp, synthetic construct
  misc_feature 1..2316: note = Synthetic
  source 1..2316: mol_type = other DNA
atggccttaccagtgaccgccttgctcctgccgctggccttgctgctccacgccgccaggccgcaagtgcagctggtggagtctggcggcggagtggtgcaacctggaaggagcctgcggctgagctgcgctgccagcggcttcaccttcagcaattacgacatgcactgggtgcggcaggcccctggcaaaggcctggaatgggtcacaatcatctggcatgatgccagcaacaagtactacctggacagcgtcaagggcagattcacaatcagccgggacaacagcaagaacaccctgtacctgcagatgaacagcctgagagccgaggacaccgctgtgtactattgtgccagaggagataattggaacgacgagcaccactacttctactacatggacgtgtggggcaagggcaccaccgtgaccgtttctagcggcggaggcggctccggcggtggaggctccggaggcggcggctctgagatcgtgctgacacagagccctgattttcagagcgtgacacctaaagagaaggtgaccatcacctgcagagccagccagagcatcggctccagcctgcactggtatcagcagaagcccgaccagagcccaaagctgctgatcaagttcgcctcccagtctttttccggcgtgcccagcagattcagcgggagcggctctggcaccgacttcacactgaccatccactctctggaagccgaggatgccgccacctactattgccaccagagcagctctctcccttggaccttcggccagggcacaaaagtggaaattaagggctctggcggcggcggcagctgcccttattctaaccctaggctctgcagcggaggcggcggcagcgagctgcctacccaaggcacatttagcaacgtctccaccaacgtgtcccctgccaaacccaccaccacagcttgtccttacagcaatcctagcctgtgcggcggcggcggcagcaccacgacgccagcgccgcggccaccaacaccggcgcccaccatcgcgtcgcagcccctgtccctgcgcccagaggcgtgccggccagcggcggggggcgcagtgcacacgagggggctggacttcgcctgtgatatctacatctgggcgcccttggccgggacttgtggggtccttctcctgtcactggttatcaccctttactgccggagggaccagaggctgccccccgatgcccacaagccccctgggggaggcagtttccggacccccatccaagaggagcaggccgacgcccactccaccctggccaagatcagagtgaagttcagcaggagcgcagacgcccccgcgtaccagcagggccagaaccagctctataacgagctcaatctaggacgaagagaggagtacgatgttttggacaagagacgtggccgggaccctgagatggggggaaagccgagaaggaagaaccctcaggaaggcctgtacaatgaactgcagaaagataagatggcggaggcctacagtgagattgggatgaaaggcgagcgccggaggggcaaggggcacgatggcctttaccagggtctcagtacagccaccaaggacacctacgacgcccttcacatgcaggccctgccccctcgcggctctggcgagggaaggggttccctgcttacttgcggcgacgtcgaagagaatcccggtccgatggccctcccagtaactgccctccttttgcccctcgcactccttcttcatgccgctcgccccaactgggtcaacgtgattagcgatttgaagaaaatcgaggaccttatacagtctatgcatattgacgctacactgtatactgagagtgatgtacacccgtcctgtaaggtaacggccatgaaatgctttcttctggagctccaggtcatcagcttggagtctggggacgcaagcatccacgatacggttgaaaacctcatcatccttgcgaacaactctctctcatctaatggaaacgttacagagagtgggtgtaaggagtgcgaagagttggaagaaaaaaacatcaaagaatttcttcaatccttcgttcacatagtgcaaatgttcattaacacgtccactaccacacccgccccgaggccacctacgccggcaccgactatcgccagtcaacccctctctctgcgccccgaggcttgccggcctgcggctggtggggcggtccacacccggggcctggattttgcgtgcgatatatacatctgggcacctcttgccggcacctgcggagtgctgcttctctcactcgttattacgctgtactgctaa

SEQ ID NO: 1349 - DNA, 2316 bp, synthetic construct
  misc_feature 1..2316: note = Synthetic
  source 1..2316: mol_type = other DNA
atggccttaccagtgaccgccttgctcctgccgctggccttgctgctccacgccgccaggccgcaagtgcagctggtcgaaagcggcggaggcgtggtgcaacctggaagaagcctgagactgagctgcgccgcctctggcttcaccttttctaattacgacatgcactgggtgcggcaggcccctggcaagggtcttgagtgggttaccatcatctggcacgacggcagcaacaagtactacctggacagcgtgaagggcagatttacaatcagcagagataatagcaagaacaccctgtacctgcagatgaacagcctgcgggccgaggacaccgccgtgtactattgtgccagaggcgacaactggaacgacgagcaccactacttctactacatggacgtgtggggcaaaggcaccacagtgaccgtgtccagcggcggcggcggcagcggcggaggaggctctggcggaggcggcagcgagatcgtgctgacccagagccctgacttccagagcgtgacccctaaggaaaaggtgacaattacatgcagggccagccagtccatcggctcttctctgcattggtatcagcagaagcccgatcagtctccaaagctgctgatcaaattcgccagccagagcttcagcggagtccccagccggttcagcggatctggctccggcactgatttcaccctgaccatccacagcctggaggccgaagatgccgctacatactattgccaccagtcctccagcctgccttggacattcggccagggcaccaaggtggagatcaaaggctctggcggcggcggcagctgcccttattctaaccctaggctctgcagcggaggcggcggcagcgagctgcctacccaaggcacatttagcaacgtctccaccaacgtgtcccctgccaaacccaccaccacagcttgtccttacagcaatcctagcctgtgcggcggcggcggcagcaccacgacgccagcgccgcggccaccaacaccggcgcccaccatcgcgtcgcagcccctgtccctgcgcccagaggcgtgccggccagcggcggggggcgcagtgcacacgagggggctggacttcgcctgtgatatctacatctgggcgcccttggccgggacttgtggggtccttctcctgtcactggttatcaccctttactgccggagggaccagaggctgccccccgatgcccacaagccccctgggggaggcagtttccggacccccatccaagaggagcaggccgacgcccactccaccctggccaagatcagagtgaagttcagcaggagcgcagacgcccccgcgtaccagcagggccagaaccagctctataacgagctcaatctaggacgaagagaggagtacgatgttttggacaagagacgtggccgggaccctgagatggggggaaagccgagaaggaagaaccctcaggaaggcctgtacaatgaactgcagaaagataagatggcggaggcctacagtgagattgggatgaaaggcgagcgccggaggggcaaggggcacgatggcctttaccagggtctcagtacagccaccaaggacacctacgacgcccttcacatgcaggccctgccccctcgcggctctggcgagggaaggggttccctgcttacttgcggcgacgtcgaagagaatcccggtccgatggccctcccagtaactgccctccttttgcccctcgcactccttcttcatgccgctcgccccaactgggtcaacgtgattagcgatttgaagaaaatcgaggaccttatacagtctatgcatattgacgctacactgtatactgagagtgatgtacacccgtcctgtaaggtaacggccatgaaatgctttcttctggagctccaggtcatcagcttggagtctggggacgcaagcatccacgatacggttgaaaacctcatcatccttgcgaacaactctctctcatctaatggaaacgttacagagagtgggtgtaaggagtgcgaagagttggaagaaaaaaacatcaaagaatttcttcaatccttcgttcacatagtgcaaatgttcattaacacgtccactaccacacccgccccgaggccacctacgccggcaccgactatcgccagtcaacccctctctctgcgccccgaggcttgccggcctgcggctggtggggcggtccacacccggggcctggattttgcgtgcgatatatacatctgggcacctcttgccggcacctgcggagtgctgcttctctcactcgttattacgctgtactgctaa

SEQ ID NO: 1350 - DNA, 2298 bp, synthetic construct
  misc_feature 1..2298: note = Synthetic
  source 1..2298: mol_type = other DNA
atggccttaccagtgaccgccttgctcctgccgctggccttgctgctccacgccgccaggccggaggtgcagctgctggaaagcggcggcggactcgtgcaacctggcggctccctgcggctgtcttgcgccgcttctggcttcacattcagcatctacgccatgagctgggtcagacaggcccccggcaaaggcctggaatgggtgtccgccatcagcggcggcggagataccacctactacgccgacagcgtgaagggcagattcaccattagcagagataatagcaagaccacactggacctgcaaatgaacagcctgcgggccgaggacaccgccgtgtactactgtgctaagcacacctcttattacatggacgtgtggggaaaaggcacaaccgtgaccgtgtccagcggcggaggcggctctggcggcggcggcagcggcggtggcggaagccagaccgtggtgacacaggagccttctctgagcgtgagccccggcggcaccgtgaccctgacatgcggcctgagcagcggctccgtctccaccagctactatcctagctggtatcagcagacccctggccaggcccctagaaccctgatctacagcacaaacatccggagctctggagtgccagacagatttagcggaagcatcctgggcaacaaggccgccctgaccatcaccggcgcccaggctgacgacgagagtgattactactgcaagctgtacatgggctctggcatcatcttcggcagcggaacaaaggtgacagttctgggctctggcggcggcggcagctgcccttattctaaccctaggctctgcagcggaggcggcggcagcgagctgcctacccaaggcacatttagcaacgtctccaccaacgtgtcccctgccaaacccaccaccacagcttgtccttacagcaatcctagcctgtgcggcggcggcggcagcaccacgacgccagcgccgcggccaccaacaccggcgcccaccatcgcgtcgcagcccctgtccctgcgcccagaggcgtgccggccagcggcggggggcgcagtgcacacgagggggctggacttcgcctgtgatatctacatctgggcgcccttggccgggacttgtggggtccttctcctgtcactggttatcaccctttactgccggagggaccagaggctgccccccgatgcccacaagccccctgggggaggcagtttccggacccccatccaagaggagcaggccgacgcccactccaccctggccaagatcagagtgaagttcagcaggagcgcagacgcccccgcgtaccagcagggccagaaccagctctataacgagctcaatctaggacgaagagaggagtacgatgttttggacaagagacgtggccgggaccctgagatggggggaaagccgagaaggaagaaccctcaggaaggcctgtacaatgaactgcagaaagataagatggcggaggcctacagtgagattgggatgaaaggcgagcgccggaggggcaaggggcacgatggcctttaccagggtctcagtacagccaccaaggacacctacgacgcccttcacatgcaggccctgccccctcgcggctctggcgagggaaggggttccctgcttacttgcggcgacgtcgaagagaatcccggtccgatggccctcccagtaactgccctccttttgcccctcgcactccttcttcatgccgctcgccccaactgggtcaacgtgattagcgatttgaagaaaatcgaggaccttatacagtctatgcatattgacgctacactgtatactgagagtgatgtacacccgtcctgtaaggtaacggccatgaaatgctttcttctggagctccaggtcatcagcttggagtctggggacgcaagcatccacgatacggttgaaaacctcatcatccttgcgaacaactctctctcatctaatggaaacgttacagagagtgggtgtaaggagtgcgaagagttggaagaaaaaaacatcaaagaatttcttcaatccttcgttcacatagtgcaaatgttcattaacacgtccactaccacacccgccccgaggccacctacgccggcaccgactatcgccagtcaacccctctctctgcgccccgaggcttgccggcctgcggctggtggggcggtccacacccggggcctggattttgcgtgcgatatatacatctgggcacctcttgccggcacctgcggagtgctgcttctctcactcgttattacgctgtactgctaa

SEQ ID NO: 1351 - DNA, 2316 bp, synthetic construct
  misc_feature 1..2316: note = Synthetic
  source 1..2316: mol_type = other DNA
atggccttaccagtgaccgccttgctcctgccgctggccttgctgctccacgccgccaggccgcaagtgcagctggtggaaagcggcggtggagtggtgcaacctggcagaagcctgcggctgagctgcgccgcttctggcttcacattttctaattacgacaagcactgggtgcggcaggcccctggcaaaggcctggagtgggtcgctgtgatctggtatgacggcagcaacaagtactacgccgacagcgtgaagggcagattcaccatcagcagagacaacagcaagaacaccctgtacctgcagatgaacagcctgcgggctgaagataccgccatgtactattgtgccaggggcgataattggaacgacgagcaccactacttctactacatggacgtgtggggaaagggcaccacagtgaccgtgtccagcggcggcggcggcagcggcggcggcggcagcggcggcggcggcagcgagatcgtgctgacacagtcccctgactttcagagcgtgacccctaaggaaaaggtcacaattacatgcagagcctctcagagcatcggcagctctctgcactggtatcagcagaaacctgatcagagccccaagctgctgatcaaattcgccagccagagcttctccggcgtgccaagcagattcagcggcagcggcagcggaaccgatttcaccctgaccatccattctctggaggccgaggacgccgccacctactactgccaccagtctagcagcctgccctggaccttcggccagggcacaaaggttgagatcaagggctctggcggcggcggcagctgcccttattctaaccctaggctctgcagcggaggcggcggcagcgagctgcctacccaaggcacatttagcaacgtctccaccaacgtgtcccctgccaaacccaccaccacagcttgtccttacagcaatcctagcctgtgcggcggcggcggcagcaccacgacgccagcgccgcggccaccaacaccggcgcccaccatcgcgtcgcagcccctgtccctgcgcccagaggcgtgccggccagcggcggggggcgcagtgcacacgagggggctggacttcgcctgtgatatctacatctgggcgcccttggccgggacttgtggggtccttctcctgtcactggttatcaccctttactgccggagggaccagaggctgccccccgatgcccacaagccccctgggggaggcagtttccggacccccatccaagaggagcaggccgacgcccactccaccctggccaagatcagagtgaagttcagcaggagcgcagacgcccccgcgtaccagcagggccagaaccagctctataacgagctcaatctaggacgaagagaggagtacgatgttttggacaagagacgtggccgggaccctgagatggggggaaagccgagaaggaagaaccctcaggaaggcctgtacaatgaactgcagaaagataagatggcggaggcctacagtgagattgggatgaaaggcgagcgccggaggggcaaggggcacgatggcctttaccagggtctcagtacagccaccaaggacacctacgacgcccttcacatgcaggccctgccccctcgcggctctggcgagggaaggggttccctgcttacttgcggcgacgtcgaagagaatcccggtccgatggccctcccagtaactgccctccttttgcccctcgcactccttcttcatgccgctcgccccaactgggtcaacgtgattagcgatttgaagaaaatcgaggaccttatacagtctatgcatattgacgctacactgtatactgagagtgatgtacacccgtcctgtaaggtaacggccatgaaatgctttcttctggagctccaggtcatcagcttggagtctggggacgcaagcatccacgatacggttgaaaacctcatcatccttgcgaacaactctctctcatctaatggaaacgttacagagagtgggtgtaaggagtgcgaagagttggaagaaaaaaacatcaaagaatttcttcaatccttcgttcacatagtgcaaatgttcattaacacgtccactaccacacccgccccgaggccacctacgccggcaccgactatcgccagtcaacccctctctctgcgccccgaggcttgccggcctgcggctggtggggcggtccacacccggggcctggattttgcgtgcgatatatacatctgggcacctcttgccggcacctgcggagtgctgcttctctcactcgttattacgctgtactgctaa

SEQ ID NO: 1352 - DNA, 2310 bp, synthetic construct
  misc_feature 1..2310: note = Synthetic
  source 1..2310: mol_type = other DNA
atggccttaccagtgaccgccttgctcctgccgctggccttgctgctccacgccgccaggccgcaagtgcagctggtccagtctggagctgaggtgaagaagcccggcgccagcgtgaaggtgtcctgtaaagcctctggttatacattcacaaactatggcttcagctgggttagacaggcccctggacagggcctggactggatgggatggatcagcgcctacaacggctacaccaactacacccagaagctgcagggcagagtgacaatgaccacagataccagcaccaccacagcttacatggaactgaggtccctgcggagcgacgacaccgccgtgtactactgcgccagacggggcctgctgtactactactacagcatggacgtgtggggcaagggcaccaccgtgaccgtgtcttctggcggcggcggaagcggcggcggaggaagcggcggcggcggcagcgagatcgtgctgacccaatctcctgccacactgagcctctccccaggcgagcgggccaccctgagctgcggcgcttctcagagcgtgtacaatagctacctggcctggtatcagcagaaacccggcctggctcctagactgctgatctacgacgccagcctgagagccaccggcgtgcctgatagattcagcggcagcggcagcggaaccgacttcaccctgacaatcagcacactggaacccgaggattttgccgtgtactattgccagcagtacggcggcagccctatgtacacattcggccagggcaccaagctggaaatcaagggctctggcggcggcggcagctgcccttattctaaccctaggctctgcagcggaggcggcggcagcgagctgcctacccaaggcacatttagcaacgtctccaccaacgtgtcccctgccaaacccaccaccacagcttgtccttacagcaatcctagcctgtgcggcggcggcggcagcaccacgacgccagcgccgcggccaccaacaccggcgcccaccatcgcgtcgcagcccctgtccctgcgcccagaggcgtgccggccagcggcggggggcgcagtgcacacgagggggctggacttcgcctgtgatatctacatctgggcgcccttggccgggacttgtggggtccttctcctgtcactggttatcaccctttactgccggagggaccagaggctgccccccgatgcccacaagccccctgggggaggcagtttccggacccccatccaagaggagcaggccgacgcccactccaccctggccaagatcagagtgaagttcagcaggagcgcagacgcccccgcgtaccagcagggccagaaccagctctataacgagctcaatctaggacgaagagaggagtacgatgttttggacaagagacgtggccgggaccctgagatggggggaaagccgagaaggaagaaccctcaggaaggcctgtacaatgaactgcagaaagataagatggcggaggcctacagtgagattgggatgaaaggcgagcgccggaggggcaaggggcacgatggcctttaccagggtctcagtacagccaccaaggacacctacgacgcccttcacatgcaggccctgccccctcgcggctctggcgagggaaggggttccctgcttacttgcggcgacgtcgaagagaatcccggtccgatggccctcccagtaactgccctccttttgcccctcgcactccttcttcatgccgctcgccccaactgggtcaacgtgattagcgatttgaagaaaatcgaggaccttatacagtctatgcatattgacgctacactgtatactgagagtgatgtacacccgtcctgtaaggtaacggccatgaaatgctttcttctggagctccaggtcatcagcttggagtctggggacgcaagcatccacgatacggttgaaaacctcatcatccttgcgaacaactctctctcatctaatggaaacgttacagagagtgggtgtaaggagtgcgaagagttggaagaaaaaaacatcaaagaatttcttcaatccttcgttcacatagtgcaaatgttcattaacacgtccactaccacacccgccccgaggccacctacgccggcaccgactatcgccagtcaacccctctctctgcgccccgaggcttgccggcctgcggctggtggggcggtccacacccggggcctggattttgcgtgcgatatatacatctgggcacctcttgccggcacctgcggagtgctgcttctctcactcgttattacgctgtactgctaa

SEQ ID NO: 1353 - DNA, 2298 bp, synthetic construct
  misc_feature 1..2298: note = Synthetic
  source 1..2298: mol_type = other DNA
atggccttaccagtgaccgccttgctcctgccgctggccttgctgctccacgccgccaggccggaggtgcagctgctggaaagcggcggcggactggtgcaacctggcggctctctgcggctgtcctgtaccgccagcggcttcaccttcagcagcttcgccatgagctgggtcagacaggctccaggaaaaggcctggaatgggtgtctgccatgagcggatctggcgacaccacatactacgccgattccgtgaagggcagatttaccatcagcagagataatagcaagacaacactgtatctgcagatgaacagcctgagggccgaggacacagccgtgtacagctgcgccaagcacaccacctactacatggacgtgtggggcaaaggcaccaccgtcacagtgtccagcggcggaggcggcagcggaggcggcggcagcggcggaggaggctctcagaccgtggtgacccaggagcctagcctgtccgtgtcccctggcggcaccgtgaccctcacatgcggcctgagcagcggctcagtttccacgagcgactaccccagctggtatcagcaaacccctggacaggctcctcggaccctgatctacagaaccaacacccggagcagcggcgtgcccgatagattctctggctctatcctgggcaacaaggccgctctgaccattacaggcgcccaggccgacgacgagagcgattattactgcgtgctgtacatggacagcggcatcatcttcggctctggaacaaaggtgacagtgctgggctctggcggcggcggcagctgcccttattctaaccctaggctctgcagcggaggcggcggcagcgagctgcctacccaaggcacatttagcaacgtctccaccaacgtgtcccctgccaaacccaccaccacagcttgtccttacagcaatcctagcctgtgcggcggcggcggcagcaccacgacgccagcgccgcggccaccaacaccggcgcccaccatcgcgtcgcagcccctgtccctgcgcccagaggcgtgccggccagcggcggggggcgcagtgcacacgagggggctggacttcgcctgtgatatctacatctgggcgcccttggccgggacttgtggggtccttctcctgtcactggttatcaccctttactgccggagggaccagaggctgccccccgatgcccacaagccccctgggggaggcagtttccggacccccatccaagaggagcaggccgacgcccactccaccctggccaagatcagagtgaagttcagcaggagcgcagacgcccccgcgtaccagcagggccagaaccagctctataacgagctcaatctaggacgaagagaggagtacgatgttttggacaagagacgtggccgggaccctgagatggggggaaagccgagaaggaagaaccctcaggaaggcctgtacaatgaactgcagaaagataagatggcggaggcctacagtgagattgggatgaaaggcgagcgccggaggggcaaggggcacgatggcctttaccagggtctcagtacagccaccaaggacacctacgacgcccttcacatgcaggccctgccccctcgcggctctggcgagggaaggggttccctgcttacttgcggcgacgtcgaagagaatcccggtccgatggccctcccagtaactgccctccttttgcccctcgcactccttcttcatgccgctcgccccaactgggtcaacgtgattagcgatttgaagaaaatcgaggaccttatacagtctatgcatattgacgctacactgtatactgagagtgatgtacacccgtcctgtaaggtaacggccatgaaatgctttcttctggagctccaggtcatcagcttggagtctggggacgcaagcatccacgatacggttgaaaacctcatcatccttgcgaacaactctctctcatctaatggaaacgttacagagagtgggtgtaaggagtgcgaagagttggaagaaaaaaacatcaaagaatttcttcaatccttcgttcacatagtgcaaatgttcattaacacgtccactaccacacccgccccgaggccacctacgccggcaccgactatcgccagtcaacccctctctctgcgccccgaggcttgccggcctgcggctggtggggcggtccacacccggggcctggattttgcgtgcgatatatacatctgggcacctcttgccggcacctgcggagtgctgcttctctcactcgttattacgctgtactgctaa

SEQ ID NO: 1354 - DNA, 2298 bp, synthetic construct
  misc_feature 1..2298: note = Synthetic
  source 1..2298: mol_type = other DNA
atggccttaccagtgaccgccttgctcctgccgctggccttgctgctccacgccgccaggccggaggtgcagctgctggaaagcggcggcggcctggtgcaacctggcggaagtctgcggctgtcttgtgccgcttctggattcaccttcaacacctacgccatgagctgggtgcggcaggcccctggcaaaggcctggaatgggtctccgccatgagcggctctggcgacacaacctactatgccgacagcgtgaagggcagatttacaatcagcagggataacagcaagaccaccctgtacctgcagatgaacagcctccgggccgaggacaccgccgtgtacagctgcgccaagcacaccagctactacatggacgtgtggggcaaaggcaccaccgtgaccgtgtccagcggaggtggcggcagcggcggcggaggctccggcggcggaggctcacagaccgtcgtgacccaggagccttctctgagcgtgtctccaggaggcacagttactctgacatgcggcctgtctagcggcagcgtgtccaccagcgactaccccagctggtatcagcaaacacctggccaggctcctagaaccctgatctatagaacaaataccagaagcagcggcgtgcccgatagattcagcggaagcatcctgggcaacaaggccgccctgaccatcaccggcgcccaggctgacgacgagtctgattactactgcgtgctgtacatgggcagcggcatcattttcggcagcggaacaaaggtgacagtgctgggctctggcggcggcggcagctgcccttattctaaccctaggctctgcagcggaggcggcggcagcgagctgcctacccaaggcacatttagcaacgtctccaccaacgtgtcccctgccaaacccaccaccacagcttgtccttacagcaatcctagcctgtgcggcggcggcggcagcaccacgacgccagcgccgcggccaccaacaccggcgcccaccatcgcgtcgcagcccctgtccctgcgcccagaggcgtgccggccagcggcggggggcgcagtgcacacgagggggctggacttcgcctgtgatatctacatctgggcgcccttggccgggacttgtggggtccttctcctgtcactggttatcaccctttactgccggagggaccagaggctgccccccgatgcccacaagccccctgggggaggcagtttccggacccccatccaagaggagcaggccgacgcccactccaccctggccaagatcagagtgaagttcagcaggagcgcagacgcccccgcgtaccagcagggccagaaccagctctataacgagctcaatctaggacgaagagaggagtacgatgttttggacaagagacgtggccgggaccctgagatggggggaaagccgagaaggaagaaccctcaggaaggcctgtacaatgaactgcagaaagataagatggcggaggcctacagtgagattgggatgaaaggcgagcgccggaggggcaaggggcacgatggcctttaccagggtctcagtacagccaccaaggacacctacgacgcccttcacatgcaggccctgccccctcgcggctctggcgagggaaggggttccctgcttacttgcggcgacgtcgaagagaatcccggtccgatggccctcccagtaactgccctccttttgcccctcgcactccttcttcatgccgctcgccccaactgggtcaacgtgattagcgatttgaagaaaatcgaggaccttatacagtctatgcatattgacgctacactgtatactgagagtgatgtacacccgtcctgtaaggtaacggccatgaaatgctttcttctggagctccaggtcatcagcttggagtctggggacgcaagcatccacgatacggttgaaaacctcatcatccttgcgaacaactctctctcatctaatggaaacgttacagagagtgggtgtaaggagtgcgaagagttggaagaaaaaaacatcaaagaatttcttcaatccttcgttcacatagtgcaaatgttcattaacacgtccactaccacacccgccccgaggccacctacgccggcaccgactatcgccagtcaacccctctctctgcgccccgaggcttgccggcctgcggctggtggggcggtccacacccggggcctggattttgcgtgcgatatatacatctgggcacctcttgccggcacctgcggagtgctgcttctctcactcgttattacgctgtactgctaa

SEQ ID NO: 1355 - DNA, 2298 bp, synthetic construct
  misc_feature 1..2298: note = Synthetic
  source 1..2298: mol_type = other DNA
atggccttaccagtgaccgccttgctcctgccgctggccttgctgctccacgccgccaggccggaagtgcagctgctggaaagcggcggcgacctggtgcaacctggcggctccctgagactgagctgcgccgcttctggctttaccttcagcacctacgccatgagctgggtgcggcaggcccctggcaaaggactggagtgggtctccgccatcagcggcagcggcgagaatatctactacgctgatagcgtgaagggcagattcaccattagcagagataattctaagaacaccctgttcctgcagatgaacagcctgcgggccgaagataccgccgtgtactactgcgccaagcacacatcttactacatggacgtgtggggcaaaggcaccaccgtcacagtgtccagcggaggcggcggcagcggcggaggcggcagcggaggaggcggctcacagaccgtggtgacccaagagcccagcttctctgtgtccccaggtggcaccgtgacactgacatgcggcctgtacagcgacagcgtgtctacaagctactatcctagctggtatcagcagacacctggccaggctcctagaaccctgatctacaacaccaacacaagaagcagcggcgtgcccgaccggtttagcggaagcatcctgggcaacaaggccgccctgaccatcaccggcgcccaggccgacgacgagagcgactactattgtgtgctgtacatggtgtccggcatcgtgttcggctctggaacaaaggtgaccgttctgggctctggcggcggcggcagctgcccttattctaaccctaggctctgcagcggaggcggcggcagcgagctgcctacccaaggcacatttagcaacgtctccaccaacgtgtcccctgccaaacccaccaccacagcttgtccttacagcaatcctagcctgtgcggcggcggcggcagcaccacgacgccagcgccgcggccaccaacaccggcgcccaccatcgcgtcgcagcccctgtccctgcgcccagaggcgtgccggccagcggcggggggcgcagtgcacacgagggggctggacttcgcctgtgatatctacatctgggcgcccttggccgggacttgtggggtccttctcctgtcactggttatcaccctttactgccggagggaccagaggctgccccccgatgcccacaagccccctgggggaggcagtttccggacccccatccaagaggagcaggccgacgcccactccaccctggccaagatcagagtgaagttcagcaggagcgcagacgcccccgcgtaccagcagggccagaaccagctctataacgagctcaatctaggacgaagagaggagtacgatgttttggacaagagacgtggccgggaccctgagatggggggaaagccgagaaggaagaaccctcaggaaggcctgtacaatgaactgcagaaagataagatggcggaggcctacagtgagattgggatgaaaggcgagcgccggaggggcaaggggcacgatggcctttaccagggtctcagtacagccaccaaggacacctacgacgcccttcacatgcaggccctgccccctcgcggctctggcgagggaaggggttccctgcttacttgcggcgacgtcgaagagaatcccggtccgatggccctcccagtaactgccctccttttgcccctcgcactccttcttcatgccgctcgccccaactgggtcaacgtgattagcgatttgaagaaaatcgaggaccttatacagtctatgcatattgacgctacactgtatactgagagtgatgtacacccgtcctgtaaggtaacggccatgaaatgctttcttctggagctccaggtcatcagcttggagtctggggacgcaagcatccacgatacggttgaaaacctcatcatccttgcgaacaactctctctcatctaatggaaacgttacagagagtgggtgtaaggagtgcgaagagttggaagaaaaaaacatcaaagaatttcttcaatccttcgttcacatagtgcaaatgttcattaacacgtccactaccacacccgccccgaggccacctacgccggcaccgactatcgccagtcaacccctctctctgcgccccgaggcttgccggcctgcggctggtggggcggtccacacccggggcctggattttgcgtgcgatatatacatctgggcacctcttgccggcacctgcggagtgctgcttctctcactcgttattacgctgtactgctaa

SEQ ID NO: 1356 - DNA, 2316 bp, synthetic construct
  misc_feature 1..2316: note = Synthetic
  source 1..2316: mol_type = other DNA
atggccttaccagtgaccgccttgctcctgccgctggccttgctgctccacgccgccaggccgcaagtgcagctggtggaaagcggaggcggagttgtgcaacctggcagatctctgcgcctgtcatgcgccgccagcggctttacattctccagctacggcatgcactgggtgcggcaggcccctggcaaaggcctggaatgggtcgctgtgatctggtacgacggcatcaacaaatactacgccgacagcgtgaagggcagattcaccatcagcagagataatagcaagaacaccctgtacctgcagatgaacagcctgcgggccgaggacactgccgtgtactactgcgccagagagcggctggaacggagatactactactacatggacgtgtggggcaagggcaccaccgtgaccgtgtccagtggtggcggaggatctggcggaggcggctctggcggcggcggcagccagaccgtggtgacccaggagcctagcttcagcgtgtcccccggaggcacagtgaccctgacatgcggcctcagctctggctccgtcagcacctcttactatcctggatggtatcagcagacacctggccaggccccaagaaccctgatctacagcacaaacaccagaagcagcggcgtgcccgatagatttagcggcagcatcctgggcaacaaggccgccctgaccattacaggcgcccaggctgatgacgagagcgactactactgtgtgctgtacatgggcagcggcatgttcatcttcggctctggaaccaaggtgacagtgctgggctctggcggcggcggcagctgcccttattctaaccctaggctctgcagcggaggcggcggcagcgagctgcctacccaaggcacatttagcaacgtctccaccaacgtgtcccctgccaaacccaccaccacagcttgtccttacagcaatcctagcctgtgcggcggcggcggcagcaccacgacgccagcgccgcggccaccaacaccggcgcccaccatcgcgtcgcagcccctgtccctgcgcccagaggcgtgccggccagcggcggggggcgcagtgcacacgagggggctggacttcgcctgtgatatctacatctgggcgcccttggccgggacttgtggggtccttctcctgtcactggttatcaccctttactgccggagggaccagaggctgccccccgatgcccacaagccccctgggggaggcagtttccggacccccatccaagaggagcaggccgacgcccactccaccctggccaagatcagagtgaagttcagcaggagcgcagacgcccccgcgtaccagcagggccagaaccagctctataacgagctcaatctaggacgaagagaggagtacgatgttttggacaagagacgtggccgggaccctgagatggggggaaagccgagaaggaagaaccctcaggaaggcctgtacaatgaactgcagaaagataagatggcggaggcctacagtgagattgggatgaaaggcgagcgccggaggggcaaggggcacgatggcctttaccagggtctcagtacagccaccaaggacacctacgacgcccttcacatgcaggccctgccccctcgcggctctggcgagggaaggggttccctgcttacttgcggcgacgtcgaagagaatcccggtccgatggccctcccagtaactgccctccttttgcccctcgcactccttcttcatgccgctcgccccaactgggtcaacgtgattagcgatttgaagaaaatcgaggaccttatacagtctatgcatattgacgctacactgtatactgagagtgatgtacacccgtcctgtaaggtaacggccatgaaatgctttcttctggagctccaggtcatcagcttggagtctggggacgcaagcatccacgatacggttgaaaacctcatcatccttgcgaacaactctctctcatctaatggaaacgttacagagagtgggtgtaaggagtgcgaagagttggaagaaaaaaacatcaaagaatttcttcaatccttcgttcacatagtgcaaatgttcattaacacgtccactaccacacccgccccgaggccacctacgccggcaccgactatcgccagtcaacccctctctctgcgccccgaggcttgccggcctgcggctggtggggcggtccacacccggggcctggattttgcgtgcgatatatacatctgggcacctcttgccggcacctgcggagtgctgcttctctcactcgttattacgctgtactgctaa

SEQ ID NO: 1357 - DNA, 2298 bp, synthetic construct
  misc_feature 1..2298: note = Synthetic
  source 1..2298: mol_type = other DNA
atggccttaccagtgaccgccttgctcctgccgctggccttgctgctccacgccgccaggccggaggtgcagctgctggaatctggaggcggcctcgtgcagcctggaggcagcctgaggctgagctgcgctgcttctggcttcaccttcagcagcttcgccatgagctgggtcagacaagctcccggcaaaggcctggaatgggtgtccgccgtgtctggcagcggcgacgatacctactacgccgatagcgtgaaaggaagatttacaatcagccgggacaacagcaagaataccctgtacctgcagatgaactctctgcgggccgaggacaccgccgtgtactattgcgccaagcacaccagctactacctggacgtgtggggcaagggcaccaccgtgaccgtttccagcggcggcggcggcagcggcggaggtggaagcggcggaggcggatctcagacagtggtgacacaggagcctagcttttctgtgtcccctggcggcaccgtgacactgacatgcgccctgagctccgatagcgtgtcaacatcttacttccccagctggtatcggcagacccctggacaggcccctagaaccctgatctacaacaccaacaccagaagcagcggcgtgccagatagattcagcggctccatcctgggcaacaaggccgccctgaccattacaggcgcccaggccgacgacgagagcgactactactgtgtgctgtacatgggcagcggcatcatcttcggctctggcacaaaggtgaccgtcctgggctctggcggcggcggcagctgcccttattctaaccctaggctctgcagcggaggcggcggcagcgagctgcctacccaaggcacatttagcaacgtctccaccaacgtgtcccctgccaaacccaccaccacagcttgtccttacagcaatcctagcctgtgcggcggcggcggcagcaccacgacgccagcgccgcggccaccaacaccggcgcccaccatcgcgtcgcagcccctgtccctgcgcccagaggcgtgccggccagcggcggggggcgcagtgcacacgagggggctggacttcgcctgtgatatctacatctgggcgcccttggccgggacttgtggggtccttctcctgtcactggttatcaccctttactgccggagggaccagaggctgccccccgatgcccacaagccccctgggggaggcagtttccggacccccatccaagaggagcaggccgacgcccactccaccctggccaagatcagagtgaagttcagcaggagcgcagacgcccccgcgtaccagcagggccagaaccagctctataacgagctcaatctaggacgaagagaggagtacgatgttttggacaagagacgtggccgggaccctgagatggggggaaagccgagaaggaagaaccctcaggaaggcctgtacaatgaactgcagaaagataagatggcggaggcctacagtgagattgggatgaaaggcgagcgccggaggggcaaggggcacgatggcctttaccagggtctcagtacagccaccaaggacacctacgacgcccttcacatgcaggccctgccccctcgcggctctggcgagggaaggggttccctgcttacttgcggcgacgtcgaagagaatcccggtccgatggccctcccagtaactgccctccttttgcccctcgcactccttcttcatgccgctcgccccaactgggtcaacgtgattagcgatttgaagaaaatcgaggaccttatacagtctatgcatattgacgctacactgtatactgagagtgatgtacacccgtcctgtaaggtaacggccatgaaatgctttcttctggagctccaggtcatcagcttggagtctggggacgcaagcatccacgatacggttgaaaacctcatcatccttgcgaacaactctctctcatctaatggaaacgttacagagagtgggtgtaaggagtgcgaagagttggaagaaaaaaacatcaaagaatttcttcaatccttcgttcacatagtgcaaatgttcattaacacgtccactaccacacccgccccgaggccacctacgccggcaccgactatcgccagtcaacccctctctctgcgccccgaggcttgccggcctgcggctggtggggcggtccacacccggggcctggattttgcgtgcgatatatacatctgggcacctcttgccggcacctgcggagtgctgcttctctcactcgttattacgctgtactgctaa

SEQ ID NO: 1358 - DNA, 2316 bp, synthetic construct
  misc_feature 1..2316: note = Synthetic
  source 1..2316: mol_type = other DNA
atggccttaccagtgaccgccttgctcctgccgctggccttgctgctccacgccgccaggccgcaagtgcagctggtggaaagcggaggcggcgtcgtgcaacctggcagaagcctgagactgagctgcgccgccagcggctttaacttcagcaccttcgacatccactgggtgcggcaggcccctggaaaaggcctggagtgggtcgccctgatctggtatgacggcagctacaagtactacgccgatagcgttaagggcaggttcaccatcagcagagataattctaagaacaccctggacctgagaatgaacagcctccgggctgaggacaccgccgtgtactactgcgccagaaatgacaactggaacgacgagcattactatcactactacatggacgtgtggggcaagggcaccaccgtgacagtgtcctctggcggcggcggcagcggcggcggcggcagcggtggaggcggaagcgagatcgtgctgacccagtctcctgatttccagtccgtgacccctaaggaaaaggtgaccatcacctgtagagcttctcagagcatcggcagctctctgcactggtatcagcagaaacctgaccagagcccaaagctgctgatcaaattcgccagccagtccttcagcggcgtgccctcccggtttagcggctccggcagcggaacagacttcaccctgacaattaacagcctggaagccgaggatgccgccacatacttctgccaccagtcttctagcctgccctggacattcggccagggcacaaaggtggagatcaagggctctggcggcggcggcagctgcccttattctaaccctaggctctgcagcggaggcggcggcagcgagctgcctacccaaggcacatttagcaacgtctccaccaacgtgtcccctgccaaacccaccaccacagcttgtccttacagcaatcctagcctgtgcggcggcggcggcagcaccacgacgccagcgccgcggccaccaacaccggcgcccaccatcgcgtcgcagcccctgtccctgcgcccagaggcgtgccggccagcggcggggggcgcagtgcacacgagggggctggacttcgcctgtgatatctacatctgggcgcccttggccgggacttgtggggtccttctcctgtcactggttatcaccctttactgccggagggaccagaggctgccccccgatgcccacaagccccctgggggaggcagtttccggacccccatccaagaggagcaggccgacgcccactccaccctggccaagatcagagtgaagttcagcaggagcgcagacgcccccgcgtaccagcagggccagaaccagctctataacgagctcaatctaggacgaagagaggagtacgatgttttggacaagagacgtggccgggaccctgagatggggggaaagccgagaaggaagaaccctcaggaaggcctgtacaatgaactgcagaaagataagatggcggaggcctacagtgagattgggatgaaaggcgagcgccggaggggcaaggggcacgatggcctttaccagggtctcagtacagccaccaaggacacctacgacgcccttcacatgcaggccctgccccctcgcggctctggcgagggaaggggttccctgcttacttgcggcgacgtcgaagagaatcccggtccgatggccctcccagtaactgccctccttttgcccctcgcactccttcttcatgccgctcgccccaactgggtcaacgtgattagcgatttgaagaaaatcgaggaccttatacagtctatgcatattgacgctacactgtatactgagagtgatgtacacccgtcctgtaaggtaacggccatgaaatgctttcttctggagctccaggtcatcagcttggagtctggggacgcaagcatccacgatacggttgaaaacctcatcatccttgcgaacaactctctctcatctaatggaaacgttacagagagtgggtgtaaggagtgcgaagagttggaagaaaaaaacatcaaagaatttcttcaatccttcgttcacatagtgcaaatgttcattaacacgtccactaccacacccgccccgaggccacctacgccggcaccgactatcgccagtcaacccctctctctgcgccccgaggcttgccggcctgcggctggtggggcggtccacacccggggcctggattttgcgtgcgatatatacatctgggcacctcttgccggcacctgcggagtgctgcttctctcactcgttattacgctgtactgctaa

SEQ ID NO: 1359 - DNA, 2331 bp, synthetic construct
  misc_feature 1..2331: note = Synthetic
  source 1..2331: mol_type = other DNA
atggccttaccagtgaccgccttgctcctgccgctggccttgctgctccacgccgccaggccggaggtgcacctgctggaaagcggcggcggcctggtgcagcctggaggctctctgcggctgagctgtgccgcctctggttttaccttcagcagctacgccatgaattgggttagacaggcccctggcaagggcctggaatgggtcagcagcatcagcggctccggcagcagctcttactatgctgatagcgtgaagggcagattcaccattagcagagacaatagcaagaacaccctgtacctgcagatgaacagcctgcgggccgaggacaccgccgtgtactactgcgccagccggggcttcaactcccaataccctcctggctactactactactacatggacgtgtggggaaaaggcacgaccgtgaccgtgtcctccggcggcggcggaagcggcggcggcggctctggcggaggcggcagccagaccgtggtgacacaggagcctagcttcagcgtgtctccaggaggaacagtgaccctgacatgcggcctcagcagcggctctgtgtccaccagctatttccccagctggtatcagcagacccctggccaggctcccaggaccctgatctacatcaccaacacaagaagcagcggcgtgcccgacagattttctggcagcatcatcggcaacaaggccgctctgaccatcacaggcgcccaggccgacgacgagagtgattacttctgcgtgctgtacatgggcagcggaacatgggtgttcggcggaggcacaaagctgaccgtcctgggctctggcggcggcggcagctgcccttattctaaccctaggctctgcagcggaggcggcggcagcgagctgcctacccaaggcacatttagcaacgtctccaccaacgtgtcccctgccaaacccaccaccacagcttgtccttacagcaatcctagcctgtgcggcggcggcggcagcaccacgacgccagcgccgcggccaccaacaccggcgcccaccatcgcgtcgcagcccctgtccctgcgcccagaggcgtgccggccagcggcggggggcgcagtgcacacgagggggctggacttcgcctgtgatatctacatctgggcgcccttggccgggacttgtggggtccttctcctgtcactggttatcaccctttactgccggagggaccagaggctgccccccgatgcccacaagccccctgggggaggcagtttccggacccccatccaagaggagcaggccgacgcccactccaccctggccaagatcagagtgaagttcagcaggagcgcagacgcccccgcgtaccagcagggccagaaccagctctataacgagctcaatctaggacgaagagaggagtacgatgttttggacaagagacgtggccgggaccctgagatggggggaaagccgagaaggaagaaccctcaggaaggcctgtacaatgaactgcagaaagataagatggcggaggcctacagtgagattgggatgaaaggcgagcgccggaggggcaaggggcacgatggcctttaccagggtctcagtacagccaccaaggacacctacgacgcccttcacatgcaggccctgccccctcgcggctctggcgagggaaggggttccctgcttacttgcggcgacgtcgaagagaatcccggtccgatggccctcccagtaactgccctccttttgcccctcgcactccttcttcatgccgctcgccccaactgggtcaacgtgattagcgatttgaagaaaatcgaggaccttatacagtctatgcatattgacgctacactgtatactgagagtgatgtacacccgtcctgtaaggtaacggccatgaaatgctttcttctggagctccaggtcatcagcttggagtctggggacgcaagcatccacgatacggttgaaaacctcatcatccttgcgaacaactctctctcatctaatggaaacgttacagagagtgggtgtaaggagtgcgaagagttggaagaaaaaaacatcaaagaatttcttcaatccttcgttcacatagtgcaaatgttcattaacacgtccactaccacacccgccccgaggccacctacgccggcaccgactatcgccagtcaacccctctctctgcgccccgaggcttgccggcctgcggctggtggggcggtccacacccggggcctggattttgcgtgcgatatatacatctgggcacctcttgccggcacctgcggagtgctgcttctctcactcgttattacgctgtactgctaa

SEQ ID NO: 1360 - DNA, 2292 bp, synthetic construct
  misc_feature 1..2292: note = Synthetic
  source 1..2292: mol_type = other DNA
atggccttaccagtgaccgccttgctcctgccgctggccttgctgctccacgccgccaggccggaggtgcagctgctggaaagcggcggcggcctggtgcaacctggcggctccctgaggctgagctgcgccgccagcggcttcacctttagcaactacgctatgacctgggtcagacaggcccctggaaagggcctggagtgggtgtccgccatcagcggatctggtattggaacatactacgccgacagcgtgcaaggcagattcacaacaagcagagataattctaagaacaccctgtacctgcagatgaacagcctgcgggccgaggacaccgccgtgtactattgtgccaagggcggctacaactggaaggacgtgtggggcaagggaaccaccgtgaccgtttcttctggcggcggaggcagcggcggcggaggctccggaggcggaggcagcgagatcgtgctgacacagtctcccgactttcagagcgtgacccctaaagagaaggtgacaatcacctgcagagccagccagtcaatcggctctagcctgcactggtatcagcagaaacctgatcagagccctaagctgctgatcaagttcgcctctcagagcttcagcggcgtgccaagccggttcagcggctccggcagcggcaccgacttcaccctgaccatccacagcctggaggccgaagatgccgctacatactactgccaccagtccagcagcctcccctggaccttcggccagggcacaaaggtggaaatcaaaggctctggcggcggcggcagctgcccttattctaaccctaggctctgcagcggaggcggcggcagcgagctgcctacccaaggcacatttagcaacgtctccaccaacgtgtcccctgccaaacccaccaccacagcttgtccttacagcaatcctagcctgtgcggcggcggcggcagcaccacgacgccagcgccgcggccaccaacaccggcgcccaccatcgcgtcgcagcccctgtccctgcgcccagaggcgtgccggccagcggcggggggcgcagtgcacacgagggggctggacttcgcctgtgatatctacatctgggcgcccttggccgggacttgtggggtccttctcctgtcactggttatcaccctttactgccggagggaccagaggctgccccccgatgcccacaagccccctgggggaggcagtttccggacccccatccaagaggagcaggccgacgcccactccaccctggccaagatcagagtgaagttcagcaggagcgcagacgcccccgcgtaccagcagggccagaaccagctctataacgagctcaatctaggacgaagagaggagtacgatgttttggacaagagacgtggccgggaccctgagatggggggaaagccgagaaggaagaaccctcaggaaggcctgtacaatgaactgcagaaagataagatggcggaggcctacagtgagattgggatgaaaggcgagcgccggaggggcaaggggcacgatggcctttaccagggtctcagtacagccaccaaggacacctacgacgcccttcacatgcaggccctgccccctcgcggctctggcgagggaaggggttccctgcttacttgcggcgacgtcgaagagaatcccggtccgatggccctcccagtaactgccctccttttgcccctcgcactccttcttcatgccgctcgccccaactgggtcaacgtgattagcgatttgaagaaaatcgaggaccttatacagtctatgcatattgacgctacactgtatactgagagtgatgtacacccgtcctgtaaggtaacggccatgaaatgctttcttctggagctccaggtcatcagcttggagtctggggacgcaagcatccacgatacggttgaaaacctcatcatccttgcgaacaactctctctcatctaatggaaacgttacagagagtgggtgtaaggagtgcgaagagttggaagaaaaaaacatcaaagaatttcttcaatccttcgttcacatagtgcaaatgttcattaacacgtccactaccacacccgccccgaggccacctacgccggcaccgactatcgccagtcaacccctctctctgcgccccgaggcttgccggcctgcggctggtggggcggtccacacccggggcctggattttgcgtgcgatatatacatctgggcacctcttgccggcacctgcggagtgctgcttctctcactcgttattacgctgtactgctaa

SEQ ID NO: 1361 - DNA, 2316 bp, synthetic construct
  misc_feature 1..2316: note = Synthetic
  source 1..2316: mol_type = other DNA
atggccttaccagtgaccgccttgctcctgccgctggccttgctgctccacgccgccaggccgcaagtgcagctggtggagagcggcggcggcgtcgtgcagcccggcagaagcctgcggctgtcttgcgctgccagcggcttcacctttacaaactacgacatgcactgggtcagacaggcccctggcaaaggcctggaatgggtgaccatcatctggcacgacggctccaataagtactacctggacagcgtgcggggcagattcacgatcagcagagataattccaagaacaccctgtacctgcagatgaacagcctgagagccgaggacaccgccgtgtactattgcgccagaggcgacaactggaacgacgagcaccactacttctactacatggacgtgtggggcaagggcaccaccgtgaccgtgtccagcggcggaggcggctccggaggaggcggctctggtggcggcggcagcgagatcgtgctgacccagagccctgacttccagtctgtgacacctaaggaaaaggtgacaatcacctgtagggccagccaaagcatcggcagcagcctgcattggtatcagcagaagcccgatcagtctccaaagctgctgatcaaattcgccagccagagcttcagcggagttcctagccggttcagcggctctggcagcggaacagatttcaccctgacaattcactctctggaggccgaggatgccgccacatattactgccaccagtctagcagcctgccttggacctttggacagggcaccaaggtggaaatcaagggctctggcggcggcggcagctgcccttattctaaccctaggctctgcagcggaggcggcggcagcgagctgcctacccaaggcacatttagcaacgtctccaccaacgtgtcccctgccaaacccaccaccacagcttgtccttacagcaatcctagcctgtgcggcggcggcggcagcaccacgacgccagcgccgcggccaccaacaccggcgcccaccatcgcgtcgcagcccctgtccctgcgcccagaggcgtgccggccagcggcggggggcgcagtgcacacgagggggctggacttcgcctgtgatatctacatctgggcgcccttggccgggacttgtggggtccttctcctgtcactggttatcaccctttactgccggagggaccagaggctgccccccgatgcccacaagccccctgggggaggcagtttccggacccccatccaagaggagcaggccgacgcccactccaccctggccaagatcagagtgaagttcagcaggagcgcagacgcccccgcgtaccagcagggccagaaccagctctataacgagctcaatctaggacgaagagaggagtacgatgttttggacaagagacgtggccgggaccctgagatggggggaaagccgagaaggaagaaccctcaggaaggcctgtacaatgaactgcagaaagataagatggcggaggcctacagtgagattgggatgaaaggcgagcgccggaggggcaaggggcacgatggcctttaccagggtctcagtacagccaccaaggacacctacgacgcccttcacatgcaggccctgccccctcgcggctctggcgagggaaggggttccctgcttacttgcggcgacgtcgaagagaatcccggtccgatggccctcccagtaactgccctccttttgcccctcgcactccttcttcatgccgctcgccccaactgggtcaacgtgattagcgatttgaagaaaatcgaggaccttatacagtctatgcatattgacgctacactgtatactgagagtgatgtacacccgtcctgtaaggtaacggccatgaaatgctttcttctggagctccaggtcatcagcttggagtctggggacgcaagcatccacgatacggttgaaaacctcatcatccttgcgaacaactctctctcatctaatggaaacgttacagagagtgggtgtaaggagtgcgaagagttggaagaaaaaaacatcaaagaatttcttcaatccttcgttcacatagtgcaaatgttcattaacacgtccactaccacacccgccccgaggccacctacgccggcaccgactatcgccagtcaacccctctctctgcgccccgaggcttgccggcctgcggctggtggggcggtccacacccggggcctggattttgcgtgcgatatatacatctgggcacctcttgccggcacctgcggagtgctgcttctctcactcgttattacgctgtactgctaa

SEQ ID NO: 1362 - DNA, 2316 bp, synthetic construct
  misc_feature 1..2316: note = Synthetic
  source 1..2316: mol_type = other DNA
atggccttaccagtgaccgccttgctcctgccgctggccttgctgctccacgccgccaggccgcaggtgcagctggttgagagcggcggaggcgtggtgcaacctggaagatctctgcgcctgagctgcgccgccagcggcttcaccttcagcaactacgatatgcactgggtgcggcaggcccctggcaagggcctggaatgggtcaccattatctggcatgacggcagcaacaagtactacctggacagcgtgaaaggcagattcaccatcagcagagacaatagcaagaacaccctgtacctgcagatgaacagcctgcgggccgaggacaccgccgtgtactattgcgccagaggcgacaactggaacgacgagcaccactacttctactatatggacgtgtggggcaaaggcacaaccgtgaccgtcagcagcggcggcggaggcagcggaggcggaggctctggcggcggtggcagtgaaatcgtgctgacccagagccccgctacactgagcctctcccctggcgagcgggccacactgtcttgtagagcctctcagtccgtgtccagcagcctggcctggtatcagcagaagcccggccaggctccaagactgctgatctacgacgccagcaatagagccaccggcatccccgcccggttttccggcagcggatctggaacagattttaccctgaccatcagcagcctggaacctgaggatttcgccgtgtactactgccagcaaagaagcaactggcctctgacattcggcggcggcacaaaggtggaaatcaagggctctggcggcggcggcagctgcccttattctaaccctaggctctgcagcggaggcggcggcagcgagctgcctacccaaggcacatttagcaacgtctccaccaacgtgtcccctgccaaacccaccaccacagcttgtccttacagcaatcctagcctgtgcggcggcggcggcagcaccacgacgccagcgccgcggccaccaacaccggcgcccaccatcgcgtcgcagcccctgtccctgcgcccagaggcgtgccggccagcggcggggggcgcagtgcacacgagggggctggacttcgcctgtgatatctacatctgggcgcccttggccgggacttgtggggtccttctcctgtcactggttatcaccctttactgccggagggaccagaggctgccccccgatgcccacaagccccctgggggaggcagtttccggacccccatccaagaggagcaggccgacgcccactccaccctggccaagatcagagtgaagttcagcaggagcgcagacgcccccgcgtaccagcagggccagaaccagctctataacgagctcaatctaggacgaagagaggagtacgatgttttggacaagagacgtggccgggaccctgagatggggggaaagccgagaaggaagaaccctcaggaaggcctgtacaatgaactgcagaaagataagatggcggaggcctacagtgagattgggatgaaaggcgagcgccggaggggcaaggggcacgatggcctttaccagggtctcagtacagccaccaaggacacctacgacgcccttcacatgcaggccctgccccctcgcggctctggcgagggaaggggttccctgcttacttgcggcgacgtcgaagagaatcccggtccgatggccctcccagtaactgccctccttttgcccctcgcactccttcttcatgccgctcgccccaactgggtcaacgtgattagcgatttgaagaaaatcgaggaccttatacagtctatgcatattgacgctacactgtatactgagagtgatgtacacccgtcctgtaaggtaacggccatgaaatgctttcttctggagctccaggtcatcagcttggagtctggggacgcaagcatccacgatacggttgaaaacctcatcatccttgcgaacaactctctctcatctaatggaaacgttacagagagtgggtgtaaggagtgcgaagagttggaagaaaaaaacatcaaagaatttcttcaatccttcgttcacatagtgcaaatgttcattaacacgtccactaccacacccgccccgaggccacctacgccggcaccgactatcgccagtcaacccctctctctgcgccccgaggcttgccggcctgcggctggtggggcggtccacacccggggcctggattttgcgtgcgatatatacatctgggcacctcttgccggcacctgcggagtgctgcttctctcactcgttattacgctgtactgctaa

SEQ ID NO: 1363 - DNA, 2304 bp, synthetic construct
  misc_feature 1..2304: note = Synthetic
  source 1..2304: mol_type = other DNA
atggccttaccagtgaccgccttgctcctgccgctggccttgctgctccacgccgccaggccggaagtgcagctggtcgagagcggcggcggcgtggtgcggcctggcgggtccctgagactgagctgcgccgcctctggcttcaccttcgacgactatggcatgagctgggtcagacaggcccctggaaaaggcctggaatgggtgtccggaatcaactggaatggcggcagtacaggctacgtggacagcgtgaagggcagattcaccatcagccgggacaacgccaagaacagcctgtatctgcagatgaacagcctgcgggccgaggacaccgccctgtaccactgtgccagacctgtgacaaccgactactactactacatggacgtgtggggcaagggcaccaccgtgaccgtgtcttccggcggaggaggcagcggcggcggcggcagcggcggaggcggcagcgagatcgtgctgacacagagccccggaacactgagcctgagccctggcgagcgggctacactgtcttgcagagcttctcagagcgtttcctccagctacctggcctggtatcagcaaaagcccggccaagctccaagactgctgatctacggcgccagctctagggccaccggcattcctgatagattcagcggctctggcagcggaacagattttaccctgaccatcagcagactggagcctgaggatttcgccgtgtactactgccagcagtacggatctagctggacctttggccagggcaccaaggtggaaatcaaaggctctggcggcggcggcagctgcccttattctaaccctaggctctgcagcggaggcggcggcagcgagctgcctacccaaggcacatttagcaacgtctccaccaacgtgtcccctgccaaacccaccaccacagcttgtccttacagcaatcctagcctgtgcggcggcggcggcagcaccacgacgccagcgccgcggccaccaacaccggcgcccaccatcgcgtcgcagcccctgtccctgcgcccagaggcgtgccggccagcggcggggggcgcagtgcacacgagggggctggacttcgcctgtgatatctacatctgggcgcccttggccgggacttgtggggtccttctcctgtcactggttatcaccctttactgccggagggaccagaggctgccccccgatgcccacaagccccctgggggaggcagtttccggacccccatccaagaggagcaggccgacgcccactccaccctggccaagatcagagtgaagttcagcaggagcgcagacgcccccgcgtaccagcagggccagaaccagctctataacgagctcaatctaggacgaagagaggagtacgatgttttggacaagagacgtggccgggaccctgagatggggggaaagccgagaaggaagaaccctcaggaaggcctgtacaatgaactgcagaaagataagatggcggaggcctacagtgagattgggatgaaaggcgagcgccggaggggcaaggggcacgatggcctttaccagggtctcagtacagccaccaaggacacctacgacgcccttcacatgcaggccctgccccctcgcggctctggcgagggaaggggttccctgcttacttgcggcgacgtcgaagagaatcccggtccgatggccctcccagtaactgccctccttttgcccctcgcactccttcttcatgccgctcgccccaactgggtcaacgtgattagcgatttgaagaaaatcgaggaccttatacagtctatgcatattgacgctacactgtatactgagagtgatgtacacccgtcctgtaaggtaacggccatgaaatgctttcttctggagctccaggtcatcagcttggagtctggggacgcaagcatccacgatacggttgaaaacctcatcatccttgcgaacaactctctctcatctaatggaaacgttacagagagtgggtgtaaggagtgcgaagagttggaagaaaaaaacatcaaagaatttcttcaatccttcgttcacatagtgcaaatgttcattaacacgtccactaccacacccgccccgaggccacctacgccggcaccgactatcgccagtcaacccctctctctgcgccccgaggcttgccggcctgcggctggtggggcggtccacacccggggcctggattttgcgtgcgatatatacatctgggcacctcttgccggcacctgcggagtgctgcttctctcactcgttattacgctgtactgctaa

SEQ ID NO: 1364 - DNA, 2328 bp, synthetic construct
  misc_feature 1..2328: note = Synthetic
  source 1..2328: mol_type = other DNA
atggccttaccagtgaccgccttgctcctgccgctggccttgctgctccacgccgccaggccggaggtgcagctgctggagagcggaggaggcctggtgcaacctggcggcagcctgcggctgagctgcgccgcttccggcttcaccttcagcagctacgccatgagctgggtgcggcaggctcctggaaaaggcctggagtgggtcagcgccatcagcggcagcggaggctcaacatactacgccgacagcgtgaagggcagattcaccatcagccgcgacaactctaagaacaccctgtacctgcagatgaactctctgagagccgaggacaccgccgtgtactattgtgccaagaagggcacaagctacaactggaatgatgtgcactactactactactattatatggacgtgtggggcaaaggcacaaccgtgaccgtgtccagcggcggtggaggcagcggaggcggcggaagcggcggcggcggcagtgaaattgtgctgacccagagccccggcaccctgagcctgtctccaggcgagcgggctaccctgtcctgcagagccagccagtctgtttccagctcttacctggcctggtatcagcaaaagcctggacaggcccctagactgctgatctacggcgcctctagcagggctacaggcatccctgatagatttagcggcagcggctctggcaccgacttcaccctgaccatctccagactggaacccgaggatttcgccgtgtactactgccagcagtacggcagcagctggacatttggccagggcacaaaggtggaaatcaagggctctggcggcggcggcagctgcccttattctaaccctaggctctgcagcggaggcggcggcagcgagctgcctacccaaggcacatttagcaacgtctccaccaacgtgtcccctgccaaacccaccaccacagcttgtccttacagcaatcctagcctgtgcggcggcggcggcagcaccacgacgccagcgccgcggccaccaacaccggcgcccaccatcgcgtcgcagcccctgtccctgcgcccagaggcgtgccggccagcggcggggggcgcagtgcacacgagggggctggacttcgcctgtgatatctacatctgggcgcccttggccgggacttgtggggtccttctcctgtcactggttatcaccctttactgccggagggaccagaggctgccccccgatgcccacaagccccctgggggaggcagtttccggacccccatccaagaggagcaggccgacgcccactccaccctggccaagatcagagtgaagttcagcaggagcgcagacgcccccgcgtaccagcagggccagaaccagctctataacgagctcaatctaggacgaagagaggagtacgatgttttggacaagagacgtggccgggaccctgagatggggggaaagccgagaaggaagaaccctcaggaaggcctgtacaatgaactgcagaaagataagatggcggaggcctacagtgagattgggatgaaaggcgagcgccggaggggcaaggggcacgatggcctttaccagggtctcagtacagccaccaaggacacctacgacgcccttcacatgcaggccctgccccctcgcggctctggcgagggaaggggttccctgcttacttgcggcgacgtcgaagagaatcccggtccgatggccctcccagtaactgccctccttttgcccctcgcactccttcttcatgccgctcgccccaactgggtcaacgtgattagcgatttgaagaaaatcgaggaccttatacagtctatgcatattgacgctacactgtatactgagagtgatgtacacccgtcctgtaaggtaacggccatgaaatgctttcttctggagctccaggtcatcagcttggagtctggggacgcaagcatccacgatacggttgaaaacctcatcatccttgcgaacaactctctctcatctaatggaaacgttacagagagtgggtgtaaggagtgcgaagagttggaagaaaaaaacatcaaagaatttcttcaatccttcgttcacatagtgcaaatgttcattaacacgtccactaccacacccgccccgaggccacctacgccggcaccgactatcgccagtcaacccctctctctgcgccccgaggcttgccggcctgcggctggtggggcggtccacacccggggcctggattttgcgtgcgatatatacatctgggcacctcttgccggcacctgcggagtgctgcttctctcactcgttattacgctgtactgctaa

SEQ ID NO: 1365 - DNA, 2310 bp, synthetic construct
  misc_feature 1..2310: note = Synthetic
  source 1..2310: mol_type = other DNA
atggccttaccagtgaccgccttgctcctgccgctggccttgctgctccacgccgccaggccgcagctgcaactgcaggagagcggtcctggactggtgaagccttctgagacactgagcctgacctgcaccgtgtccggcggctctatcagctcctccagctactactggggctggatcagacagccacctggcaagggcctggaatggatcggcagcatttactattctggctcaacatactacaaccccagccttaaaagcagagtgacaatcagcgtggacaccagcaagaaccagttcagcctgaagctgtcctctgtgaccgccgctgatactgccgtttactactgcaccaccggaacaacagcttattactactactactacatggacgtgtggggaaagggcaccacagtgaccgtgtccagcggcggaggcggcagcggcggaggaggatctggcggcggcggcagcgagatcgtgctgacccagtctccaggcaccctgagcctgagccccggcgagcgggccacactgagctgcagagcctctcagagcgtcagctctagctacctggcctggtatcagcaaaaacctggccaggcccctagactgctgatctacggcgccagcagccgggccaccggcatccctgatagattcagcggatctggcagcggcaccgactttaccctcaccatcagcagactggaacccgaggacttcgccgtgtactattgtcagcagtacggcagcagctggacattcggccagggcaccaaggtggaaatcaagggctctggcggcggcggcagctgcccttattctaaccctaggctctgcagcggaggcggcggcagcgagctgcctacccaaggcacatttagcaacgtctccaccaacgtgtcccctgccaaacccaccaccacagcttgtccttacagcaatcctagcctgtgcggcggcggcggcagcaccacgacgccagcgccgcggccaccaacaccggcgcccaccatcgcgtcgcagcccctgtccctgcgcccagaggcgtgccggccagcggcggggggcgcagtgcacacgagggggctggacttcgcctgtgatatctacatctgggcgcccttggccgggacttgtggggtccttctcctgtcactggttatcaccctttactgccggagggaccagaggctgccccccgatgcccacaagccccctgggggaggcagtttccggacccccatccaagaggagcaggccgacgcccactccaccctggccaagatcagagtgaagttcagcaggagcgcagacgcccccgcgtaccagcagggccagaaccagctctataacgagctcaatctaggacgaagagaggagtacgatgttttggacaagagacgtggccgggaccctgagatggggggaaagccgagaaggaagaaccctcaggaaggcctgtacaatgaactgcagaaagataagatggcggaggcctacagtgagattgggatgaaaggcgagcgccggaggggcaaggggcacgatggcctttaccagggtctcagtacagccaccaaggacacctacgacgcccttcacatgcaggccctgccccctcgcggctctggcgagggaaggggttccctgcttacttgcggcgacgtcgaagagaatcccggtccgatggccctcccagtaactgccctccttttgcccctcgcactccttcttcatgccgctcgccccaactgggtcaacgtgattagcgatttgaagaaaatcgaggaccttatacagtctatgcatattgacgctacactgtatactgagagtgatgtacacccgtcctgtaaggtaacggccatgaaatgctttcttctggagctccaggtcatcagcttggagtctggggacgcaagcatccacgatacggttgaaaacctcatcatccttgcgaacaactctctctcatctaatggaaacgttacagagagtgggtgtaaggagtgcgaagagttggaagaaaaaaacatcaaagaatttcttcaatccttcgttcacatagtgcaaatgttcattaacacgtccactaccacacccgccccgaggccacctacgccggcaccgactatcgccagtcaacccctctctctgcgccccgaggcttgccggcctgcggctggtggggcggtccacacccggggcctggattttgcgtgcgatatatacatctgggcacctcttgccggcacctgcggagtgctgcttctctcactcgttattacgctgtactgctaa

SEQ ID NO: 1366 - DNA, 2307 bp, synthetic construct
  misc_feature 1..2307: note = Synthetic
  source 1..2307: mol_type = other DNA
atggccttaccagtgaccgccttgctcctgccgctggccttgctgctccacgccgccaggccggaggtgcagctgctggagagcggtggaggcctggtgcaacctggcggctccctgcggctgagctgcgccgccagcggcttcacctttagctcttacgccatgacctgggtcagacaggcccctggcaagggactggaatgggtgtctgccatcagcggcagcggaggatctacatactacgctgatagcgtgaagggcagatttacaatcagccgcgacaatagcaagaacaccctgtacctgcagatgaacagcctgagagccgaggacaccgccgtgtactactgcgctagaggcggctacaactggcactactactactacatggacgtgtggggcaaaggaaccaccgtgaccgtgtccagcggcggcggcggctctggcggaggcggctctggcggcggcggaagcgagatcgtgctgacccagtctcccggaacactctccctgtccccaggcgagcgggctacactgagctgccgggccagccagagcgtgtcctcgtcttatctggcctggtatcagcagaaacctggccaagcccctagactgctgatctacggcgccagcagccgggccacaggcatccccgatagattcagcggcagcggaagcggcaccgacttcaccctgacaatcagcagactggaacctgaggacttcgccgtgtactattgtcagcagtacggcagcagctggaccttcggccagggcaccaaggttgaaattaagggctctggcggcggcggcagctgcccttattctaaccctaggctctgcagcggaggcggcggcagcgagctgcctacccaaggcacatttagcaacgtctccaccaacgtgtcccctgccaaacccaccaccacagcttgtccttacagcaatcctagcctgtgcggcggcggcggcagcaccacgacgccagcgccgcggccaccaacaccggcgcccaccatcgcgtcgcagcccctgtccctgcgcccagaggcgtgccggccagcggcggggggcgcagtgcacacgagggggctggacttcgcctgtgatatctacatctgggcgcccttggccgggacttgtggggtccttctcctgtcactggttatcaccctttactgccggagggaccagaggctgccccccgatgcccacaagccccctgggggaggcagtttccggacccccatccaagaggagcaggccgacgcccactccaccctggccaagatcagagtgaagttcagcaggagcgcagacgcccccgcgtaccagcagggccagaaccagctctataacgagctcaatctaggacgaagagaggagtacgatgttttggacaagagacgtggccgggaccctgagatggggggaaagccgagaaggaagaaccctcaggaaggcctgtacaatgaactgcagaaagataagatggcggaggcctacagtgagattgggatgaaaggcgagcgccggaggggcaaggggcacgatggcctttaccagggtctcagtacagccaccaaggacacctacgacgcccttcacatgcaggccctgccccctcgcggctctggcgagggaaggggttccctgcttacttgcggcgacgtcgaagagaatcccggtccgatggccctcccagtaactgccctccttttgcccctcgcactccttcttcatgccgctcgccccaactgggtcaacgtgattagcgatttgaagaaaatcgaggaccttatacagtctatgcatattgacgctacactgtatactgagagtgatgtacacccgtcctgtaaggtaacggccatgaaatgctttcttctggagctccaggtcatcagcttggagtctggggacgcaagcatccacgatacggttgaaaacctcatcatccttgcgaacaactctctctcatctaatggaaacgttacagagagtgggtgtaaggagtgcgaagagttggaagaaaaaaacatcaaagaatttcttcaatccttcgttcacatagtgcaaatgttcattaacacgtccactaccacacccgccccgaggccacctacgccggcaccgactatcgccagtcaacccctctctctgcgccccgaggcttgccggcctgcggctggtggggcggtccacacccggggcctggattttgcgtgcgatatatacatctgggcacctcttgccggcacctgcggagtgctgcttctctcactcgttattacgctgtactgctaa

SEQ ID NO: 1367 - DNA, 2319 bp, synthetic construct
  misc_feature 1..2319: note = Synthetic
  source 1..2319: mol_type = other DNA
atggccttaccagtgaccgccttgctcctgccgctggccttgctgctccacgccgccaggccgcaagtgcagctggtggagagcggaggcggagtcgtgcaacctggcagaagcctgagactgagctgcgccgcttctggcttcaccttttctagctacgacatgcactgggtgcggcaggcccctggaaaaggcctggaatgggtcagcgtgatctggtatgacggctccaacaagaagtacggcgacagcgccaagggcaggttcaccattagccgggacaattctaagaacaccctggacctgcagatgaacagcctgcgggctgaggacaccgccgtgtactattgtgccagaggcgataattggaacgacgagggcggctactactactactacatggacgtgtggggcaagggaacaaccgtgacagtgtccagcggcggcggcggaagcggcggcggcggatctggcggaggcggcagcgagatcgtgctgacccagagccccgacttccagtccgtgacccctaaggaaaaggtgaccatcacatgcagagccagccagaacatcggcagcagcctgcactggtatcagcagaaacctgatcagtctccaaagctgctgatcaaattcgcctctcagagcatcagcggtgttcctagcagattcagcggctccggcagcggcactgattttacactgaccatcaacagcctggaggccgaggatgccgctgcctactactgccaccagagctctagcctgccctggaccttcggccagggcacaaaggtggaaatcaagggctctggcggcggcggcagctgcccttattctaaccctaggctctgcagcggaggcggcggcagcgagctgcctacccaaggcacatttagcaacgtctccaccaacgtgtcccctgccaaacccaccaccacagcttgtccttacagcaatcctagcctgtgcggcggcggcggcagcaccacgacgccagcgccgcggccaccaacaccggcgcccaccatcgcgtcgcagcccctgtccctgcgcccagaggcgtgccggccagcggcggggggcgcagtgcacacgagggggctggacttcgcctgtgatatctacatctgggcgcccttggccgggacttgtggggtccttctcctgtcactggttatcaccctttactgccggagggaccagaggctgccccccgatgcccacaagccccctgggggaggcagtttccggacccccatccaagaggagcaggccgacgcccactccaccctggccaagatcagagtgaagttcagcaggagcgcagacgcccccgcgtaccagcagggccagaaccagctctataacgagctcaatctaggacgaagagaggagtacgatgttttggacaagagacgtggccgggaccctgagatggggggaaagccgagaaggaagaaccctcaggaaggcctgtacaatgaactgcagaaagataagatggcggaggcctacagtgagattgggatgaaaggcgagcgccggaggggcaaggggcacgatggcctttaccagggtctcagtacagccaccaaggacacctacgacgcccttcacatgcaggccctgccccctcgcggctctggcgagggaaggggttccctgcttacttgcggcgacgtcgaagagaatcccggtccgatggccctcccagtaactgccctccttttgcccctcgcactccttcttcatgccgctcgccccaactgggtcaacgtgattagcgatttgaagaaaatcgaggaccttatacagtctatgcatattgacgctacactgtatactgagagtgatgtacacccgtcctgtaaggtaacggccatgaaatgctttcttctggagctccaggtcatcagcttggagtctggggacgcaagcatccacgatacggttgaaaacctcatcatccttgcgaacaactctctctcatctaatggaaacgttacagagagtgggtgtaaggagtgcgaagagttggaagaaaaaaacatcaaagaatttcttcaatccttcgttcacatagtgcaaatgttcattaacacgtccactaccacacccgccccgaggccacctacgccggcaccgactatcgccagtcaacccctctctctgcgccccgaggcttgccggcctgcggctggtggggcggtccacacccggggcctggattttgcgtgcgatatatacatctgggcacctcttgccggcacctgcggagtgctgcttctctcactcgttattacgctgtactgctaa

SEQ ID NO: 1368 - DNA, 2319 bp, synthetic construct
  misc_feature 1..2319: note = Synthetic
  source 1..2319: mol_type = other DNA
atggccttaccagtgaccgccttgctcctgccgctggccttgctgctccacgccgccaggccgcaagtgcagctggtggagagcggcggcggcgtggtgcagcccggacgctccctgcggctgagctgcgccgccagcggctttaccttctctagctacgatatgcactgggtcagacaggctcctggcaaaggcctggaatgggtgtccgtgatctggtacgacggctccaacaagaagtacggcgacagcgccaagggcagattcaccatctctcgggacaatagcaagaacacactggacctgcagatgaactctctgagagccgaggacaccgccgtgtactactgcgccagaggcgataattggaacgacgagggcggttattactactactatatggacgtgtggggaaaaggcacaaccgtgaccgtttccagcggcggaggcggcagcggcggcggcggatctggcggaggcggcagcgacattcagatgacacagagccccagcagcctctccacctctgtgggcgatagagtgaccatcacatgccgggccagccagggcatcagcaactacctggcctggttccagcagaagcctggaaaggcccctaagagcctgatctacgccgccagcagcctgcagagcggagtgccatctaagttcagcggcagcggatctggcaccgacttcagcctgaccatcagctctctgcagcctgaggattttgccacatactactgtcagcagtacaacagctaccctatcacattcggccagggcaccagactggaaatcaagggctctggcggcggcggcagctgcccttattctaaccctaggctctgcagcggaggcggcggcagcgagctgcctacccaaggcacatttagcaacgtctccaccaacgtgtcccctgccaaacccaccaccacagcttgtccttacagcaatcctagcctgtgcggcggcggcggcagcaccacgacgccagcgccgcggccaccaacaccggcgcccaccatcgcgtcgcagcccctgtccctgcgcccagaggcgtgccggccagcggcggggggcgcagtgcacacgagggggctggacttcgcctgtgatatctacatctgggcgcccttggccgggacttgtggggtccttctcctgtcactggttatcaccctttactgccggagggaccagaggctgccccccgatgcccacaagccccctgggggaggcagtttccggacccccatccaagaggagcaggccgacgcccactccaccctggccaagatcagagtgaagttcagcaggagcgcagacgcccccgcgtaccagcagggccagaaccagctctataacgagctcaatctaggacgaagagaggagtacgatgttttggacaagagacgtggccgggaccctgagatggggggaaagccgagaaggaagaaccctcaggaaggcctgtacaatgaactgcagaaagataagatggcggaggcctacagtgagattgggatgaaaggcgagcgccggaggggcaaggggcacgatggcctttaccagggtctcagtacagccaccaaggacacctacgacgcccttcacatgcaggccctgccccctcgcggctctggcgagggaaggggttccctgcttacttgcggcgacgtcgaagagaatcccggtccgatggccctcccagtaactgccctccttttgcccctcgcactccttcttcatgccgctcgccccaactgggtcaacgtgattagcgatttgaagaaaatcgaggaccttatacagtctatgcatattgacgctacactgtatactgagagtgatgtacacccgtcctgtaaggtaacggccatgaaatgctttcttctggagctccaggtcatcagcttggagtctggggacgcaagcatccacgatacggttgaaaacctcatcatccttgcgaacaactctctctcatctaatggaaacgttacagagagtgggtgtaaggagtgcgaagagttggaagaaaaaaacatcaaagaatttcttcaatccttcgttcacatagtgcaaatgttcattaacacgtccactaccacacccgccccgaggccacctacgccggcaccgactatcgccagtcaacccctctctctgcgccccgaggcttgccggcctgcggctggtggggcggtccacacccggggcctggattttgcgtgcgatatatacatctgggcacctcttgccggcacctgcggagtgctgcttctctcactcgttattacgctgtactgctaa

SEQ ID NO: 1369 - DNA, 2310 bp, synthetic construct
  misc_feature 1..2310: note = Synthetic
  source 1..2310: mol_type = other DNA
atggccttaccagtgaccgccttgctcctgccgctggccttgctgctccacgccgccaggccgcaagtgcagctggtgcagtctggagccgaggtgaaaaagagcggcgcctcagtgaaggtgtcctgcaaggccagcggctacacactgaccagctacggcatctcttgggttagacaggcccctggacaaggcctggaatggatgggctggatcagcgcctacaacggcaacatcaactacgcccagaaattccagggcagagtgacaatgaccacagacaccagcacctccaccgcttacatggaactgcggagcctgagaagcgacgacaccgccgtgtactactgtgtgcgggacggcgatagatacaattggaaccacagctatatggacgtgtggggcaagggcacaacagtcaccgtgtcttctggaggcggaggcagcggaggcggcggcagcggcggcggcggcagcgagatcgtgctgacacagagccctgatttccaaagcgtgacccctaaggaaaaggtgaccatcacatgcagagcctctcagaacattggaagtagcctgcactggtatcagcagaaacccgatcagtccccaaagctgctgatcaagttcgccagccagagcatcagcggagtgcccagccggttcagcggctctggctctggcaccgacttcaccctgaccatcaatagcctggaggccgaggacgccgctgcttattactgccaccagagcagctccctgccttggacctttggccagggcaccaaggtcgagatcaagggctctggcggcggcggcagctgcccttattctaaccctaggctctgcagcggaggcggcggcagcgagctgcctacccaaggcacatttagcaacgtctccaccaacgtgtcccctgccaaacccaccaccacagcttgtccttacagcaatcctagcctgtgcggcggcggcggcagcaccacgacgccagcgccgcggccaccaacaccggcgcccaccatcgcgtcgcagcccctgtccctgcgcccagaggcgtgccggccagcggcggggggcgcagtgcacacgagggggctggacttcgcctgtgatatctacatctgggcgcccttggccgggacttgtggggtccttctcctgtcactggttatcaccctttactgccggagggaccagaggctgccccccgatgcccacaagccccctgggggaggcagtttccggacccccatccaagaggagcaggccgacgcccactccaccctggccaagatcagagtgaagttcagcaggagcgcagacgcccccgcgtaccagcagggccagaaccagctctataacgagctcaatctaggacgaagagaggagtacgatgttttggacaagagacgtggccgggaccctgagatggggggaaagccgagaaggaagaaccctcaggaaggcctgtacaatgaactgcagaaagataagatggcggaggcctacagtgagattgggatgaaaggcgagcgccggaggggcaaggggcacgatggcctttaccagggtctcagtacagccaccaaggacacctacgacgcccttcacatgcaggccctgccccctcgcggctctggcgagggaaggggttccctgcttacttgcggcgacgtcgaagagaatcccggtccgatggccctcccagtaactgccctccttttgcccctcgcactccttcttcatgccgctcgccccaactgggtcaacgtgattagcgatttgaagaaaatcgaggaccttatacagtctatgcatattgacgctacactgtatactgagagtgatgtacacccgtcctgtaaggtaacggccatgaaatgctttcttctggagctccaggtcatcagcttggagtctggggacgcaagcatccacgatacggttgaaaacctcatcatccttgcgaacaactctctctcatctaatggaaacgttacagagagtgggtgtaaggagtgcgaagagttggaagaaaaaaacatcaaagaatttcttcaatccttcgttcacatagtgcaaatgttcattaacacgtccactaccacacccgccccgaggccacctacgccggcaccgactatcgccagtcaacccctctctctgcgccccgaggcttgccggcctgcggctggtggggcggtccacacccggggcctggattttgcgtgcgatatatacatctgggcacctcttgccggcacctgcggagtgctgcttctctcactcgttattacgctgtactgctaa

SEQ ID NO: 1370 - DNA, 2310 bp, synthetic construct
  misc_feature 1..2310: note = Synthetic
  source 1..2310: mol_type = other DNA
atggccttaccagtgaccgccttgctcctgccgctggccttgctgctccacgccgccaggccgcaagtgcagctggttcagagcggagccgaggtgaaaaagtccggcgccagcgtgaaggtgtcatgcaaggcctctggctacaccctgacctcctacggcatcagctgggtccggcaggcccctggccagggcctggagtggatgggctggatcagcgcttataatggcaacatcaattacgcccagaagttccaaggcagagtgacaatgaccacagataccagcaccagcacagcttacatggaactgagatccctgcggagcgacgacaccgccgtgtactattgtgtgcgggacggcgacagatacaactggaaccacagctacatggacgtgtggggcaagggcaccaccgtgaccgtgtccagcggcggcggcggctctggaggcggcggatctggcggaggaggttccgacatccagatgacacagagccccagcagcctgagcacctctgtgggcgatagagtgaccatcacctgcagagccagccagggcatcagcaactacctggcctggttccagcagaaacctggaaaggcccctaagagcctgatctacgccgcttcttctctgcaaagcggcgtgccaagcaagttcagcggcagcggcagcggaacagacttcagcctgacaatttctagcctccagcctgaggattttgccacatactactgccagcagtacaacagctaccccatcaccttcggccagggcacaagactggaaatcaagggctctggcggcggcggcagctgcccttattctaaccctaggctctgcagcggaggcggcggcagcgagctgcctacccaaggcacatttagcaacgtctccaccaacgtgtcccctgccaaacccaccaccacagcttgtccttacagcaatcctagcctgtgcggcggcggcggcagcaccacgacgccagcgccgcggccaccaacaccggcgcccaccatcgcgtcgcagcccctgtccctgcgcccagaggcgtgccggccagcggcggggggcgcagtgcacacgagggggctggacttcgcctgtgatatctacatctgggcgcccttggccgggacttgtggggtccttctcctgtcactggttatcaccctttactgccggagggaccagaggctgccccccgatgcccacaagccccctgggggaggcagtttccggacccccatccaagaggagcaggccgacgcccactccaccctggccaagatcagagtgaagttcagcaggagcgcagacgcccccgcgtaccagcagggccagaaccagctctataacgagctcaatctaggacgaagagaggagtacgatgttttggacaagagacgtggccgggaccctgagatggggggaaagccgagaaggaagaaccctcaggaaggcctgtacaatgaactgcagaaagataagatggcggaggcctacagtgagattgggatgaaaggcgagcgccggaggggcaaggggcacgatggcctttaccagggtctcagtacagccaccaaggacacctacgacgcccttcacatgcaggccctgccccctcgcggctctggcgagggaaggggttccctgcttacttgcggcgacgtcgaagagaatcccggtccgatggccctcccagtaactgccctccttttgcccctcgcactccttcttcatgccgctcgccccaactgggtcaacgtgattagcgatttgaagaaaatcgaggaccttatacagtctatgcatattgacgctacactgtatactgagagtgatgtacacccgtcctgtaaggtaacggccatgaaatgctttcttctggagctccaggtcatcagcttggagtctggggacgcaagcatccacgatacggttgaaaacctcatcatccttgcgaacaactctctctcatctaatggaaacgttacagagagtgggtgtaaggagtgcgaagagttggaagaaaaaaacatcaaagaatttcttcaatccttcgttcacatagtgcaaatgttcattaacacgtccactaccacacccgccccgaggccacctacgccggcaccgactatcgccagtcaacccctctctctgcgccccgaggcttgccggcctgcggctggtggggcggtccacacccggggcctggattttgcgtgcgatatatacatctgggcacctcttgccggcacctgcggagtgctgcttctctcactcgttattacgctgtactgctaa

SEQ ID NO: 1371 - DNA, 2307 bp, synthetic construct
  misc_feature 1..2307: note = Synthetic
  source 1..2307: mol_type = other DNA
atggccttaccagtgaccgccttgctcctgccgctggccttgctgctccacgccgccaggccggaggtgcagctgctggaaagcggaggcgacctggtgcaacctggaggcagcctgcggctgagctgcgccgcttctggcttcacctttagcacctacgccatgacatgggttagacaggcccctggcaagggcctggagtgggtcagcgccatcagcggcaccagcggctctacctactacgccgacagcgtgaagggcagattcaccatctccagagataattcaaagagcaccctgtacctgcacatgaacagcctgagaaccgaggacaccgccgtgtactattgcgctagaggcggctacaactggcactactactactacatggacgtgtggggaaaaggcacaacagtgaccgtgtcttctggcggaggaggcagcggcggtggcggcagtggcggaggcggcagcgagatcgtgctgacacagtcccctgacttccagagcgtgacccctaaggaaaaggtgacaatcacctgccgggcctctcagagcatcggcagcagcctgcactggtatcagcagaagcccgatcagtccccaaagctgctgatcaaatacgtgtcccaatctatcagcggcgtgcccagccggttttctggcagcggcagcggaacagacttcaccctgaccattaactccctggaggccgaggatgccgctgcctactattgtcaccagagcagcagcctgccttggacattcggccagggcaccaaggtggaaatcaagggctctggcggcggcggcagctgcccttattctaaccctaggctctgcagcggaggcggcggcagcgagctgcctacccaaggcacatttagcaacgtctccaccaacgtgtcccctgccaaacccaccaccacagcttgtccttacagcaatcctagcctgtgcggcggcggcggcagcaccacgacgccagcgccgcggccaccaacaccggcgcccaccatcgcgtcgcagcccctgtccctgcgcccagaggcgtgccggccagcggcggggggcgcagtgcacacgagggggctggacttcgcctgtgatatctacatctgggcgcccttggccgggacttgtggggtccttctcctgtcactggttatcaccctttactgccggagggaccagaggctgccccccgatgcccacaagccccctgggggaggcagtttccggacccccatccaagaggagcaggccgacgcccactccaccctggccaagatcagagtgaagttcagcaggagcgcagacgcccccgcgtaccagcagggccagaaccagctctataacgagctcaatctaggacgaagagaggagtacgatgttttggacaagagacgtggccgggaccctgagatggggggaaagccgagaaggaagaaccctcaggaaggcctgtacaatgaactgcagaaagataagatggcggaggcctacagtgagattgggatgaaaggcgagcgccggaggggcaaggggcacgatggcctttaccagggtctcagtacagccaccaaggacacctacgacgcccttcacatgcaggccctgccccctcgcggctctggcgagggaaggggttccctgcttacttgcggcgacgtcgaagagaatcccggtccgatggccctcccagtaactgccctccttttgcccctcgcactccttcttcatgccgctcgccccaactgggtcaacgtgattagcgatttgaagaaaatcgaggaccttatacagtctatgcatattgacgctacactgtatactgagagtgatgtacacccgtcctgtaaggtaacggccatgaaatgctttcttctggagctccaggtcatcagcttggagtctggggacgcaagcatccacgatacggttgaaaacctcatcatccttgcgaacaactctctctcatctaatggaaacgttacagagagtgggtgtaaggagtgcgaagagttggaagaaaaaaacatcaaagaatttcttcaatccttcgttcacatagtgcaaatgttcattaacacgtccactaccacacccgccccgaggccacctacgccggcaccgactatcgccagtcaacccctctctctgcgccccgaggcttgccggcctgcggctggtggggcggtccacacccggggcctggattttgcgtgcgatatatacatctgggcacctcttgccggcacctgcggagtgctgcttctctcactcgttattacgctgtactgctaa

SEQ ID NO: 1372 - DNA, 2310 bp, synthetic construct
  misc_feature 1..2310: note = Synthetic
  source 1..2310: mol_type = other DNA
atggccttaccagtgaccgccttgctcctgccgctggccttgctgctccacgccgccaggccggaggtgcaactgctggaaagcggaggagatctggtgcagcccggcggctccctgcgcctgtcttgcgccgccagcggctttacattcagcacctacgccatgacatgggttagacaggcccctggaaaaggcctggaatgggtgtccgccatcagcggaaccagcggcagcacatactacgccgacagcgtgaagggcagattcaccatcagccgggacaacagcaagtccaccctgtacctgcacatgaacagcctgcggaccgaggacaccgccgtgtactattgcgctagaggcggttataattggcactactactactacatggacgtgtggggcaagggcacgaccgtgacagtgtccagcggcggcggaggcagcggcggaggaggctctggcggcggcggcagcgagatcgtgatgacccagtctcctgctacactgagcctgagccccggcgagcgggccaccctgagttgtagagccagccagagcgtgtcttctagctacctgagctggtatcagcaaaaacctggccttgctccaagactgctgatctacggcgcctctacaagagccaccggcatccccgccagatttagcggctctggcagcggcaccgacttcaccctgaccatctccagcctccagcctgaggatttcgccgtctactactgccagcaggattacaacctgcctcctaccttcggccagggcacaaaggtggaaattaagggctctggcggcggcggcagctgcccttattctaaccctaggctctgcagcggaggcggcggcagcgagctgcctacccaaggcacatttagcaacgtctccaccaacgtgtcccctgccaaacccaccaccacagcttgtccttacagcaatcctagcctgtgcggcggcggcggcagcaccacgacgccagcgccgcggccaccaacaccggcgcccaccatcgcgtcgcagcccctgtccctgcgcccagaggcgtgccggccagcggcggggggcgcagtgcacacgagggggctggacttcgcctgtgatatctacatctgggcgcccttggccgggacttgtggggtccttctcctgtcactggttatcaccctttactgccggagggaccagaggctgccccccgatgcccacaagccccctgggggaggcagtttccggacccccatccaagaggagcaggccgacgcccactccaccctggccaagatcagagtgaagttcagcaggagcgcagacgcccccgcgtaccagcagggccagaaccagctctataacgagctcaatctaggacgaagagaggagtacgatgttttggacaagagacgtggccgggaccctgagatggggggaaagccgagaaggaagaaccctcaggaaggcctgtacaatgaactgcagaaagataagatggcggaggcctacagtgagattgggatgaaaggcgagcgccggaggggcaaggggcacgatggcctttaccagggtctcagtacagccaccaaggacacctacgacgcccttcacatgcaggccctgccccctcgcggctctggcgagggaaggggttccctgcttacttgcggcgacgtcgaagagaatcccggtccgatggccctcccagtaactgccctccttttgcccctcgcactccttcttcatgccgctcgccccaactgggtcaacgtgattagcgatttgaagaaaatcgaggaccttatacagtctatgcatattgacgctacactgtatactgagagtgatgtacacccgtcctgtaaggtaacggccatgaaatgctttcttctggagctccaggtcatcagcttggagtctggggacgcaagcatccacgatacggttgaaaacctcatcatccttgcgaacaactctctctcatctaatggaaacgttacagagagtgggtgtaaggagtgcgaagagttggaagaaaaaaacatcaaagaatttcttcaatccttcgttcacatagtgcaaatgttcattaacacgtccactaccacacccgccccgaggccacctacgccggcaccgactatcgccagtcaacccctctctctgcgccccgaggcttgccggcctgcggctggtggggcggtccacacccggggcctggattttgcgtgcgatatatacatctgggcacctcttgccggcacctgcggagtgctgcttctctcactcgttattacgctgtactgctaa

SEQ ID NO: 1373 - protein, 21 aa, synthetic construct
  REGION 1..21: note = Synthetic
MALPVTALLLPLALLLHAARP

SEQ ID NO: 1374 - DNA, 63 bp, synthetic construct
  misc_feature 1..63: note = Synthetic
  source 1..63: mol_type = other DNA
atggccttaccagtgaccgccttgctcctgccgctggccttgctgctccacgccgccaggccg

SEQ ID NO: 1375 - protein, 218 aa, synthetic construct
  REGION 1..218: note = Synthetic
TTTPAPRPPTPAPTIASQPLSLRPEACRPAAGGAVHTRGLDFACDIYIWAPLAGTCGVLLLSLVITLYCRRDQRLPPDAHKPPGGGSFRTPIQEEQADAHSTLAKIRVKFSRSADAPAYQQGQNQLYNELNLGRREEYDVLDKRRGRDPEMGGKPRRKNPQEGLYNELQKDKMAEAYSEIGMKGERRRGKGHDGLYQGLSTATKDTYDALHMQALPPR

SEQ ID NO: 1376 - DNA, 654 bp, synthetic construct
  misc_feature 1..654: note = Synthetic
  source 1..654: mol_type = other DNA
accacgacgccagcgccgcggccaccaacaccggcgcccaccatcgcgtcgcagcccctgtccctgcgcccagaggcgtgccggccagcggcggggggcgcagtgcacacgagggggctggacttcgcctgtgatatctacatctgggcgcccttggccgggacttgtggggtccttctcctgtcactggttatcaccctttactgccggagggaccagaggctgccccccgatgcccacaagccccctgggggaggcagtttccggacccccatccaagaggagcaggccgacgcccactccaccctggccaagatcagagtgaagttcagcaggagcgcagacgcccccgcgtaccagcagggccagaaccagctctataacgagctcaatctaggacgaagagaggagtacgatgttttggacaagagacgtggccgggaccctgagatggggggaaagccgagaaggaagaaccctcaggaaggcctgtacaatgaactgcagaaagataagatggcggaggcctacagtgagattgggatgaaaggcgagcgccggaggggcaaggggcacgatggcctttaccagggtctcagtacagccaccaaggacacctacgacgcccttcacatgcaggccctgccccctcgc

SEQ ID NO: 1377 - protein, 185 aa, synthetic construct
  REGION 1..185: note = Synthetic
ESKYGPPCPSCPIYIWAPLAGTCGVLLLSLVITLYCRRDQRLPPDAHKPPGGGSFRTPIQEEQADAHSTLAKIRVKFSRSADAPAYQQGQNQLYNELNLGRREEYDVLDKRRGRDPEMGGKPRRKNPQEGLYNELQKDKMAEAYSEIGMKGERRRGKGHDGLYQGLSTATKDTYDALHMQALPPR

SEQ ID NO: 1378 - DNA, 555 bp, synthetic construct
  misc_feature 1..555: note = Synthetic
  source 1..555: mol_type = other DNA
gagtccaaatatgggcccccatgcccatcatgcccaatctacatctgggcgcccttggccgggacttgtggggtccttctcctgtcactggttatcaccctttactgccggagggaccagaggctgccccccgatgcccacaagccccctgggggaggcagtttccggacccccatccaagaggagcaggccgacgcccactccaccctggccaagatcagagtgaagttcagcaggagcgcagacgcccccgcgtaccagcagggccagaaccagctctataacgagctcaatctaggacgaagagaggagtacgatgttttggacaagagacgtggccgggaccctgagatggggggaaagccgagaaggaagaaccctcaggaaggcctgtacaatgaactgcagaaagataagatggcggaggcctacagtgagattgggatgaaaggcgagcgccggaggggcaaggggcacgatggcctttaccagggtctcagtacagccaccaaggacacctacgacgcccttcacatgcaggccctgccccctcgc

SEQ ID NO: 1379 - protein, 278 aa, synthetic construct
  REGION 1..278: note = Synthetic
GSGGGGSCPYSNPRLCSGGGGSELPTQGTFSNVSTNVSPAKPTTTACPYSNPSLCGGGGSTTTPAPRPPTPAPTIASQPLSLRPEACRPAAGGAVHTRGLDFACDIYIWAPLAGTCGVLLLSLVITLYCRRDQRLPPDAHKPPGGGSFRTPIQEEQADAHSTLAKIRVKFSRSADAPAYQQGQNQLYNELNLGRREEYDVLDKRRGRDPEMGGKPRRKNPQEGLYNELQKDKMAEAYSEIGMKGERRRGKGHDGLYQGLSTATKDTYDALHMQALPPR

SEQ ID NO: 1380 - DNA, 834 bp, synthetic construct
  misc_feature 1..834: note = Synthetic
  source 1..834: mol_type = other DNA
ggctctggcggcggcggcagctgcccttattctaaccctaggctctgcagcggaggcggcggcagcgagctgcctacccaaggcacatttagcaacgtctccaccaacgtgtcccctgccaaacccaccaccacagcttgtccttacagcaatcctagcctgtgcggcggcggcggcagcaccacgacgccagcgccgcggccaccaacaccggcgcccaccatcgcgtcgcagcccctgtccctgcgcccagaggcgtgccggccagcggcggggggcgcagtgcacacgagggggctggacttcgcctgtgatatctacatctgggcgcccttggccgggacttgtggggtccttctcctgtcactggttatcaccctttactgccggagggaccagaggctgccccccgatgcccacaagccccctgggggaggcagtttccggacccccatccaagaggagcaggccgacgcccactccaccctggccaagatcagagtgaagttcagcaggagcgcagacgcccccgcgtaccagcagggccagaaccagctctataacgagctcaatctaggacgaagagaggagtacgatgttttggacaagagacgtggccgggaccctgagatggggggaaagccgagaaggaagaaccctcaggaaggcctgtacaatgaactgcagaaagataagatggcggaggcctacagtgagattgggatgaaaggcgagcgccggaggggcaaggggcacgatggcctttaccagggtctcagtacagccaccaaggacacctacgacgcccttcacatgcaggccctgccccctcgc

SEQ ID NO: 1381 - protein, 443 aa, synthetic construct
  REGION 1..443: note = Synthetic
TTTPAPRPPTPAPTIASQPLSLRPEACRPAAGGAVHTRGLDFACDIYIWAPLAGTCGVLLLSLVITLYCRRDQRLPPDAHKPPGGGSFRTPIQEEQADAHSTLAKIRVKFSRSADAPAYQQGQNQLYNELNLGRREEYDVLDKRRGRDPEMGGKPRRKNPQEGLYNELQKDKMAEAYSEIGMKGERRRGKGHDGLYQGLSTATKDTYDALHMQALPPRGSGEGRGSLLTCGDVEENPGPMALPVTALLLPLALLLHAARPNWVNVISDLKKIEDLIQSMHIDATLYTESDVHPSCKVTAMKCFLLELQVISLESGDASIHDTVENLIILANNSLSSNGNVTESGCKECEELEEKNIKEFLQSFVHIVQMFINTSTTTPAPRPPTPAPTIASQPLSLRPEACRPAAGGAVHTRGLDFACDIYIWAPLAGTCGVLLLSLVITLYC

SEQ ID NO: 1382 - DNA, 1332 bp, synthetic construct
  misc_feature 1..1332: note = Synthetic
  source 1..1332: mol_type = other DNA
accacgacgccagcgccgcggccaccaacaccggcgcccaccatcgcgtcgcagcccctgtccctgcgcccagaggcgtgccggccagcggcggggggcgcagtgcacacgagggggctggacttcgcctgtgatatctacatctgggcgcccttggccgggacttgtggggtccttctcctgtcactggttatcaccctttactgccggagggaccagaggctgccccccgatgcccacaagccccctgggggaggcagtttccggacccccatccaagaggagcaggccgacgcccactccaccctggccaagatcagagtgaagttcagcaggagcgcagacgcccccgcgtaccagcagggccagaaccagctctataacgagctcaatctaggacgaagagaggagtacgatgttttggacaagagacgtggccgggaccctgagatggggggaaagccgagaaggaagaaccctcaggaaggcctgtacaatgaactgcagaaagataagatggcggaggcctacagtgagattgggatgaaaggcgagcgccggaggggcaaggggcacgatggcctttaccagggtctcagtacagccaccaaggacacctacgacgcccttcacatgcaggccctgccccctcgcggctctggcgagggaaggggttccctgcttacttgcggcgacgtcgaagagaatcccggtccgatggccctcccagtaactgccctccttttgcccctcgcactccttcttcatgccgctcgccccaactgggtcaacgtgattagcgatttgaagaaaatcgaggaccttatacagtctatgcatattgacgctacactgtatactgagagtgatgtacacccgtcctgtaaggtaacggccatgaaatgctttcttctggagctccaggtcatcagcttggagtctggggacgcaagcatccacgatacggttgaaaacctcatcatccttgcgaacaactctctctcatctaatggaaacgttacagagagtgggtgtaaggagtgcgaagagttggaagaaaaaaacatcaaagaatttcttcaatccttcgttcacatagtgcaaatgttcattaacacgtccactaccacacccgccccgaggccacctacgccggcaccgactatcgccagtcaacccctctctctgcgccccgaggcttgccggcctgcggctggtggggcggtccacacccggggcctggattttgcgtgcgatatatacatctgggcacctcttgccggcacctgcggagtgctgcttctctcactcgttattacgctgtactgctaa

SEQ ID NO: 1383 - protein, 410 aa, synthetic construct
  REGION 1..410: note = Synthetic
ESKYGPPCPSCPIYIWAPLAGTCGVLLLSLVITLYCRRDQRLPPDAHKPPGGGSFRTPIQEEQADAHSTLAKIRVKFSRSADAPAYQQGQNQLYNELNLGRREEYDVLDKRRGRDPEMGGKPRRKNPQEGLYNELQKDKMAEAYSEIGMKGERRRGKGHDGLYQGLSTATKDTYDALHMQALPPRGSGEGRGSLLTCGDVEENPGPMALPVTALLLPLALLLHAARPNWVNVISDLKKIEDLIQSMHIDATLYTESDVHPSCKVTAMKCFLLELQVISLESGDASIHDTVENLIILANNSLSSNGNVTESGCKECEELEEKNIKEFLQSFVHIVQMFINTSTTTPAPRPPTPAPTIASQPLSLRPEACRPAAGGAVHTRGLDFACDIYIWAPLAGTCGVLLLSLVITLYC

SEQ ID NO: 1384 - DNA, 1233 bp, synthetic construct
  misc_feature 1..1233: note = Synthetic
  source 1..1233: mol_type = other DNA
gagtccaaatatgggcccccatgcccatcatgcccaatctacatctgggcgcccttggccgggacttgtggggtccttctcctgtcactggttatcaccctttactgccggagggaccagaggctgccccccgatgcccacaagccccctgggggaggcagtttccggacccccatccaagaggagcaggccgacgcccactccaccctggccaagatcagagtgaagttcagcaggagcgcagacgcccccgcgtaccagcagggccagaaccagctctataacgagctcaatctaggacgaagagaggagtacgatgttttggacaagagacgtggccgggaccctgagatggggggaaagccgagaaggaagaaccctcaggaaggcctgtacaatgaactgcagaaagataagatggcggaggcctacagtgagattgggatgaaaggcgagcgccggaggggcaaggggcacgatggcctttaccagggtctcagtacagccaccaaggacacctacgacgcccttcacatgcaggccctgccccctcgcggctctggcgagggaaggggttccctgcttacttgcggcgacgtcgaagagaatcccggtccgatggccctcccagtaactgccctccttttgcccctcgcactccttcttcatgccgctcgccccaactgggtcaacgtgattagcgatttgaagaaaatcgaggaccttatacagtctatgcatattgacgctacactgtatactgagagtgatgtacacccgtcctgtaaggtaacggccatgaaatgctttcttctggagctccaggtcatcagcttggagtctggggacgcaagcatccacgatacggttgaaaacctcatcatccttgcgaacaactctctctcatctaatggaaacgttacagagagtgggtgtaaggagtgcgaagagttggaagaaaaaaacatcaaagaatttcttcaatccttcgttcacatagtgcaaatgttcattaacacgtccactaccacacccgccccgaggccacctacgccggcaccgactatcgccagtcaacccctctctctgcgccccgaggcttgccggcctgcggctggtggggcggtccacacccggggcctggattttgcgtgcgatatatacatctgggcacctcttgccggcacctgcggagtgctgcttctctcactcgttattacgctgtactgctaa

SEQ ID NO: 1385 - protein, 503 aa, synthetic construct
  REGION 1..503: note = Synthetic
GSGGGGSCPYSNPRLCSGGGGSELPTQGTFSNVSTNVSPAKPTTTACPYSNPSLCGGGGSTTTPAPRPPTPAPTIASQPLSLRPEACRPAAGGAVHTRGLDFACDIYIWAPLAGTCGVLLLSLVITLYCRRDQRLPPDAHKPPGGGSFRTPIQEEQADAHSTLAKIRVKFSRSADAPAYQQGQNQLYNELNLGRREEYDVLDKRRGRDPEMGGKPRRKNPQEGLYNELQKDKMAEAYSEIGMKGERRRGKGHDGLYQGLSTATKDTYDALHMQALPPRGSGEGRGSLLTCGDVEENPGPMALPVTALLLPLALLLHAARPNWVNVISDLKKIEDLIQSMHIDATLYTESDVHPSCKVTAMKCFLLELQVISLESGDASIHDTVENLIILANNSLSSNGNVTESGCKECEELEEKNIKEFLQSFVHIVQMFINTSTTTPAPRPPTPAPTIASQPLSLRPEACRPAAGGAVHTRGLDFACDIYIWAPLAGTCGVLLLSLVITLYC

SEQ ID NO: 1386 - DNA, 1512 bp, synthetic construct
  misc_feature 1..1512: note = Synthetic
  source 1..1512: mol_type = other DNA
ggctctggcggcggcggcagctgcccttattctaaccctaggctctgcagcggaggcggcggcagcgagctgcctacccaaggcacatttagcaacgtctccaccaacgtgtcccctgccaaacccaccaccacagcttgtccttacagcaatcctagcctgtgcggcggcggcggcagcaccacgacgccagcgccgcggccaccaacaccggcgcccaccatcgcgtcgcagcccctgtccctgcgcccagaggcgtgccggccagcggcggggggcgcagtgcacacgagggggctggacttcgcctgtgatatctacatctgggcgcccttggccgggacttgtggggtccttctcctgtcactggttatcaccctttactgccggagggaccagaggctgccccccgatgcccacaagccccctgggggaggcagtttccggacccccatccaagaggagcaggccgacgcccactccaccctggccaagatcagagtgaagttcagcaggagcgcagacgcccccgcgtaccagcagggccagaaccagctctataacgagctcaatctaggacgaagagaggagtacgatgttttggacaagagacgtggccgggaccctgagatggggggaaagccgagaaggaagaaccctcaggaaggcctgtacaatgaactgcagaaagataagatggcggaggcctacagtgagattgggatgaaaggcgagcgccggaggggcaaggggcacgatggcctttaccagggtctcagtacagccaccaaggacacctacgacgcccttcacatgcaggccctgccccctcgcggctctggcgagggaaggggttccctgcttacttgcggcgacgtcgaagagaatcccggtccgatggccctcccagtaactgccctccttttgcccctcgcactccttcttcatgccgctcgccccaactgggtcaacgtgattagcgatttgaagaaaatcgaggaccttatacagtctatgcatattgacgctacactgtatactgagagtgatgtacacccgtcctgtaaggtaacggccatgaaatgctttcttctggagctccaggtcatcagcttggagtctggggacgcaagcatccacgatacggttgaaaacctcatcatccttgcgaacaactctctctcatctaatggaaacgttacagagagtgggtgtaaggagtgcgaagagttggaagaaaaaaacatcaaagaatttcttcaatccttcgttcacatagtgcaaatgttcattaacacgtccactaccacacccgccccgaggccacctacgccggcaccgactatcgccagtcaacccctctctctgcgccccgaggcttgccggcctgcggctggtggggcggtccacacccggggcctggattttgcgtgcgatatatacatctgggcacctcttgccggcacctgcggagtgctgcttctctcactcgttattacgctgtactgctaa

SEQ ID NO: 1387 - protein, 5 aa, synthetic construct
  REGION 1..5: note = Synthetic
GGGGS

SEQ ID NO: 1388 - protein, 15 aa, synthetic construct
  REGION 1..15: note = Synthetic
GGGGSGGGGSGGGGS

SEQ ID NO: 1389 - protein, 45 aa, synthetic construct
  REGION 1..45: note = Synthetic
TTTPAPRPPTPAPTIASQPLSLRPEACRPAAGGAVHTRGLDFACD

SEQ ID NO: 1390 - protein, 12 aa, synthetic construct
  REGION 1..12: note = Synthetic
ESKYGPPCPSCP

SEQ ID NO: 1391 - protein, 105 aa, synthetic construct
  REGION 1..105: note = Synthetic
GSGGGGSCPYSNPRLCSGGGGSELPTQGTFSNVSTNVSPAKPTTTACPYSNPSLCGGGGSTTTPAPRPPTPAPTIASQPLSLRPEACRPAAGGAVHTRGLDFACD

SEQ ID NO: 1392 - protein, 21 aa, synthetic construct
  REGION 1..21: note = Synthetic
IYIWAPLAGTCGVLLLSLVIT

SEQ ID NO: 1393 - skipped

SEQ ID NO: 1394 - protein, 37 aa, synthetic construct
  REGION 1..37: note = Synthetic
RRDQRLPPDAHKPPGGGSFRTPIQEEQADAHSTLAKI

SEQ ID NO: 1395 - protein, 112 aa, synthetic construct
  REGION 1..112: note = Synthetic
RVKFSRSADAPAYQQGQNQLYNELNLGRREEYDVLDKRRGRDPEMGGKPRRKNPQEGLYNELQKDKMAEAYSEIGMKGERRRGKGHDGLYQGLSTATKDTYDALHMQALPPR

SEQ ID NO: 1396 - protein, 21 aa, synthetic construct
  REGION 1..21: note = Synthetic
MALPVTALLLPLALLLHAARP

SEQ ID NO: 1397 - protein, 114 aa, synthetic construct
  REGION 1..114: note = Synthetic
NWVNVISDLKKIEDLIQSMHIDATLYTESDVHPSCKVTAMKCFLLELQVISLESGDASIHDTVENLIILANNSLSSNGNVTESGCKECEELEEKNIKEFLQSFVHIVQMFINTS

SEQ ID NO: 1398 - protein, 204 aa, synthetic construct
  REGION 1..204: note = Synthetic
MALPVTALLLPLALLLHAARPNWVNVISDLKKIEDLIQSMHIDATLYTESDVHPSCKVTAMKCFLLELQVISLESGDASIHDTVENLIILANNSLSSNGNVTESGCKECEELEEKNIKEFLQSFVHIVQMFINTSTTTPAPRPPTPAPTIASQPLSLRPEACRPAAGGAVHTRGLDFACDIYIWAPLAGTCGVLLLSLVITLYC

SEQ ID NO: 1399 - protein, 21 aa, synthetic construct
  REGION 1..21: note = Synthetic
GSGEGRGSLLTCGDVEENPGP

SEQ ID NO: 1400 - DNA, 135 bp, synthetic construct
  misc_feature 1..135: note = Synthetic
  source 1..135: mol_type = other DNA
accacgacgccagcgccgcggccaccaacaccggcgcccaccatcgcgtcgcagcccctgtccctgcgcccagaggcgtgccggccagcggcggggggcgcagtgcacacgagggggctggacttcgcctgtgat

SEQ ID NO: 1401 - DNA, 36 bp, synthetic construct
  misc_feature 1..36: note = Synthetic
  source 1..36: mol_type = other DNA
gagtccaaatatgggcccccatgcccatcatgccca

SEQ ID NO: 1402 - DNA, 315 bp, synthetic construct
  misc_feature 1..315: note = Synthetic
  source 1..315: mol_type = other DNA
ggctctggcggcggcggcagctgcccttattctaaccctaggctctgcagcggaggcggcggcagcgagctgcctacccaaggcacatttagcaacgtctccaccaacgtgtcccctgccaaacccaccaccacagcttgtccttacagcaatcctagcctgtgcggcggcggcggcagcaccacgacgccagcgccgcggccaccaacaccggcgcccaccatcgcgtcgcagcccctgtccctgcgcccagaggcgtgccggccagcggcggggggcgcagtgcacacgagggggctggacttcgcctgtgat

SEQ ID NO: 1403 - DNA, 63 bp, synthetic construct
  misc_feature 1..63: note = Synthetic
  source 1..63: mol_type = other DNA
atctacatctgggcgcccttggccgggacttgtggggtccttctcctgtcactggttatcacc

SEQ ID NO: 1404 - skipped

SEQ ID NO: 1405 - DNA, 111 bp, synthetic construct
  misc_feature 1..111: note = Synthetic
  source 1..111: mol_type = other DNA
cggagggaccagaggctgccccccgatgcccacaagccccctgggggaggcagtttccggacccccatccaagaggagcaggccgacgcccactccaccctggccaagatc

SEQ ID NO: 1406 - DNA, 336 bp, synthetic construct
  misc_feature 1..336: note = Synthetic
  source 1..336: mol_type = other DNA
agagtgaagttcagcaggagcgcagacgcccccgcgtaccagcagggccagaaccagctctataacgagctcaatctaggacgaagagaggagtacgatgttttggacaagagacgtggccgggaccctgagatggggggaaagccgagaaggaagaaccctcaggaaggcctgtacaatgaactgcagaaagataagatggcggaggcctacagtgagattgggatgaaaggcgagcgccggaggggcaaggggcacgatggcctttaccagggtctcagtacagccaccaaggacacctacgacgcccttcacatgcaggccctgccccctcgc

SEQ ID NO: 1407 - DNA, 63 bp, synthetic construct
  misc_feature 1..63: note = Synthetic
  source 1..63: mol_type = other DNA
atggccctcccagtaactgccctccttttgcccctcgcactccttcttcatgccgctcgcccc

SEQ ID NO: 1408 - DNA, 342 bp, synthetic construct
  misc_feature 1..342: note = Synthetic
  source 1..342: mol_type = other DNA
aactgggtcaacgtgattagcgatttgaagaaaatcgaggaccttatacagtctatgcatattgacgctacactgtatactgagagtgatgtacacccgtcctgtaaggtaacggccatgaaatgctttcttctggagctccaggtcatcagcttggagtctggggacgcaagcatccacgatacggttgaaaacctcatcatccttgcgaacaactctctctcatctaatggaaacgttacagagagtgggtgtaaggagtgcgaagagttggaagaaaaaaacatcaaagaatttcttcaatccttcgttcacatagtgcaaatgttcattaacacgtcc

SEQ ID NO: 1409 - DNA, 135 bp, synthetic construct
  misc_feature 1..135: note = Synthetic
  source 1..135: mol_type = other DNA
actaccacacccgccccgaggccacctacgccggcaccgactatcgccagtcaacccctctctctgcgccccgaggcttgccggcctgcggctggtggggcggtccacacccggggcctggattttgcgtgcgat

SEQ ID NO: 1410 - DNA, 63 bp, synthetic construct
  misc_feature 1..63: note = Synthetic
  source 1..63: mol_type = other DNA
atatacatctgggcacctcttgccggcacctgcggagtgctgcttctctcactcgttattacg

SEQ ID NO: 1411 - skipped

SEQ ID NO: 1412 - DNA, 612 bp, synthetic construct
  misc_feature 1..612: note = Synthetic
  source 1..612: mol_type = other DNA
atggccctcccagtaactgccctccttttgcccctcgcactccttcttcatgccgctcgccccaactgggtcaacgtgattagcgatttgaagaaaatcgaggaccttatacagtctatgcatattgacgctacactgtatactgagagtgatgtacacccgtcctgtaaggtaacggccatgaaatgctttcttctggagctccaggtcatcagcttggagtctggggacgcaagcatccacgatacggttgaaaacctcatcatccttgcgaacaactctctctcatctaatggaaacgttacagagagtgggtgtaaggagtgcgaagagttggaagaaaaaaacatcaaagaatttcttcaatccttcgttcacatagtgcaaatgttcattaacacgtccactaccacacccgccccgaggccacctacgccggcaccgactatcgccagtcaacccctctctctgcgccccgaggcttgccggcctgcggctggtggggcggtccacacccggggcctggattttgcgtgcgatatatacatctgggcacctcttgccggcacctgcggagtgctgcttctctcactcgttattacgctgtactgc

SEQ ID NO: 1413 - DNA, 63 bp, synthetic construct
  misc_feature 1..63: note = Synthetic
  source 1..63: mol_type = other DNA
ggctctggcgagggaaggggttccctgcttacttgcggcgacgtcgaagagaatcccggtccg

SEQ ID NO: 1414 - protein, 27 aa, synthetic construct
  REGION 1..27: note = Synthetic
FWVLVVVGGVLACYSLLVTVAFIIFWV

SEQ ID NO: 1415 - DNA, 81 bp, synthetic construct
  misc_feature 1..81: note = Synthetic
  source 1..81: mol_type = other DNA
ttttgggtgctggtggtggttggtggagtcctggcttgctatagcttgctagtaacagtggcctttattattttctgggtg

SEQ ID NO: 1416 - DNA, 69 bp, synthetic construct
  misc_feature 1..69: note = Synthetic
  source 1..69: mol_type = other DNA
gaaattgtgctgactcagtctccagactttcagtctgtgactccaaaggagaaagtcaccatcacctgc

SEQ ID NO: 1417 - DNA, 66 bp, synthetic construct
  misc_feature 1..66: note = Synthetic
  source 1..66: mol_type = other DNA
cagactgtggtgacccaggagccatcgctctcagtgtcccctggagggacagtcacactcacttgt

SEQ ID NO: 1418 - DNA, 69 bp, synthetic construct
  misc_feature 1..69: note = Synthetic
  source 1..69: mol_type = other DNA
gaaattgtgttgacgcagtctccagccaccctgtctttgtctccaggggaaagagccaccctctcctgc

SEQ ID NO: 1419 - DNA, 66 bp, synthetic construct
  misc_feature 1..66: note = Synthetic
  source 1..66: mol_type = other DNA
cagactgtggtgacccaggagccatcgttctcagtgtcccctggagggacagtcacactcacttgt

SEQ ID NO: 1420 - DNA, 69 bp, synthetic construct
  misc_feature 1..69: note = Synthetic
  source 1..69: mol_type = other DNA
gaaattgtcctgactcagtctccagactttcagtctgtgactccaaaggagaaagtcaccatcacctgc

SEQ ID NO: 1421 - protein, 250 aa, synthetic construct
  REGION 1..250: note = Synthetic
QVQLVESGGGVVQPGRSLRLSCAASGFTFNNYDMYWVRQAPGKGLEWVAVTWYDGSNKYYADSVKGRFTISRDNSKNTLYLQMNSLRAEDTAVYYCARGDNWNDEHHYFYYMDVWGKGTTVTVSSGSTSGSGKPGSGEGSTKGEIVLTQSPDFQSVTPKEKVTITCRASQSIGSSLHWYQQKPDQSPKLLIKFASQSFSGVPSRFSGSGSGTDFTLTIHSLEAEDAATYYCHQSSSLPWTFGQGTKVEIK

SEQ ID NO: 1422 - protein, 250 aa, synthetic construct
  REGION 1..250: note = Synthetic
QVQLVESGGGVVQPGRSLRLSCAASGFTFSNYDMHWVRQAPGKGLEWVTIIWHDASNKYYLDSVKGRFTISRDNSKNTLYLQMNSLRAEDTAVYYCARGDNWNDEHHYFYYMDVWGKGTTVTVSSGSTSGSGKPGSGEGSTKGEIVLTQSPDFQSVTPKEKVTITCRASQSIGSSLHWYQQKPDQSPKLLIKFASQSFSGVPSRFSGSGSGTDFTLTIHSLEAEDAATYYCHQSSSLPWTFGQGTKVEIK

SEQ ID NO: 1423 - protein, 250 aa, synthetic construct
  REGION 1..250: note = Synthetic
QVQLVESGGGVVQPGRSLRLSCAASGFTFSNYDMHWVRQAPGKGLEWVTIIWHDGSNKYYLDSVKGRFTISRDNSKNTLYLQMNSLRAEDTAVYYCARGDNWNDEHHYFYYMDVWGKGTTVTVSSGSTSGSGKPGSGEGSTKGEIVLTQSPDFQSVTPKEKVTITCRASQSIGSSLHWYQQKPDQSPKLLIKFASQSFSGVPSRFSGSGSGTDFTLTIHSLEAEDAATYYCHQSSSLPWTFGQGTKVEIK

SEQ ID NO: 1424 - protein, 244 aa, synthetic construct
  REGION 1..244: note = Synthetic
EVQLLESGGGLVQPGGSLRLSCAASGFTFSIYAMSWVRQAPGKGLEWVSAISGGGDTTYYADSVKGRFTISRDNSKTTLDLQMNSLRAEDTAVYYCAKHTSYYMDVWGKGTTVTVSSGSTSGSGKPGSGEGSTKGQTVVTQEPSLSVSPGGTVTLTCGLSSGSVSTSYYPSWYQQTPGQAPRTLIYSTNIRSSGVPDRFSGSILGNKAALTITGAQADDESDYYCKLYMGSGIIFGSGTKVTVL

SEQ ID NO: 1425 - protein, 250 aa, synthetic construct
  REGION 1..250: note = Synthetic
QVQLVESGGGVVQPGRSLRLSCAASGFTFSNYDKHWVRQAPGKGLEWVAVIWYDGSNKYYADSVKGRFTISRDNSKNTLYLQMNSLRAEDTAMYYCARGDNWNDEHHYFYYMDVWGKGTTVTVSSGSTSGSGKPGSGEGSTKGEIVLTQSPDFQSVTPKEKVTITCRASQSIGSSLHWYQQKPDQSPKLLIKFASQSFSGVPSRFSGSGSGTDFTLTIHSLEAEDAATYYCHQSSSLPWTFGQGTKVEIK

SEQ ID NO: 1426 - protein, 248 aa, synthetic construct
  REGION 1..248: note = Synthetic
QVQLVQSGAEVKKPGASVKVSCKASGYTFTNYGFSWVRQAPGQGLDWMGWISAYNGYTNYTQKLQGRVTMTTDTSTTTAYMELRSLRSDDTAVYYCARRGLLYYYYSMDVWGKGTTVTVSSGSTSGSGKPGSGEGSTKGEIVLTQSPATLSLSPGERATLSCGASQSVYNSYLAWYQQKPGLAPRLLIYDASLRATGVPDRFSGSGSGTDFTLTISTLEPEDFAVYYCQQYGGSPMYTFGQGTKLEIK

SEQ ID NO: 1427 - protein, 244 aa, synthetic construct
  REGION 1..244: note = Synthetic
EVQLLESGGGLVQPGGSLRLSCTASGFTFSSFAMSWVRQAPGKGLEWVSAMSGSGDTTYYADSVKGRFTISRDNSKTTLYLQMNSLRAEDTAVYSCAKHTTYYMDVWGKGTTVTVSSGSTSGSGKPGSGEGSTKGQTVVTQEPSLSVSPGGTVTLTCGLSSGSVSTSDYPSWYQQTPGQAPRTLIYRTNTRSSGVPDRFSGSILGNKAALTITGAQADDESDYYCVLYMDSGIIFGSGTKVTVL

SEQ ID NO: 1428 - protein, 244 aa, synthetic construct
  REGION 1..244: note = Synthetic
EVQLLESGGGLVQPGGSLRLSCAASGFTFNTYAMSWVRQAPGKGLEWVSAMSGSGDTTYYADSVKGRFTISRDNSKTTLYLQMNSLRAEDTAVYSCAKHTSYYMDVWGKGTTVTVSSGSTSGSGKPGSGEGSTKGQTVVTQEPSLSVSPGGTVTLTCGLSSGSVSTSDYPSWYQQTPGQAPRTLIYRTNTRSSGVPDRFSGSILGNKAALTITGAQADDESDYYCVLYMGSGIIFGSGTKVTVL

SEQ ID NO: 1429 - protein, 244 aa, synthetic construct
  REGION 1..244: note = Synthetic
EVQLLESGGDLVQPGGSLRLSCAASGFTFSTYAMSWVRQAPGKGLEWVSAISGSGENIYYADSVKGRFTISRDNSKNTLFLQMNSLRAEDTAVYYCAKHTSYYMDVWGKGTTVTVSSGSTSGSGKPGSGEGSTKGQTVVTQEPSFSVSPGGTVTLTCGLYSDSVSTSYYPSWYQQTPGQAPRTLIYNTNTRSSGVPDRFSGSILGNKAALTITGAQADDESDYYCVLYMVSGIVFGSGTKVTVL

SEQ ID NO: 1430 - protein, 250 aa, synthetic construct
  REGION 1..250: note = Synthetic
QVQLVESGGGVVQPGRSLRLSCAASGFTFSSYGMHWVRQAPGKGLEWVAVIWYDGINKYYADSVKGRFTISRDNSKNTLYLQMNSLRAEDTAVYYCARERLERRYYYYMDVWGKGTTVTVSSGSTSGSGKPGSGEGSTKGQTVVTQEPSFSVSPGGTVTLTCGLSSGSVSTSYYPGWYQQTPGQAPRTLIYSTNTRSSGVPDRFSGSILGNKAALTITGAQADDESDYYCVLYMGSGMFIFGSGTKVTVL

SEQ ID NO: 1431 - protein, 244 aa, synthetic construct
  REGION 1..244: note = Synthetic
EVQLLESGGGLVQPGGSLRLSCAASGFTFSSFAMSWVRQAPGKGLEWVSAVSGSGDDTYYADSVKGRFTISRDNSKNTLYLQMNSLRAEDTAVYYCAKHTSYYLDVWGKGTTVTVSSGSTSGSGKPGSGEGSTKGQTVVTQEPSFSVSPGGTVTLTCALSSDSVSTSYFPSWYRQTPGQAPRTLIYNTNTRSSGVPDRFSGSILGNKAALTITGAQADDESDYYCVLYMGSGIIFGSGTKVTVL

SEQ ID NO: 1432 - protein, 250 aa, synthetic construct
  REGION 1..250: note = Synthetic
QVQLVESGGGVVQPGRSLRLSCAASGFNFSTFDIHWVRQAPGKGLEWVALIWYDGSYKYYADSVKGRFTISRDNSKNTLDLRMNSLRAEDTAVYYCARNDNWNDEHYYHYYMDVWGKGTTVTVSSGSTSGSGKPGSGEGSTKGEIVLTQSPDFQSVTPKEKVTITCRASQSIGSSLHWYQQKPDQSPKLLIKFASQSFSGVPSRFSGSGSGTDFTLTINSLEAEDAATYFCHQSSSLPWTFGQGTKVEIK

SEQ ID NO: 1433 - protein, 255 aa, synthetic construct
  REGION 1..255: note = Synthetic
EVHLLESGGGLVQPGGSLRLSCAASGFTFSSYAMNWVRQAPGKGLEWVSSISGSGSSSYYADSVKGRFTISRDNSKNTLYLQMNSLRAEDTAVYYCASRGFNSQYPPGYYYYYMDVWGKGTTVTVSSGSTSGSGKPGSGEGSTKGQTVVTQEPSFSVSPGGTVTLTCGLSSGSVSTSYFPSWYQQTPGQAPRTLIYITNTRSSGVPDRFSGSIIGNKAALTITGAQADDESDYFCVLYMGSGTWVFGGGTKLTVL

SEQ ID NO: 1434 - protein, 242 aa, synthetic construct
  REGION 1..242: note = Synthetic
EVQLLESGGGLVQPGGSLRLSCAASGFTFSNYAMTWVRQAPGKGLEWVSAISGSGIGTYYADSVQGRFTTSRDNSKNTLYLQMNSLRAEDTAVYYCAKGGYNWKDVWGKGTTVTVSSGSTSGSGKPGSGEGSTKGEIVLTQSPDFQSVTPKEKVTITCRASQSIGSSLHWYQQKPDQSPKLLIKFASQSFSGVPSRFSGSGSGTDFTLTIHSLEAEDAATYYCHQSSSLPWTFGQGTKVEIK

SEQ ID NO: 1435 - protein, 250 aa, synthetic construct
  REGION 1..250: note = Synthetic
QVQLVESGGGVVQPGRSLRLSCAASGFTFTNYDMHWVRQAPGKGLEWVTIIWHDGSNKYYLDSVRGRFTISRDNSKNTLYLQMNSLRAEDTAVYYCARGDNWNDEHHYFYYMDVWGKGTTVTVSSGSTSGSGKPGSGEGSTKGEIVLTQSPDFQSVTPKEKVTITCRASQSIGSSLHWYQQKPDQSPKLLIKFASQSFSGVPSRFSGSGSGTDFTLTIHSLEAEDAATYYCHQSSSLPWTFGQGTKVEIK

SEQ ID NO: 1436 - protein, 250 aa, synthetic construct
  REGION 1..250: note = Synthetic
QVQLVESGGGVVQPGRSLRLSCAASGFTFSNYDMHWVRQAPGKGLEWVTIIWHDGSNKYYLDSVKGRFTISRDNSKNTLYLQMNSLRAEDTAVYYCARGDNWNDEHHYFYYMDVWGKGTTVTVSSGSTSGSGKPGSGEGSTKGEIVLTQSPATLSLSPGERATLSCRASQSVSSSLAWYQQKPGQAPRLLIYDASNRATGIPARFSGSGSGTDFTLTISSLEPEDFAVYYCQQRSNWPLTFGGGTKVEIK

SEQ ID NO: 1437 - protein, 246 aa, synthetic construct
  REGION 1..246: note = Synthetic
EVQLVESGGGVVRPGGSLRLSCAASGFTFDDYGMSWVRQAPGKGLEWVSGINWNGGSTGYVDSVKGRFTISRDNAKNSLYLQMNSLRAEDTALYHCARPVTTDYYYYMDVWGKGTTVTVSSGSTSGSGKPGSGEGSTKGEIVLTQSPGTLSLSPGERATLSCRASQSVSSSYLAWYQQKPGQAPRLLIYGASSRATGIPDRFSGSGSGTDFTLTISRLEPEDFAVYYCQQYGSSWTFGQGTKVEIK

SEQ ID NO: 1438 - protein, 254 aa, synthetic construct
  REGION 1..254: note = Synthetic
EVQLLESGGGLVQPGGSLRLSCAASGFTFSSYAMSWVRQAPGKGLEWVSAISGSGGSTYYADSVKGRFTISRDNSKNTLYLQMNSLRAEDTAVYYCAKKGTSYNWNDVHYYYYYYMDVWGKGTTVTVSSGSTSGSGKPGSGEGSTKGEIVLTQSPGTLSLSPGERATLSCRASQSVSSSYLAWYQQKPGQAPRLLIYGASSRATGIPDRFSGSGSGTDFTLTISRLEPEDFAVYYCQQYGSSWTFGQGTKVEIK

SEQ ID NO: 1439 - protein, 248 aa, synthetic construct
  REGION 1..248: note = Synthetic
QLQLQESGPGLVKPSETLSLTCTVSGGSISSSSYYWGWIRQPPGKGLEWIGSIYYSGSTYYNPSLKSRVTISVDTSKNQFSLKLSSVTAADTAVYYCTTGTTAYYYYYYMDVWGKGTTVTVSSGSTSGSGKPGSGEGSTKGEIVLTQSPGTLSLSPGERATLSCRASQSVSSSYLAWYQQKPGQAPRLLIYGASSRATGIPDRFSGSGSGTDFTLTISRLEPEDFAVYYCQQYGSSWTFGQGTKVEIK

SEQ ID NO: 1440 - protein, 247 aa, synthetic construct
  REGION 1..247: note = Synthetic
EVQLLESGGGLVQPGGSLRLSCAASGFTFSSYAMTWVRQAPGKGLEWVSAISGSGGSTYYADSVKGRFTISRDNSKNTLYLQMNSLRAEDTAVYYCARGGYNWHYYYYMDVWGKGTTVTVSSGSTSGSGKPGSGEGSTKGEIVLTQSPGTLSLSPGERATLSCRASQSVSSSYLAWYQQKPGQAPRLLIYGASSRATGIPDRFSGSGSGTDFTLTISRLEPEDFAVYYCQQYGSSWTFGQGTKVEIK

SEQ ID NO: 1441 - protein, 251 aa, synthetic construct
  REGION 1..251: note = Synthetic
QVQLVESGGGVVQPGRSLRLSCAASGFTFSSYDMHWVRQAPGKGLEWVSVIWYDGSNKKYGDSAKGRFTISRDNSKNTLDLQMNSLRAEDTAVYYCARGDNWNDEGGYYYYYMDVWGKGTTVTVSSGSTSGSGKPGSGEGSTKGEIVLTQSPDFQSVTPKEKVTITCRASQNIGSSLHWYQQKPDQSPKLLIKFASQSISGVPSRFSGSGSGTDFTLTINSLEAEDAAAYYCHQSSSLPWTFGQGTKVEIK

SEQ ID NO: 1442 - protein, 251 aa, synthetic construct
  REGION 1..251: note = Synthetic
QVQLVESGGGVVQPGRSLRLSCAASGFTFSSYDMHWVRQAPGKGLEWVSVIWYDGSNKKYGDSAKGRFTISRDNSKNTLDLQMNSLRAEDTAVYYCARGDNWNDEGGYYYYYMDVWGKGTTVTVSSGSTSGSGKPGSGEGSTKGDIQMTQSPSSLSTSVGDRVTITCRASQGISNYLAWFQQKPGKAPKSLIYAASSLQSGVPSKFSGSGSGTDFSLTISSLQPEDFATYYCQQYNSYPITFGQGTRLEIK

SEQ ID NO: 1443 - protein, 248 aa, synthetic construct
  REGION 1..248: note = Synthetic
QVQLVQSGAEVKKSGASVKVSCKASGYTLTSYGISWVRQAPGQGLEWMGWISAYNGNINYAQKFQGRVTMTTDTSTSTAYMELRSLRSDDTAVYYCVRDGDRYNWNHSYMDVWGKGTTVTVSSGSTSGSGKPGSGEGSTKGEIVLTQSPDFQSVTPKEKVTITCRASQNIGSSLHWYQQKPDQSPKLLIKFASQSISGVPSRFSGSGSGTDFTLTINSLEAEDAAAYYCHQSSSLPWTFGQGTKVEIK

SEQ ID NO: 1444 - protein, 248 aa, synthetic construct
  REGION 1..248: note = Synthetic
QVQLVQSGAEVKKSGASVKVSCKASGYTLTSYGISWVRQAPGQGLEWMGWISAYNGNINYAQKFQGRVTMTTDTSTSTAYMELRSLRSDDTAVYYCVRDGDRYNWNHSYMDVWGKGTTVTVSSGSTSGSGKPGSGEGSTKGDIQMTQSPSSLSTSVGDRVTITCRASQGISNYLAWFQQKPGKAPKSLIYAASSLQSGVPSKFSGSGSGTDFSLTISSLQPEDFATYYCQQYNSYPITFGQGTRLEIK

SEQ ID NO: 1445 - protein, 247 aa, synthetic construct
  REGION 1..247: note = Synthetic
EVQLLESGGDLVQPGGSLRLSCAASGFTFSTYAMTWVRQAPGKGLEWVSAISGTSGSTYYADSVKGRFTISRDNSKSTLYLHMNSLRTEDTAVYYCARGGYNWHYYYYMDVWGKGTTVTVSSGSTSGSGKPGSGEGSTKGEIVLTQSPDFQSVTPKEKVTITCRASQSIGSSLHWYQQKPDQSPKLLIKYVSQSISGVPSRFSGSGSGTDFTLTINSLEAEDAAAYYCHQSSSLPWTFGQGTKVEIK

SEQ ID NO: 1446 - protein, 248 aa, synthetic construct
  REGION 1..248: note = Synthetic
EVQLLESGGDLVQPGGSLRLSCAASGFTFSTYAMTWVRQAPGKGLEWVSAISGTSGSTYYADSVKGRFTISRDNSKSTLYLHMNSLRTEDTAVYYCARGGYNWHYYYYMDVWGKGTTVTVSSGSTSGSGKPGSGEGSTKGEIVMTQSPATLSLSPGERATLSCRASQSVSSSYLSWYQQKPGLAPRLLIYGASTRATGIPARFSGSGSGTDFTLTISSLQPEDFAVYYCQQDYNLPPTFGQGTKVEIK

SEQ ID NO: 1447 - DNA, 750 bp, synthetic construct
  misc_feature 1..750: note = Synthetic
  source 1..750: mol_type = other DNA
caggtgcagctggtggagtctgggggaggcgtggtccagcctgggaggtccctgagactctcctgtgcagcgtctggattcaccttcaataattatgacatgtactgggtccgccaggccccaggcaaggggctggagtgggtggcagttacatggtatgatggaagtaataaatactatgcagactccgtgaagggccgattcaccatctccagagacaattccaagaacacgctgtatctgcaaatgaacagcctgagagccgaggacacggctgtgtattactgtgcgagaggtgacaactggaatgacgaacaccactatttttactacatggacgtctggggcaaagggaccacggtcaccgtctcctcaggcagcaccagcggcagcggcaagcccggctccggagagggcagcaccaagggcgaaattgtgctgactcagtctccagactttcagtctgtgactccaaaggagaaagtcaccatcacctgccgggccagtcagagcattggtagtagcttacactggtaccagcagaaaccagatcagtctccaaagctcctcatcaagtttgcttcccagtccttctcaggggtcccctcgaggttcagtggcagtggatctgggacagatttcaccctcaccatccatagcctggaagctgaagatgctgcaacgtattactgtcatcagagtagtagtttaccgtggacgttcggccaagggaccaaggtggaaatcaaa

SEQ ID NO: 1448 - DNA, 750 bp, synthetic construct
  misc_feature 1..750: note = Synthetic
  source 1..750: mol_type = other DNA
caggtgcagctggtggagtctgggggaggcgtggtccagcctgggaggtccctgagactctcctgtgcagcgtctgggttcaccttcagtaactatgacatgcactgggtccgccaggccccaggcaaggggctggagtgggtgacaattatatggcatgatgcaagtaataaatattatttagactccgtgaagggccgattcaccatctccagagacaattccaagaacacgctgtatctgcaaatgaacagcctgagagccgaggacacggctgtgtattactgtgcgagaggtgacaactggaacgacgaacaccactacttctactacatggacgtctggggcaaagggaccacggtcaccgtctcctcaggcagcaccagcggcagcggcaagcccggctccggagagggcagcaccaagggcgaaattgtgctgactcagtctccagactttcagtctgtgactccaaaggagaaagtcaccatcacctgccgggccagtcagagcattggtagtagcttacactggtaccagcagaaaccagatcagtctccaaagctcctcatcaagtttgcttcccagtccttctcaggggtcccctcgaggttcagtggcagtggatctgggacagatttcaccctcaccatccatagcctggaagctgaagatgctgcaacgtattactgtcatcagagtagtagtttaccgtggacgttcggccaagggaccaaggtggaaatcaaa

SEQ ID NO: 1449 - DNA, 750 bp, synthetic construct
  misc_feature 1..750: note = Synthetic
  source 1..750: mol_type = other DNA
caggtgcagctggtggagtctgggggaggcgtggtccagcctgggaggtccctgagactctcctgtgcagcgtctgggttcaccttcagtaactatgacatgcactgggtccgccaggccccaggcaaggggctggagtgggtgacaattatatggcatgatggaagtaataaatattatttagactccgtgaagggccgattcaccatctccagagacaattccaagaacacgctgtatctgcaaatgaacagcctgagagccgaggacacggctgtgtattactgtgcgagaggtgacaactggaacgacgaacaccactacttctactacatggacgtctggggcaaagggaccacggtcaccgtctcctcaggcagcaccagcggcagcggcaagcccggctccggagagggcagcaccaagggcgaaattgtgctgactcagtctccagactttcagtctgtgactccaaaggagaaagtcaccatcacctgccgggccagtcagagcattggtagtagcttacactggtaccagcagaaaccagatcagtctccaaagctcctcatcaagtttgcttcccagtccttctcaggggtcccctcgaggttcagtggcagtggatctgggacagatttcaccctcaccatccatagcctggaagctgaagatgctgcaacgtattactgtcatcagagtagtagtttaccgtggacgttcggccaagggaccaaggtggaaatcaaa

SEQ ID NO: 1450 - DNA, 732 bp, synthetic construct
  misc_feature 1..732: note = Synthetic
  source 1..732: mol_type = other DNA
gaggtgcagctgctggagtctgggggaggcttggtacagcctggggggtccctgagactctcctgtgcagcctctggattcacctttagcatctatgccatgagctgggtccgccaggctccagggaaggggctggagtgggtctcagctattagtggtggtggtgataccacatactacgcagactccgtgaagggccggttcaccatctccagagacaattccaagaccacgctggatctgcaaatgaacagcctgagagccgaggacacggccgtatattactgtgcgaaacacactagctactacatggacgtctggggcaaagggaccacggtcaccgtctcctcaggcagcaccagcggcagcggcaagcccggctccggagagggcagcaccaagggccagactgtggtgacccaggagccatcgctctcagtgtcccctggagggacagtcacactcacttgtggcttgagctctggctcagtctctactagttactaccccagctggtaccagcagaccccaggccaggctccacgcacgctcatctacagcacaaatattcggtcttctggggtccctgatcgcttctctggctccatccttgggaacaaagctgccctcaccatcacgggggcccaggcagatgatgaatctgattattattgtaagctgtatatgggaagtggcattattttcggcagtggaaccaaggtcactgtccta

SEQ ID NO: 1451 - DNA, 750 bp, synthetic construct
  misc_feature 1..750: note = Synthetic
  source 1..750: mol_type = other DNA
caggtgcagctggtggagtctgggggaggcgtggtccagcctgggaggtccctgagactctcctgtgcagcgtctggattcaccttcagtaactatgacaagcactgggtccgccaggccccaggcaaggggctggagtgggtggcagttatatggtatgatggaagtaataagtactatgcagactccgtgaagggccgattcaccatttccagagacaattccaagaacacgctgtatctacaaatgaacagcctgagagccgaggacacggctatgtattactgtgcgagaggtgacaactggaacgacgaacaccactacttctactacatggacgtctggggcaaagggaccacggtcaccgtctcctcaggcagcaccagcggcagcggcaagcccggctccggagagggcagcaccaagggcgaaattgtgctgactcagtctccagactttcagtctgtgactccaaaggagaaagtcaccatcacctgccgggccagtcagagcattggtagtagcttacactggtaccagcagaaaccagatcagtctccaaagctcctcatcaagtttgcttcccagtccttctcaggggtcccctcgaggttcagtggcagtggatctgggacagatttcaccctcaccatccatagcctggaagctgaagatgctgcaacgtattactgtcatcagagtagtagtttaccgtggacgttcggccaagggaccaaggtggaaatcaaa

SEQ ID NO: 1452 - DNA, 744 bp, synthetic construct
  misc_feature 1..744: note = Synthetic
  source 1..744: mol_type = other DNA
caggttcagttggtacagtctggagctgaggtgaagaagcctggggcctcagtgaaggtctcctgtaaggcttctggttacacctttaccaactatggtttcagctgggtgcgacaggcccctggacaagggcttgactggatgggatggatcagcgcttacaatggttacacaaattatacacagaaactccagggcagagtcaccatgaccactgacacatccacgaccacagcctacatggagctgaggagcctgagatctgacgacacggccgtctattactgtgcgagaagaggactactctactactactactccatggacgtctggggcaaagggaccacggtcaccgtctcctcaggcagcaccagcggcagcggcaagcccggctccggagagggcagcaccaagggcgaaattgtgttgacgcagtctccagccaccctgtctttgtctccaggggaaagagccaccctctcctgcggggccagtcagagtgtttacaacagttacttagcctggtaccagcagaaacctggcctggcgcccaggctcctcatctatgatgcatccctcagggccactggcgtcccagacaggttcagtggcagtgggtctgggacagacttcactctcaccatcagcacactggagcctgaagattttgcagtgtattactgtcagcagtatggtggctcacccatgtacacttttggccaggggaccaagctggagatcaaa

SEQ ID NO: 1453 - DNA, 732 bp, synthetic construct
  misc_feature 1..732: note = Synthetic
  source 1..732: mol_type = other DNA
gaggtgcagctgctggagtctgggggaggcctggtacagcctggggggtccctgagactctcctgtacagcctctggattcacctttagcagctttgccatgagctgggtccgccaggctccagggaaggggctggagtgggtctcagctatgagtggtagtggtgataccacatactacgcagactccgtgaagggccggttcaccatctcccgagacaattccaagaccacgctgtatctgcaaatgaacagcctgagagccgaggacacggccgtatattcctgtgcgaagcacactacctactacatggacgtctggggcaaagggaccacggtcaccgtctcctcaggcagcaccagcggcagcggcaagcccggctccggagagggcagcaccaagggccagactgtggtgacccaggagccatcgctctcagtgtcccctggagggacagtcacactcacttgtggcttgagctctggctcagtctctactagtgactaccccagctggtaccagcagaccccaggccaggctccacgcacgctcatctacagaacaaacactcgctcttctggggtccctgatcgcttctctggctccatccttgggaacaaagctgccctcaccatcacgggggcccaggcagatgatgaatctgattattactgtgtgctgtatatggatagtggcattattttcggcagtggaaccaaggtcactgtccta

SEQ ID NO: 1454 - DNA, 732 bp, synthetic construct
  misc_feature 1..732: note = Synthetic
  source 1..732: mol_type = other DNA
gaggtgcagctgctggagtctgggggaggcttggtacagcctggggggtccctgagactctcctgtgcagcctctggattcacctttaacacctatgccatgagctgggtccgccaggctccagggaaggggctggagtgggtctcagctatgagtggtagtggtgataccacatactacgcagactccgtgaagggccggttcaccatctccagagacaattccaagaccactctgtatctgcaaatgaacagcctgagagccgaggacacggccgtatattcctgtgcgaaacacacttcctactacatggacgtctggggcaaagggaccacggtcaccgtctcctcaggcagcaccagcggcagcggcaagcccggctccggagagggcagcaccaagggccagactgtggtgacccaggagccatcgctctcagtgtcccctggagggacagtcacactcacttgtggcttgagctctggctcagtctctactagtgactaccccagttggtaccagcagaccccaggccaggctccacgcacgctcatctacagaacaaacactcgctcttctggggtccctgatcgcttctctggctccatccttgggaacaaagctgccctcaccatcacgggggcccaggcagatgatgaatctgattattactgtgtgctgtatatgggtagtggcattattttcggcagtggaaccaaggtcactgtccta

SEQ ID NO: 1455 - DNA, 732 bp, synthetic construct
  misc_feature 1..732: note = Synthetic
  source 1..732: mol_type = other DNA
gaggtccaattattggagtctgggggagacttggtacagcctggggggtccctgagactctcctgtgcagcctctggattcacctttagcacctatgccatgagctgggtccgccaggctccagggaaggggctggaatgggtctcagctattagtggtagtggtgaaaacatatactacgcagactccgtgaagggccggttcaccatctccagagacaattccaagaacacgctatttctacaaatgaacagcctgagagccgaggacacggccgtatattactgtgcgaaacacactagctattacatggacgtctggggcaaagggaccacggtcaccgtctcctcaggcagcaccagcggcagcggcaagcccggctccggagagggcagcaccaagggccagactgtggtgacccaggagccatcgttctcagtgtcccctggagggacagtcacactcacttgtggcttatactctgactcagtctctactagttactaccccagctggtaccagcagaccccaggccaggctccacgcacgctcatctacaacacaaacactcgctcttctggggtccctgatcgcttctctggctccatccttgggaacaaagctgccctcaccatcacgggggcccaggcagatgatgaatctgattattactgtgtactatatatggttagtggcattgttttcggcagtggaaccaaggtcactgtcctg

SEQ ID NO: 1456 - DNA, 750 bp, synthetic construct
  misc_feature 1..750: note = Synthetic
  source 1..750: mol_type = other DNA
caggtgcagctggtggagtctgggggaggcgtggtccagcctgggaggtccctgagactctcctgtgcagcgtctggattcaccttcagtagttatggcatgcactgggtccgccaggctccaggcaaggggctggagtgggtggcagttatatggtatgatggaattaataaatactatgcagactccgtgaagggccgattcaccatctccagagacaattccaagaacacgctgtatctgcaaatgaacagcctgagagccgaagacacggctgtgtattactgtgcgagagaacggctggaacgaaggtactactactacatggacgtctggggcaaagggaccacggtcaccgtctcctcaggcagcaccagcggcagcggcaagcccggctccggagagggcagcaccaagggccagactgtggtgacccaggagccatcgttctcagtgtcccctggagggacagtcacactcacttgtggcttgagctctggctcagtctctactagttactaccccggctggtaccagcagaccccaggccaggctccacgcacgctcatctacagcacaaacactcgctcttctggggtccctgatcgcttctctggctccatccttgggaacaaagctgccctcaccatcacgggggcccaggcagatgatgaatctgattattactgtgtgctatatatgggtagtggcatgtttattttcggcagtggaaccaaggtcactgtccta

SEQ ID NO: 1457 - DNA, 732 bp, synthetic construct
  misc_feature 1..732: note = Synthetic
  source 1..732: mol_type = other DNA
gaggtgcagttgttggagtctgggggaggcttggtacagcctggggggtccctgagactctcctgtgcagcctctggattcacctttagcagctttgccatgagctgggtccgccaggctccagggaaggggctggaatgggtctcagctgttagtggtagtggtgatgacacatactacgcagactccgtgaagggccggttcaccatctccagagacaattccaagaacacgctgtatctgcaaatgaacagcctgagagccgaggacacggccgtatattactgtgcgaaacacactagctactacctggacgtctggggcaaagggaccacggtcaccgtctcctcaggcagcaccagcggcagcggcaagcccggctccggagagggcagcaccaagggccagactgtggtgacccaggagccatcgttctcagtgtcccctggagggacagtcacactcacttgtgccttgagctctgactcagtctctactagttactttcccagctggtaccggcagaccccaggccaggctccacgcacgctcatctacaacacaaacactcgctcttctggggtccctgatcgcttctctggctccatccttgggaacaaagctgccctcaccatcacgggggcccaggcagatgatgaatctgattattactgtgtgctatatatgggtagtggcattattttcggcagtggaaccaaggtcactgtccta

SEQ ID NO: 1458 - DNA, 750 bp, synthetic construct
  misc_feature 1..750: note = Synthetic
  source 1..750: mol_type = other DNA
caggtgcagctggtggagtctgggggaggcgtggtccagcctgggaggtccctgagactctcctgtgcagcgtctggattcaacttcagtacctttgacatacactgggtccgccaggctccaggcaaggggctggagtgggtggcacttatatggtatgatggaagttataaatactatgcagactccgtgaagggccgattcaccatttccagagacaattccaagaacacgctggatctgcgaatgaacagcctgagagccgaggacacggctgtgtattactgtgcgcgaaatgacaactggaacgacgaacactactaccactattacatggacgtctggggcaaagggaccacggtcaccgtctcctcaggcagcaccagcggcagcggcaagcccggctccggagagggcagcaccaagggcgaaattgtcctgactcagtctccagactttcagtctgtgactccaaaggagaaagtcaccatcacctgccgggccagtcagagtattggtagtagcttacactggtaccagcagaaaccagatcagtctccaaagctcctcatcaagtttgcttcccagtccttctcaggggtcccctcgaggttcagtggcagtggatctgggacagatttcaccctcaccatcaatagcctggaagctgaagatgctgcaacgtatttctgtcatcagagtagtagtttaccgtggacgttcggccaagggaccaaggtggaaatcaaa

SEQ ID NO: 1459 - DNA, 765 bp, synthetic construct
  misc_feature 1..765: note = Synthetic
  source 1..765: mol_type = other DNA
gaagtgcacctgttggagtctgggggaggcttggtccagcctggggggtccctgagactctcctgtgcggcctctggattcacctttagcagctatgccatgaactgggtccgccaggctccagggaaggggctggagtgggtctcttctattagtggtagtggtagtagctcatactacgcagactccgtgaagggccggttcaccatctccagagacaattccaagaacacgctgtatctgcaaatgaacagcctgagagccgaggacacggccgtatattactgtgcgtctcgtggattcaactcccagtatcctcccggatactactactactacatggacgtctggggcaaagggaccacggtcaccgtctcctcaggcagcaccagcggcagcggcaagcccggctccggagagggcagcaccaagggccagactgtggtgacccaggagccatcgttctcagtgtcccctggagggacagtcacactcacttgtggcttgagctctggctcagtctccactagttacttccccagctggtaccagcagacccccggccaggctccacgcacgctcatctacatcacaaacactcgctcttcaggggtccctgatcgcttctctggctccattattgggaacaaagctgccctcaccatcacgggggcccaggcagatgatgaatctgattatttctgtgtactatatatgggtagtggcacttgggtgttcggtggaggaaccaagctgactgtccta

SEQ ID NO: 1460 - DNA, 726 bp, synthetic construct
  misc_feature 1..726: note = Synthetic
  source 1..726: mol_type = other DNA
gaggtgcagctgttggagtctgggggaggcttggtacagcctggggggtccctgagactctcctgtgcagcctctggattcaccttcagcaactatgccatgacctgggtccgccaggctccagggaaggggctggagtgggtctcagctattagtggtagtggtattggcacatactacgcagactccgtgcagggccggttcaccacctccagagacaattccaagaacacgctgtatctgcaaatgaacagcctgagagccgaggacacggccgtttattactgtgcgaaaggggggtacaactggaaggacgtctggggcaaagggaccacggtcaccgtctcctcaggcagcaccagcggcagcggcaagcccggctccggagagggcagcaccaagggcgaaattgtgctgactcagtctccagactttcagtctgtgactccaaaggagaaagtcaccatcacctgccgggccagtcagagcattggtagtagcttacactggtaccagcagaaaccagatcagtctccaaagctcctcatcaagtttgcttcccagtccttctcaggggtcccctcgaggttcagtggcagtggatctgggacagatttcaccctcaccatccatagcctggaagctgaagatgctgcaacgtattactgtcatcagagtagtagtttaccgtggacgttcggccaagggaccaaggtggaaatcaaa

SEQ ID NO: 1461 - DNA, 750 bp, synthetic construct
  misc_feature 1..750: note = Synthetic
  source 1..750: mol_type = other DNA
caggtgcagctggtggagtctgggggaggcgtggtccagcctgggaggtccctgagactctcctgtgcagcgtctgggttcaccttcactaactatgacatgcactgggtccgccaggccccaggcaaggggctggagtgggtgacaattatatggcatgatggaagtaataaatattatttagactccgtgaggggccgattcaccatctccagagacaattccaagaacacgctgtatctgcaaatgaacagcctgagagccgaggacacggctgtgtattactgtgcgagaggtgacaactggaacgacgaacaccactacttctactacatggacgtctggggcaaagggaccacggtcaccgtctcctcaggcagcaccagcggcagcggcaagcccggctccggagagggcagcaccaagggcgaaattgtgctgactcagtctccagactttcagtctgtgactccaaaggagaaagtcaccatcacctgccgggccagtcagagcattggtagtagcttacactggtaccagcagaaaccagatcagtctccaaagctcctcatcaagtttgcttcccagtccttctcaggggtcccctcgaggttcagtggcagtggatctgggacagatttcaccctcaccatccatagcctggaagctgaagatgctgcaacgtattactgtcatcagagtagtagtttaccgtggacgttcggccaagggaccaaggtggaaatcaaa

SEQ ID NO: 1462 - DNA, 750 bp, synthetic construct
  misc_feature 1..750: note = Synthetic
  source 1..750: mol_type = other DNA
caggtgcagctggtggagtctgggggaggcgtggtccagcctgggaggtccctgagactctcctgtgcagcgtctgggttcaccttcagtaactatgacatgcactgggtccgccaggccccaggcaaggggctggagtgggtgacaattatatggcatgatggaagtaataaatattatttagactccgtgaagggccgattcaccatctccagagacaattccaagaacacgctgtatctgcaaatgaacagcctgagagccgaggacacggctgtgtattactgtgcgagaggtgacaactggaacgacgaacaccactacttctactacatggacgtctggggcaaagggaccacggtcaccgtctcctcaggcagcaccagcggcagcggcaagcccggctccggagagggcagcaccaagggcgaaattgtgttgacacagtctccagccaccctgtctttgtctccaggggaaagagccaccctctcctgcagggccagtcagagtgttagcagctccttagcctggtaccaacagaaacctggccaggctccccggctcctcatctatgatgcatccaacagggccactggcatcccagccaggttcagtggcagtgggtctgggacagacttcactctcaccatcagcagcctagagcctgaagattttgcagtttattactgtcagcagcgtagcaactggcctctcactttcggcggagggaccaaggtggagatcaaa

SEQ ID NO: 1463 - DNA, 738 bp, synthetic construct
  misc_feature 1..738: note = Synthetic
  source 1..738: mol_type = other DNA
gaggtgcagctggtggagtctgggggaggtgtggtacggcctggggggtccctgagactctcctgtgcagcctctggattcacctttgatgattatggcatgagctgggtccgccaagctccagggaaggggctggagtgggtctctggtattaattggaatggtggtagcacaggttatgtagactctgtgaagggccgattcaccatctccagagacaacgccaagaactccctgtatctgcaaatgaacagtctgagagccgaggacacggccttgtatcactgtgcgagaccagtaactacggactactactactacatggacgtctggggcaaagggaccacggtcaccgtctcctcaggcagcaccagcggcagcggcaagcccggctccggagagggcagcaccaagggcgaaattgtgttgacgcagtctccaggcaccctgtctttgtctccaggggaaagagccaccctctcctgcagggccagtcagagtgttagcagcagctacttagcctggtaccagcagaaacctggccaggctcccaggctcctcatctatggtgcatccagcagggccactggcatcccagacaggttcagtggcagtgggtctgggacagacttcactctcaccatcagcagactggagcctgaagattttgcagtgtattactgtcagcagtatggtagctcgtggacgttcggccaagggaccaaggtggaaatcaaa

SEQ ID NO: 1464 - DNA, 762 bp, synthetic construct
  misc_feature 1..762: note = Synthetic
  source 1..762: mol_type = other DNA
gaggtgcagctgttggagtctgggggaggcttggtacagcctggggggtccctgagactctcctgtgcagcctctggattcacctttagcagctatgccatgagctgggtccgccaggctccagggaaggggctggagtgggtctcagctattagtggtagtggtggtagcacatactacgcagactccgtgaagggccggttcaccatctccagagacaattccaagaacacgctgtatctgcaaatgaacagcctgagagccgaggacacggccgtatattactgtgcgaaaaaggggacgtcgtacaactggaacgacgtccattactactactactactacatggacgtctggggcaaagggaccacggtcaccgtctcctcaggcagcaccagcggcagcggcaagcccggctccggagagggcagcaccaagggcgaaattgtgttgacgcagtctccaggcaccctgtctttgtctccaggggaaagagccaccctctcctgcagggccagtcagagtgttagcagcagctacttagcctggtaccagcagaaacctggccaggctcccaggctcctcatctatggtgcatccagcagggccactggcatcccagacaggttcagtggcagtgggtctgggacagacttcactctcaccatcagcagactggagcctgaagattttgcagtgtattactgtcagcagtatggtagctcgtggacgttcggccaagggaccaaggtggaaatcaaa

SEQ ID NO: 1465 - DNA, 744 bp, synthetic construct
  misc_feature 1..744: note = Synthetic
  source 1..744: mol_type = other DNA
cagctgcagctgcaggagtcgggcccaggactggtgaagccttcggagaccctgtccctcacctgcactgtctctggtggctccatcagcagtagtagttactactggggctggatccgccagcccccagggaaggggctggagtggattgggagtatctattatagtgggagcacctactacaacccgtccctcaagagtcgagtcaccatatccgtagacacgtccaagaaccagttctccctgaagctgagctctgtgaccgccgcagacacggctgtgtattactgcacaactggaacgacggcttactactactactactacatggacgtctggggcaaagggaccacggtcaccgtctcctcaggcagcaccagcggcagcggcaagcccggctccggagagggcagcaccaagggcgaaattgtgttgacgcagtctccaggcaccctgtctttgtctccaggggaaagagccaccctctcctgcagggccagtcagagtgttagcagcagctacttagcctggtaccagcagaaacctggccaggctcccaggctcctcatctatggtgcatccagcagggccactggcatcccagacaggttcagtggcagtgggtctgggacagacttcactctcaccatcagcagactggagcctgaagattttgcagtgtattactgtcagcagtatggtagctcgtggacgttcggccaagggaccaaggtggaaatcaaa

SEQ ID NO: 1466 - DNA, 741 bp, synthetic construct
  misc_feature 1..741: note = Synthetic
  source 1..741: mol_type = other DNA
gaggtgcagctgttggagtctgggggaggcttggtgcagcctggggggtccctgagactctcctgtgcagcctctggattcacctttagcagctatgccatgacctgggtccgccaggctccagggaaggggctggagtgggtctcagctattagtggtagtggtggtagcacatactacgcagactccgtgaagggccggttcaccatctccagagacaattccaagaacacgctgtatctgcaaatgaacagcctgagagccgaggacacggccgtatattactgtgcgagaggcgggtataactggcactactactactacatggacgtctggggcaaagggaccacggtcaccgtctcctcaggcagcaccagcggcagcggcaagcccggctccggagagggcagcaccaagggcgaaattgtgttgacgcagtctccaggcaccctgtctttgtctccaggggaaagagccaccctctcctgcagggccagtcagagtgttagcagcagctacttagcctggtaccagcagaaacctggccaggctcccaggctcctcatctatggtgcatccagcagggccactggcatcccagacaggttcagtggcagtgggtctgggacagacttcactctcaccatcagcagactggagcctgaagattttgcagtgtattactgtcagcagtatggtagctcgtggacgttcggccaagggaccaaggtggaaatcaaa

SEQ ID NO: 1467 - DNA, 753 bp, synthetic construct
  misc_feature 1..753: note = Synthetic
  source 1..753: mol_type = other DNA
caggtgcagctggtggagtctgggggaggcgtggtccagcctgggaggtccctgagactctcctgtgcagcgtctggattcaccttcagtagctatgacatgcactgggtccgccaggctccaggcaaggggctggagtgggtgtcagttatatggtatgatggaagtaataaaaagtatggagactccgcgaagggccgattcaccatctccagagacaattccaagaacacgctggatctgcaaatgaacagcctgagagccgaggacacggctgtgtattactgtgcgagaggcgacaactggaacgacgaaggtggctactactactactacatggacgtctggggcaaagggaccacggtcaccgtctcctcaggcagcaccagcggcagcggcaagcccggctccggagagggcagcaccaagggcgaaattgtgctgactcagtctccagactttcagtctgtgactccaaaggagaaagtcaccatcacctgccgggccagtcagaacattggtagtagcttacactggtaccagcagaaaccagatcagtctccaaagctcctcatcaagtttgcttcccagtccatctcaggggtcccctcgaggttcagtggcagtggatctgggacagatttcaccctcaccatcaatagcctggaagctgaagatgctgcagcgtattactgtcatcagagtagtagtttaccgtggacgttcggccaagggaccaaggtggaaatcaaa

SEQ ID NO: 1468 - DNA, 753 bp, synthetic construct
  misc_feature 1..753: note = Synthetic
  source 1..753: mol_type = other DNA
caggtgcagctggtggagtctgggggaggcgtggtccagcctgggaggtccctgagactctcctgtgcagcgtctggattcaccttcagtagctatgacatgcactgggtccgccaggctccaggcaaggggctggagtgggtgtcagttatatggtatgatggaagtaataaaaagtatggagactccgcgaagggccgattcaccatctccagagacaattccaagaacacgctggatctgcaaatgaacagcctgagagccgaggacacggctgtgtattactgtgcgagaggcgacaactggaacgacgaaggtggctactactactactacatggacgtctggggcaaagggaccacggtcaccgtctcctcaggcagcaccagcggcagcggcaagcccggctccggagagggcagcaccaagggcgacatccagatgacccagtctccatcctcactgtctacatctgtaggagacagagtcaccatcacttgtcgggcgagtcagggcattagcaattatttagcctggtttcagcagaaaccagggaaagcccctaagtccctgatctatgctgcatccagtttgcaaagtggggtcccatcaaagttcagcggcagtggatctgggacagatttctctctcaccattagcagcctgcagcctgaagattttgcaacttattactgccaacagtataatagttacccgatcaccttcggccaagggacacgactggagattaaa

SEQ ID NO: 1469 - DNA, 744 bp, synthetic construct
  misc_feature 1..744: note = Synthetic
  source 1..744: mol_type = other DNA
caggttcagctggtacagtctggagctgaggtgaagaagtctggggcctcagtgaaggtctcctgcaaggcttctggttacaccttaaccagctatggcatcagctgggtgcgacaggcccctggacaagggcttgagtggatgggatggatcagcgcttacaatggtaacataaactatgcacagaagttccagggcagagtcaccatgaccacagacacatccacgagcacagcctacatggagctgaggagcctgagatctgacgacacggccgtgtattactgtgtgagagatggggaccggtacaactggaaccacagctacatggacgtctggggcaaagggaccacggtcaccgtctcctcaggcagcaccagcggcagcggcaagcccggctccggagagggcagcaccaagggcgaaattgtgctgactcagtctccagactttcagtctgtgactccaaaggagaaagtcaccatcacctgccgggccagtcagaacattggtagtagcttacactggtaccagcagaaaccagatcagtctccaaagctcctcatcaagtttgcttcccagtccatctcaggggtcccctcgaggttcagtggcagtggatctgggacagatttcaccctcaccatcaatagcctggaagctgaagatgctgcagcgtattactgtcatcagagtagtagtttaccgtggacgttcggccaagggaccaaggtggaaatcaaa

SEQ ID NO: 1470 - DNA, 744 bp, synthetic construct
  misc_feature 1..744: note = Synthetic
  source 1..744: mol_type = other DNA
caggttcagctggtacagtctggagctgaggtgaagaagtctggggcctcagtgaaggtctcctgcaaggcttctggttacaccttaaccagctatggcatcagctgggtgcgacaggcccctggacaagggcttgagtggatgggatggatcagcgcttacaatggtaacataaactatgcacagaagttccagggcagagtcaccatgaccacagacacatccacgagcacagcctacatggagctgaggagcctgagatctgacgacacggccgtgtattactgtgtgagagatggggaccggtacaactggaaccacagctacatggacgtctggggcaaagggaccacggtcaccgtctcctcaggcagcaccagcggcagcggcaagcccggctccggagagggcagcaccaagggcgacatccagatgacccagtctccatcctcactgtctacatctgtaggagacagagtcaccatcacttgtcgggcgagtcagggcattagcaattatttagcctggtttcagcagaaaccagggaaagcccctaagtccctgatctatgctgcatccagtttgcaaagtggggtcccatcaaagttcagcggcagtggatctgggacagatttctctctcaccattagcagcctgcagcctgaagattttgcaacttattactgccaacagtataatagttacccgatcaccttcggccaagggacacgactggagattaaa

SEQ ID NO: 1471 - DNA, 741 bp, synthetic construct
  misc_feature 1..741: note = Synthetic
  source 1..741: mol_type = other DNA
gaggtgcagctgttggagtctgggggagacttggtacagcctggggggtccctgcgactctcctgtgcagcctctggattcacctttagcacctatgccatgacctgggtccgccaggctccagggaaggggctggagtgggtctcagctattagtggtactagtggtagcacatactacgcagactccgtgaagggccggttcaccatctccagagacaattccaagagcacgctgtatctgcacatgaacagcctgagaaccgaggacacggccgtatattactgtgcgagaggcggatataactggcactactactactacatggacgtctggggcaaagggaccacggtcaccgtctcctcaggcagcaccagcggcagcggcaagcccggctccggagagggcagcaccaagggcgaaattgtgctgactcagtctccagactttcagtctgtgactccaaaggagaaagtcaccatcacctgccgggccagtcagagcattggaagtagcttacactggtaccagcagaaaccagatcagtctccaaagctcctcatcaagtatgtttcccagtccatctcaggggtcccctcgaggttcagtggcagtggatctgggacagatttcaccctcaccatcaatagcctggaagctgaagatgctgcagcgtattactgtcatcagagtagtagtttaccgtggacgttcggccaagggaccaaggtggaaatcaaa

SEQ ID NO: 1472 - DNA, 744 bp, synthetic construct
  misc_feature 1..744: note = Synthetic
  source 1..744: mol_type = other DNA
gaggtgcagctgttggagtctgggggagacttggtacagcctggggggtccctgcgactctcctgtgcagcctctggattcacctttagcacctatgccatgacctgggtccgccaggctccagggaaggggctggagtgggtctcagctattagtggtactagtggtagcacatactacgcagactccgtgaagggccggttcaccatctccagagacaattccaagagcacgctgtatctgcacatgaacagcctgagaaccgaggacacggccgtatattactgtgcgagaggcggatataactggcactactactactacatggacgtctggggcaaagggaccacggtcaccgtctcctcaggcagcaccagcggcagcggcaagcccggctccggagagggcagcaccaagggcgaaattgtaatgacacagtctccagccaccctgtctttgtctccaggggaaagagccaccctctcctgcagggccagtcagagtgttagcagcagctacttatcctggtaccagcagaaacctgggctggctcccaggctcctcatctatggtgcatccaccagggccactggcatcccagccaggttcagtggcagtgggtctgggacagacttcactctcaccatcagcagcctgcagcctgaagattttgcagtttattactgtcagcaggattataacttacctccgacgttcggccaagggaccaaggtggaaatcaaa

SEQ ID NO: 1473 - protein, 250 aa, synthetic construct
  REGION 1..250: note = Synthetic
EIVLTQSPDFQSVTPKEKVTITCRASQSIGSSLHWYQQKPDQSPKLLIKFASQSFSGVPSRFSGSGSGTDFTLTIHSLEAEDAATYYCHQSSSLPWTFGQGTKVEIKGSTSGSGKPGSGEGSTKGQVQLVESGGGVVQPGRSLRLSCAASGFTFNNYDMYWVRQAPGKGLEWVAVTWYDGSNKYYADSVKGRFTISRDNSKNTLYLQMNSLRAEDTAVYYCARGDNWNDEHHYFYYMDVWGKGTTVTVSS

SEQ ID NO: 1474 - protein, 250 aa, synthetic construct
  REGION 1..250: note = Synthetic
EIVLTQSPDFQSVTPKEKVTITCRASQSIGSSLHWYQQKPDQSPKLLIKFASQSFSGVPSRFSGSGSGTDFTLTIHSLEAEDAATYYCHQSSSLPWTFGQGTKVEIKGSTSGSGKPGSGEGSTKGQVQLVESGGGVVQPGRSLRLSCAASGFTFSNYDMHWVRQAPGKGLEWVTIIWHDASNKYYLDSVKGRFTISRDNSKNTLYLQMNSLRAEDTAVYYCARGDNWNDEHHYFYYMDVWGKGTTVTVSS

SEQ ID NO: 1475 - protein, 250 aa, synthetic construct
  REGION 1..250: note = Synthetic
EIVLTQSPDFQSVTPKEKVTITCRASQSIGSSLHWYQQKPDQSPKLLIKFASQSFSGVPSRFSGSGSGTDFTLTIHSLEAEDAATYYCHQSSSLPWTFGQGTKVEIKGSTSGSGKPGSGEGSTKGQVQLVESGGGVVQPGRSLRLSCAASGFTFSNYDMHWVRQAPGKGLEWVTIIWHDGSNKYYLDSVKGRFTISRDNSKNTLYLQMNSLRAEDTAVYYCARGDNWNDEHHYFYYMDVWGKGTTVTVSS

SEQ ID NO: 1476 - protein, 244 aa, synthetic construct
  REGION 1..244: note = Synthetic
QTVVTQEPSLSVSPGGTVTLTCGLSSGSVSTSYYPSWYQQTPGQAPRTLIYSTNIRSSGVPDRFSGSILGNKAALTITGAQADDESDYYCKLYMGSGIIFGSGTKVTVLGSTSGSGKPGSGEGSTKGEVQLLESGGGLVQPGGSLRLSCAASGFTFSIYAMSWVRQAPGKGLEWVSAISGGGDTTYYADSVKGRFTISRDNSKTTLDLQMNSLRAEDTAVYYCAKHTSYYMDVWGKGTTVTVSS

SEQ ID NO: 1477 - protein, 250 aa, synthetic construct
  REGION 1..250: note = Synthetic
EIVLTQSPDFQSVTPKEKVTITCRASQSIGSSLHWYQQKPDQSPKLLIKFASQSFSGVPSRFSGSGSGTDFTLTIHSLEAEDAATYYCHQSSSLPWTFGQGTKVEIKGSTSGSGKPGSGEGSTKGQVQLVESGGGVVQPGRSLRLSCAASGFTFSNYDKHWVRQAPGKGLEWVAVIWYDGSNKYYADSVKGRFTISRDNSKNTLYLQMNSLRAEDTAMYYCARGDNWNDEHHYFYYMDVWGKGTTVTVSS

SEQ ID NO: 1478 - protein, 248 aa, synthetic construct
  REGION 1..248: note = Synthetic
EIVLTQSPATLSLSPGERATLSCGASQSVYNSYLAWYQQKPGLAPRLLIYDASLRATGVPDRFSGSGSGTDFTLTISTLEPEDFAVYYCQQYGGSPMYTFGQGTKLEIKGSTSGSGKPGSGEGSTKGQVQLVQSGAEVKKPGASVKVSCKASGYTFTNYGFSWVRQAPGQGLDWMGWISAYNGYTNYTQKLQGRVTMTTDTSTTTAYMELRSLRSDDTAVYYCARRGLLYYYYSMDVWGKGTTVTVSS

SEQ ID NO: 1479 - protein, 244 aa, synthetic construct
  REGION 1..244: note = Synthetic
QTVVTQEPSLSVSPGGTVTLTCGLSSGSVSTSDYPSWYQQTPGQAPRTLIYRTNTRSSGVPDRFSGSILGNKAALTITGAQADDESDYYCVLYMDSGIIFGSGTKVTVLGSTSGSGKPGSGEGSTKGEVQLLESGGGLVQPGGSLRLSCTASGFTFSSFAMSWVRQAPGKGLEWVSAMSGSGDTTYYADSVKGRFTISRDNSKTTLYLQMNSLRAEDTAVYSCAKHTTYYMDVWGKGTTVTVSS

SEQ ID NO: 1480 - protein, 244 aa, synthetic construct
  REGION 1..244: note = Synthetic
QTVVTQEPSLSVSPGGTVTLTCGLSSGSVSTSDYPSWYQQTPGQAPRTLIYRTNTRSSGVPDRFSGSILGNKAALTITGAQADDESDYYCVLYMGSGIIFGSGTKVTVLGSTSGSGKPGSGEGSTKGEVQLLESGGGLVQPGGSLRLSCAASGFTFNTYAMSWVRQAPGKGLEWVSAMSGSGDTTYYADSVKGRFTISRDNSKTTLYLQMNSLRAEDTAVYSCAKHTSYYMDVWGKGTTVTVSS

SEQ ID NO: 1481 - protein, 244 aa, synthetic construct
  REGION 1..244: note = Synthetic
QTVVTQEPSFSVSPGGTVTLTCGLYSDSVSTSYYPSWYQQTPGQAPRTLIYNTNTRSSGVPDRFSGSILGNKAALTITGAQADDESDYYCVLYMVSGIVFGSGTKVTVLGSTSGSGKPGSGEGSTKGEVQLLESGGDLVQPGGSLRLSCAASGFTFSTYAMSWVRQAPGKGLEWVSAISGSGENIYYADSVKGRFTISRDNSKNTLFLQMNSLRAEDTAVYYCAKHTSYYMDVWGKGTTVTVSS

SEQ ID NO: 1482 - protein, 250 aa, synthetic construct
  REGION 1..250: note = Synthetic
QTVVTQEPSFSVSPGGTVTLTCGLSSGSVSTSYYPGWYQQTPGQAPRTLIYSTNTRSSGVPDRFSGSILGNKAALTITGAQADDESDYYCVLYMGSGMFIFGSGTKVTVLGSTSGSGKPGSGEGSTKGQVQLVESGGGVVQPGRSLRLSCAASGFTFSSYGMHWVRQAPGKGLEWVAVIWYDGINKYYADSVKGRFTISRDNSKNTLYLQMNSLRAEDTAVYYCARERLERRYYYYMDVWGKGTTVTVSS

SEQ ID NO: 1483 - protein, 244 aa, synthetic construct
  REGION 1..244: note = Synthetic
QTVVTQEPSFSVSPGGTVTLTCALSSDSVSTSYFPSWYRQTPGQAPRTLIYNTNTRSSGVPDRFSGSILGNKAALTITGAQADDESDYYCVLYMGSGIIFGSGTKVTVLGSTSGSGKPGSGEGSTKGEVQLLESGGGLVQPGGSLRLSCAASGFTFSSFAMSWVRQAPGKGLEWVSAVSGSGDDTYYADSVKGRFTISRDNSKNTLYLQMNSLRAEDTAVYYCAKHTSYYLDVWGKGTTVTVSS

SEQ ID NO: 1484 - protein, 250 aa, synthetic construct
  REGION 1..250: note = Synthetic
EIVLTQSPDFQSVTPKEKVTITCRASQSIGSSLHWYQQKPDQSPKLLIKFASQSFSGVPSRFSGSGSGTDFTLTINSLEAEDAATYFCHQSSSLPWTFGQGTKVEIKGSTSGSGKPGSGEGSTKGQVQLVESGGGVVQPGRSLRLSCAASGFNFSTFDIHWVRQAPGKGLEWVALIWYDGSYKYYADSVKGRFTISRDNSKNTLDLRMNSLRAEDTAVYYCARNDNWNDEHYYHYYMDVWGKGTTVTVSS

SEQ ID NO: 1485 - protein, 255 aa, synthetic construct
  REGION 1..255: note = Synthetic
QTVVTQEPSFSVSPGGTVTLTCGLSSGSVSTSYFPSWYQQTPGQAPRTLIYITNTRSSGVPDRFSGSIIGNKAALTITGAQADDESDYFCVLYMGSGTWVFGGGTKLTVLGSTSGSGKPGSGEGSTKGEVHLLESGGGLVQPGGSLRLSCAASGFTFSSYAMNWVRQAPGKGLEWVSSISGSGSSSYYADSVKGRFTISRDNSKNTLYLQMNSLRAEDTAVYYCASRGFNSQYPPGYYYYYMDVWGKGTTVTVSS

SEQ ID NO: 1486 - protein, 242 aa, synthetic construct
  REGION 1..242: note = Synthetic
EIVLTQSPDFQSVTPKEKVTITCRASQSIGSSLHWYQQKPDQSPKLLIKFASQSFSGVPSRFSGSGSGTDFTLTIHSLEAEDAATYYCHQSSSLPWTFGQGTKVEIKGSTSGSGKPGSGEGSTKGEVQLLESGGGLVQPGGSLRLSCAASGFTFSNYAMTWVRQAPGKGLEWVSAISGSGIGTYYADSVQGRFTTSRDNSKNTLYLQMNSLRAEDTAVYYCAKGGYNWKDVWGKGTTVTVSS

SEQ ID NO: 1487 - protein, 250 aa, synthetic construct
  REGION 1..250: note = Synthetic
EIVLTQSPDFQSVTPKEKVTITCRASQSIGSSLHWYQQKPDQSPKLLIKFASQSFSGVPSRFSGSGSGTDFTLTIHSLEAEDAATYYCHQSSSLPWTFGQGTKVEIKGSTSGSGKPGSGEGSTKGQVQLVESGGGVVQPGRSLRLSCAASGFTFTNYDMHWVRQAPGKGLEWVTIIWHDGSNKYYLDSVRGRFTISRDNSKNTLYLQMNSLRAEDTAVYYCARGDNWNDEHHYFYYMDVWGKGTTVTVSS

SEQ ID NO: 1488 - protein, 250 aa, synthetic construct
  REGION 1..250: note = Synthetic
EIVLTQSPATLSLSPGERATLSCRASQSVSSSLAWYQQKPGQAPRLLIYDASNRATGIPARFSGSGSGTDFTLTISSLEPEDFAVYYCQQRSNWPLTFGGGTKVEIKGSTSGSGKPGSGEGSTKGQVQLVESGGGVVQPGRSLRLSCAASGFTFSNYDMHWVRQAPGKGLEWVTIIWHDGSNKYYLDSVKGRFTISRDNSKNTLYLQMNSLRAEDTAVYYCARGDNWNDEHHYFYYMDVWGKGTTVTVSS

SEQ ID NO: 1489 - protein, 246 aa, synthetic construct
  REGION 1..246: note = Synthetic
EIVLTQSPGTLSLSPGERATLSCRASQSVSSSYLAWYQQKPGQAPRLLIYGASSRATGIPDRFSGSGSGTDFTLTISRLEPEDFAVYYCQQYGSSWTFGQGTKVEIKGSTSGSGKPGSGEGSTKGEVQLVESGGGVVRPGGSLRLSCAASGFTFDDYGMSWVRQAPGKGLEWVSGINWNGGSTGYVDSVKGRFTISRDNAKNSLYLQMNSLRAEDTALYHCARPVTTDYYYYMDVWGKGTTVTVSS

SEQ ID NO: 1490 - protein, 254 aa, synthetic construct
  REGION 1..254: note = Synthetic
EIVLTQSPGTLSLSPGERATLSCRASQSVSSSYLAWYQQKPGQAPRLLIYGASSRATGIPDRFSGSGSGTDFTLTISRLEPEDFAVYYCQQYGSSWTFGQGTKVEIKGSTSGSGKPGSGEGSTKGEVQLLESGGGLVQPGGSLRLSCAASGFTFSSYAMSWVRQAPGKGLEWVSAISGSGGSTYYADSVKGRFTISRDNSKNTLYLQMNSLRAEDTAVYYCAKKGTSYNWNDVHYYYYYYMDVWGKGTTVTVSS

SEQ ID NO: 1491 - protein, 248 aa, synthetic construct
  REGION 1..248: note = Synthetic
EIVLTQSPGTLSLSPGERATLSCRASQSVSSSYLAWYQQKPGQAPRLLIYGASSRATGIPDRFSGSGSGTDFTLTISRLEPEDFAVYYCQQYGSSWTFGQGTKVEIKGSTSGSGKPGSGEGSTKGQLQLQESGPGLVKPSETLSLTCTVSGGSISSSSYYWGWIRQPPGKGLEWIGSIYYSGSTYYNPSLKSRVTISVDTSKNQFSLKLSSVTAADTAVYYCTTGTTAYYYYYYMDVWGKGTTVTVSS

SEQ ID NO: 1492 - protein, 247 aa, synthetic construct
  REGION 1..247: note = Synthetic
EIVLTQSPGTLSLSPGERATLSCRASQSVSSSYLAWYQQKPGQAPRLLIYGASSRATGIPDRFSGSGSGTDFTLTISRLEPEDFAVYYCQQYGSSWTFGQGTKVEIKGSTSGSGKPGSGEGSTKGEVQLLESGGGLVQPGGSLRLSCAASGFTFSSYAMTWVRQAPGKGLEWVSAISGSGGSTYYADSVKGRFTISRDNSKNTLYLQMNSLRAEDTAVYYCARGGYNWHYYYYMDVWGKGTTVTVSS

SEQ ID NO: 1493 - protein, 251 aa, synthetic construct
  REGION 1..251: note = Synthetic
EIVLTQSPDFQSVTPKEKVTITCRASQNIGSSLHWYQQKPDQSPKLLIKFASQSISGVPSRFSGSGSGTDFTLTINSLEAEDAAAYYCHQSSSLPWTFGQGTKVEIKGSTSGSGKPGSGEGSTKGQVQLVESGGGVVQPGRSLRLSCAASGFTFSSYDMHWVRQAPGKGLEWVSVIWYDGSNKKYGDSAKGRFTISRDNSKNTLDLQMNSLRAEDTAVYYCARGDNWNDEGGYYYYYMDVWGKGTTVTVSS

SEQ ID NO: 1494 - protein, 251 aa, synthetic construct
  REGION 1..251: note = Synthetic
DIQMTQSPSSLSTSVGDRVTITCRASQGISNYLAWFQQKPGKAPKSLIYAASSLQSGVPSKFSGSGSGTDFSLTISSLQPEDFATYYCQQYNSYPITFGQGTRLEIKGSTSGSGKPGSGEGSTKGQVQLVESGGGVVQPGRSLRLSCAASGFTFSSYDMHWVRQAPGKGLEWVSVIWYDGSNKKYGDSAKGRFTISRDNSKNTLDLQMNSLRAEDTAVYYCARGDNWNDEGGYYYYYMDVWGKGTTVTVSS

SEQ ID NO: 1495 - protein, 248 aa, synthetic construct
  REGION 1..248: note = Synthetic
EIVLTQSPDFQSVTPKEKVTITCRASQNIGSSLHWYQQKPDQSPKLLIKFASQSISGVPSRFSGSGSGTDFTLTINSLEAEDAAAYYCHQSSSLPWTFGQGTKVEIKGSTSGSGKPGSGEGSTKGQVQLVQSGAEVKKSGASVKVSCKASGYTLTSYGISWVRQAPGQGLEWMGWISAYNGNINYAQKFQGRVTMTTDTSTSTAYMELRSLRSDDTAVYYCVRDGDRYNWNHSYMDVWGKGTTVTVSS

SEQ ID NO: 1496 - protein, 248 aa, synthetic construct
  REGION 1..248: note = Synthetic
DIQMTQSPSSLSTSVGDRVTITCRASQGISNYLAWFQQKPGKAPKSLIYAASSLQSGVPSKFSGSGSGTDFSLTISSLQPEDFATYYCQQYNSYPITFGQGTRLEIKGSTSGSGKPGSGEGSTKGQVQLVQSGAEVKKSGASVKVSCKASGYTLTSYGISWVRQAPGQGLEWMGWISAYNGNINYAQKFQGRVTMTTDTSTSTAYMELRSLRSDDTAVYYCVRDGDRYNWNHSYMDVWGKGTTVTVSS

SEQ ID NO: 1497 - protein, 247 aa, synthetic construct
  REGION 1..247: note = Synthetic
EIVLTQSPDFQSVTPKEKVTITCRASQSIGSSLHWYQQKPDQSPKLLIKYVSQSISGVPSRFSGSGSGTDFTLTINSLEAEDAAAYYCHQSSSLPWTFGQGTKVEIKGSTSGSGKPGSGEGSTKGEVQLLESGGDLVQPGGSLRLSCAASGFTFSTYAMTWVRQAPGKGLEWVSAISGTSGSTYYADSVKGRFTISRDNSKSTLYLHMNSLRTEDTAVYYCARGGYNWHYYYYMDVWGKGTTVTVSS

SEQ ID NO: 1498 - protein, 248 aa, synthetic construct
  REGION 1..248: note = Synthetic
EIVMTQSPATLSLSPGERATLSCRASQSVSSSYLSWYQQKPGLAPRLLIYGASTRATGIPARFSGSGSGTDFTLTISSLQPEDFAVYYCQQDYNLPPTFGQGTKVEIKGSTSGSGKPGSGEGSTKGEVQLLESGGDLVQPGGSLRLSCAASGFTFSTYAMTWVRQAPGKGLEWVSAISGTSGSTYYADSVKGRFTISRDNSKSTLYLHMNSLRTEDTAVYYCARGGYNWHYYYYMDVWGKGTTVTVSS

SEQ ID NO: 1499 - DNA, 750 bp, synthetic construct
  misc_feature 1..750: note = Synthetic
  source 1..750: mol_type = other DNA
gaaattgtgctgactcagtctccagactttcagtctgtgactccaaaggagaaagtcaccatcacctgccgggccagtcagagcattggtagtagcttacactggtaccagcagaaaccagatcagtctccaaagctcctcatcaagtttgcttcccagtccttctcaggggtcccctcgaggttcagtggcagtggatctgggacagatttcaccctcaccatccatagcctggaagctgaagatgctgcaacgtattactgtcatcagagtagtagtttaccgtggacgttcggccaagggaccaaggtggaaatcaaaggcagcaccagcggcagcggcaagcccggctccggagagggcagcaccaagggccaggtgcagctggtggagtctgggggaggcgtggtccagcctgggaggtccctgagactctcctgtgcagcgtctggattcaccttcaataattatgacatgtactgggtccgccaggccccaggcaaggggctggagtgggtggcagttacatggtatgatggaagtaataaatactatgcagactccgtgaagggccgattcaccatctccagagacaattccaagaacacgctgtatctgcaaatgaacagcctgagagccgaggacacggctgtgtattactgtgcgagaggtgacaactggaatgacgaacaccactatttttactacatggacgtctggggcaaagggaccacggtcaccgtctcctca

SEQ ID NO: 1500 - DNA, 750 bp, synthetic construct
  misc_feature 1..750: note = Synthetic
  source 1..750: mol_type = other DNA
gaaattgtgctgactcagtctccagactttcagtctgtgactccaaaggagaaagtcaccatcacctgccgggccagtcagagcattggtagtagcttacactggtaccagcagaaaccagatcagtctccaaagctcctcatcaagtttgcttcccagtccttctcaggggtcccctcgaggttcagtggcagtggatctgggacagatttcaccctcaccatccatagcctggaagctgaagatgctgcaacgtattactgtcatcagagtagtagtttaccgtggacgttcggccaagggaccaaggtggaaatcaaaggcagcaccagcggcagcggcaagcccggctccggagagggcagcaccaagggccaggtgcagctggtggagtctgggggaggcgtggtccagcctgggaggtccctgagactctcctgtgcagcgtctgggttcaccttcagtaactatgacatgcactgggtccgccaggccccaggcaaggggctggagtgggtgacaattatatggcatgatgcaagtaataaatattatttagactccgtgaagggccgattcaccatctccagagacaattccaagaacacgctgtatctgcaaatgaacagcctgagagccgaggacacggctgtgtattactgtgcgagaggtgacaactggaacgacgaacaccactacttctactacatggacgtctggggcaaagggaccacggtcaccgtctcctca

SEQ ID NO: 1501 - DNA, 750 bp, synthetic construct
  misc_feature 1..750: note = Synthetic
  source 1..750: mol_type = other DNA
gaaattgtgctgactcagtctccagactttcagtctgtgactccaaaggagaaagtcaccatcacctgccgggccagtcagagcattggtagtagcttacactggtaccagcagaaaccagatcagtctccaaagctcctcatcaagtttgcttcccagtccttctcaggggtcccctcgaggttcagtggcagtggatctgggacagatttcaccctcaccatccatagcctggaagctgaagatgctgcaacgtattactgtcatcagagtagtagtttaccgtggacgttcggccaagggaccaaggtggaaatcaaaggcagcaccagcggcagcggcaagcccggctccggagagggcagcaccaagggccaggtgcagctggtggagtctgggggaggcgtggtccagcctgggaggtccctgagactctcctgtgcagcgtctgggttcaccttcagtaactatgacatgcactgggtccgccaggccccaggcaaggggctggagtgggtgacaattatatggcatgatggaagtaataaatattatttagactccgtgaagggccgattcaccatctccagagacaattccaagaacacgctgtatctgcaaatgaacagcctgagagccgaggacacggctgtgtattactgtgcgagaggtgacaactggaacgacgaacaccactacttctactacatggacgtctggggcaaagggaccacggtcaccgtctcctca

SEQ ID NO: 1502 - DNA, 732 bp, synthetic construct
  misc_feature 1..732: note = Synthetic
  source 1..732: mol_type = other DNA
cagactgtggtgacccaggagccatcgctctcagtgtcccctggagggacagtcacactcacttgtggcttgagctctggctcagtctctactagttactaccccagctggtaccagcagaccccaggccaggctccacgcacgctcatctacagcacaaatattcggtcttctggggtccctgatcgcttctctggctccatccttgggaacaaagctgccctcaccatcacgggggcccaggcagatgatgaatctgattattattgtaagctgtatatgggaagtggcattattttcggcagtggaaccaaggtcactgtcctaggcagcaccagcggcagcggcaagcccggctccggagagggcagcaccaagggcgaggtgcagctgctggagtctgggggaggcttggtacagcctggggggtccctgagactctcctgtgcagcctctggattcacctttagcatctatgccatgagctgggtccgccaggctccagggaaggggctggagtgggtctcagctattagtggtggtggtgataccacatactacgcagactccgtgaagggccggttcaccatctccagagacaattccaagaccacgctggatctgcaaatgaacagcctgagagccgaggacacggccgtatattactgtgcgaaacacactagctactacatggacgtctggggcaaagggaccacggtcaccgtctcctca

SEQ ID NO: 1503 - DNA, 750 bp, synthetic construct
  misc_feature 1..750: note = Synthetic
  source 1..750: mol_type = other DNA
gaaattgtgctgactcagtctccagactttcagtctgtgactccaaaggagaaagtcaccatcacctgccgggccagtcagagcattggtagtagcttacactggtaccagcagaaaccagatcagtctccaaagctcctcatcaagtttgcttcccagtccttctcaggggtcccctcgaggttcagtggcagtggatctgggacagatttcaccctcaccatccatagcctggaagctgaagatgctgcaacgtattactgtcatcagagtagtagtttaccgtggacgttcggccaagggaccaaggtggaaatcaaaggcagcaccagcggcagcggcaagcccggctccggagagggcagcaccaagggccaggtgcagctggtggagtctgggggaggcgtggtccagcctgggaggtccctgagactctcctgtgcagcgtctggattcaccttcagtaactatgacaagcactgggtccgccaggccccaggcaaggggctggagtgggtggcagttatatggtatgatggaagtaataagtactatgcagactccgtgaagggccgattcaccatttccagagacaattccaagaacacgctgtatctacaaatgaacagcctgagagccgaggacacggctatgtattactgtgcgagaggtgacaactggaacgacgaacaccactacttctactacatggacgtctggggcaaagggaccacggtcaccgtctcctca

SEQ ID NO: 1504 - DNA, 744 bp, synthetic construct
  misc_feature 1..744: note = Synthetic
  source 1..744: mol_type = other DNA
gaaattgtgttgacgcagtctccagccaccctgtctttgtctccaggggaaagagccaccctctcctgcggggccagtcagagtgtttacaacagttacttagcctggtaccagcagaaacctggcctggcgcccaggctcctcatctatgatgcatccctcagggccactggcgtcccagacaggttcagtggcagtgggtctgggacagacttcactctcaccatcagcacactggagcctgaagattttgcagtgtattactgtcagcagtatggtggctcacccatgtacacttttggccaggggaccaagctggagatcaaaggcagcaccagcggcagcggcaagcccggctccggagagggcagcaccaagggccaggttcagttggtacagtctggagctgaggtgaagaagcctggggcctcagtgaaggtctcctgtaaggcttctggttacacctttaccaactatggtttcagctgggtgcgacaggcccctggacaagggcttgactggatgggatggatcagcgcttacaatggttacacaaattatacacagaaactccagggcagagtcaccatgaccactgacacatccacgaccacagcctacatggagctgaggagcctgagatctgacgacacggccgtctattactgtgcgagaagaggactactctactactactactccatggacgtctggggcaaagggaccacggtcaccgtctcctca

SEQ ID NO: 1505 - DNA, 732 bp, synthetic construct
  misc_feature 1..732: note = Synthetic
  source 1..732: mol_type = other DNA
cagactgtggtgacccaggagccatcgctctcagtgtcccctggagggacagtcacactcacttgtggcttgagctctggctcagtctctactagtgactaccccagctggtaccagcagaccccaggccaggctccacgcacgctcatctacagaacaaacactcgctcttctggggtccctgatcgcttctctggctccatccttgggaacaaagctgccctcaccatcacgggggcccaggcagatgatgaatctgattattactgtgtgctgtatatggatagtggcattattttcggcagtggaaccaaggtcactgtcctaggcagcaccagcggcagcggcaagcccggctccggagagggcagcaccaagggcgaggtgcagctgctggagtctgggggaggcctggtacagcctggggggtccctgagactctcctgtacagcctctggattcacctttagcagctttgccatgagctgggtccgccaggctccagggaaggggctggagtgggtctcagctatgagtggtagtggtgataccacatactacgcagactccgtgaagggccggttcaccatctcccgagacaattccaagaccacgctgtatctgcaaatgaacagcctgagagccgaggacacggccgtatattcctgtgcgaagcacactacctactacatggacgtctggggcaaagggaccacggtcaccgtctcctca

SEQ ID NO: 1506 - DNA, 732 bp, synthetic construct
  misc_feature 1..732: note = Synthetic
  source 1..732: mol_type = other DNA
cagactgtggtgacccaggagccatcgctctcagtgtcccctggagggacagtcacactcacttgtggcttgagctctggctcagtctctactagtgactaccccagttggtaccagcagaccccaggccaggctccacgcacgctcatctacagaacaaacactcgctcttctggggtccctgatcgcttctctggctccatccttgggaacaaagctgccctcaccatcacgggggcccaggcagatgatgaatctgattattactgtgtgctgtatatgggtagtggcattattttcggcagtggaaccaaggtcactgtcctaggcagcaccagcggcagcggcaagcccggctccggagagggcagcaccaagggcgaggtgcagctgctggagtctgggggaggcttggtacagcctggggggtccctgagactctcctgtgcagcctctggattcacctttaacacctatgccatgagctgggtccgccaggctccagggaaggggctggagtgggtctcagctatgagtggtagtggtgataccacatactacgcagactccgtgaagggccggttcaccatctccagagacaattccaagaccactctgtatctgcaaatgaacagcctgagagccgaggacacggccgtatattcctgtgcgaaacacacttcctactacatggacgtctggggcaaagggaccacggtcaccgtctcctca

SEQ ID NO: 1507 - DNA, 732 bp, synthetic construct
  misc_feature 1..732: note = Synthetic
  source 1..732: mol_type = other DNA
cagactgtggtgacccaggagccatcgttctcagtgtcccctggagggacagtcacactcacttgtggcttatactctgactcagtctctactagttactaccccagctggtaccagcagaccccaggccaggctccacgcacgctcatctacaacacaaacactcgctcttctggggtccctgatcgcttctctggctccatccttgggaacaaagctgccctcaccatcacgggggcccaggcagatgatgaatctgattattactgtgtactatatatggttagtggcattgttttcggcagtggaaccaaggtcactgtcctgggcagcaccagcggcagcggcaagcccggctccggagagggcagcaccaagggcgaggtccaattattggagtctgggggagacttggtacagcctggggggtccctgagactctcctgtgcagcctctggattcacctttagcacctatgccatgagctgggtccgccaggctccagggaaggggctggaatgggtctcagctattagtggtagtggtgaaaacatatactacgcagactccgtgaagggccggttcaccatctccagagacaattccaagaacacgctatttctacaaatgaacagcctgagagccgaggacacggccgtatattactgtgcgaaacacactagctattacatggacgtctggggcaaagggaccacggtcaccgtctcctca

SEQ ID NO: 1508 - DNA, 750 bp, synthetic construct
  misc_feature 1..750: note = Synthetic
  source 1..750: mol_type = other DNA
cagactgtggtgacccaggagccatcgttctcagtgtcccctggagggacagtcacactcacttgtggcttgagctctggctcagtctctactagttactaccccggctggtaccagcagaccccaggccaggctccacgcacgctcatctacagcacaaacactcgctcttctggggtccctgatcgcttctctggctccatccttgggaacaaagctgccctcaccatcacgggggcccaggcagatgatgaatctgattattactgtgtgctatatatgggtagtggcatgtttattttcggcagtggaaccaaggtcactgtcctaggcagcaccagcggcagcggcaagcccggctccggagagggcagcaccaagggccaggtgcagctggtggagtctgggggaggcgtggtccagcctgggaggtccctgagactctcctgtgcagcgtctggattcaccttcagtagttatggcatgcactgggtccgccaggctccaggcaaggggctggagtgggtggcagttatatggtatgatggaattaataaatactatgcagactccgtgaagggccgattcaccatctccagagacaattccaagaacacgctgtatctgcaaatgaacagcctgagagccgaagacacggctgtgtattactgtgcgagagaacggctggaacgaaggtactactactacatggacgtctggggcaaagggaccacggtcaccgtctcctca

SEQ ID NO: 1509 - DNA, 732 bp, synthetic construct
  misc_feature 1..732: note = Synthetic
  source 1..732: mol_type = other DNA
cagactgtggtgacccaggagccatcgttctcagtgtcccctggagggacagtcacactcacttgtgccttgagctctgactcagtctctactagttactttcccagctggtaccggcagaccccaggccaggctccacgcacgctcatctacaacacaaacactcgctcttctggggtccctgatcgcttctctggctccatccttgggaacaaagctgccctcaccatcacgggggcccaggcagatgatgaatctgattattactgtgtgctatatatgggtagtggcattattttcggcagtggaaccaaggtcactgtcctaggcagcaccagcggcagcggcaagcccggctccggagagggcagcaccaagggcgaggtgcagttgttggagtctgggggaggcttggtacagcctggggggtccctgagactctcctgtgcagcctctggattcacctttagcagctttgccatgagctgggtccgccaggctccagggaaggggctggaatgggtctcagctgttagtggtagtggtgatgacacatactacgcagactccgtgaagggccggttcaccatctccagagacaattccaagaacacgctgtatctgcaaatgaacagcctgagagccgaggacacggccgtatattactgtgcgaaacacactagctactacctggacgtctggggcaaagggaccacggtcaccgtctcctca

SEQ ID NO: 1510 - DNA, 750 bp, synthetic construct
  misc_feature 1..750: note = Synthetic
  source 1..750: mol_type = other DNA
gaaattgtcctgactcagtctccagactttcagtctgtgactccaaaggagaaagtcaccatcacctgccgggccagtcagagtattggtagtagcttacactggtaccagcagaaaccagatcagtctccaaagctcctcatcaagtttgcttcccagtccttctcaggggtcccctcgaggttcagtggcagtggatctgggacagatttcaccctcaccatcaatagcctggaagctgaagatgctgcaacgtatttctgtcatcagagtagtagtttaccgtggacgttcggccaagggaccaaggtggaaatcaaaggcagcaccagcggcagcggcaagcccggctccggagagggcagcaccaagggccaggtgcagctggtggagtctgggggaggcgtggtccagcctgggaggtccctgagactctcctgtgcagcgtctggattcaacttcagtacctttgacatacactgggtccgccaggctccaggcaaggggctggagtgggtggcacttatatggtatgatggaagttataaatactatgcagactccgtgaagggccgattcaccatttccagagacaattccaagaacacgctggatctgcgaatgaacagcctgagagccgaggacacggctgtgtattactgtgcgcgaaatgacaactggaacgacgaacactactaccactattacatggacgtctggggcaaagggaccacggtcaccgtctcctca

SEQ ID NO: 1511 - DNA, 765 bp, synthetic construct
  misc_feature 1..765: note = Synthetic
  source 1..765: mol_type = other DNA
cagactgtggtgacccaggagccatcgttctcagtgtcccctggagggacagtcacactcacttgtggcttgagctctggctcagtctccactagttacttccccagctggtaccagcagacccccggccaggctccacgcacgctcatctacatcacaaacactcgctcttcaggggtccctgatcgcttctctggctccattattgggaacaaagctgccctcaccatcacgggggcccaggcagatgatgaatctgattatttctgtgtactatatatgggtagtggcacttgggtgttcggtggaggaaccaagctgactgtcctaggcagcaccagcggcagcggcaagcccggctccggagagggcagcaccaagggcgaagtgcacctgttggagtctgggggaggcttggtccagcctggggggtccctgagactctcctgtgcggcctctggattcacctttagcagctatgccatgaactgggtccgccaggctccagggaaggggctggagtgggtctcttctattagtggtagtggtagtagctcatactacgcagactccgtgaagggccggttcaccatctccagagacaattccaagaacacgctgtatctgcaaatgaacagcctgagagccgaggacacggccgtatattactgtgcgtctcgtggattcaactcccagtatcctcccggatactactactactacatggacgtctggggcaaagggaccacggtcaccgtctcctca

SEQ ID NO: 1512 - DNA, 726 bp, synthetic construct
  misc_feature 1..726: note = Synthetic
  source 1..726: mol_type = other DNA
gaaattgtgctgactcagtctccagactttcagtctgtgactccaaaggagaaagtcaccatcacctgccgggccagtcagagcattggtagtagcttacactggtaccagcagaaaccagatcagtctccaaagctcctcatcaagtttgcttcccagtccttctcaggggtcccctcgaggttcagtggcagtggatctgggacagatttcaccctcaccatccatagcctggaagctgaagatgctgcaacgtattactgtcatcagagtagtagtttaccgtggacgttcggccaagggaccaaggtggaaatcaaaggcagcaccagcggcagcggcaagcccggctccggagagggcagcaccaagggcgaggtgcagctgttggagtctgggggaggcttggtacagcctggggggtccctgagactctcctgtgcagcctctggattcaccttcagcaactatgccatgacctgggtccgccaggctccagggaaggggctggagtgggtctcagctattagtggtagtggtattggcacatactacgcagactccgtgcagggccggttcaccacctccagagacaattccaagaacacgctgtatctgcaaatgaacagcctgagagccgaggacacggccgtttattactgtgcgaaaggggggtacaactggaaggacgtctggggcaaagggaccacggtcaccgtctcctca

SEQ ID NO: 1513 - DNA, 750 bp, synthetic construct
  misc_feature 1..750: note = Synthetic
  source 1..750: mol_type = other DNA
gaaattgtgctgactcagtctccagactttcagtctgtgactccaaaggagaaagtcaccatcacctgccgggccagtcagagcattggtagtagcttacactggtaccagcagaaaccagatcagtctccaaagctcctcatcaagtttgcttcccagtccttctcaggggtcccctcgaggttcagtggcagtggatctgggacagatttcaccctcaccatccatagcctggaagctgaagatgctgcaacgtattactgtcatcagagtagtagtttaccgtggacgttcggccaagggaccaaggtggaaatcaaaggcagcaccagcggcagcggcaagcccggctccggagagggcagcaccaagggccaggtgcagctggtggagtctgggggaggcgtggtccagcctgggaggtccctgagactctcctgtgcagcgtctgggttcaccttcactaactatgacatgcactgggtccgccaggccccaggcaaggggctggagtgggtgacaattatatggcatgatggaagtaataaatattatttagactccgtgaggggccgattcaccatctccagagacaattccaagaacacgctgtatctgcaaatgaacagcctgagagccgaggacacggctgtgtattactgtgcgagaggtgacaactggaacgacgaacaccactacttctactacatggacgtctggggcaaagggaccacggtcaccgtctcctca

SEQ ID NO: 1514 - DNA, 750 bp, synthetic construct
  misc_feature 1..750: note = Synthetic
  source 1..750: mol_type = other DNA
gaaattgtgttgacacagtctccagccaccctgtctttgtctccaggggaaagagccaccctctcctgcagggccagtcagagtgttagcagctccttagcctggtaccaacagaaacctggccaggctccccggctcctcatctatgatgcatccaacagggccactggcatcccagccaggttcagtggcagtgggtctgggacagacttcactctcaccatcagcagcctagagcctgaagattttgcagtttattactgtcagcagcgtagcaactggcctctcactttcggcggagggaccaaggtggagatcaaaggcagcaccagcggcagcggcaagcccggctccggagagggcagcaccaagggccaggtgcagctggtggagtctgggggaggcgtggtccagcctgggaggtccctgagactctcctgtgcagcgtctgggttcaccttcagtaactatgacatgcactgggtccgccaggccccaggcaaggggctggagtgggtgacaattatatggcatgatggaagtaataaatattatttagactccgtgaagggccgattcaccatctccagagacaattccaagaacacgctgtatctgcaaatgaacagcctgagagccgaggacacggctgtgtattactgtgcgagaggtgacaactggaacgacgaacaccactacttctactacatggacgtctggggcaaagggaccacggtcaccgtctcctca

SEQ ID NO: 1515 - DNA, 738 bp, synthetic construct
  misc_feature 1..738: note = Synthetic
  source 1..738: mol_type = other DNA
gaaattgtgttgacgcagtctccaggcaccctgtctttgtctccaggggaaagagccaccctctcctgcagggccagtcagagtgttagcagcagctacttagcctggtaccagcagaaacctggccaggctcccaggctcctcatctatggtgcatccagcagggccactggcatcccagacaggttcagtggcagtgggtctgggacagacttcactctcaccatcagcagactggagcctgaagattttgcagtgtattactgtcagcagtatggtagctcgtggacgttcggccaagggaccaaggtggaaatcaaaggcagcaccagcggcagcggcaagcccggctccggagagggcagcaccaagggcgaggtgcagctggtggagtctgggggaggtgtggtacggcctggggggtccctgagactctcctgtgcagcctctggattcacctttgatgattatggcatgagctgggtccgccaagctccagggaaggggctggagtgggtctctggtattaattggaatggtggtagcacaggttatgtagactctgtgaagggccgattcaccatctccagagacaacgccaagaactccctgtatctgcaaatgaacagtctgagagccgaggacacggccttgtatcactgtgcgagaccagtaactacggactactactactacatggacgtctggggcaaagggaccacggtcaccgtctcctca

SEQ ID NO: 1516 - DNA, 762 bp, synthetic construct
  misc_feature 1..762: note = Synthetic
  source 1..762: mol_type = other DNA
gaaattgtgttgacgcagtctccaggcaccctgtctttgtctccaggggaaagagccaccctctcctgcagggccagtcagagtgttagcagcagctacttagcctggtaccagcagaaacctggccaggctcccaggctcctcatctatggtgcatccagcagggccactggcatcccagacaggttcagtggcagtgggtctgggacagacttcactctcaccatcagcagactggagcctgaagattttgcagtgtattactgtcagcagtatggtagctcgtggacgttcggccaagggaccaaggtggaaatcaaaggcagcaccagcggcagcggcaagcccggctccggagagggcagcaccaagggcgaggtgcagctgttggagtctgggggaggcttggtacagcctggggggtccctgagactctcctgtgcagcctctggattcacctttagcagctatgccatgagctgggtccgccaggctccagggaaggggctggagtgggtctcagctattagtggtagtggtggtagcacatactacgcagactccgtgaagggccggttcaccatctccagagacaattccaagaacacgctgtatctgcaaatgaacagcctgagagccgaggacacggccgtatattactgtgcgaaaaaggggacgtcgtacaactggaacgacgtccattactactactactactacatggacgtctggggcaaagggaccacggtcaccgtctcctca

SEQ ID NO: 1517 - DNA, 744 bp, synthetic construct
  misc_feature 1..744: note = Synthetic
  source 1..744: mol_type = other DNA
gaaattgtgttgacgcagtctccaggcaccctgtctttgtctccaggggaaagagccaccctctcctgcagggccagtcagagtgttagcagcagctacttagcctggtaccagcagaaacctggccaggctcccaggctcctcatctatggtgcatccagcagggccactggcatcccagacaggttcagtggcagtgggtctgggacagacttcactctcaccatcagcagactggagcctgaagattttgcagtgtattactgtcagcagtatggtagctcgtggacgttcggccaagggaccaaggtggaaatcaaaggcagcaccagcggcagcggcaagcccggctccggagagggcagcaccaagggccagctgcagctgcaggagtcgggcccaggactggtgaagccttcggagaccctgtccctcacctgcactgtctctggtggctccatcagcagtagtagttactactggggctggatccgccagcccccagggaaggggctggagtggattgggagtatctattatagtgggagcacctactacaacccgtccctcaagagtcgagtcaccatatccgtagacacgtccaagaaccagttctccctgaagctgagctctgtgaccgccgcagacacggctgtgtattactgcacaactggaacgacggcttactactactactactacatggacgtctggggcaaagggaccacggtcaccgtctcctca

SEQ ID NO: 1518 - DNA, 741 bp, synthetic construct
  misc_feature 1..741: note = Synthetic
  source 1..741: mol_type = other DNA
gaaattgtgttgacgcagtctccaggcaccctgtctttgtctccaggggaaagagccaccctctcctgcagggccagtcagagtgttagcagcagctacttagcctggtaccagcagaaacctggccaggctcccaggctcctcatctatggtgcatccagcagggccactggcatcccagacaggttcagtggcagtgggtctgggacagacttcactctcaccatcagcagactggagcctgaagattttgcagtgtattactgtcagcagtatggtagctcgtggacgttcggccaagggaccaaggtggaaatcaaaggcagcaccagcggcagcggcaagcccggctccggagagggcagcaccaagggcgaggtgcagctgttggagtctgggggaggcttggtgcagcctggggggtccctgagactctcctgtgcagcctctggattcacctttagcagctatgccatgacctgggtccgccaggctccagggaaggggctggagtgggtctcagctattagtggtagtggtggtagcacatactacgcagactccgtgaagggccggttcaccatctccagagacaattccaagaacacgctgtatctgcaaatgaacagcctgagagccgaggacacggccgtatattactgtgcgagaggcgggtataactggcactactactactacatggacgtctggggcaaagggaccacggtcaccgtctcctca

SEQ ID NO: 1519 - DNA, 753 bp, synthetic construct
  misc_feature 1..753: note = Synthetic
  source 1..753: mol_type = other DNA
gaaattgtgctgactcagtctccagactttcagtctgtgactccaaaggagaaagtcaccatcacctgccgggccagtcagaacattggtagtagcttacactggtaccagcagaaaccagatcagtctccaaagctcctcatcaagtttgcttcccagtccatctcaggggtcccctcgaggttcagtggcagtggatctgggacagatttcaccctcaccatcaatagcctggaagctgaagatgctgcagcgtattactgtcatcagagtagtagtttaccgtggacgttcggccaagggaccaaggtggaaatcaaaggcagcaccagcggcagcggcaagcccggctccggagagggcagcaccaagggccaggtgcagctggtggagtctgggggaggcgtggtccagcctgggaggtccctgagactctcctgtgcagcgtctggattcaccttcagtagctatgacatgcactgggtccgccaggctccaggcaaggggctggagtgggtgtcagttatatggtatgatggaagtaataaaaagtatggagactccgcgaagggccgattcaccatctccagagacaattccaagaacacgctggatctgcaaatgaacagcctgagagccgaggacacggctgtgtattactgtgcgagaggcgacaactggaacgacgaaggtggctactactactactacatggacgtctggggcaaagggaccacggtcaccgtctcctca

SEQ ID NO: 1520 - DNA, 753 bp, synthetic construct
  misc_feature 1..753: note = Synthetic
  source 1..753: mol_type = other DNA
gacatccagatgacccagtctccatcctcactgtctacatctgtaggagacagagtcaccatcacttgtcgggcgagtcagggcattagcaattatttagcctggtttcagcagaaaccagggaaagcccctaagtccctgatctatgctgcatccagtttgcaaagtggggtcccatcaaagttcagcggcagtggatctgggacagatttctctctcaccattagcagcctgcagcctgaagattttgcaacttattactgccaacagtataatagttacccgatcaccttcggccaagggacacgactggagattaaaggcagcaccagcggcagcggcaagcccggctccggagagggcagcaccaagggccaggtgcagctggtggagtctgggggaggcgtggtccagcctgggaggtccctgagactctcctgtgcagcgtctggattcaccttcagtagctatgacatgcactgggtccgccaggctccaggcaaggggctggagtgggtgtcagttatatggtatgatggaagtaataaaaagtatggagactccgcgaagggccgattcaccatctccagagacaattccaagaacacgctggatctgcaaatgaacagcctgagagccgaggacacggctgtgtattactgtgcgagaggcgacaactggaacgacgaaggtggctactactactactacatggacgtctggggcaaagggaccacggtcaccgtctcctca

SEQ ID NO: 1521 - DNA, 744 bp, synthetic construct
  misc_feature 1..744: note = Synthetic
  source 1..744: mol_type = other DNA
gaaattgtgctgactcagtctccagactttcagtctgtgactccaaaggagaaagtcaccatcacctgccgggccagtcagaacattggtagtagcttacactggtaccagcagaaaccagatcagtctccaaagctcctcatcaagtttgcttcccagtccatctcaggggtcccctcgaggttcagtggcagtggatctgggacagatttcaccctcaccatcaatagcctggaagctgaagatgctgcagcgtattactgtcatcagagtagtagtttaccgtggacgttcggccaagggaccaaggtggaaatcaaaggcagcaccagcggcagcggcaagcccggctccggagagggcagcaccaagggccaggttcagctggtacagtctggagctgaggtgaagaagtctggggcctcagtgaaggtctcctgcaaggcttctggttacaccttaaccagctatggcatcagctgggtgcgacaggcccctggacaagggcttgagtggatgggatggatcagcgcttacaatggtaacataaactatgcacagaagttccagggcagagtcaccatgaccacagacacatccacgagcacagcctacatggagctgaggagcctgagatctgacgacacggccgtgtattactgtgtgagagatggggaccggtacaactggaaccacagctacatggacgtctggggcaaagggaccacggtcaccgtctcctca

SEQ ID NO: 1522 - DNA, 744 bp, synthetic construct
  misc_feature 1..744: note = Synthetic
  source 1..744: mol_type = other DNA
gacatccagatgacccagtctccatcctcactgtctacatctgtaggagacagagtcaccatcacttgtcgggcgagtcagggcattagcaattatttagcctggtttcagcagaaaccagggaaagcccctaagtccctgatctatgctgcatccagtttgcaaagtggggtcccatcaaagttcagcggcagtggatctgggacagatttctctctcaccattagcagcctgcagcctgaagattttgcaacttattactgccaacagtataatagttacccgatcaccttcggccaagggacacgactggagattaaaggcagcaccagcggcagcggcaagcccggctccggagagggcagcaccaagggccaggttcagctggtacagtctggagctgaggtgaagaagtctggggcctcagtgaaggtctcctgcaaggcttctggttacaccttaaccagctatggcatcagctgggtgcgacaggcccctggacaagggcttgagtggatgggatggatcagcgcttacaatggtaacataaactatgcacagaagttccagggcagagtcaccatgaccacagacacatccacgagcacagcctacatggagctgaggagcctgagatctgacgacacggccgtgtattactgtgtgagagatggggaccggtacaactggaaccacagctacatggacgtctggggcaaagggaccacggtcaccgtctcctca

SEQ ID NO: 1523 - DNA, 741 bp, synthetic construct
  misc_feature 1..741: note = Synthetic
  source 1..741: mol_type = other DNA
gaaattgtgctgactcagtctccagactttcagtctgtgactccaaaggagaaagtcaccatcacctgccgggccagtcagagcattggaagtagcttacactggtaccagcagaaaccagatcagtctccaaagctcctcatcaagtatgtttcccagtccatctcaggggtcccctcgaggttcagtggcagtggatctgggacagatttcaccctcaccatcaatagcctggaagctgaagatgctgcagcgtattactgtcatcagagtagtagtttaccgtggacgttcggccaagggaccaaggtggaaatcaaaggcagcaccagcggcagcggcaagcccggctccggagagggcagcaccaagggcgaggtgcagctgttggagtctgggggagacttggtacagcctggggggtccctgcgactctcctgtgcagcctctggattcacctttagcacctatgccatgacctgggtccgccaggctccagggaaggggctggagtgggtctcagctattagtggtactagtggtagcacatactacgcagactccgtgaagggccggttcaccatctccagagacaattccaagagcacgctgtatctgcacatgaacagcctgagaaccgaggacacggccgtatattactgtgcgagaggcggatataactggcactactactactacatggacgtctggggcaaagggaccacggtcaccgtctcctca

SEQ ID NO: 1524 - DNA, 744 bp, synthetic construct
  misc_feature 1..744: note = Synthetic
  source 1..744: mol_type = other DNA
gaaattgtaatgacacagtctccagccaccctgtctttgtctccaggggaaagagccaccctctcctgcagggccagtcagagtgttagcagcagctacttatcctggtaccagcagaaacctgggctggctcccaggctcctcatctatggtgcatccaccagggccactggcatcccagccaggttcagtggcagtgggtctgggacagacttcactctcaccatcagcagcctgcagcctgaagattttgcagtttattactgtcagcaggattataacttacctccgacgttcggccaagggaccaaggtggaaatcaaaggcagcaccagcggcagcggcaagcccggctccggagagggcagcaccaagggcgaggtgcagctgttggagtctgggggagacttggtacagcctggggggtccctgcgactctcctgtgcagcctctggattcacctttagcacctatgccatgacctgggtccgccaggctccagggaaggggctggagtgggtctcagctattagtggtactagtggtagcacatactacgcagactccgtgaagggccggttcaccatctccagagacaattccaagagcacgctgtatctgcacatgaacagcctgagaaccgaggacacggccgtatattactgtgcgagaggcggatataactggcactactactactacatggacgtctggggcaaagggaccacggtcaccgtctcctca

SEQ ID NO: 1525 - protein, 10 aa, synthetic construct
  REGION 1..10: note = Synthetic
GFTFSSHDMH

SEQ ID NO: 1526 - protein, 10 aa, synthetic construct
  REGION 1..10: note = Synthetic
GFTFSSHDMH

SEQ ID NO: 1527 - protein, 10 aa, synthetic construct
  REGION 1..10: note = Synthetic
GYTFTNYGIS

SEQ ID NO: 1528 - protein, 10 aa, synthetic construct
  REGION 1..10: note = Synthetic
GFTFSSNDIY

SEQ ID NO: 1529 - protein, 10 aa, synthetic construct
  REGION 1..10: note = Synthetic
GFTFSSYGMH

SEQ ID NO: 1530 - protein, 12 aa, synthetic construct
  REGION 1..12: note = Synthetic
GGSISSSSYYWG

SEQ ID NO: 1531 - protein, 10 aa, synthetic construct
  REGION 1..10: note = Synthetic
GFTFSNYGMH

SEQ ID NO: 1532 - protein, 10 aa, synthetic construct
  REGION 1..10: note = Synthetic
GYTFTSYDIN

SEQ ID NO: 1533 - protein, 10 aa, synthetic construct
  REGION 1..10: note = Synthetic
GYTFTSYDIN

SEQ ID NO: 1534 - protein, 10 aa, synthetic construct
  REGION 1..10: note = Synthetic
GGSISSYYWS

SEQ ID NO: 1535 - protein, 10 aa, synthetic construct
  REGION 1..10: note = Synthetic
GFTFSSYGMH

SEQ ID NO: 1536 - protein, 10 aa, synthetic construct
  REGION 1..10: note = Synthetic
GFTFTSYDMH

SEQ ID NO: 1537 - protein, 10 aa, synthetic construct
  REGION 1..10: note = Synthetic
GYTFTSYGIS

SEQ ID NO: 1538 - protein, 10 aa, synthetic construct
  REGION 1..10: note = Synthetic
GYTLTELSMH

SEQ ID NO: 1539 - protein, 10 aa, synthetic construct
  REGION 1..10: note = Synthetic
GYTFTNYGIG

SEQ ID NO: 1540 - protein, 10 aa, synthetic construct
  REGION 1..10: note = Synthetic
GYTFTNYGIG

SEQ ID NO: 1541 - protein, 10 aa, synthetic construct
  REGION 1..10: note = Synthetic
GYTFTSYDIN

SEQ ID NO: 1542 - protein, 10 aa, synthetic construct
  REGION 1..10: note = Synthetic
GYTFTSYDIN

SEQ ID NO: 1543 - protein, 10 aa, synthetic construct
  REGION 1..10: note = Synthetic
GFTFSSYVMN

SEQ ID NO: 1544 - protein, 16 aa, synthetic construct
  REGION 1..16: note = Synthetic
IWSDGNKKYYVDSAKG

SEQ ID NO: 1545 - protein, 16 aa, synthetic construct
  REGION 1..16: note = Synthetic
IWSDGNNKYYADSAKG

SEQ ID NO: 1546 - protein, 16 aa, synthetic construct
  REGION 1..16: note = Synthetic
ISGYNDNTHYAQKFQG

SEQ ID NO: 1547 - protein, 16 aa, synthetic construct
  REGION 1..16: note = Synthetic
IWYDGSNKYYADSVKG

SEQ ID NO: 1548 - protein, 16 aa, synthetic construct
  REGION 1..16: note = Synthetic
ISYDGSNKYYADSVKG

SEQ ID NO: 1549 - protein, 15 aa, synthetic construct
  REGION 1..15: note = Synthetic
LYYSGSTYYNPSLKS

SEQ ID NO: 1550 - protein, 16 aa, synthetic construct
  REGION 1..16: note = Synthetic
IWSDGHNKYYADSVKG

SEQ ID NO: 1551 - protein, 16 aa, synthetic construct
  REGION 1..16: note = Synthetic
MIPNSGDTGSAQKFQG

SEQ ID NO: 1552 - protein, 16 aa, synthetic construct
  REGION 1..16: note = Synthetic
MNPNSGNTVYAQKFQG

SEQ ID NO: 1553 - protein, 15 aa, synthetic construct
  REGION 1..15: note = Synthetic
IYTSGSTNYNPSLKS

SEQ ID NO: 1554 - protein, 16 aa, synthetic construct
  REGION 1..16: note = Synthetic
IWSDGHNKYYADSVKG

SEQ ID NO: 1555 - protein, 16 aa, synthetic construct
  REGION 1..16: note = Synthetic
IWFDGSNKYYADSVKG

SEQ ID NO: 1556 - protein, 16 aa, synthetic construct
  REGION 1..16: note = Synthetic
ISAYNGHTDYTQKLQG

SEQ ID NO: 1557 - protein, 16 aa, synthetic construct
  REGION 1..16: note = Synthetic
FDPEDGETIYAQKFQG

SEQ ID NO: 1558 - protein, 16 aa, synthetic construct
  REGION 1..16: note = Synthetic
IIAYNGYTKYAQILQG

SEQ ID NO: 1559 - protein, 16 aa, synthetic construct
  REGION 1..16: note = Synthetic
IIAYNGYTKYAQILQG

SEQ ID NO: 1560 - protein, 16 aa, synthetic construct
  REGION 1..16: note = Synthetic
MNPISGDTGSAQKFQG

SEQ ID NO: 1561 - protein, 16 aa, synthetic construct
  REGION 1..16: note = Synthetic
MIPNSGDTGSAQKFQG

SEQ ID NO: 1562 - protein, 16 aa, synthetic construct
  REGION 1..16: note = Synthetic
VSGSGNNSFYADSVKG

SEQ ID NO: 1563 - protein, 18 aa, synthetic construct
  REGION 1..18: note = Synthetic
ARGDNWNDEHSYYYYMDV

SEQ ID NO: 1564 - protein, 18 aa, synthetic construct
  REGION 1..18: note = Synthetic
ARGDNWNDEHSYYYYMDV

SEQ ID NO: 1565 - protein, 17 aa, synthetic construct
  REGION 1..17: note = Synthetic
ARDGIAARPVYYYYMDV

SEQ ID NO: 1566 - protein, 18 aa, synthetic construct
  REGION 1..18: note = Synthetic
ARGDNWNDEHHYHYYMDV

SEQ ID NO: 1567 - protein, 11 aa, synthetic construct
  REGION 1..11: note = Synthetic
ARDHYYYYMDV

SEQ ID NO: 1568 - protein, 15 aa, synthetic construct
  REGION 1..15: note = Synthetic
AAVQLERRGYFYMDV

SEQ ID NO: 1569 - protein, 15 aa, synthetic construct
  REGION 1..15: note = Synthetic
ARAQLERRYFYYMDV

SEQ ID NO: 1570 - protein, 18 aa, synthetic construct
  REGION 1..18: note = Synthetic
ARGGYCNSTSCYYYYMDV

SEQ ID NO: 1571 - protein, 19 aa, synthetic construct
  REGION 1..19: note = Synthetic
ARGGDFWSGYHDYYYYMDV

SEQ ID NO: 1572 - protein, 19 aa, synthetic construct
  REGION 1..19: note = Synthetic
AREEYQLLPALYYYYYMDV

SEQ ID NO: 1573 - protein, 15 aa, synthetic construct
  REGION 1..15: note = Synthetic
ARAQLERRYFYYMDV

SEQ ID NO: 1574 - protein, 18 aa, synthetic construct
  REGION 1..18: note = Synthetic
ARGDNWNDRYYYYYYMDV

SEQ ID NO: 1575 - protein, 18 aa, synthetic construct
  REGION 1..18: note = Synthetic
VREVVLPTTDYYYFYMDV

SEQ ID NO: 1576 - protein, 22 aa, synthetic construct
  REGION 1..22: note = Synthetic
ATGRITMVRGVIIPYYYYYMDV

SEQ ID NO: 1577 - protein, 15 aa, synthetic construct
  REGION 1..15: note = Synthetic
ARQQLGGDYHYYMDV

SEQ ID NO: 1578 - protein, 15 aa, synthetic construct
  REGION 1..15: note = Synthetic
ARQQLGGDYHYYMDV

SEQ ID NO: 1579 - protein, 18 aa, synthetic construct
  REGION 1..18: note = Synthetic
ARGGYCSSTSCYYYYMDV

SEQ ID NO: 1580 - protein, 18 aa, synthetic construct
  REGION 1..18: note = Synthetic
ARGGYCNSTSCYYYYMDV

SEQ ID NO: 1581 - protein, 16 aa, synthetic construct
  REGION 1..16: note = Synthetic
ASRSSSYLYYYYYMDV

SEQ ID NO: 1582 - protein, 125 aa, synthetic construct
  REGION 1..125: note = Synthetic
QVQLVESGGGVVQPGRSLRLSCAASGFTFSSHDMHWVRQAPGKGLDWVAVIWSDGNKKYYVDSAKGRFTISRDNSKNTVYLQMNSLRAEDTAIYYCARGDNWNDEHSYYYYMDVWGKGTTVTVSS

SEQ ID NO: 1583 - protein, 125 aa, synthetic construct
  REGION 1..125: note = Synthetic
QVQLVESGGGVVQPGRSLRLSCAASGFTFSSHDMHWVRQAPGKGLDWVAVIWSDGNNKYYADSAKGRFTISRDNSKNTVYLQMNSLRAEDTAIYYCARGDNWNDEHSYYYYMDVWGKGTTVTVSS

SEQ ID NO: 1584 - protein, 124 aa, synthetic construct
  REGION 1..124: note = Synthetic
QLQLVQSGAEVKKPGASVKVSCKASGYTFTNYGISWLRQAPGQGLEWMGWISGYNDNTHYAQKFQGRVTMTTDTSTTTAYMELRNLRSDDTAVYYCARDGIAARPVYYYYMDVWGKGTTVTVSS

SEQ ID NO: 1585 - protein, 125 aa, synthetic construct
  REGION 1..125: note = Synthetic
QVQLVESGGGVVQPGRSLRLSCVASGFTFSSNDIYWVRQAPGKGLEWVAVIWYDGSNKYYADSVKGRFTISRDNSKNTLYLQMNSLRAEDTAVYYCARGDNWNDEHHYHYYMDVWGKGTTVTVSS

SEQ ID NO: 1586 - protein, 118 aa, synthetic construct
  REGION 1..118: note = Synthetic
QVQLVESGGGVVQPGRSLRLSCAASGFTFSSYGMHWVRQAPGKGLEWVAVISYDGSNKYYADSVKGRFTISRDNSKTTLYLQMNSLRAEDTAVYYCARDHYYYYMDVWGKGTTVTVSS

SEQ ID NO: 1587 - protein, 123 aa, synthetic construct
  REGION 1..123: note = Synthetic
QLQLQESGPGLVKPSETLSLTCTVSGGSISSSSYYWGWIRQPPGKGLEWIGSLYYSGSTYYNPSLKSRVTISVDTSKNQFSLKLSSVTAADTAVYYCAAVQLERRGYFYMDVWGKGTTVTVSS

SEQ ID NO: 1588 - protein, 122 aa, synthetic construct
  REGION 1..122: note = Synthetic
QVQLVESGGGVVQPGRSLRLSCAASGFTFSNYGMHWVRQAPGKGLEWMAVIWSDGHNKYYADSVKGRFTISRDNSKNTLYLQMNSLRAEDTAVYYCARAQLERRYFYYMDVWGKGTTVTVSS

SEQ ID NO: 1589 - protein, 125 aa, synthetic construct
  REGION 1..125: note = Synthetic
QVQLVQSGAEVKKPGASVKVSCKASGYTFTSYDINWVRQATGQGLEWMGWMIPNSGDTGSAQKFQGRVTMTRNTSIGTAYMELSSLRSEDTAVYYCARGGYCNSTSCYYYYMDVWGKGTTVTVSS

SEQ ID NO: 1590 - protein, 126 aa, synthetic construct
  REGION 1..126: note = Synthetic
QVQLVQSGAEVKKPGASVKVSCKASGYTFTSYDINWVRQATGQGLEWMGWMNPNSGNTVYAQKFQGRVTMTRNTSISTAYMELSSLRSEDTAVYYCARGGDFWSGYHDYYYYMDVWGKGTTVTVSS

SEQ ID NO: 1591 - protein, 125 aa, synthetic construct
  REGION 1..125: note = Synthetic
QVQLQESGPGLVKPSETLSLTCTVSGGSISSYYWSWIRQPAGKGLEWIGRIYTSGSTNYNPSLKSRVTMSVDTSKNQFSLKLSSVTAADTAVYYCAREEYQLLPALYYYYYMDVWGKGTTVTVSS

SEQ ID NO: 1592 - protein, 122 aa, synthetic construct
  REGION 1..122: note = Synthetic
QVQLVESGGGVVQPGRSLRLSCAATGFTFSSYGMHWVRQAPGKGLEWMVVIWSDGHNKYYADSVKGRFTISRDNSKNTLYLQMNSLRAEDTAVYYCARAQLERRYFYYMDVWGKGTTVTVSS

SEQ ID NO: 1593 - protein, 125 aa, synthetic construct
  REGION 1..125: note = Synthetic
QVQLVESGGGVVQPGRSLRLSCAASGFTFTSYDMHWVRQAPGKGLEWVTIIWFDGSNKYYADSVKGRFTISRDNSKNTLYLQMNSLSAEDTAVYYCARGDNWNDRYYYYYYMDVWGKGTTVTVSS

SEQ ID NO: 1594 - protein, 125 aa, synthetic construct
  REGION 1..125: note = Synthetic
QVQLVQSGAEVKKPGASVKVSCKASGYTFTSYGISWVRQAPGQGLEWMGWISAYNGHTDYTQKLQGRVTMTTDTSTTTAYMELRSLSSADTAVYYCVREVVLPTTDYYYFYMDVWGKGTTVTVSS

SEQ ID NO: 1595 - protein, 129 aa, synthetic construct
  REGION 1..129: note = Synthetic
QVQLVQSGAEVKKPGASVKVSCKVSGYTLTELSMHWVRQAPGKGLEWMGGFDPEDGETIYAQKFQGRVTMTEDTSTDTAYMELSSLRSEDTAVYYCATGRITMVRGVIIPYYYYYMDVWGKGTTVTVSS

SEQ ID NO: 1596 - protein, 122 aa, synthetic construct
  REGION 1..122: note = Synthetic
QVQLVQSGTEVKKPGASVKVSCKASGYTFTNYGIGWVRQAPGQGLEWMGWIIAYNGYTKYAQILQGRVTMTTDTSTNTAYMELRSLRSDDTAVYYCARQQLGGDYHYYMDVWGKGTTVTVSS

SEQ ID NO: 1597 - protein, 122 aa, synthetic construct; identical to SEQ ID NO: 1596
  REGION 1..122: note = Synthetic

SEQ ID NO: 1598 - protein, 125 aa, synthetic construct
  REGION 1..125: note = Synthetic
QVQLVQSGTEVKKPGASVKVSCKTSGYTFTSYDINWVRQATGQGLEWMGWMNPISGDTGSAQKFQGRVTMTRNTSIGTAYMELSSLRSEDTAVYYCARGGYCSSTSCYYYYMDVWGKGTTVTVSS

SEQ ID NO: 1599 - protein, 125 aa, synthetic construct
  REGION 1..125: note = Synthetic
QVQLVQSGAEVKKPGASVKVSCKASGYTFTSYDINWVRQATGQGLEWMGWMIPNSGDTGSAQKFQGRVTMTRNTSISTAYMELSSLRSEDTAVYYCARGGYCNSTSCYYYYMDVWGKGTTVTVSS

SEQ ID NO: 1600 - protein, 123 aa, synthetic construct
  REGION 1..123: note = Synthetic
EVQLLESGGGLVQPGGSLRLSCAASGFTFSSYVMNWVRQAPGKGLEWVSSVSGSGNNSFYADSVKGRFTISRDNSKNTLYLQMNSLRAEDTAVYYCASRSSSYLYYYYYMDVWGKGTTVTVSS

SEQ ID NO: 1601 - DNA, 375 bp, synthetic construct
  misc_feature 1..375: note = Synthetic
  source 1..375: mol_type = other DNA
caggtgcagctggtggagtctgggggaggcgtggtccagcctgggaggtccctgagactttcctgtgcagcgtctggattcaccttcagcagtcatgacatgcactgggtccgccaggctccaggcaaggggctggactgggtggcagttatatggagtgatggaaataaaaaatactatgtagactccgcgaagggccggttcaccatctccagagacaattccaagaacacggtgtatctgcaaatgaacagcctgagagccgaggacacggctatatattactgtgcgagaggtgacaactggaacgacgaacactcctactattactacatggacgtctggggcaaggggaccacggtcaccgtctcctca

SEQ ID NO: 1602 - DNA, 375 bp, synthetic construct
  misc_feature 1..375: note = Synthetic
  source 1..375: mol_type = other DNA
caggtgcagctggtggagtctgggggaggcgtggtccagcctgggaggtccctgagactttcctgtgcagcgtctggattcaccttcagtagtcatgacatgcactgggtccgccaggctccaggcaaggggctggactgggtggcagttatatggagtgatggaaataataaatactatgcagactccgcgaagggccggttcaccatctccagagacaattccaagaacacggtgtatctgcaaatgaacagcctgagagccgaggacacggctatatattactgtgcgagaggtgacaactggaacgacgaacactcctactattactacatggacgtctggggcaaggggaccacggtcaccgtctcctca

SEQ ID NO: 1603 - DNA, 372 bp, synthetic construct
  misc_feature 1..372: note = Synthetic
  source 1..372: mol_type = other DNA
cagcttcagctggtgcagtctggagctgaggtgaagaagcctggggcctcagtgaaggtctcctgcaaggcttctggttacacctttaccaactatggtatcagctggttgcgacaggcccctggacaagggcttgagtggatgggatggatcagtggttacaatgataacacacactatgcacagaagttccagggcagagtcaccatgaccacagacacatccacgaccacagcctacatggaactgaggaacctgagatctgacgacacggccgtgtattactgtgcgagagatgggatagcagctcgtccagtctactactactacatggacgtctggggcaaagggaccacggtcaccgtctcctca

SEQ ID NO: 1604 - DNA, 375 bp, synthetic construct
  misc_feature 1..375: note = Synthetic
  source 1..375: mol_type = other DNA
caggtgcagctggtggagtctgggggaggcgtggtccagcctgggaggtccctgagactctcctgtgtagcgtctggattcaccttcagtagcaatgacatatactgggtccgccaggccccaggcaaggggctggagtgggtggcagttatatggtatgatggaagtaataaatactatgcagactccgtgaagggccgattcaccatctccagagacaattccaagaacacgctgtatctgcaaatgaacagcctgagagccgaggacacggctgtgtattactgtgcgagaggtgacaactggaacgacgaacaccactaccactactacatggacgtctggggcaaagggaccacggtcaccgtctcctca

SEQ ID NO: 1605 - DNA, 354 bp, synthetic construct
  misc_feature 1..354: note = Synthetic
  source 1..354: mol_type = other DNA
caggtgcagttggtggagtctgggggaggcgtggtccagcctgggaggtccctgagactctcctgtgcagcctctggattcaccttcagtagctatggcatgcactgggtccgccaggctccaggcaaggggctggagtgggtggcagttatatcatatgatggaagtaataaatactatgcagactccgtgaagggccgattcaccatctccagggacaattccaagaccacgctgtatctgcaaatgaacagcctgagagctgaggacacggctgtgtattactgtgcgagagatcactactactactacatggacgtctggggcaaagggaccacggtcaccgtctcctca

SEQ ID NO: 1606 - DNA, 369 bp, synthetic construct
  misc_feature 1..369: note = Synthetic
  source 1..369: mol_type = other DNA
caactgcagctgcaggagtcgggcccaggactggtgaagccttcggagaccctgtccctcacctgcactgtctctggtggctccatcagcagtagtagttactactggggctggatccgccagcccccagggaaggggctggagtggattgggagtctctattatagtgggagcacctactacaacccgtccctcaagagtcgagtcaccatatccgttgacacgtccaagaaccagttctccctgaagctgagctctgtgaccgccgcagacacggctgtgtattactgtgcggccgtacaactggaacgacgtgggtacttctacatggacgtctggggcaaagggaccacggtcaccgtctcctca

SEQ ID NO: 1607 - DNA, 366 bp, synthetic construct
  misc_feature 1..366: note = Synthetic
  source 1..366: mol_type = other DNA
caggtgcagctggtggagtctgggggaggcgtggtccagcctgggaggtccctgagactctcctgtgcagcatctggattcaccttcagtaactatggcatgcactgggtccgccaggctccaggcaaggggctggagtggatggcagttatatggtctgatggacataataaatactatgcagactccgtgaagggccgattcaccatctccagagacaattccaagaacacgctgtatctgcaaatgaacagcctgagagccgaggacacggctgtgtattactgtgcgagggcacaattggaacgacggtacttctactacatggacgtctggggcaaagggaccacggtcaccgtctcctca

SEQ ID NO: 1608 - DNA, 375 bp, synthetic construct
  misc_feature 1..375: note = Synthetic
  source 1..375: mol_type = other DNA
caggtgcagctggtgcagtctggggctgaggtgaagaagcctggggcctcagtgaaggtctcctgcaaggcttctggatacaccttcaccagttatgatatcaactgggtgcgacaggccactggacaagggcttgagtggatgggatggatgatccctaacagtggtgacacaggctctgcacagaagttccagggcagagtcaccatgaccaggaacacctccataggcacagcctacatggagctgagcagcctgagatctgaggacacggccgtttattactgtgcgagaggcggatattgtaatagtaccagttgctactactactacatggacgtctggggcaaagggaccacggtcaccgtctcctca

SEQ ID NO: 1609 - DNA, 378 bp, synthetic construct
  misc_feature 1..378: note = Synthetic
  source 1..378: mol_type = other DNA
caggtgcagctggtgcagtctggggctgaggtgaagaagcctggggcctcagtgaaggtctcctgcaaggcttctggatacaccttcaccagttatgatatcaactgggtgcgacaggccactggacaagggcttgagtggatgggatggatgaaccctaatagtggtaacacagtctatgcacagaagttccagggcagagtcaccatgaccaggaacacctccataagcacagcctacatggagctgagcagcctgagatctgaggacacggccgtgtattactgtgcgagaggaggcgatttttggagtggttaccatgactactactactacatggacgtctggggcaaagggaccacggtcaccgtctcctca

SEQ ID NO: 1610 - DNA, 375 bp, synthetic construct
  misc_feature 1..375: note = Synthetic
  source 1..375: mol_type = other DNA
caggtgcagctgcaggagtcgggcccaggactggtgaagccttcggagaccctgtccctcacctgcactgtctctggtggctccatcagtagttactactggagctggatccggcagcccgccgggaagggactggagtggattgggcgtatctataccagtgggagcaccaactacaacccctccctcaagagtcgagtcaccatgtcagtagacacgtccaagaaccagttctccctgaagctgagctctgtgaccgccgcggacacggccgtgtattactgtgcgagagaggagtaccagctgctaccggccctctactactactactacatggacgtctggggcaaagggaccacggtcaccgtctcctca

SEQ ID NO: 1611 - DNA, 366 bp, synthetic construct
  misc_feature 1..366: note = Synthetic
  source 1..366: mol_type = other DNA
caggtgcagctggtggagtctgggggaggcgtggtccagcctgggaggtccctgagactctcctgtgcagcaactggattcaccttcagtagctatggcatgcactgggtccgccaggctccaggcaaggggctggagtggatggtagttatatggtctgatggacataataaatactatgcagactccgtgaagggccgattcaccatctccagagacaattccaagaacacgctgtatctgcaaatgaacagcctgagagccgaggacacggctgtgtattactgtgcgagggcacaactggaacgacggtacttctactacatggacgtctggggcaaagggaccacggtcaccgtctcctca

SEQ ID NO: 1612 - DNA, 375 bp, synthetic construct
  misc_feature 1..375: note = Synthetic
  source 1..375: mol_type = other DNA
caggtgcagctggtggagtctgggggaggcgtggtccagcctgggaggtccctgagactctcctgtgcagcgtctggattcaccttcactagttatgacatgcactgggtccgccaggctccaggcaaggggctggagtgggtgacaattatatggtttgatggaagtaataaatactatgcagactccgtgaagggccgattcaccatctccagagacaattccaagaacacgctgtatctgcaaatgaacagcctgagcgccgaggacacggctgtgtattactgtgcgagaggagacaactggaacgaccggtactactactactactacatggacgtctggggcaaagggaccacggtcaccgtctcctca

SEQ ID NO: 1613 - DNA, 375 bp, synthetic construct
  misc_feature 1..375: note = Synthetic
  source 1..375: mol_type = other DNA
caggttcagctggtgcagtctggagctgaggtgaagaagcctggggcctcagtgaaggtctcctgcaaggcttctggttacacctttaccagctatggtatcagctgggtgcgacaggcccctggacaagggcttgagtggatggggtggatcagcgcttacaatggtcacacagactatacacagaaactccagggcagagtcaccatgaccacagacacatccacgaccacagcctacatggaactgaggagcctgagctctgccgacacggccgtgtattactgtgtgagagaagtggtacttcccaccacggactactactacttttacatggacgtctggggcaaagggaccacggtcaccgtctcctca

SEQ ID NO: 1614 - DNA, 387 bp, synthetic construct
  misc_feature 1..387: note = Synthetic
  source 1..387: mol_type = other DNA
caggtccagctggtacagtctggggctgaggtgaagaagcctggggcctcagtgaaggtctcctgcaaggtttccggatacaccctcactgaattatccatgcactgggtgcgacaggctcctggaaaagggcttgagtggatgggaggttttgatcctgaagatggtgaaacaatctacgcacagaagttccagggcagagtcaccatgaccgaggacacatctacagacacagcctacatggagctgagcagcctgagatctgaggacacggccgtgtattactgtgcaacaggacgtattactatggttcggggagttattatcccctactactactactacatggacgtctggggcaaagggaccacggtcaccgtctcctca

SEQ ID NO: 1615 - DNA, 366 bp, synthetic construct
  misc_feature 1..366: note = Synthetic
  source 1..366: mol_type = other DNA
caggttcagctggtgcagtctggaactgaggtgaagaagcctggggcctcagtgaaggtctcctgcaaggcttctggttacacctttaccaactatggtatcggctgggtgcgacaggcccctggacaagggcttgagtggatgggatggatcatcgcttacaatggttacacaaagtatgcacagattctccagggcagagtcaccatgaccacagacacatccacgaacacagcttatatggaactgaggagcctgagatctgacgacacggccgtgtattactgtgcgagacagcagctcgggggggactaccactactacatggacgtctggggcaaagggaccacggtcaccgtctcctca

SEQ ID NO: 1616 - DNA, 366 bp, synthetic construct
  misc_feature 1..366: note = Synthetic
  source 1..366: mol_type = other DNA
caggttcagctggtgcagtctggaactgaggtgaagaagcctggggcctcagtgaaggtctcctgcaaggcttctggttacacctttaccaactatggtatcggctgggtgcgacaggcccctggacaagggcttgagtggatgggatggatcatcgcttacaatggttacacaaagtatgcacagattctccagggcagagtcaccatgaccacggacacatccacgaacacagcctatatggaactgaggagcctgagatctgacgacacggccgtgtattactgtgcgcgacagcagctcgggggggactaccactactacatggacgtctggggcaaagggaccacggtcaccgtctcttca

SEQ ID NO: 1617 - DNA, 375 bp, synthetic construct
  misc_feature 1..375: note = Synthetic
  source 1..375: mol_type = other DNA
caggtgcagctggtgcagtctgggactgaggtgaagaagcctggggcctcagtgaaggtctcctgtaagacttctggatacaccttcaccagttatgatatcaactgggtgcgacaggccactggacaagggcttgagtggatgggatggatgaaccctatcagtggtgacacaggctctgcacagaagttccagggcagagtcaccatgaccaggaacacctccataggcacagcctacatggagctgagcagcctgagatctgaggacacggccgtttattactgtgcgagaggcggatattgtagtagtaccagctgctactactactacatggacgtctggggcaaagggaccacggtcaccgtctcctca

SEQ ID NO: 1618 - DNA, 375 bp, synthetic construct
  misc_feature 1..375: note = Synthetic
  source 1..375: mol_type = other DNA
caggtgcagctggtgcagtctggggctgaggtgaagaagcctggggcctcagtgaaggtctcctgcaaggcttctggatacaccttcaccagttatgatatcaactgggtgcgacaggccactggacaagggcttgagtggatgggatggatgatccctaacagtggtgacacaggctctgcacagaagttccagggcagagtcaccatgaccaggaacacctccataagcacagcctacatggagctgagcagcctgagatctgaggacacggccgtttattactgtgcgagaggcggatattgtaatagtaccagttgctactactactacatggacgtctggggcaaagggaccacggtcaccgtctcctca

SEQ ID NO: 1619 - DNA, 369 bp, synthetic construct
  misc_feature 1..369: note = Synthetic
  source 1..369: mol_type = other DNA
gaggtgcagttgttggagtctgggggaggcttggtacaacctggggggtccctgagactctcctgtgcagcctctggattcacctttagcagctatgtcatgaactgggtccgccaggctccagggaaggggctggaatgggtctcatctgttagtggtagtggtaataactcattctacgcagactccgtgaagggccggttcaccatctccagagacaattccaagaacacgctgtatctgcaaatgaacagcctgagagccgaggacacggccgtatattactgtgcgagtcgtagttccagttatctctactactactactacatggacgtctggggcaaagggaccaccgtcaccgtctcctca

SEQ ID NO: 1620 - protein, 7 aa, synthetic construct
  REGION 1..7: note = Synthetic
QTIGSSL

SEQ ID NO: 1621 - protein, 7 aa, synthetic construct
  REGION 1..7: note = Synthetic
QTIGSSL

SEQ ID NO: 1622 - protein, 7 aa, synthetic construct
  REGION 1..7: note = Synthetic
NIGSKNV

SEQ ID NO: 1623 - protein, 7 aa, synthetic construct
  REGION 1..7: note = Synthetic
QSIGSSL

SEQ ID NO: 1624 - protein, 10 aa, synthetic construct
  REGION 1..10: note = Synthetic
SGSVSTSYYP

SEQ ID NO: 1625 - protein, 7 aa, synthetic construct
  REGION 1..7: note = Synthetic
QSVSSYF

SEQ ID NO: 1626 - protein, 10 aa, synthetic construct
  REGION 1..10: note = Synthetic
SGSVSTSYYP

SEQ ID NO: 1627 - protein, 7 aa, synthetic construct
  REGION 1..7: note = Synthetic
QGISSWL

SEQ ID NO: 1628 - protein, 7 aa, synthetic construct
  REGION 1..7: note = Synthetic
QGISSYL

SEQ ID NO: 1629 - protein, 7 aa, synthetic construct
  REGION 1..7: note = Synthetic
KLGDKYA

SEQ ID NO: 1630 - protein, 10 aa, synthetic construct
  REGION 1..10: note = Synthetic
SGSVSTSYYP

SEQ ID NO: 1631 - protein, 7 aa, synthetic construct
  REGION 1..7: note = Synthetic
QSIGSSL

SEQ ID NO: 1632 - protein, 12 aa, synthetic construct
  REGION 1..12: note = Synthetic
QSLVHSDGNTYL

SEQ ID NO: 1633 - protein, 7 aa, synthetic construct
  REGION 1..7: note = Synthetic
QGISSWL

SEQ ID NO: 1634 - protein, 12 aa, synthetic construct
  REGION 1..12: note = Synthetic
KSLLHSDGKTYL

SEQ ID NO: 1635 - protein, 12 aa, synthetic construct
  REGION 1..12: note = Synthetic
KSLLHSDGKTYL

SEQ ID NO: 1636 - protein, 7 aa, synthetic construct
  REGION 1..7: note = Synthetic
QGISNWL

SEQ ID NO: 1637 - protein, 7 aa, synthetic construct
  REGION 1..7: note = Synthetic
QGISSWL

SEQ ID NO: 1638 - protein, 8 aa, synthetic construct
  REGION 1..8: note = Synthetic
QSVSSSYL

SEQ ID NO: 1639 - protein, 4 aa, synthetic construct
  REGION 1..4: note = Synthetic
HASQ

SEQ ID NO: 1640 - protein, 4 aa, synthetic construct
  REGION 1..4: note = Synthetic
HASQ

SEQ ID NO: 1641 - protein, 4 aa, synthetic construct
  REGION 1..4: note = Synthetic
RDSN

SEQ ID NO: 1642 - protein, 4 aa, synthetic construct
  REGION 1..4: note = Synthetic
FASQ

SEQ ID NO: 1643 - protein, 4 aa, synthetic construct
  REGION 1..4: note = Synthetic
STNI

SEQ ID NO: 1644 - protein, 4 aa, synthetic construct
  REGION 1..4: note = Synthetic
DASN

SEQ ID NO: 1645 - protein, 4 aa, synthetic construct
  REGION 1..4: note = Synthetic
STNI

SEQ ID NO: 1646 - protein, 4 aa, synthetic construct
  REGION 1..4: note = Synthetic
AASS

SEQ ID NO: 1647 - protein, 4 aa, synthetic construct
  REGION 1..4: note = Synthetic
GAST

SEQ ID NO: 1648 - protein, 4 aa, synthetic construct
  REGION 1..4: note = Synthetic
QDSK

SEQ ID NO: 1649 - protein, 4 aa, synthetic construct
  REGION 1..4: note = Synthetic
STNI

SEQ ID NO: 1650 - protein, 4 aa, synthetic construct
  REGION 1..4: note = Synthetic
FASQ

SEQ ID NO: 1651 - protein, 4 aa, synthetic construct
  REGION 1..4: note = Synthetic
KVSN

SEQ ID NO: 1652 - protein, 4 aa, synthetic construct
  REGION 1..4: note = Synthetic
AASS

SEQ ID NO: 1653 - protein, 4 aa, synthetic construct
  REGION 1..4: note = Synthetic
EVSN

SEQ ID NO: 1654 - protein, 4 aa, synthetic construct
  REGION 1..4: note = Synthetic
EVST

SEQ ID NO: 1655 - protein, 4 aa, synthetic construct
  REGION 1..4: note = Synthetic
AASS

SEQ ID NO: 1656 - protein, 4 aa, synthetic construct
  REGION 1..4: note = Synthetic
AASS

SEQ ID NO: 1657 - protein, 4 aa, synthetic construct
  REGION 1..4: note = Synthetic
GASS

SEQ ID NO: 1658 - protein, 9 aa, synthetic construct
  REGION 1..9: note = Synthetic
HQSSSLPWT

SEQ ID NO: 1659 - protein, 9 aa, synthetic construct
  REGION 1..9: note = Synthetic
HQSSSLPWT

SEQ ID NO: 1660 - protein, 9 aa, synthetic construct
  REGION 1..9: note = Synthetic
QVWDSSTAV

SEQ ID NO: 1661 - protein, 9 aa, synthetic construct
  REGION 1..9: note = Synthetic
HQSGSLPWT

SEQ ID NO: 1662 - protein, 10 aa, synthetic construct
  REGION 1..10: note = Synthetic
VLYMGSDIVV

SEQ ID NO: 1663 - protein, 9 aa, synthetic construct
  REGION 1..9: note = Synthetic
QQRSNWPLT

SEQ ID NO: 1664 - protein, 10 aa, synthetic construct
  REGION 1..10: note = Synthetic
VLYMGSGMFI

SEQ ID NO: 1665 - protein, 9 aa, synthetic construct
  REGION 1..9: note = Synthetic
QQYDSYPYT

SEQ ID NO: 1666 - protein, 9 aa, synthetic construct
  REGION 1..9: note = Synthetic
QQLNSYPWT

SEQ ID NO: 1667 - protein, 9 aa, synthetic construct
  REGION 1..9: note = Synthetic
QAWDSSTAV

SEQ ID NO: 1668 - protein, 10 aa, synthetic construct
  REGION 1..10: note = Synthetic
VLYMGSGMFI

SEQ ID NO: 1669 - protein, 9 aa, synthetic construct
  REGION 1..9: note = Synthetic
HQSSSLPWT

SEQ ID NO: 1670 - protein, 9 aa, synthetic construct
  REGION 1..9: note = Synthetic
TQATQFPHT

SEQ ID NO: 1671 - protein, 9 aa, synthetic construct
  REGION 1..9: note = Synthetic
QQYNSYPYT

SEQ ID NO: 1672 - protein, 9 aa, synthetic construct
  REGION 1..9: note = Synthetic
MQSIQFPWT

SEQ ID NO: 1673 - protein, 9 aa, synthetic construct
  REGION 1..9: note = Synthetic
MQSIQFPWT

SEQ ID NO: 1674 - protein, 9 aa, synthetic construct
  REGION 1..9: note = Synthetic
QQYDSYPYT

SEQ ID NO: 1675 - protein, 9 aa, synthetic construct
  REGION 1..9: note = Synthetic
QQYDSYPYT

SEQ ID NO: 1676 - protein, 11 aa, synthetic construct
  REGION 1..11: note = Synthetic
QHYGSSPPRIT

SEQ ID NO: 1677 - protein, 107 aa, synthetic construct
  REGION 1..107: note = Synthetic
EIVLTQSPDFQSVTPKEKVTITCRASQTIGSSLHWYQQKPDQSPKLLIKHASQSFSGVPSRFSGSGSGTDFTLTVNSLEAEDAATYYCHQSSSLPWTFGQGTKVEIK

SEQ ID NO: 1678 - protein, 107 aa, synthetic construct; identical to SEQ ID NO: 1677
  REGION 1..107: note = Synthetic

SEQ ID NO: 1679 - protein, 107 aa, synthetic construct
  REGION 1..107: note = Synthetic
DIQMTQSPSSLSASVGDRVTITCRASQSISNYLNWYHQKPGKAPKLLIYAASSLESGVPSRFSGSGSGTDFTLTISSLQPEDFATYYCQQSYSNPLTFGGGTKVESK

SEQ ID NO: 1680 - protein, 107 aa, synthetic construct
  REGION 1..107: note = Synthetic
EIVLTQSPDFQSVTPKEKVTITCRASQSIGSSLHWYQQKPDQSPKLLIKFASQSFSGVPSRFSGSGSGTDFTLTIHSLEAEDAATYYCHQSGSLPWTFGQGTKVEIK

SEQ ID NO: 1681 - protein, 107 aa, synthetic construct
  REGION 1..107: note = Synthetic
VTQEPSFSVSPGGTVTLTCGLSSGSVSTSYYPSWYQQTPGQAPRTLIYSTNIRSSGVPDRFSGSILGNKAALTITGAQADDESDYYCVLYMGSDIVVFGGGTKLTVL

SEQ ID NO: 1682 - protein, 107 aa, synthetic construct
  REGION 1..107: note = Synthetic
EIVLTQSPATLSLSPGERATLSCRASQSVSSYFAWYQQKPGQAPRLLIYDASNRATGIPARFSGSGSGTDFTLTISSLEPEDFAVYYCQQRSNWPLTFGGGTKVEIK

SEQ ID NO: 1683 - protein, 110 aa, synthetic construct
  REGION 1..110: note = Synthetic
QTVVTQEPSFSVSPGGTVTLTCGLTSGSVSTSYYPNWYQQTPGQAPRTLIYSTNIRSSGVPDRFSGSILGNKAALTITGAQADDESDYYCVLYMGSGMFIFGSGTKVTVL

SEQ ID NO: 1684 - protein, 107 aa, synthetic construct
  REGION 1..107: note = Synthetic
DIQMTQSPSSLSASVGDRVTITCRASQGISSWLAWYQQKPEKAPKSLIYAASSLQGGVPSRFSGSGSGTDFTLTISSLQPEDFATYYCQQYDSYPYTFGQGTKLEIK

SEQ ID NO: 1685 - protein, 107 aa, synthetic construct
  REGION 1..107: note = Synthetic
DIQVTQSPTFLSASVGDRVTITCRASQGISSYLAWYQQKPGKAPKLLIYGASTLQSGVPSRFSGSGSGTEFTLTISSLQPEDFATYYCQQLNSYPWTFGQGTKVEIK

SEQ ID NO: 1686 - protein, 105 aa, synthetic construct
  REGION 1..105: note = Synthetic
YELTQPPSVSVSPGQTASITCSGDKLGDKYACWYQQKPGQSPVLVIYQDSKRPSGIPERFSGSNSGNTATLTISGTQAMDEADYYCQAWDSSTAVFGGGTQLTAL

SEQ ID NO: 1687 - protein, 110 aa, synthetic construct; identical to SEQ ID NO: 1683
  REGION 1..110: note = Synthetic

SEQ ID NO: 1688 - protein, 107 aa, synthetic construct
  REGION 1..107: note = Synthetic
EIVLTQSPDFQSVTPKEKVTITCRASQSIGSSLHWYQQKPDQSPMLLIKFASQSISGVPSRFSGSGSGTDFTLTINSLEAEDAAAYYCHQSSSLPWTFGQGTKVEIK

SEQ ID NO: 1689 - protein, 112 aa, synthetic construct
  REGION 1..112: note = Synthetic
DIVMTQPPLSSPVTLGQPASISCRSSQSLVHSDGNTYLSWLQQRPGQPPRLLIYKVSNRFSGVPDRFSGSGAGTDFTLKISRVEAEDVGVYYCTQATQFPHTFGQGTKLEIK

SEQ ID NO: 1690 - protein, 107 aa, synthetic construct
  REGION 1..107: note = Synthetic
DIQMTQSPSSLSASVGDRVTITCRASQGISSWLAWYQQKPEKAPKSLIYAASSLQSGVPSRFSGSGSGTDFTLTISSLQPEDFATYYCQQYNSYPYTFGQGTKLEIK

SEQ ID NO: 1691 - protein, 112 aa, synthetic construct
  REGION 1..112: note = Synthetic
DIVMTQTPLSLSVTPGQPASISCKSSKSLLHSDGKTYLYWYLQKPGQPPQLLIYEVSNRFSGVPDRFSGSGSGTDFTLKISRVEAEDVGVYYCMQSIQFPWTFGQGTKVEIK

SEQ ID NO: 1692 - protein, 112 aa, synthetic construct
  REGION 1..112: note = Synthetic
DIVMTQTPLSLSVTPGQPASISCKSSKSLLHSDGKTYLYWYLQKPGQPPQLLIYEVSTRFSGVPDRFSGSGSGTDFTLKISRVEAEDVGVYYCMQSIQFPWTFGQGTKVEIK

SEQ ID NO: 1693 - protein, 107 aa, synthetic construct
  REGION 1..107: note = Synthetic
DIQMTQSPSSLSASVGDRVTITCRASQGISNWLAWYQQKPEKAPKSLIYAASSLQGGVPSRFSGSGSGTDFTLTISSLQPEDFATYYCQQYDSYPYTFGQGTKLEIK

SEQ ID NO: 1694 - protein, 107 aa, synthetic construct; identical to SEQ ID NO: 1684
  REGION 1..107: note = Synthetic

SEQ ID NO: 1695 - protein, 110 aa, synthetic construct
  REGION 1..110: note = Synthetic
EIVLTQSPGTLSLSPGERATLSCRASQSVSSSYLAWYQQKPGQAPRLLIYGASSRATGIPDRFSDSGSGTDFTLTISRLEPEDFAVYYCQHYGSSPPRITFGPGTKVDIK

SEQ ID NO: 1696 - DNA, 321 bp, synthetic construct
  misc_feature 1..321: note = Synthetic
  source 1..321: mol_type = other DNA
gaaattgtgctgactcagtctccagactttcagtctgtgactccaaaggagaaagtcaccatcacctgccgggccagtcagaccattggcagtagcttacactggtaccagcagaaaccagatcagtctccaaagctcctcatcaagcatgcttcccagtccttctcaggggtcccctcgaggttcagtggcagtggatctgggacagatttcaccctcaccgtcaatagcctggaagctgaagatgctgcaacgtattactgtcatcagagtagtagtttaccgtggacgttcggccaagggaccaaggtggaaatcaaa

SEQ ID NO: 1697 - DNA, 321 bp, synthetic construct; identical to SEQ ID NO: 1696
  misc_feature 1..321: note = Synthetic
  source 1..321: mol_type = other DNA

SEQ ID NO: 1698 - DNA, 321 bp, synthetic construct
  misc_feature 1..321: note = Synthetic
  source 1..321: mol_type = other DNA
gacatacagatgacccagtctccatcctccctgtctgcatctgtaggagacagagtcaccatcacttgccgggcaagccagagcattagcaactatttaaattggtatcaccagaaaccagggaaagcccctaagctcctgatctatgctgcatccagtttggaaagtggggtcccatcaaggttcagtggcagtggatctgggacagatttcactctcaccatcagcagtctgcaacctgaagattttgcaacttactactgtcaacagagttacagtaacccgctcactttcggcggagggaccaaggtggagagcaaa

SEQ ID NO: 1699 - DNA, 321 bp, synthetic construct
  misc_feature 1..321: note = Synthetic
  source 1..321: mol_type = other DNA
gaaattgtgctgactcagtctccagactttcagtctgtgactccaaaggagaaagtcaccatcacctgccgggccagtcagagcattggtagtagcttacactggtaccagcagaaaccagatcagtctccaaagctcctcatcaagtttgcttcccagtccttctcaggggtcccctcgaggttcagtggcagtggatctgggacagatttcaccctcaccatccatagcctggaagctgaagatgctgcaacgtattactgtcatcagagtggtagtttaccgtggacgttcggccaagggaccaaggtggaaatcaaa

SEQ ID NO: 1700 - DNA, 322 bp, synthetic construct
  misc_feature 1..322: note = Synthetic
  source 1..322: mol_type = other DNA
ggtgacccaggagccatcgttctcagtgtcccctggagggacagtcacactcacttgtggcttgagctctggctcagtctctactagttactaccccagctggtaccagcagaccccaggccaggctccacgcacgctcatctacagcacaaacattcgctcttctggggtccctgatcgcttctctggctccatccttgggaacaaagctgccctcaccatcacgggggcccaggcagatgatgaatctgattattactgtgtgctgtatatgggtagtgacattgtggtattcggcggagggaccaagctgaccgtccta

SEQ ID NO: 1701 - DNA, 321 bp, synthetic construct
  misc_feature 1..321: note = Synthetic
  source 1..321: mol_type = other DNA
gaaattgtgttgacacagtctccagccaccctgtctttgtctccaggggaaagagccaccctctcctgcagggccagtcagagtgttagcagctactttgcctggtaccaacagaaacctggccaggctcccaggctcctcatctatgatgcatccaacagggccactggcatcccagccaggttcagtggcagtgggtctgggacagacttcactctcaccatcagcagcctggagcctgaagattttgcagtttattactgtcagcagcgtagcaactggcctctcactttcggcggagggaccaaggtggagatcaaa

SEQ ID NO: 1702 - DNA, 330 bp, synthetic construct
  misc_feature 1..330: note = Synthetic
  source 1..330: mol_type = other DNA
cagactgtagtgacccaggaaccatcgttctcagtgtcccctggagggacagtcacactcacttgtggcttgacctctggctcagtctctactagttactaccccaactggtaccagcagaccccaggccaggctccacgcacgctcatctatagtacaaatattcgctcttctggggtccctgatcgcttctctggctccatccttgggaacaaagctgccctcaccatcacgggggcccaggcagatgatgaatctgattattactgtgtgctgtatatgggtagtggcatgtttattttcggcagtggaaccaaggtcactgtccta

SEQ ID NO: 1703 - DNA, 321 bp, synthetic construct
  misc_feature 1..321: note = Synthetic
  source 1..321: mol_type = other DNA
gacatccagatgacccagtctccatcctcactgtctgcatctgtaggagacagagtcaccatcacttgtcgggcgagtcagggtattagcagctggttagcctggtatcagcagaaaccagagaaagcccctaagtccctgatctatgctgcatccagtttacagggtggggtcccatcaaggttcagcggcagtggatctgggacagatttcactctcaccatcagcagcctgcagcctgaagattttgcaacttattactgccaacagtatgatagttacccgtacacttttggccaggggaccaagctggagatcaaa

SEQ ID NO: 1704 - DNA, 321 bp, synthetic construct
  misc_feature 1..321: note = Synthetic
  source 1..321: mol_type = other DNA
gacatccaggtgacccagtctccaaccttcctgtctgcatctgtaggagacagagtcaccatcacttgccgggccagtcagggcattagcagttatttagcctggtatcagcaaaaaccagggaaagcccctaagctcctgatctatggtgcatccactttgcaaagtggggtcccatcaaggttcagcggcagtggatctgggacagaattcactctcacaatcagcagcctgcagcctgaagattttgcaacttattactgtcaacagcttaatagttacccgtggacgttcggccaagggaccaaggtggaaatcaaa

SEQ ID NO: 1705 - DNA, 318 bp, synthetic construct
  misc_feature 1..318: note = Synthetic
  source 1..318: mol_type = other DNA
tcctatgagctgactcagccaccctcagtgtccgtgtccccaggacagacagccagcatcacctgctctggagataaattgggggataaatatgcttgctggtatcagcagaagccaggccagtcccctgtgctggtcatctatcaagatagcaagcggccctcagggatccctgagcgattctctggctccaactctgggaacacagccactctgaccatcagcgggacccaggctatggatgaggctgactattactgtcaggcgtgggacagcagcactgctgtgttcggaggaggcacccagctgaccgccctc

SEQ ID NO: 1706 - DNA, 330 bp, synthetic construct
  misc_feature 1..330: note = Synthetic
  source 1..330: mol_type = other DNA
cagactgtagtgacccaggaaccatcgttctcagtgtcccctggagggacagtcacactcacttgtggcttgacctctggctcagtctctactagttactaccccaactggtaccagcagaccccaggccaggctccacgcacgctcatctacagcacaaatattcgctcttctggggtccctgatcgcttctctggctccatccttgggaacaaagctgccctcaccatcacgggggcccaggcagatgatgaatctgattattactgtgtgctgtatatgggtagtggcatgtttattttcggcagtggaaccaaggtcactgtccta

SEQ ID NO: 1707 - DNA, 321 bp, synthetic construct
  misc_feature 1..321: note = Synthetic
  source 1..321: mol_type = other DNA
gaaattgtgctgactcagtctccagactttcagtctgtgactccaaaggagaaagtcaccatcacctgccgggccagtcagagcattggtagtagcttacactggtaccagcagaaaccagatcagtctccaatgctcctcatcaagtttgcttcccagtccatctcaggggtcccctcgaggttcagtggcagtggatctgggacagatttcaccctcaccatcaatagcctggaagctgaagatgctgcagcgtattactgtcatcagagtagtagtttaccgtggacgttcggccaagggaccaaggtggaaatcaaa

SEQ ID NO: 1708 - DNA, 336 bp, synthetic construct
  misc_feature 1..336: note = Synthetic
  source 1..336: mol_type = other DNA
gatattgtgatgacccagcctccactctcctcgcctgtcacccttggacagccggcctccatctcctgcaggtctagtcaaagcctcgtacacagtgatggaaacacctacttgagttggcttcagcagaggccaggccagcctccaagactcctaatttataaggtttctaaccggttctctggggtcccagacagattcagtggcagtggggcagggacagatttcacactgaaaatcagcagggtggaagctgaggatgtcggggtttattactgcacgcaagctacacaatttcctcacacttttggccaggggaccaagctggagatcaaa

SEQ ID NO: 1709 - DNA, 321 bp, synthetic construct
  misc_feature 1..321: note = Synthetic
  source 1..321: mol_type = other DNA
gacatccagatgacccagtctccatcctcactgtctgcatctgtaggagacagagtcaccatcacttgtcgggcgagtcagggtattagcagctggttagcctggtatcagcagaaaccagagaaagcccctaagtccctgatctatgctgcatccagtttgcaaagtggggtcccatcaaggttcagcggcagtggatctgggacagatttcactctcaccatcagcagcctgcagcctgaagattttgcaacttattactgccaacagtataatagttacccgtacacttttggccaggggaccaagctggagatcaaa

SEQ ID NO: 1710 - DNA, 336 bp, synthetic construct
  misc_feature 1..336: note = Synthetic
  source 1..336: mol_type = other DNA
gatattgtgatgacccagactccactctctctgtccgtcacccctggacagccggcctccatctcctgcaagtctagtaagagcctcctgcatagtgatggaaagacctatttgtattggtacctgcagaagccaggccagcctccacagctcctgatctatgaagtttccaaccggttctctggagtgccagataggttcagtggcagcgggtcagggacagatttcacactgaaaatcagccgggtggaggctgaggatgttggggtttattactgcatgcaaagtatacaatttccgtggacgttcggccaagggaccaaggtggaaatcaag

SEQ ID NO: 1711 - DNA, 336 bp, synthetic construct
  misc_feature 1..336: note = Synthetic
  source 1..336: mol_type = other DNA
gatattgtgatgacccagactccactctctctgtccgtcacccctggacagccggcctccatctcctgcaagtctagtaagagcctcctgcatagtgatggaaagacctatttgtattggtacctgcagaagccaggccagcctccacagctcctgatctatgaagtttccacccggttctctggagtgccagataggttcagtggcagcgggtcagggacagatttcacactgaaaatcagccgggtggaggctgaggatgttggggtttattactgcatgcaaagtatacagtttccgtggacgttcggccaagggaccaaggtggaaatcaaa

SEQ ID NO: 1712 - DNA, 321 bp, synthetic construct
  misc_feature 1..321: note = Synthetic
  source 1..321: mol_type = other DNA
gacatccagatgacccagtctccatcctcactgtctgcctctgtaggagacagagtcaccatcacttgtcgggcgagtcagggtattagcaactggttagcctggtatcagcagaaaccagagaaagcccctaagtccctgatctatgctgcatccagtttgcaaggtggggtcccatcaagattcagcggcagtggatctgggacagatttcactctcaccatcagcagcctgcagcctgaagattttgcaacttattactgccaacagtatgatagttacccgtacacttttggccaggggaccaagctggagatcaaa

SEQ ID NO: 1713 - DNA, 321 bp, synthetic construct
  misc_feature 1..321: note = Synthetic
  source 1..321: mol_type = other DNA
gacatccagatgacccagtctccatcctcactgtctgcatctgtaggagacagagtcaccatcacttgtcgggcgagtcagggtattagcagctggttagcctggtatcagcagaaaccagagaaagcccctaagtccctgatctatgctgcatccagtttacaaggtggggtcccatcaaggttcagcggcagtggatctgggacagatttcactctcaccatcagcagcctgcagcctgaagattttgcaacttattactgccaacagtatgatagttacccgtacacttttggccaggggaccaagctggagatcaaa

SEQ ID NO: 1714 - DNA, 330 bp, synthetic construct
  misc_feature 1..330: note = Synthetic
  source 1..330: mol_type = other DNA
gaaattgtgttgacgcagtctccaggcaccctgtctttgtctccaggggaaagagccaccctctcctgcagggccagtcagagtgttagcagcagctacttagcctggtaccagcagaaacctggccaggctcccaggctcctcatctatggtgcatccagcagggccactggcatcccagacaggttcagtgacagtgggtctgggacagacttcactctcaccatcagcagactggagcctgaagattttgcagtgtattactgtcagcactatggtagctcacctccgaggatcactttcggccctgggaccaaagtggatatcaaa

SEQ ID NO: 1715 - protein, 247 aa, synthetic construct
  REGION 1..247: note = Synthetic
QVQLVESGGGVVQPGRSLRLSCAASGFTFSSHDMHWVRQAPGKGLDWVAVIWSDGNKKYYVDSAKGRFTISRDNSKNTVYLQMNSLRAEDTAIYYCARGDNWNDEHSYYYYMDVWGKGTTVTVSSGGGGSGGGGSGGGGSEIVLTQSPDFQSVTPKEKVTITCRASQTIGSSLHWYQQKPDQSPKLLIKHASQSFSGVPSRFSGSGSGTDFTLTVNSLEAEDAATYYCHQSSSLPWTFGQGTKVEIK

SEQ ID NO: 1716 - protein, 247 aa, synthetic construct
  REGION 1..247: note = Synthetic
QVQLVESGGGVVQPGRSLRLSCAASGFTFSSHDMHWVRQAPGKGLDWVAVIWSDGNNKYYADSAKGRFTISRDNSKNTVYLQMNSLRAEDTAIYYCARGDNWNDEHSYYYYMDVWGKGTTVTVSSGGGGSGGGGSGGGGSEIVLTQSPDFQSVTPKEKVTITCRASQTIGSSLHWYQQKPDQSPKLLIKHASQSFSGVPSRFSGSGSGTDFTLTVNSLEAEDAATYYCHQSSSLPWTFGQGTKVEIK

SEQ ID NO: 1717 - protein, 246 aa, synthetic construct
  REGION 1..246: note = Synthetic
QLQLVQSGAEVKKPGASVKVSCKASGYTFTNYGISWLRQAPGQGLEWMGWISGYNDNTHYAQKFQGRVTMTTDTSTTTAYMELRNLRSDDTAVYYCARDGIAARPVYYYYMDVWGKGTTVTVSSGGGGSGGGGSGGGGSDIQMTQSPSSLSASVGDRVTITCRASQSISNYLNWYHQKPGKAPKLLIYAASSLESGVPSRFSGSGSGTDFTLTISSLQPEDFATYYCQQSYSNPLTFGGGTKVESK

SEQ ID NO: 1718 - protein, 247 aa, synthetic construct
  REGION 1..247: note = Synthetic
QVQLVESGGGVVQPGRSLRLSCVASGFTFSSNDIYWVRQAPGKGLEWVAVIWYDGSNKYYADSVKGRFTISRDNSKNTLYLQMNSLRAEDTAVYYCARGDNWNDEHHYHYYMDVWGKGTTVTVSSGGGGSGGGGSGGGGSEIVLTQSPDFQSVTPKEKVTITCRASQSIGSSLHWYQQKPDQSPKLLIKFASQSFSGVPSRFSGSGSGTDFTLTIHSLEAEDAATYYCHQSGSLPWTFGQGTKVEIK

SEQ ID NO: 1719 - protein, 240 aa, synthetic construct
  REGION 1..240: note = Synthetic
QVQLVESGGGVVQPGRSLRLSCAASGFTFSSYGMHWVRQAPGKGLEWVAVISYDGSNKYYADSVKGRFTISRDNSKTTLYLQMNSLRAEDTAVYYCARDHYYYYMDVWGKGTTVTVSSGGGGSGGGGSGGGGSVTQEPSFSVSPGGTVTLTCGLSSGSVSTSYYPSWYQQTPGQAPRTLIYSTNIRSSGVPDRFSGSILGNKAALTITGAQADDESDYYCVLYMGSDIVVFGGGTKLTVL

SEQ ID NO: 1720 - protein, 245 aa, synthetic construct
  REGION 1..245: note = Synthetic
QLQLQESGPGLVKPSETLSLTCTVSGGSISSSSYYWGWIRQPPGKGLEWIGSLYYSGSTYYNPSLKSRVTISVDTSKNQFSLKLSSVTAADTAVYYCAAVQLERRGYFYMDVWGKGTTVTVSSGGGGSGGGGSGGGGSEIVLTQSPATLSLSPGERATLSCRASQSVSSYFAWYQQKPGQAPRLLIYDASNRATGIPARFSGSGSGTDFTLTISSLEPEDFAVYYCQQRSNWPLTFGGGTKVEIK

SEQ ID NO: 1721 - protein, 247 aa, synthetic construct
  REGION 1..247: note = Synthetic
QVQLVESGGGVVQPGRSLRLSCAASGFTFSNYGMHWVRQAPGKGLEWMAVIWSDGHNKYYADSVKGRFTISRDNSKNTLYLQMNSLRAEDTAVYYCARAQLERRYFYYMDVWGKGTTVTVSSGGGGSGGGGSGGGGSQTVVTQEPSFSVSPGGTVTLTCGLTSGSVSTSYYPNWYQQTPGQAPRTLIYSTNIRSSGVPDRFSGSILGNKAALTITGAQADDESDYYCVLYMGSGMFIFGSGTKVTVL

SEQ ID NO: 1722 - protein, 247 aa, synthetic construct
  REGION 1..247: note = Synthetic
QVQLVQSGAEVKKPGASVKVSCKASGYTFTSYDINWVRQATGQGLEWMGWMIPNSGDTGSAQKFQGRVTMTRNTSIGTAYMELSSLRSEDTAVYYCARGGYCNSTSCYYYYMDVWGKGTTVTVSSGGGGSGGGGSGGGGSDIQMTQSPSSLSASVGDRVTITCRASQGISSWLAWYQQKPEKAPKSLIYAASSLQGGVPSRFSGSGSGTDFTLTISSLQPEDFATYYCQQYDSYPYTFGQGTKLEIK

SEQ ID NO: 1723 - protein, 248 aa, synthetic construct
  REGION 1..248: note = Synthetic
QVQLVQSGAEVKKPGASVKVSCKASGYTFTSYDINWVRQATGQGLEWMGWMNPNSGNTVYAQKFQGRVTMTRNTSISTAYMELSSLRSEDTAVYYCARGGDFWSGYHDYYYYMDVWGKGTTVTVSSGGGGSGGGGSGGGGSDIQVTQSPTFLSASVGDRVTITCRASQGISSYLAWYQQKPGKAPKLLIYGASTLQSGVPSRFSGSGSGTEFTLTISSLQPEDFATYYCQQLNSYPWTFGQGTKVEIK

SEQ ID NO: 1724 - protein, 246 aa, synthetic construct
  REGION 1..246: note = Synthetic
QVQLQESGPGLVKPSETLSLTCTVSGGSISSYYWSWIRQPAGKGLEWIGRIYTSGSTNYNPSLKSRVTMSVDTSKNQFSLKLSSVTAADTAVYYCAREEYQLLPALYYYYYMDVWGKGTTVTVSSGGGGSGGGGSGGGGSSYELTQPPSVSVSPGQTASITCSGDKLGDKYACWYQQKPGQSPVLVIYQDSKRPSGIPERFSGSNSGNTATLTISGTQAMDEADYYCQAWDSSTAVFGGGTQLTAL

SEQ ID NO: 1725 - protein, 247 aa, synthetic construct
  REGION 1..247: note = Synthetic
QVQLVESGGGVVQPGRSLRLSCAATGFTFSSYGMHWVRQAPGKGLEWMVVIWSDGHNKYYADSVKGRFTISRDNSKNTLYLQMNSLRAEDTAVYYCARAQLERRYFYYMDVWGKGTTVTVSSGGGGSGGGGSGGGGSQTVVTQEPSFSVSPGGTVTLTCGLTSGSVSTSYYPNWYQQTPGQAPRTLIYSTNIRSSGVPDRFSGSILGNKAALTITGAQADDESDYYCVLYMGSGMFIFGSGTKVTVL

SEQ ID NO: 1726 - protein, 247 aa, synthetic construct
  REGION 1..247: note = Synthetic
QVQLVESGGGVVQPGRSLRLSCAASGFTFTSYDMHWVRQAPGKGLEWVTIIWFDGSNKYYADSVKGRFTISRDNSKNTLYLQMNSLSAEDTAVYYCARGDNWNDRYYYYYYMDVWGKGTTVTVSSGGGGSGGGGSGGGGSEIVLTQSPDFQSVTPKEKVTITCRASQSIGSSLHWYQQKPDQSPMLLIKFASQSISGVPSRFSGSGSGTDFTLTINSLEAEDAAAYYCHQSSSLPWTFGQGTKVEIK

SEQ ID NO: 1727 - protein, 252 aa, synthetic construct
  REGION 1..252: note = Synthetic
QVQLVQSGAEVKKPGASVKVSCKASGYTFTSYGISWVRQAPGQGLEWMGWISAYNGHTDYTQKLQGRVTMTTDTSTTTAYMELRSLSSADTAVYYCVREVVLPTTDYYYFYMDVWGKGTTVTVSSGGGGSGGGGSGGGGSDIVMTQPPLSSPVTLGQPASISCRSSQSLVHSDGNTYLSWLQQRPGQPPRLLIYKVSNRFSGVPDRFSGSGAGTDFTLKISRVEAEDVGVYYCTQATQFPHTFGQGTKLEIK

SEQ ID NO: 1728 - protein, 251 aa, synthetic construct
  REGION 1..251: note = Synthetic
QVQLVQSGAEVKKPGASVKVSCKVSGYTLTELSMHWVRQAPGKGLEWMGGFDPEDGETIYAQKFQGRVTMTEDTSTDTAYMELSSLRSEDTAVYYCATGRITMVRGVIIPYYYYYMDVWGKGTTVTVSSGGGGSGGGGSGGGGSDIQMTQSPSSLSASVGDRVTITCRASQGISSWLAWYQQKPEKAPKSLIYAASSLQSGVPSRFSGSGSGTDFTLTISSLQPEDFATYYCQQYNSYPYTFGQGTKLEIK

SEQ ID NO: 1729 - protein, 249 aa, synthetic construct
  REGION 1..249: note = Synthetic
QVQLVQSGTEVKKPGASVKVSCKASGYTFTNYGIGWVRQAPGQGLEWMGWIIAYNGYTKYAQILQGRVTMTTDTSTNTAYMELRSLRSDDTAVYYCARQQLGGDYHYYMDVWGKGTTVTVSSGGGGSGGGGSGGGGSDIVMTQTPLSLSVTPGQPASISCKSSKSLLHSDGKTYLYWYLQKPGQPPQLLIYEVSNRFSGVPDRFSGSGSGTDFTLKISRVEAEDVGVYYCMQSIQFPWTFGQGTKVEIK

SEQ ID NO: 1730 - protein, 249 aa, synthetic construct
  REGION 1..249: note = Synthetic
QVQLVQSGTEVKKPGASVKVSCKASGYTFTNYGIGWVRQAPGQGLEWMGWIIAYNGYTKYAQILQGRVTMTTDTSTNTAYMELRSLRSDDTAVYYCARQQLGGDYHYYMDVWGKGTTVTVSSGGGGSGGGGSGGGGSDIVMTQTPLSLSVTPGQPASISCKSSKSLLHSDGKTYLYWYLQKPGQPPQLLIYEVSTRFSGVPDRFSGSGSGTDFTLKISRVEAEDVGVYYCMQSIQFPWTFGQGTKVEIK

SEQ ID NO: 1731 - protein, 247 aa, synthetic construct
  REGION 1..247: note = Synthetic
QVQLVQSGTEVKKPGASVKVSCKTSGYTFTSYDINWVRQATGQGLEWMGWMNPISGDTGSAQKFQGRVTMTRNTSIGTAYMELSSLRSEDTAVYYCARGGYCSSTSCYYYYMDVWGKGTTVTVSSGGGGSGGGGSGGGGSDIQMTQSPSSLSASVGDRVTITCRASQGISNWLAWYQQKPEKAPKSLIYAASSLQGGVPSRFSGSGSGTDFTLTISSLQPEDFATYYCQQYDSYPYTFGQGTKLEIK

SEQ ID NO: 1732 - protein, 247 aa, synthetic construct
  REGION 1..247: note = Synthetic
QVQLVQSGAEVKKPGASVKVSCKASGYTFTSYDINWVRQATGQGLEWMGWMIPNSGDTGSAQKFQGRVTMTRNTSISTAYMELSSLRSEDTAVYYCARGGYCNSTSCYYYYMDVWGKGTTVTVSSGGGGSGGGGSGGGGSDIQMTQSPSSLSASVGDRVTITCRASQGISSWLAWYQQKPEKAPKSLIYAASSLQGGVPSRFSGSGSGTDFTLTISSLQPEDFATYYCQQYDSYPYTFGQGTKLEIK

SEQ ID NO: 1733 - protein, 248 aa, synthetic construct
  REGION 1..248: note = Synthetic
EVQLLESGGGLVQPGGSLRLSCAASGFTFSSYVMNWVRQAPGKGLEWVSSVSGSGNNSFYADSVKGRFTISRDNSKNTLYLQMNSLRAEDTAVYYCASRSSSYLYYYYYMDVWGKGTTVTVSSGGGGSGGGGSGGGGSEIVLTQSPGTLSLSPGERATLSCRASQSVSSSYLAWYQQKPGQAPRLLIYGASSRATGIPDRFSDSGSGTDFTLTISRLEPEDFAVYYCQHYGSSPPRITFGPGTKVDIK

SEQ ID NO: 1734 - DNA, 741 bp, synthetic construct
  misc_feature 1..741: note = Synthetic
  source 1..741: mol_type = other DNA
caggtgcagctggtggagtctgggggaggcgtggtccagcctgggaggtccctgagactttcctgtgcagcgtctggattcaccttcagcagtcatgacatgcactgggtccgccaggctccaggcaaggggctggactgggtggcagttatatggagtgatggaaataaaaaatactatgtagactccgcgaagggccggttcaccatctccagagacaattccaagaacacggtgtatctgcaaatgaacagcctgagagccgaggacacggctatatattactgtgcgagaggtgacaactggaacgacgaacactcctactattactacatggacgtctggggcaaggggaccacggtcaccgtctcctcaggcggcggtggatctggaggcggaggctctggaggcggcggctccgaaattgtgctgactcagtctccagactttcagtctgtgactccaaaggagaaagtcaccatcacctgccgggccagtcagaccattggcagtagcttacactggtaccagcagaaaccagatcagtctccaaagctcctcatcaagcatgcttcccagtccttctcaggggtcccctcgaggttcagtggcagtggatctgggacagatttcaccctcaccgtcaatagcctggaagctgaagatgctgcaacgtattactgtcatcagagtagtagtttaccgtggacgttcggccaagggaccaaggtggaaatcaaa

SEQ ID NO: 1735 - DNA, 741 bp, synthetic construct
  misc_feature 1..741: note = Synthetic
  source 1..741: mol_type = other DNA
caggtgcagctggtggagtctgggggaggcgtggtccagcctgggaggtccctgagactttcctgtgcagcgtctggattcaccttcagtagtcatgacatgcactgggtccgccaggctccaggcaaggggctggactgggtggcagttatatggagtgatggaaataataaatactatgcagactccgcgaagggccggttcaccatctccagagacaattccaagaacacggtgtatctgcaaatgaacagcctgagagccgaggacacggctatatattactgtgcgagaggtgacaactggaacgacgaacactcctactattactacatggacgtctggggcaaggggaccacggtcaccgtctcctcaggcggcggtggatctggaggcggaggctctggaggcggcggctccgaaattgtgctgactcagtctccagactttcagtctgtgactccaaaggagaaagtcaccatcacctgccgggccagtcagaccattggcagtagcttacactggtaccagcagaaaccagatcagtctccaaagctcctcatcaagcatgcttcccagtccttctcaggggtcccctcgaggttcagtggcagtggatctgggacagatttcaccctcaccgtcaatagcctggaagctgaagatgctgcaacgtattactgtcatcagagtagtagtttaccgtggacgttcggccaagggaccaaggtggaaatcaaa

SEQ ID NO: 1736 - DNA, 738 bp, synthetic construct
  misc_feature 1..738: note = Synthetic
  source 1..738: mol_type = other DNA
cagcttcagctggtgcagtctggagctgaggtgaagaagcctggggcctcagtgaaggtctcctgcaaggcttctggttacacctttaccaactatggtatcagctggttgcgacaggcccctggacaagggcttgagtggatgggatggatcagtggttacaatgataacacacactatgcacagaagttccagggcagagtcaccatgaccacagacacatccacgaccacagcctacatggaactgaggaacctgagatctgacgacacggccgtgtattactgtgcgagagatgggatagcagctcgtccagtctactactactacatggacgtctggggcaaagggaccacggtcaccgtctcctcaggcggcggtggatctggaggcggaggctctggaggcggcggctccgacatacagatgacccagtctccatcctccctgtctgcatctgtaggagacagagtcaccatcacttgccgggcaagccagagcattagcaactatttaaattggtatcaccagaaaccagggaaagcccctaagctcctgatctatgctgcatccagtttggaaagtggggtcccatcaaggttcagtggcagtggatctgggacagatttcactctcaccatcagcagtctgcaacctgaagattttgcaacttactactgtcaacagagttacagtaacccgctcactttcggcggagggaccaaggtggagagcaaa

SEQ ID NO: 1737 - DNA, 741 bp, synthetic construct
  misc_feature 1..741: note = Synthetic
  source 1..741: mol_type = other DNA
caggtgcagctggtggagtctgggggaggcgtggtccagcctgggaggtccctgagactctcctgtgtagcgtctggattcaccttcagtagcaatgacatatactgggtccgccaggccccaggcaaggggctggagtgggtggcagttatatggtatgatggaagtaataaatactatgcagactccgtgaagggccgattcaccatctccagagacaattccaagaacacgctgtatctgcaaatgaacagcctgagagccgaggacacggctgtgtattactgtgcgagaggtgacaactggaacgacgaacaccactaccactactacatggacgtctggggcaaagggaccacggtcaccgtctcctcaggcggcggtggatctggaggcggaggctctggaggcggcggctccgaaattgtgctgactcagtctccagactttcagtctgtgactccaaaggagaaagtcaccatcacctgccgggccagtcagagcattggtagtagcttacactggtaccagcagaaaccagatcagtctccaaagctcctcatcaagtttgcttcccagtccttctcaggggtcccctcgaggttcagtggcagtggatctgggacagatttcaccctcaccatccatagcctggaagctgaagatgctgcaacgtattactgtcatcagagtggtagtttaccgtggacgttcggccaagggaccaaggtggaaatcaaa

SEQ ID NO: 1738 - DNA, 721 bp, synthetic construct
  misc_feature 1..721: note = Synthetic
  source 1..721: mol_type = other DNA
caggtgcagttggtggagtctgggggaggcgtggtccagcctgggaggtccctgagactctcctgtgcagcctctggattcaccttcagtagctatggcatgcactgggtccgccaggctccaggcaaggggctggagtgggtggcagttatatcatatgatggaagtaataaatactatgcagactccgtgaagggccgattcaccatctccagggacaattccaagaccacgctgtatctgcaaatgaacagcctgagagctgaggacacggctgtgtattactgtgcgagagatcactactactactacatggacgtctggggcaaagggaccacggtcaccgtctcctcaggcggcggtggatctggaggcggaggctctggaggcggcggctccggtgacccaggagccatcgttctcagtgtcccctggagggacagtcacactcacttgtggcttgagctctggctcagtctctactagttactaccccagctggtaccagcagaccccaggccaggctccacgcacgctcatctacagcacaaacattcgctcttctggggtccctgatcgcttctctggctccatccttgggaacaaagctgccctcaccatcacgggggcccaggcagatgatgaatctgattattactgtgtgctgtatatgggtagtgacattgtggtattcggcggagggaccaagctgaccgtccta

SEQ ID NO: 1739 - DNA, 735 bp, synthetic construct
  misc_feature 1..735: note = Synthetic
  source 1..735: mol_type = other DNA
caactgcagctgcaggagtcgggcccaggactggtgaagccttcggagaccctgtccctcacctgcactgtctctggtggctccatcagcagtagtagttactactggggctggatccgccagcccccagggaaggggctggagtggattgggagtctctattatagtgggagcacctactacaacccgtccctcaagagtcgagtcaccatatccgttgacacgtccaagaaccagttctccctgaagctgagctctgtgaccgccgcagacacggctgtgtattactgtgcggccgtacaactggaacgacgtgggtacttctacatggacgtctggggcaaagggaccacggtcaccgtctcctcaggcggcggtggatctggaggcggaggctctggaggcggcggctccgaaattgtgttgacacagtctccagccaccctgtctttgtctccaggggaaagagccaccctctcctgcagggccagtcagagtgttagcagctactttgcctggtaccaacagaaacctggccaggctcccaggctcctcatctatgatgcatccaacagggccactggcatcccagccaggttcagtggcagtgggtctgggacagacttcactctcaccatcagcagcctggagcctgaagattttgcagtttattactgtcagcagcgtagcaactggcctctcactttcggcggagggaccaaggtggagatcaaa

SEQ ID NO: 1740 - DNA, 741 bp, synthetic construct
  misc_feature 1..741: note = Synthetic
  source 1..741: mol_type = other DNA
caggtgcagctggtggagtctgggggaggcgtggtccagcctgggaggtccctgagactctcctgtgcagcatctggattcaccttcagtaactatggcatgcactgggtccgccaggctccaggcaaggggctggagtggatggcagttatatggtctgatggacataataaatactatgcagactccgtgaagggccgattcaccatctccagagacaattccaagaacacgctgtatctgcaaatgaacagcctgagagccgaggacacggctgtgtattactgtgcgagggcacaattggaacgacggtacttctactacatggacgtctggggcaaagggaccacggtcaccgtctcctcaggcggcggtggatctggaggcggaggctctggaggcggcggctcccagactgtagtgacccaggaaccatcgttctcagtgtcccctggagggacagtcacactcacttgtggcttgacctctggctcagtctctactagttactaccccaactggtaccagcagaccccaggccaggctccacgcacgctcatctatagtacaaatattcgctcttctggggtccctgatcgcttctctggctccatccttgggaacaaagctgccctcaccatcacgggggcccaggcagatgatgaatctgattattactgtgtgctgtatatgggtagtggcatgtttattttcggcagtggaaccaaggtcactgtccta

SEQ ID NO: 1741 - DNA, 741 bp, synthetic construct
  misc_feature 1..741: note = Synthetic
  source 1..741: mol_type = other DNA
caggtgcagctggtgcagtctggggctgaggtgaagaagcctggggcctcagtgaaggtctcctgcaaggcttctggatacaccttcaccagttatgatatcaactgggtgcgacaggccactggacaagggcttgagtggatgggatggatgatccctaacagtggtgacacaggctctgcacagaagttccagggcagagtcaccatgaccaggaacacctccataggcacagcctacatggagctgagcagcctgagatctgaggacacggccgtttattactgtgcgagaggcggatattgtaatagtaccagttgctactactactacatggacgtctggggcaaagggaccacggtcaccgtctcctcaggcggcggtggatctggaggcggaggctctggaggcggcggctccgacatccagatgacccagtctccatcctcactgtctgcatctgtaggagacagagtcaccatcacttgtcgggcgagtcagggtattagcagctggttagcctggtatcagcagaaaccagagaaagcccctaagtccctgatctatgctgcatccagtttacagggtggggtcccatcaaggttcagcggcagtggatctgggacagatttcactctcaccatcagcagcctgcagcctgaagattttgcaacttattactgccaacagtatgatagttacccgtacacttttggccaggggaccaagctggagatcaaa

SEQ ID NO: 1742 - DNA, 744 bp, synthetic construct
  misc_feature 1..744: note = Synthetic
  source 1..744: mol_type = other DNA
caggtgcagctggtgcagtctggggctgaggtgaagaagcctggggcctcagtgaaggtctcctgcaaggcttctggatacaccttcaccagttatgatatcaactgggtgcgacaggccactggacaagggcttgagtggatgggatggatgaaccctaatagtggtaacacagtctatgcacagaagttccagggcagagtcaccatgaccaggaacacctccataagcacagcctacatggagctgagcagcctgagatctgaggacacggccgtgtattactgtgcgagaggaggcgatttttggagtggttaccatgactactactactacatggacgtctggggcaaagggaccacggtcaccgtctcctcaggcggcggtggatctggaggcggaggctctggaggcggcggctccgacatccaggtgacccagtctccaaccttcctgtctgcatctgtaggagacagagtcaccatcacttgccgggccagtcagggcattagcagttatttagcctggtatcagcaaaaaccagggaaagcccctaagctcctgatctatggtgcatccactttgcaaagtggggtcccatcaaggttcagcggcagtggatctgggacagaattcactctcacaatcagcagcctgcagcctgaagattttgcaacttattactgtcaacagcttaatagttacccgtggacgttcggccaagggaccaaggtggaaatcaaa

SEQ ID NO: 1743 - DNA, 738 bp, synthetic construct
  misc_feature 1..738: note = Synthetic
  source 1..738: mol_type = other DNA
caggtgcagctgcaggagtcgggcccaggactggtgaagccttcggagaccctgtccctcacctgcactgtctctggtggctccatcagtagttactactggagctggatccggcagcccgccgggaagggactggagtggattgggcgtatctataccagtgggagcaccaactacaacccctccctcaagagtcgagtcaccatgtcagtagacacgtccaagaaccagttctccctgaagctgagctctgtgaccgccgcggacacggccgtgtattactgtgcgagagaggagtaccagctgctaccggccctctactactactactacatggacgtctggggcaaagggaccacggtcaccgtctcctcaggcggcggtggatctggaggcggaggctctggaggcggcggctcctcctatgagctgactcagccaccctcagtgtccgtgtccccaggacagacagccagcatcacctgctctggagataaattgggggataaatatgcttgctggtatcagcagaagccaggccagtcccctgtgctggtcatctatcaagatagcaagcggccctcagggatccctgagcgattctctggctccaactctgggaacacagccactctgaccatcagcgggacccaggctatggatgaggctgactattactgtcaggcgtgggacagcagcactgctgtgttcggaggaggcacccagctgaccgccctc

SEQ ID NO: 1744 - DNA, 741 bp, synthetic construct
  misc_feature 1..741: note = Synthetic
  source 1..741: mol_type = other DNA
caggtgcagctggtggagtctgggggaggcgtggtccagcctgggaggtccctgagactctcctgtgcagcaactggattcaccttcagtagctatggcatgcactgggtccgccaggctccaggcaaggggctggagtggatggtagttatatggtctgatggacataataaatactatgcagactccgtgaagggccgattcaccatctccagagacaattccaagaacacgctgtatctgcaaatgaacagcctgagagccgaggacacggctgtgtattactgtgcgagggcacaactggaacgacggtacttctactacatggacgtctggggcaaagggaccacggtcaccgtctcctcaggcggcggtggatctggaggcggaggctctggaggcggcggctcccagactgtagtgacccaggaaccatcgttctcagtgtcccctggagggacagtcacactcacttgtggcttgacctctggctcagtctctactagttactaccccaactggtaccagcagaccccaggccaggctccacgcacgctcatctacagcacaaatattcgctcttctggggtccctgatcgcttctctggctccatccttgggaacaaagctgccctcaccatcacgggggcccaggcagatgatgaatctgattattactgtgtgctgtatatgggtagtggcatgtttattttcggcagtggaaccaaggtcactgtccta

SEQ ID NO: 1745 - DNA, 741 bp, synthetic construct
  misc_feature 1..741: note = Synthetic
  source 1..741: mol_type = other DNA
caggtgcagctggtggagtctgggggaggcgtggtccagcctgggaggtccctgagactctcctgtgcagcgtctggattcaccttcactagttatgacatgcactgggtccgccaggctccaggcaaggggctggagtgggtgacaattatatggtttgatggaagtaataaatactatgcagactccgtgaagggccgattcaccatctccagagacaattccaagaacacgctgtatctgcaaatgaacagcctgagcgccgaggacacggctgtgtattactgtgcgagaggagacaactggaacgaccggtactactactactactacatggacgtctggggcaaagggaccacggtcaccgtctcctcaggcggcggtggatctggaggcggaggctctggaggcggcggctccgaaattgtgctgactcagtctccagactttcagtctgtgactccaaaggagaaagtcaccatcacctgccgggccagtcagagcattggtagtagcttacactggtaccagcagaaaccagatcagtctccaatgctcctcatcaagtttgcttcccagtccatctcaggggtcccctcgaggttcagtggcagtggatctgggacagatttcaccctcaccatcaatagcctggaagctgaagatgctgcagcgtattactgtcatcagagtagtagtttaccgtggacgttcggccaagggaccaaggtggaaatcaaa

SEQ ID NO: 1746 - DNA, 756 bp, synthetic construct
  misc_feature 1..756: note = Synthetic
  source 1..756: mol_type = other DNA
caggttcagctggtgcagtctggagctgaggtgaagaagcctggggcctcagtgaaggtctcctgcaaggcttctggttacacctttaccagctatggtatcagctgggtgcgacaggcccctggacaagggcttgagtggatggggtggatcagcgcttacaatggtcacacagactatacacagaaactccagggcagagtcaccatgaccacagacacatccacgaccacagcctacatggaactgaggagcctgagctctgccgacacggccgtgtattactgtgtgagagaagtggtacttcccaccacggactactactacttttacatggacgtctggggcaaagggaccacggtcaccgtctcctcaggcggcggtggatctggaggcggaggctctggaggcggcggctccgatattgtgatgacccagcctccactctcctcgcctgtcacccttggacagccggcctccatctcctgcaggtctagtcaaagcctcgtacacagtgatggaaacacctacttgagttggcttcagcagaggccaggccagcctccaagactcctaatttataaggtttctaaccggttctctggggtcccagacagattcagtggcagtggggcagggacagatttcacactgaaaatcagcagggtggaagctgaggatgtcggggtttattactgcacgcaagctacacaatttcctcacacttttggccaggggaccaagctggagatcaaa

SEQ ID NO: 1747 - DNA, 753 bp, synthetic construct
  misc_feature 1..753: note = Synthetic
  source 1..753: mol_type = other DNA
caggtccagctggtacagtctggggctgaggtgaagaagcctggggcctcagtgaaggtctcctgcaaggtttccggatacaccctcactgaattatccatgcactgggtgcgacaggctcctggaaaagggcttgagtggatgggaggttttgatcctgaagatggtgaaacaatctacgcacagaagttccagggcagagtcaccatgaccgaggacacatctacagacacagcctacatggagctgagcagcctgagatctgaggacacggccgtgtattactgtgcaacaggacgtattactatggttcggggagttattatcccctactactactactacatggacgtctggggcaaagggaccacggtcaccgtctcctcaggcggcggtggatctggaggcggaggctctggaggcggcggctccgacatccagatgacccagtctccatcctcactgtctgcatctgtaggagacagagtcaccatcacttgtcgggcgagtcagggtattagcagctggttagcctggtatcagcagaaaccagagaaagcccctaagtccctgatctatgctgcatccagtttgcaaagtggggtcccatcaaggttcagcggcagtggatctgggacagatttcactctcaccatcagcagcctgcagcctgaagattttgcaacttattactgccaacagtataatagttacccgtacacttttggccaggggaccaagctggagatcaaa

SEQ ID NO: 1748 - DNA, 747 bp, synthetic construct
  misc_feature 1..747: note = Synthetic
  source 1..747: mol_type = other DNA
caggttcagctggtgcagtctggaactgaggtgaagaagcctggggcctcagtgaaggtctcctgcaaggcttctggttacacctttaccaactatggtatcggctgggtgcgacaggcccctggacaagggcttgagtggatgggatggatcatcgcttacaatggttacacaaagtatgcacagattctccagggcagagtcaccatgaccacagacacatccacgaacacagcttatatggaactgaggagcctgagatctgacgacacggccgtgtattactgtgcgagacagcagctcgggggggactaccactactacatggacgtctggggcaaagggaccacggtcaccgtctcctcaggcggcggtggatctggaggcggaggctctggaggcggcggctccgatattgtgatgacccagactccactctctctgtccgtcacccctggacagccggcctccatctcctgcaagtctagtaagagcctcctgcatagtgatggaaagacctatttgtattggtacctgcagaagccaggccagcctccacagctcctgatctatgaagtttccaaccggttctctggagtgccagataggttcagtggcagcgggtcagggacagatttcacactgaaaatcagccgggtggaggctgaggatgttggggtttattactgcatgcaaagtatacaatttccgtggacgttcggccaagggaccaaggtggaaatcaag

SEQ ID NO: 1749 - DNA, 747 bp, synthetic construct
  misc_feature 1..747: note = Synthetic
  source 1..747: mol_type = other DNA
caggttcagctggtgcagtctggaactgaggtgaagaagcctggggcctcagtgaaggtctcctgcaaggcttctggttacacctttaccaactatggtatcggctgggtgcgacaggcccctggacaagggcttgagtggatgggatggatcatcgcttacaatggttacacaaagtatgcacagattctccagggcagagtcaccatgaccacggacacatccacgaacacagcctatatggaactgaggagcctgagatctgacgacacggccgtgtattactgtgcgcgacagcagctcgggggggactaccactactacatggacgtctggggcaaagggaccacggtcaccgtctcttcaggcggcggtggatctggaggcggaggctctggaggcggcggctccgatattgtgatgacccagactccactctctctgtccgtcacccctggacagccggcctccatctcctgcaagtctagtaagagcctcctgcatagtgatggaaagacctatttgtattggtacctgcagaagccaggccagcctccacagctcctgatctatgaagtttccacccggttctctggagtgccagataggttcagtggcagcgggtcagggacagatttcacactgaaaatcagccgggtggaggctgaggatgttggggtttattactgcatgcaaagtatacagtttccgtggacgttcggccaagggaccaaggtggaaatcaaa

SEQ ID NO: 1750 - DNA, 741 bp, synthetic construct
  misc_feature 1..741: note = Synthetic
  source 1..741: mol_type = other DNA
caggtgcagctggtgcagtctgggactgaggtgaagaagcctggggcctcagtgaaggtctcctgtaagacttctggatacaccttcaccagttatgatatcaactgggtgcgacaggccactggacaagggcttgagtggatgggatggatgaaccctatcagtggtgacacaggctctgcacagaagttccagggcagagtcaccatgaccaggaacacctccataggcacagcctacatggagctgagcagcctgagatctgaggacacggccgtttattactgtgcgagaggcggatattgtagtagtaccagctgctactactactacatggacgtctggggcaaagggaccacggtcaccgtctcctcaggcggcggtggatctggaggcggaggctctggaggcggcggctccgacatccagatgacccagtctccatcctcactgtctgcctctgtaggagacagagtcaccatcacttgtcgggcgagtcagggtattagcaactggttagcctggtatcagcagaaaccagagaaagcccctaagtccctgatctatgctgcatccagtttgcaaggtggggtcccatcaagattcagcggcagtggatctgggacagatttcactctcaccatcagcagcctgcagcctgaagattttgcaacttattactgccaacagtatgatagttacccgtacacttttggccaggggaccaagctggagatcaaa

SEQ ID NO: 1751 - DNA, 741 bp, synthetic construct
  misc_feature 1..741: note = Synthetic
  source 1..741: mol_type = other DNA
caggtgcagctggtgcagtctggggctgaggtgaagaagcctggggcctcagtgaaggtctcctgcaaggcttctggatacaccttcaccagttatgatatcaactgggtgcgacaggccactggacaagggcttgagtggatgggatggatgatccctaacagtggtgacacaggctctgcacagaagttccagggcagagtcaccatgaccaggaacacctccataagcacagcctacatggagctgagcagcctgagatctgaggacacggccgtttattactgtgcgagaggcggatattgtaatagtaccagttgctactactactacatggacgtctggggcaaagggaccacggtcaccgtctcctcaggcggcggtggatctggaggcggaggctctggaggcggcggctccgacatccagatgacccagtctccatcctcactgtctgcatctgtaggagacagagtcaccatcacttgtcgggcgagtcagggtattagcagctggttagcctggtatcagcagaaaccagagaaagcccctaagtccctgatctatgctgcatccagtttacaaggtggggtcccatcaaggttcagcggcagtggatctgggacagatttcactctcaccatcagcagcctgcagcctgaagattttgcaacttattactgccaacagtatgatagttacccgtacacttttggccaggggaccaagctggagatcaaa

SEQ ID NO: 1752 - DNA, 744 bp, synthetic construct
  misc_feature 1..744: note = Synthetic
  source 1..744: mol_type = other DNA
gaggtgcagttgttggagtctgggggaggcttggtacaacctggggggtccctgagactctcctgtgcagcctctggattcacctttagcagctatgtcatgaactgggtccgccaggctccagggaaggggctggaatgggtctcatctgttagtggtagtggtaataactcattctacgcagactccgtgaagggccggttcaccatctccagagacaattccaagaacacgctgtatctgcaaatgaacagcctgagagccgaggacacggccgtatattactgtgcgagtcgtagttccagttatctctactactactactacatggacgtctggggcaaagggaccaccgtcaccgtctcctcaggcggcggtggatctggaggcggaggctctggaggcggcggctccgaaattgtgttgacgcagtctccaggcaccctgtctttgtctccaggggaaagagccaccctctcctgcagggccagtcagagtgttagcagcagctacttagcctggtaccagcagaaacctggccaggctcccaggctcctcatctatggtgcatccagcagggccactggcatcccagacaggttcagtgacagtgggtctgggacagacttcactctcaccatcagcagactggagcctgaagattttgcagtgtattactgtcagcactatggtagctcacctccgaggatcactttcggccctgggaccaaagtggatatcaaa

SEQ ID NO: 1753 - DNA, 741 bp, synthetic construct
  misc_feature 1..741: note = Synthetic
  source 1..741: mol_type = other DNA
caagtgcagctggtggagagcggcggcggagtggtgcaacctggaagaagcctgcggctgagctgcgctgctagcggcttcaccttcagcagccacgacatgcactgggtgcggcaggcccctggcaagggcctggactgggtcgccgtgatctggagcgacggcaacaagaagtactacgtggacagcgccaagggcagattcaccatcagccgcgacaatagcaagaacaccgtgtacctgcagatgaacagcctgagagccgaggacaccgccatctactattgcgccagaggcgataattggaacgacgagcacagctactattactacatggacgtgtggggcaaaggcacaaccgtgaccgtgtcctccggcggcggcggttctggcggaggaggctccgggggcggcggaagcgagatcgtgctgacccagagccccgacttccagtctgtgacacctaaggaaaaggttacaattacctgtagagcttcccagaccatcggctcttctctgcactggtaccagcagaaacctgatcagtctccaaagctgctgatcaagcacgccagccagagcttctctggcgtccccagccggttttctggcagcggcagcggaacagattttacactgacagtgaactcactggaagccgaggatgccgccacctactactgccatcagagctccagcctcccttggaccttcggccagggcacgaaggtggaaatcaaa

SEQ ID NO: 1754 - DNA, 741 bp, synthetic construct
  misc_feature 1..741: note = Synthetic
  source 1..741: mol_type = other DNA
caagtgcagctggtggaaagcggcggcggagtggtgcaacctggcagatctctgcggctgtcttgtgccgcctctggatttacattcagctctcatgatatgcactgggtgcggcaggcccctggcaaaggcctggactgggtcgccgtgatctggagcgacggcaacaacaagtactacgccgacagcgccaagggaagattcaccatcagccgggacaattctaaaaacaccgtgtacctgcagatgaacagcctgagagctgaggacaccgccatctactattgcgccagaggagataattggaacgacgagcacagctactactactatatggacgtgtggggcaagggcacaacagtgaccgtgtcctccggcggcggaggtagcggcggaggcggcagcggcggcggcggctccgagatcgtgctgacacagtccccagattttcagagcgtgacccccaaggaaaaggtgacaatcacctgcagagccagccagaccatcggcagcagcctgcactggtaccagcagaaacccgatcagtctcctaagctgctgatcaagcacgccagccagagcttcagcggcgttcccagcaggttcagcggaagcggcagcggcaccgacttcaccctgaccgtgaactctctcgaggccgaggacgccgctacatactactgccaccagagcagctccctgccttggaccttcggccagggcaccaaggtcgaaattaag

SEQ ID NO: 1755 - DNA, 738 bp, synthetic construct
  misc_feature 1..738: note = Synthetic
  source 1..738: mol_type = other DNA
caactgcagctggtgcagagcggagccgaggtgaagaagcctggcgctagcgttaaggtgtcctgcaaggcctccggctacacctttaccaactacggcatctcctggctgcgccaggccccaggccagggcctggagtggatgggctggatctccggatacaacgacaacacccactacgcccagaaattccagggtagagtgactatgaccaccgataccagcacaacaacagcctacatggaactgagaaacctgcggagcgacgacaccgccgtgtactactgcgcccgggacggcattgccgctagacctgtgtactactattacatggacgtgtggggcaagggcaccaccgtgacagtgtcttctggcggcggcggcagcggcggcggaggatctggcggcggaggatctgatatccagatgacccagagccccagcagcctgagcgccagcgtgggcgaccgggtcacaatcacctgcagagccagccagagcatcagcaattacctgaactggtaccaccagaagcccggcaaagcccctaagctgctgatctacgctgcttctagcctcgagagcggcgtgcctagcagattcagcggcagcggcagcggaacagatttcaccctgacaatcagctctctgcaacctgaggacttcgccacatactattgtcagcagtcctacagcaatcctctgaccttcggcggcggcacaaaggtggaatctaag

SEQ ID NO: 1756 - DNA, 741 bp, synthetic construct
  misc_feature 1..741: note = Synthetic
  source 1..741: mol_type = other DNA
caagtgcagctggtggagagcgggggaggtgtcgtgcagcctggaagaagcctcagactgtcttgtgtggccagcggctttaccttcagctctaatgacatctactgggtgcggcaggcccctggcaagggcctggaatgggtcgctgtgatctggtacgacggcagcaacaaatactacgccgattctgtgaagggcagattcaccatcagcagagataattctaagaacaccctgtacctgcagatgaacagcctgagagccgaggataccgccgtgtactattgcgccaggggcgacaactggaacgacgagcaccattaccactactacatggacgtgtggggcaaaggcaccaccgtgaccgtgtccagcggcggcggaggctctggaggaggcggcagcggcggcggcggctccgagattgttctgacccagagccctgatttccagagcgtgacccccaaggaaaaggtgacaatcacctgccgggccagccaaagcatcggctccagcctgcactggtatcagcagaagcccgaccagtccccaaagctgctgatcaaattcgcctctcagtcattcagcggcgtgccttcccggttcagcggaagcggcagcggcacagactttaccctgacaatccacagcctggaagccgaggacgccgctacatactactgccaccagagcggcagcctgccctggacattcggccagggcacgaaggtggagatcaag

SEQ ID NO: 1757 - DNA, 729 bp, synthetic construct
  misc_feature 1..729: note = Synthetic
  source 1..729: mol_type = other DNA
caagtgcagctggtggaaagcggcggcggtgttgtgcaacctggcagaagcctgcggctgtcatgcgccgccagcggcttcaccttcagctcttacggcatgcactgggtgcggcaggcccctggaaagggactggaatgggtcgccgtgatcagctacgacggctccaacaagtactacgccgacagcgtgaaaggcagattcaccatctctagggacaacagcaagaccaccctctacctgcagatgaacagcctgagagccgaggacaccgccgtgtactattgtgccagagatcactactactactacatggacgtgtggggcaagggcaccaccgtgaccgtgtcttctggcggcggaggcagcggcggaggcggcagcggcggcggcggctcccagaccgtggtgactcaggagcccagcttcagcgtcagccccggcggaacagtgaccctgacatgcggcctgagcagcggcagcgtgtccaccagctactatcctagctggtaccagcagacaccaggccaggctcctagaaccctgatctacagcaccaacatccggagcagcggcgtgcctgatagatttagcggctctatcctgggaaataaagccgctctgaccattacaggcgcccaggctgatgacgagagcgactactactgcgtgctgtacatgggctctgatatcgtggttttcggcggcggcacaaagctgacagtgctg

SEQ ID NO: 1758 - DNA, 735 bp, synthetic construct
  misc_feature 1..735: note = Synthetic
  source 1..735: mol_type = other DNA
caactgcagctgcaggagagcggccctggactggtgaagcccagcgagacactgagcctgacatgcaccgtgtccggaggctctatcagcagcagcagctactactggggatggattagacagccccccggcaagggcctggaatggatcggcagcctgtactacagcggcagcacctactacaaccccagcctgaagtctagagtgaccatcagcgtggacaccagcaagaaccagttcagcctgaaactgagctctgtcacagccgccgataccgccgtgtactactgcgccgctgtgcagctggaaaggcggggctacttctacatggacgtgtggggcaaaggcaccaccgtgacagtgtctagcggcggcggcggaagcggcggcggtggcagtggcggcggcggctctgagatcgtgctgacacagtcccctgctaccctgagcctgagccctggcgagcgggccaccctgagctgcagagccagccagagcgtgtccagctactttgcctggtatcagcagaagcctggccaggccccacggctgctgatctacgacgcctctaatagagccacaggcatcccagctagattcagcggctccggctccggaaccgatttcaccctgaccatctctagcctcgagcctgaggacttcgccgtttactattgtcagcaaagaagcaactggcctctgacatttggcggaggcacaaaggtggaaatcaag

SEQ ID NO: 1759 - DNA, 741 bp, synthetic construct
  misc_feature 1..741: note = Synthetic
  source 1..741: mol_type = other DNA
caagtgcaactggtggaaagcggcggcggcgttgtgcagcctggcagaagcctgcggctgtcatgcgccgccagcggttttaccttctctaattacggcatgcactgggtgcggcaggctcccggcaaaggcctggaatggatggccgtgatctggtccgatggccacaacaagtactacgccgatagcgtgaaaggcagattcaccattagcagagataattctaagaacaccctgtacctgcagatgaacagcctgcgcgccgaggacaccgccgtgtactattgtgccagagcccagctggagcggagatacttctactatatggacgtgtggggcaagggcaccaccgtgacagtgtctagcggcggaggcggctctggcggcggcggctctggaggcggaggaagccagaccgtcgtgacccaggagcctagcttcagcgtgtccccaggcggaaccgtcacactgacatgcggcctcacaagcggcagcgtgtccaccagctactaccccaactggtaccagcagacacctggacaggcccctagaaccctgatctacagcaccaacatccggagcagcggagtgcccgacagattttctggcagcatcctgggcaacaaggccgctctgaccatcaccggcgctcaggccgacgacgagagcgactactactgcgtgctgtacatgggcagcggcatgttcatcttcggcagcggcacaaaggtgacagtgctg

SEQ ID NO: 1760 - DNA, 741 bp, synthetic construct
  misc_feature 1..741: note = Synthetic
  source 1..741: mol_type = other DNA
caggttcagctggtgcagagcggagccgaggtgaaaaagcccggcgcaagcgtgaaggtgtcttgcaaggcctccggatataccttcaccagctacgatatcaactgggtgcggcaggccacaggccagggtctcgaatggatgggctggatgatccccaattctggcgacacaggcagcgcccaaaagttccagggcagagtgacaatgaccagaaacaccagcatcggaacagcctacatggaactgagctccctgagaagcgaggataccgccgtgtactattgtgccagaggcggctactgcaacagcacctcctgctactactactacatggacgtgtggggcaaaggcacaaccgtcaccgtgagctctggcggcggcggcagcggaggcggcggaagcggcggaggcggaagcgacatccagatgacacagagccctagcagcctgtctgcttccgtgggcgatagagtgacaatcacctgccgggcctcccagggcatcagctcctggctggcctggtaccagcagaagcctgagaaggcccctaagagcctgatctacgccgcttctagcctgcagggaggcgtgccaagtcggttcagcggcagcggcagcggcacagacttcaccctgaccatttcttctctgcaacctgaggacttcgccacctactactgtcagcaatacgacagctacccctacacctttggccagggcaccaagctggaaatcaag

SEQ ID NO: 1761 - DNA, 744 bp, synthetic construct
  misc_feature 1..744: note = Synthetic
  source 1..744: mol_type = other DNA
caggttcaactggtgcagagcggcgccgaggtgaagaagcctggcgccagcgtgaaagtgtcctgcaaggccagcggatacacgtttaccagctacgacatcaactgggtcagacaggccaccggccagggcctggaatggatgggatggatgaaccccaacagcggcaacaccgtgtacgcccagaaattccagggcagagtgaccatgacacggaacaccagcatcagcaccgcctacatggaactgagctctctgagatccgaggatacagccgtgtactactgcgccagaggcggagatttctggagcggctaccacgactactactactacatggacgtgtggggcaagggcaccaccgtgaccgtgtcttctggcggcggcggctccggcggaggcggcagcggaggaggcggctctgatatccaggtcacacagagccctacctttctgagcgcttctgtgggcgaccgggtgaccatcacatgccgggccagccagggtattagcagctacctggcttggtaccagcagaagcccggcaaagcccctaagctgctgatctacggcgcttctaccctgcagtccggcgtgcccagcagattcagcggcagcggaagcggaacagagttcaccctgacaatctccagcctccaacctgaggacttcgccacatactattgtcagcaactgaatagctatccttggacattcggccagggcaccaaggtggaaatcaag

SEQ ID NO: 1762 - DNA, 738 bp, synthetic construct
  misc_feature 1..738: note = Synthetic
  source 1..738: mol_type = other DNA
caagtgcagctgcaggagagcggtcctggcctggttaagcctagcgagacactgtctctgacttgcaccgtgtccggcggatctatcagcagctactactggtcctggatcagacagcccgccggcaaaggcctggaatggattggaagaatctacaccagcggcagcaccaactacaaccccagcctgaagtccagagtgacaatgagcgtggacacatctaagaaccagtttagcctgaaactgagcagcgtgaccgccgccgatacagctgtgtactattgtgcccgggaagaataccagctgctgcctgccctgtactactattactacatggacgtgtggggcaagggcaccaccgtgaccgtgtccagcggaggcggcggcagcggaggcggcggctctggcggcggaggcagcagctacgagctgacccagcctccatctgtctccgtgtctccaggccaaacagccagcatcacctgcagcggagataagctgggcgacaagtacgcctgctggtaccagcagaagcccggccagagccctgtgctggtgatctaccaggacagcaagcggcctagcggcatccccgagagattcagcggctccaacagcggcaataccgctacactgacaatcagcggcacacaggccatggatgaggccgactactactgccaggcctgggacagctctaccgccgtgttcggcggcggaacccagctcaccgccctg

SEQ ID NO: 1763 - DNA, 741 bp, synthetic construct
  misc_feature 1..741: note = Synthetic
  source 1..741: mol_type = other DNA
caagtgcagctggtggaatctggcggcggcgtggtgcagcctggtaggagcctgcggctgtcatgcgccgccacaggcttcaccttcagcagctacggcatgcactgggtcagacaggcccctggcaagggactggagtggatggtggtgatctggtccgatggccacaataaatactacgccgacagcgtgaagggcagatttaccattagccgggacaacagcaagaacaccctgtacctgcagatgaacagcctgagagctgaagataccgccgtgtactactgcgccagagcccagctcgagcggagatacttctactatatggacgtgtggggcaaaggcacaacagtgaccgtttcttctggcggcggcggatctggcggaggcggctccggaggcggcggcagccagaccgtggtcacccaggagcctagctttagcgtgtccccaggaggtacagtgaccctgacatgcggcctgactagcggatctgtgtccaccagctactaccccaactggtaccagcagacacctggccaggcccctagaaccctgatctacagcaccaatatccggagctccggcgtgcccgacagattcagcggaagcatcctgggcaacaaggccgctctgaccatcaccggcgcccaagctgatgacgagagcgactactattgtgtgctgtacatgggcagcggcatgttcatcttcggctctggcaccaaggtgaccgtgctg

SEQ ID NO: 1764 - DNA, 741 bp, synthetic construct
  misc_feature 1..741: note = Synthetic
  source 1..741: mol_type = other DNA
caagtgcagctggtcgagagcggaggcggcgttgtgcaacctggaaggagcctgcggctgagctgcgccgcttctggcttcacctttactagctacgacatgcactgggtgcggcaggcccctggcaagggcctggaatgggtcaccatcatctggttcgacggcagcaacaagtactacgccgatagcgtgaagggcagattcaccatcagcagagataatagcaagaataccctgtacctgcagatgaactctctctccgccgaggacaccgccgtgtactactgcgccagaggcgacaactggaacgacagatactattattactactacatggacgtgtggggcaaaggcaccaccgtgacagtgtccagcggcggcggaggaagcggcggcggtggctctggaggcggaggcagcgagatcgtgctgacccagtctccagatttccagtccgtgacccctaaggaaaaggtgaccatcacatgcagagccagccagtccatcggctctagcctgcactggtaccagcagaagcccgaccagtctcctatgctgctgatcaaattcgcctctcagagcatcagcggcgtgcccagccggttcagcggcagcggctccggcaccgacttcacactgacaatcaacagtctggaggccgaggatgccgctgcttactactgtcaccagagcagcagcctgccttggacatttggccagggcaccaaggtggaaattaag

SEQ ID NO: 1765 - DNA, 756 bp, synthetic construct
  misc_feature 1..756: note = Synthetic
  source 1..756: mol_type = other DNA
caagtgcagctggtccagagcggcgctgaggtgaagaaacctggcgcctctgtgaaagtgtcctgcaaggccagcggctacacctttaccagctacggcattagctgggtgcggcaggcccctggccagggtcttgagtggatgggctggatcagcgcctacaacggccacacagattatacacaaaagctgcagggcagagtgaccatgacaaccgataccagcaccaccacagcctacatggaactgagaagcctgagctctgccgacaccgccgtgtactactgcgtgcgggaagtggtgctgcctaccacagactactactacttctacatggacgtgtggggcaagggcaccacagtgacagtcagctccggcggaggaggcagcggcggcggaggcagcggcggaggcggcagcgacatcgtgatgacccagcctcctctgagcagccctgtgacactgggccagccagctagcatcagctgtagatcttctcagtccctggtgcacagcgacggcaatacctacctgtcttggctgcagcagcggcctggccagccccccagactgctgatctacaaggtgtccaaccgcttcagcggcgtgccagacagattcagcggctctggcgccggcaccgacttcaccctgaagatcagcagagtcgaggccgaagatgtgggagtttactattgcacccaagctacacagttcccccacacctttggccagggcaccaagctcgagatcaag

SEQ ID NO: 1766 - DNA, 753 bp, synthetic construct
  misc_feature 1..753: note = Synthetic
  source 1..753: mol_type = other DNA
caagttcagctggtgcagagcggagccgaggtgaaaaagcccggcgcttctgtgaaggtgtcctgcaaggtgtctggctacaccctgacagagctgagcatgcactgggtccggcaggcccctggcaaaggcctggaatggatgggaggcttcgaccccgaagacggggagacaatctacgcccagaaattccagggcagagtgacaatgaccgaggacaccagcaccgatacagcctacatggaactgtcttccctgcggagcgaggacaccgccgtgtactactgcgccaccggcagaatcaccatggtgcggggcgtcatcatcccctactactattactacatggacgtgtggggcaagggcaccaccgtgaccgtgtcctctggcggaggaggatctggcggcggcggaagcggcggaggcggcagtgatatccagatgacacagagcccaagcagcctgagcgccagcgtgggcgacagagtgaccatcacatgcagagccagccagggcatcagcagctggctggcttggtaccagcaaaagcctgagaaggcccctaagagcctcatctacgccgctagcagcctgcagtccggcgtgccaagcagattcagcggctctggctctggcacagacttcaccctgaccatttccagcctgcaacctgaggattttgccacatactattgtcagcagtacaacagctacccttacaccttcggccagggcaccaagctggaaatcaag

SEQ ID NO: 1767 - DNA, 747 bp, synthetic construct
  misc_feature 1..747: note = Synthetic
  source 1..747: mol_type = other DNA
caagtgcagctggtgcagagcggcaccgaggtgaagaagccaggcgcctctgtgaaagtgtcttgtaaagccagcggctacacctttaccaattacggcatcggctgggtgcggcaggcccctggacagggactggaatggatgggctggatcatcgcctacaacggctacacaaagtacgcccagatcctgcagggcagagtgacaatgaccaccgacaccagcaccaacaccgcttatatggaactgagaagcctgcggagcgacgacaccgccgtgtactattgcgccagacagcagctgggcggagattaccactactacatggacgtgtggggcaagggcaccaccgtcacagtgtccagcggcggtggcggatctggcggcggcggctctggaggcggcggctctgatatcgtgatgacccagacccccctgagcctgtccgtgaccccaggacaacctgccagcattagctgcaagagcagcaagtccctgctgcacagcgacggcaagacatacctgtactggtacctgcaaaagcccggccagcctcctcagctgctcatctacgaggtgtccaaccggttctctggcgtgcctgatagattcagcggaagcggcagcggaacagacttcacactgaagatcagcagagtcgaggccgaggacgtgggcgtttactactgcatgcagagcatccagttcccctggacattcggccagggcacaaaagtggaaatcaag

SEQ ID NO: 1768 - DNA, 747 bp, synthetic construct
  misc_feature 1..747: note = Synthetic
  source 1..747: mol_type = other DNA
caagtgcagctggtgcaaagcggcaccgaggtgaaaaagcccggcgcctctgtgaaggtctcctgcaaggccagcggatacacatttacaaattacggcatcggctgggtgcggcaggcccctggccagggcctggaatggatgggctggatcatcgcctacaacggctacaccaagtacgcccagatcctgcaaggcagagtcaccatgaccacagacaccagcaccaacaccgcttatatggaactgagaagcctgcggagcgacgatacagccgtgtactactgcgccagacagcagctcggcggcgactaccactactacatggacgtgtggggcaagggcaccaccgtgaccgtgtccagcggaggcggcggatctggcggaggcggcagcggcggcggcggctctgacatcgtgatgacccagacccctctgagcctgagcgtgacacctggacagcccgcttctattagctgtaaaagcagcaagtccctgctgcacagcgacggcaagacctacctgtactggtacctgcagaaacctggccagcctccacagctgctgatctacgaggtgtctacaagattcagcggagtgcctgatagattcagcggcagcggatctggaacagatttcaccctgaagatcagccgggttgaggccgaggacgtgggcgtgtactattgcatgcagtccatccagttcccctggaccttcggccagggcacaaaggtggaaatcaag

SEQ ID NO: 1769 - DNA, 741 bp, synthetic construct
  misc_feature 1..741: note = Synthetic
  source 1..741: mol_type = other DNA
caagtgcagctggtgcagagcggaacagaggtgaaaaagcctggcgccagcgtgaaggtgtcttgtaaaaccagcggttatacattcacctcctacgacattaactgggtgcggcaggccaccggccagggcctggaatggatgggctggatgaaccccatctccggcgacacaggcagcgcccagaagttccagggaagagtgaccatgaccagaaataccagcatcggcaccgcctacatggaactgagcagcctgcggagcgaggacaccgccgtgtactactgcgccagaggcggatactgtagcagtacatcttgctactactattacatggacgtgtggggcaagggcacaacagtgacagtcagcagcggcggcgggggcagcggcggaggcggaagcggcggcggcggcagcgatatccagatgacacagtcccctagctctctgtctgcttctgttggagatagagtgaccatcacctgccgggccagccagggcatcagcaactggctggcctggtaccagcagaagcccgagaaggcccctaagagcctgatctacgccgctagctccctccagggcggcgtgccatctagattcagcggctcaggcagcggaaccgacttcaccctgaccatcagctccctgcaacctgaggattttgccacatactactgccagcaatacgacagctacccctacaccttcggccagggcaccaagctggaaatcaag

SEQ ID NO: 1770 - DNA, 741 bp, synthetic construct
  misc_feature 1..741: note = Synthetic
  source 1..741: mol_type = other DNA
caagtgcagctggtgcagagcggcgccgaggtgaagaagcctggcgcttccgtgaaggtgtcctgtaaagcttctggatacaccttcacctcttatgatattaactgggtgcggcaggccaccggccagggcctggaatggatgggctggatgatccccaacagcggcgataccggctccgcccagaaattccagggaagagttaccatgacaagaaacaccagcatcagcaccgcctacatggaactgagcagcctgcggagcgaggacaccgctgtgtactactgcgccagaggcggctactgtaatagcacaagctgctactattactacatggacgtgtggggcaagggcaccacagtgacagtcagctccggcggcggaggcagcggaggcggtggctctggcggcggcggaagcgacatccagatgacacagagccctagcagcctgagcgcctctgtgggcgaccgggtgaccatcacctgcagagccagccagggcatcagcagctggctggcctggtaccagcagaagcccgagaaggcccctaagtccctgatctacgccgccagctccctccagggcggagtgccatctagattcagcggctctggatctggcacagacttcaccctgaccatcagctctctgcagcctgaggattttgccacatactactgccagcaatacgacagctacccctacacattcggccaaggcacaaagctggaaatcaag

SEQ ID NO: 1771 - DNA, 744 bp, synthetic construct
  misc_feature 1..744: note = Synthetic
  source 1..744: mol_type = other DNA
gaggtgcagctgctggaaagcggaggcggcctggtgcaacctggaggttctctgcggctgagctgcgccgctagcggcttcacatttagcagctacgtgatgaactgggtgcggcaggctcctggaaagggcctggaatgggtctccagcgtgtccggcagcggcaacaacagcttttacgccgatagcgtgaagggcagattcaccatcagccgggacaacagcaagaacaccctctacctgcagatgaattctctgagagccgaggacaccgccgtgtactactgcgccagcaggtcctcttcttacctgtactactactattacatggacgtgtggggcaaaggcacaacagtgaccgtctccagcggcggcggcggctccggcggcggaggaagcggcggaggcggcagcgagatcgtgctgacccaaagccccggcaccctgagcctgagccctggcgagagagccaccctgtcttgtagagcctctcagagcgtttctagctcctacctggcctggtaccagcagaagcccggacaggcccctagactgctgatctacggcgccagcagcagagctacaggcatccccgatagattcagcgacagcggctcaggcacagacttcaccctgacaattagccggctggaacccgaggatttcgccgtgtactattgccagcactacggcagctctcctccaagaatcaccttcggccctggcaccaaggtggacatcaaa

SEQ ID NO: 1772 - protein, 250 aa, synthetic construct
  REGION 1..250: note = Synthetic
QVQLVESGGGVVQPGRSLRLSCAASGFTFSSHDMHWVRQAPGKGLDWVAVIWSDGNKKYYVDSAKGRFTISRDNSKNTVYLQMNSLRAEDTAIYYCARGDNWNDEHSYYYYMDVWGKGTTVTVSSGSTSGSGKPGSGEGSTKGEIVLTQSPDFQSVTPKEKVTITCRASQTIGSSLHWYQQKPDQSPKLLIKHASQSFSGVPSRFSGSGSGTDFTLTVNSLEAEDAATYYCHQSSSLPWTFGQGTKVEIK

SEQ ID NO: 1773 - protein, 250 aa, synthetic construct
  REGION 1..250: note = Synthetic
QVQLVESGGGVVQPGRSLRLSCAASGFTFSSHDMHWVRQAPGKGLDWVAVIWSDGNNKYYADSAKGRFTISRDNSKNTVYLQMNSLRAEDTAIYYCARGDNWNDEHSYYYYMDVWGKGTTVTVSSGSTSGSGKPGSGEGSTKGEIVLTQSPDFQSVTPKEKVTITCRASQTIGSSLHWYQQKPDQSPKLLIKHASQSFSGVPSRFSGSGSGTDFTLTVNSLEAEDAATYYCHQSSSLPWTFGQGTKVEIK

SEQ ID NO: 1774 - protein, 249 aa, synthetic construct
  REGION 1..249: note = Synthetic
QLQLVQSGAEVKKPGASVKVSCKASGYTFTNYGISWLRQAPGQGLEWMGWISGYNDNTHYAQKFQGRVTMTTDTSTTTAYMELRNLRSDDTAVYYCARDGIAARPVYYYYMDVWGKGTTVTVSSGSTSGSGKPGSGEGSTKGDIQMTQSPSSLSASVGDRVTITCRASQSISNYLNWYHQKPGKAPKLLIYAASSLESGVPSRFSGSGSGTDFTLTISSLQPEDFATYYCQQSYSNPLTFGGGTKVESK

SEQ ID NO: 1775 - protein, 250 aa, synthetic construct
  REGION 1..250: note = Synthetic
QVQLVESGGGVVQPGRSLRLSCVASGFTFSSNDIYWVRQAPGKGLEWVAVIWYDGSNKYYADSVKGRFTISRDNSKNTLYLQMNSLRAEDTAVYYCARGDNWNDEHHYHYYMDVWGKGTTVTVSSGSTSGSGKPGSGEGSTKGEIVLTQSPDFQSVTPKEKVTITCRASQSIGSSLHWYQQKPDQSPKLLIKFASQSFSGVPSRFSGSGSGTDFTLTIHSLEAEDAATYYCHQSGSLPWTFGQGTKVEIK

SEQ ID NO: 1776 - protein, 243 aa, synthetic construct
  REGION 1..243: note = Synthetic
QVQLVESGGGVVQPGRSLRLSCAASGFTFSSYGMHWVRQAPGKGLEWVAVISYDGSNKYYADSVKGRFTISRDNSKTTLYLQMNSLRAEDTAVYYCARDHYYYYMDVWGKGTTVTVSSGSTSGSGKPGSGEGSTKGVTQEPSFSVSPGGTVTLTCGLSSGSVSTSYYPSWYQQTPGQAPRTLIYSTNIRSSGVPDRFSGSILGNKAALTITGAQADDESDYYCVLYMGSDIVVFGGGTKLTVL

SEQ ID NO: 1777 - protein, 248 aa, synthetic construct
  REGION 1..248: note = Synthetic
QLQLQESGPGLVKPSETLSLTCTVSGGSISSSSYYWGWIRQPPGKGLEWIGSLYYSGSTYYNPSLKSRVTISVDTSKNQFSLKLSSVTAADTAVYYCAAVQLERRGYFYMDVWGKGTTVTVSSGSTSGSGKPGSGEGSTKGEIVLTQSPATLSLSPGERATLSCRASQSVSSYFAWYQQKPGQAPRLLIYDASNRATGIPARFSGSGSGTDFTLTISSLEPEDFAVYYCQQRSNWPLTFGGGTKVEIK

SEQ ID NO: 1778 - protein, 250 aa, synthetic construct
  REGION 1..250: note = Synthetic
QVQLVESGGGVVQPGRSLRLSCAASGFTFSNYGMHWVRQAPGKGLEWMAVIWSDGHNKYYADSVKGRFTISRDNSKNTLYLQMNSLRAEDTAVYYCARAQLERRYFYYMDVWGKGTTVTVSSGSTSGSGKPGSGEGSTKGQTVVTQEPSFSVSPGGTVTLTCGLTSGSVSTSYYPNWYQQTPGQAPRTLIYSTNIRSSGVPDRFSGSILGNKAALTITGAQADDESDYYCVLYMGSGMFIFGSGTKVTVL

SEQ ID NO: 1779 - protein, 250 aa, synthetic construct
  REGION 1..250: note = Synthetic
QVQLVQSGAEVKKPGASVKVSCKASGYTFTSYDINWVRQATGQGLEWMGWMIPNSGDTGSAQKFQGRVTMTRNTSIGTAYMELSSLRSEDTAVYYCARGGYCNSTSCYYYYMDVWGKGTTVTVSSGSTSGSGKPGSGEGSTKGDIQMTQSPSSLSASVGDRVTITCRASQGISSWLAWYQQKPEKAPKSLIYAASSLQGGVPSRFSGSGSGTDFTLTISSLQPEDFATYYCQQYDSYPYTFGQGTKLEIK

SEQ ID NO: 1780 - protein, 251 aa, synthetic construct
  REGION 1..251: note = Synthetic
QVQLVQSGAEVKKPGASVKVSCKASGYTFTSYDINWVRQATGQGLEWMGWMNPNSGNTVYAQKFQGRVTMTRNTSISTAYMELSSLRSEDTAVYYCARGGDFWSGYHDYYYYMDVWGKGTTVTVSSGSTSGSGKPGSGEGSTKGDIQVTQSPTFLSASVGDRVTITCRASQGISSYLAWYQQKPGKAPKLLIYGASTLQSGVPSRFSGSGSGTEFTLTISSLQPEDFATYYCQQLNSYPWTFGQGTKVEIK

SEQ ID NO: 1781 - protein, 249 aa, synthetic construct
  REGION 1..249: note = Synthetic
QVQLQESGPGLVKPSETLSLTCTVSGGSISSYYWSWIRQPAGKGLEWIGRIYTSGSTNYNPSLKSRVTMSVDTSKNQFSLKLSSVTAADTAVYYCAREEYQLLPALYYYYYMDVWGKGTTVTVSSGSTSGSGKPGSGEGSTKGSYELTQPPSVSVSPGQTASITCSGDKLGDKYACWYQQKPGQSPVLVIYQDSKRPSGIPERFSGSNSGNTATLTISGTQAMDEADYYCQAWDSSTAVFGGGTQLTAL

SEQ ID NO: 1782 - protein, 250 aa, synthetic construct
  REGION 1..250: note = Synthetic
QVQLVESGGGVVQPGRSLRLSCAATGFTFSSYGMHWVRQAPGKGLEWMVVIWSDGHNKYYADSVKGRFTISRDNSKNTLYLQMNSLRAEDTAVYYCARAQLERRYFYYMDVWGKGTTVTVSSGSTSGSGKPGSGEGSTKGQTVVTQEPSFSVSPGGTVTLTCGLTSGSVSTSYYPNWYQQTPGQAPRTLIYSTNIRSSGVPDRFSGSILGNKAALTITGAQADDESDYYCVLYMGSGMFIFGSGTKVTVL

SEQ ID NO: 1783 - protein, 250 aa, synthetic construct
  REGION 1..250: note = Synthetic
QVQLVESGGGVVQPGRSLRLSCAASGFTFTSYDMHWVRQAPGKGLEWVTIIWFDGSNKYYADSVKGRFTISRDNSKNTLYLQMNSLSAEDTAVYYCARGDNWNDRYYYYYYMDVWGKGTTVTVSSGSTSGSGKPGSGEGSTKGEIVLTQSPDFQSVTPKEKVTITCRASQSIGSSLHWYQQKPDQSPMLLIKFASQSISGVPSRFSGSGSGTDFTLTINSLEAEDAAAYYCHQSSSLPWTFGQGTKVEIK

SEQ ID NO: 1784 - protein, 255 aa, synthetic construct
  REGION 1..255: note = Synthetic
QVQLVQSGAEVKKPGASVKVSCKASGYTFTSYGISWVRQAPGQGLEWMGWISAYNGHTDYTQKLQGRVTMTTDTSTTTAYMELRSLSSADTAVYYCVREVVLPTTDYYYFYMDVWGKGTTVTVSSGSTSGSGKPGSGEGSTKGDIVMTQPPLSSPVTLGQPASISCRSSQSLVHSDGNTYLSWLQQRPGQPPRLLIYKVSNRFSGVPDRFSGSGAGTDFTLKISRVEAEDVGVYYCTQATQFPHTFGQGTKLEIK

SEQ ID NO: 1785 - protein, 254 aa, synthetic construct
  REGION 1..254: note = Synthetic
QVQLVQSGAEVKKPGASVKVSCKVSGYTLTELSMHWVRQAPGKGLEWMGGFDPEDGETIYAQKFQGRVTMTEDTSTDTAYMELSSLRSEDTAVYYCATGRITMVRGVIIPYYYYYMDVWGKGTTVTVSSGSTSGSGKPGSGEGSTKGDIQMTQSPSSLSASVGDRVTITCRASQGISSWLAWYQQKPEKAPKSLIYAASSLQSGVPSRFSGSGSGTDFTLTISSLQPEDFATYYCQQYNSYPYTFGQGTKLEIK

SEQ ID NO: 1786 - protein, 252 aa, synthetic construct
  REGION 1..252: note = Synthetic
QVQLVQSGTEVKKPGASVKVSCKASGYTFTNYGIGWVRQAPGQGLEWMGWIIAYNGYTKYAQILQGRVTMTTDTSTNTAYMELRSLRSDDTAVYYCARQQLGGDYHYYMDVWGKGTTVTVSSGSTSGSGKPGSGEGSTKGDIVMTQTPLSLSVTPGQPASISCKSSKSLLHSDGKTYLYWYLQKPGQPPQLLIYEVSNRFSGVPDRFSGSGSGTDFTLKISRVEAEDVGVYYCMQSIQFPWTFGQGTKVEIK

SEQ ID NO: 1787 - protein, 252 aa, synthetic construct
  REGION 1..252: note = Synthetic
QVQLVQSGTEVKKPGASVKVSCKASGYTFTNYGIGWVRQAPGQGLEWMGWIIAYNGYTKYAQILQGRVTMTTDTSTNTAYMELRSLRSDDTAVYYCARQQLGGDYHYYMDVWGKGTTVTVSSGSTSGSGKPGSGEGSTKGDIVMTQTPLSLSVTPGQPASISCKSSKSLLHSDGKTYLYWYLQKPGQPPQLLIYEVSTRFSGVPDRFSGSGSGTDFTLKISRVEAEDVGVYYCMQSIQFPWTFGQGTKVEIK

SEQ ID NO: 1788 - protein, 250 aa, synthetic construct
  REGION 1..250: note = Synthetic
QVQLVQSGTEVKKPGASVKVSCKTSGYTFTSYDINWVRQATGQGLEWMGWMNPISGDTGSAQKFQGRVTMTRNTSIGTAYMELSSLRSEDTAVYYCARGGYCSSTSCYYYYMDVWGKGTTVTVSSGSTSGSGKPGSGEGSTKGDIQMTQSPSSLSASVGDRVTITCRASQGISNWLAWYQQKPEKAPKSLIYAASSLQGGVPSRFSGSGSGTDFTLTISSLQPEDFATYYCQQYDSYPYTFGQGTKLEIK

SEQ ID NO: 1789 - protein, 250 aa, synthetic construct
  REGION 1..250: note = Synthetic
QVQLVQSGAEVKKPGASVKVSCKASGYTFTSYDINWVRQATGQGLEWMGWMIPNSGDTGSAQKFQGRVTMTRNTSISTAYMELSSLRSEDTAVYYCARGGYCNSTSCYYYYMDVWGKGTTVTVSSGSTSGSGKPGSGEGSTKGDIQMTQSPSSLSASVGDRVTITCRASQGISSWLAWYQQKPEKAPKSLIYAASSLQGGVPSRFSGSGSGTDFTLTISSLQPEDFATYYCQQYDSYPYTFGQGTKLEIK

SEQ ID NO: 1790 - protein, 251 aa, synthetic construct
  REGION 1..251: note = Synthetic
EVQLLESGGGLVQPGGSLRLSCAASGFTFSSYVMNWVRQAPGKGLEWVSSVSGSGNNSFYADSVKGRFTISRDNSKNTLYLQMNSLRAEDTAVYYCASRSSSYLYYYYYMDVWGKGTTVTVSSGSTSGSGKPGSGEGSTKGEIVLTQSPGTLSLSPGERATLSCRASQSVSSSYLAWYQQKPGQAPRLLIYGASSRATGIPDRFSDSGSGTDFTLTISRLEPEDFAVYYCQHYGSSPPRITFGPGTKVDIK

SEQ ID NO: 1791 - DNA, 750 bp, synthetic construct
  misc_feature 1..750: note = Synthetic
  source 1..750: mol_type = other DNA
caggtgcagctggtggagtctgggggaggcgtggtccagcctgggaggtccctgagactttcctgtgcagcgtctggattcaccttcagcagtcatgacatgcactgggtccgccaggctccaggcaaggggctggactgggtggcagttatatggagtgatggaaataaaaaatactatgtagactccgcgaagggccggttcaccatctccagagacaattccaagaacacggtgtatctgcaaatgaacagcctgagagccgaggacacggctatatattactgtgcgagaggtgacaactggaacgacgaacactcctactattactacatggacgtctggggcaaggggaccacggtcaccgtctcctcaggcagcaccagcggcagcggcaagcccggctccggagagggcagcaccaagggcgaaattgtgctgactcagtctccagactttcagtctgtgactccaaaggagaaagtcaccatcacctgccgggccagtcagaccattggcagtagcttacactggtaccagcagaaaccagatcagtctccaaagctcctcatcaagcatgcttcccagtccttctcaggggtcccctcgaggttcagtggcagtggatctgggacagatttcaccctcaccgtcaatagcctggaagctgaagatgctgcaacgtattactgtcatcagagtagtagtttaccgtggacgttcggccaagggaccaaggtggaaatcaaa

SEQ ID NO: 1792 - DNA, 750 bp, synthetic construct
  misc_feature 1..750: note = Synthetic
  source 1..750: mol_type = other DNA
caggtgcagctggtggagtctgggggaggcgtggtccagcctgggaggtccctgagactttcctgtgcagcgtctggattcaccttcagtagtcatgacatgcactgggtccgccaggctccaggcaaggggctggactgggtggcagttatatggagtgatggaaataataaatactatgcagactccgcgaagggccggttcaccatctccagagacaattccaagaacacggtgtatctgcaaatgaacagcctgagagccgaggacacggctatatattactgtgcgagaggtgacaactggaacgacgaacactcctactattactacatggacgtctggggcaaggggaccacggtcaccgtctcctcaggcagcaccagcggcagcggcaagcccggctccggagagggcagcaccaagggcgaaattgtgctgactcagtctccagactttcagtctgtgactccaaaggagaaagtcaccatcacctgccgggccagtcagaccattggcagtagcttacactggtaccagcagaaaccagatcagtctccaaagctcctcatcaagcatgcttcccagtccttctcaggggtcccctcgaggttcagtggcagtggatctgggacagatttcaccctcaccgtcaatagcctggaagctgaagatgctgcaacgtattactgtcatcagagtagtagtttaccgtggacgttcggccaagggaccaaggtggaaatcaaa

SEQ ID NO: 1793 - DNA, 747 bp, synthetic construct
  misc_feature 1..747: note = Synthetic
  source 1..747: mol_type = other DNA
cagcttcagctggtgcagtctggagctgaggtgaagaagcctggggcctcagtgaaggtctcctgcaaggcttctggttacacctttaccaactatggtatcagctggttgcgacaggcccctggacaagggcttgagtggatgggatggatcagtggttacaatgataacacacactatgcacagaagttccagggcagagtcaccatgaccacagacacatccacgaccacagcctacatggaactgaggaacctgagatctgacgacacggccgtgtattactgtgcgagagatgggatagcagctcgtccagtctactactactacatggacgtctggggcaaagggaccacggtcaccgtctcctcaggcagcaccagcggcagcggcaagcccggctccggagagggcagcaccaagggcgacatacagatgacccagtctccatcctccctgtctgcatctgtaggagacagagtcaccatcacttgccgggcaagccagagcattagcaactatttaaattggtatcaccagaaaccagggaaagcccctaagctcctgatctatgctgcatccagtttggaaagtggggtcccatcaaggttcagtggcagtggatctgggacagatttcactctcaccatcagcagtctgcaacctgaagattttgcaacttactactgtcaacagagttacagtaacccgctcactttcggcggagggaccaaggtggagagcaaa

SEQ ID NO: 1794 - DNA, 750 bp, synthetic construct
  misc_feature 1..750: note = Synthetic
  source 1..750: mol_type = other DNA
caggtgcagctggtggagtctgggggaggcgtggtccagcctgggaggtccctgagactctcctgtgtagcgtctggattcaccttcagtagcaatgacatatactgggtccgccaggccccaggcaaggggctggagtgggtggcagttatatggtatgatggaagtaataaatactatgcagactccgtgaagggccgattcaccatctccagagacaattccaagaacacgctgtatctgcaaatgaacagcctgagagccgaggacacggctgtgtattactgtgcgagaggtgacaactggaacgacgaacaccactaccactactacatggacgtctggggcaaagggaccacggtcaccgtctcctcaggcagcaccagcggcagcggcaagcccggctccggagagggcagcaccaagggcgaaattgtgctgactcagtctccagactttcagtctgtgactccaaaggagaaagtcaccatcacctgccgggccagtcagagcattggtagtagcttacactggtaccagcagaaaccagatcagtctccaaagctcctcatcaagtttgcttcccagtccttctcaggggtcccctcgaggttcagtggcagtggatctgggacagatttcaccctcaccatccatagcctggaagctgaagatgctgcaacgtattactgtcatcagagtggtagtttaccgtggacgttcggccaagggaccaaggtggaaatcaaa

SEQ ID NO: 1795 - DNA, 730 bp, synthetic construct
  misc_feature 1..730: note = Synthetic
  source 1..730: mol_type = other DNA
caggtgcagttggtggagtctgggggaggcgtggtccagcctgggaggtccctgagactctcctgtgcagcctctggattcaccttcagtagctatggcatgcactgggtccgccaggctccaggcaaggggctggagtgggtggcagttatatcatatgatggaagtaataaatactatgcagactccgtgaagggccgattcaccatctccagggacaattccaagaccacgctgtatctgcaaatgaacagcctgagagctgaggacacggctgtgtattactgtgcgagagatcactactactactacatggacgtctggggcaaagggaccacggtcaccgtctcctcaggcagcaccagcggcagcggcaagcccggctccggagagggcagcaccaagggcggtgacccaggagccatcgttctcagtgtcccctggagggacagtcacactcacttgtggcttgagctctggctcagtctctactagttactaccccagctggtaccagcagaccccaggccaggctccacgcacgctcatctacagcacaaacattcgctcttctggggtccctgatcgcttctctggctccatccttgggaacaaagctgccctcaccatcacgggggcccaggcagatgatgaatctgattattactgtgtgctgtatatgggtagtgacattgtggtattcggcggagggaccaagctgaccgtccta

SEQ ID NO: 1796 - DNA, 744 bp, synthetic construct
  misc_feature 1..744: note = Synthetic
  source 1..744: mol_type = other DNA
caactgcagctgcaggagtcgggcccaggactggtgaagccttcggagaccctgtccctcacctgcactgtctctggtggctccatcagcagtagtagttactactggggctggatccgccagcccccagggaaggggctggagtggattgggagtctctattatagtgggagcacctactacaacccgtccctcaagagtcgagtcaccatatccgttgacacgtccaagaaccagttctccctgaagctgagctctgtgaccgccgcagacacggctgtgtattactgtgcggccgtacaactggaacgacgtgggtacttctacatggacgtctggggcaaagggaccacggtcaccgtctcctcaggcagcaccagcggcagcggcaagcccggctccggagagggcagcaccaagggcgaaattgtgttgacacagtctccagccaccctgtctttgtctccaggggaaagagccaccctctcctgcagggccagtcagagtgttagcagctactttgcctggtaccaacagaaacctggccaggctcccaggctcctcatctatgatgcatccaacagggccactggcatcccagccaggttcagtggcagtgggtctgggacagacttcactctcaccatcagcagcctggagcctgaagattttgcagtttattactgtcagcagcgtagcaactggcctctcactttcggcggagggaccaaggtggagatcaaa

SEQ ID NO: 1797 - DNA, 750 bp, synthetic construct
  misc_feature 1..750: note = Synthetic
  source 1..750: mol_type = other DNA
caggtgcagctggtggagtctgggggaggcgtggtccagcctgggaggtccctgagactctcctgtgcagcatctggattcaccttcagtaactatggcatgcactgggtccgccaggctccaggcaaggggctggagtggatggcagttatatggtctgatggacataataaatactatgcagactccgtgaagggccgattcaccatctccagagacaattccaagaacacgctgtatctgcaaatgaacagcctgagagccgaggacacggctgtgtattactgtgcgagggcacaattggaacgacggtacttctactacatggacgtctggggcaaagggaccacggtcaccgtctcctcaggcagcaccagcggcagcggcaagcccggctccggagagggcagcaccaagggccagactgtagtgacccaggaaccatcgttctcagtgtcccctggagggacagtcacactcacttgtggcttgacctctggctcagtctctactagttactaccccaactggtaccagcagaccccaggccaggctccacgcacgctcatctatagtacaaatattcgctcttctggggtccctgatcgcttctctggctccatccttgggaacaaagctgccctcaccatcacgggggcccaggcagatgatgaatctgattattactgtgtgctgtatatgggtagtggcatgtttattttcggcagtggaaccaaggtcactgtccta

SEQ ID NO: 1798 - DNA, 750 bp, synthetic construct
  misc_feature 1..750: note = Synthetic
  source 1..750: mol_type = other DNA
caggtgcagctggtgcagtctggggctgaggtgaagaagcctggggcctcagtgaaggtctcctgcaaggcttctggatacaccttcaccagttatgatatcaactgggtgcgacaggccactggacaagggcttgagtggatgggatggatgatccctaacagtggtgacacaggctctgcacagaagttccagggcagagtcaccatgaccaggaacacctccataggcacagcctacatggagctgagcagcctgagatctgaggacacggccgtttattactgtgcgagaggcggatattgtaatagtaccagttgctactactactacatggacgtctggggcaaagggaccacggtcaccgtctcctcaggcagcaccagcggcagcggcaagcccggctccggagagggcagcaccaagggcgacatccagatgacccagtctccatcctcactgtctgcatctgtaggagacagagtcaccatcacttgtcgggcgagtcagggtattagcagctggttagcctggtatcagcagaaaccagagaaagcccctaagtccctgatctatgctgcatccagtttacagggtggggtcccatcaaggttcagcggcagtggatctgggacagatttcactctcaccatcagcagcctgcagcctgaagattttgcaacttattactgccaacagtatgatagttacccgtacacttttggccaggggaccaagctggagatcaaa

SEQ ID NO: 1799 - DNA, 753 bp, synthetic construct
  misc_feature 1..753: note = Synthetic
  source 1..753: mol_type = other DNA
caggtgcagctggtgcagtctggggctgaggtgaagaagcctggggcctcagtgaaggtctcctgcaaggcttctggatacaccttcaccagttatgatatcaactgggtgcgacaggccactggacaagggcttgagtggatgggatggatgaaccctaatagtggtaacacagtctatgcacagaagttccagggcagagtcaccatgaccaggaacacctccataagcacagcctacatggagctgagcagcctgagatctgaggacacggccgtgtattactgtgcgagaggaggcgatttttggagtggttaccatgactactactactacatggacgtctggggcaaagggaccacggtcaccgtctcctcaggcagcaccagcggcagcggcaagcccggctccggagagggcagcaccaagggcgacatccaggtgacccagtctccaaccttcctgtctgcatctgtaggagacagagtcaccatcacttgccgggccagtcagggcattagcagttatttagcctggtatcagcaaaaaccagggaaagcccctaagctcctgatctatggtgcatccactttgcaaagtggggtcccatcaaggttcagcggcagtggatctgggacagaattcactctcacaatcagcagcctgcagcctgaagattttgcaacttattactgtcaacagcttaatagttacccgtggacgttcggccaagggaccaaggtggaaatcaaa

SEQ ID NO: 1800 - DNA, 747 bp, synthetic construct
  misc_feature 1..747: note = Synthetic
  source 1..747: mol_type = other DNA
caggtgcagctgcaggagtcgggcccaggactggtgaagccttcggagaccctgtccctcacctgcactgtctctggtggctccatcagtagttactactggagctggatccggcagcccgccgggaagggactggagtggattgggcgtatctataccagtgggagcaccaactacaacccctccctcaagagtcgagtcaccatgtcagtagacacgtccaagaaccagttctccctgaagctgagctctgtgaccgccgcggacacggccgtgtattactgtgcgagagaggagtaccagctgctaccggccctctactactactactacatggacgtctggggcaaagggaccacggtcaccgtctcctcaggcagcaccagcggcagcggcaagcccggctccggagagggcagcaccaagggctcctatgagctgactcagccaccctcagtgtccgtgtccccaggacagacagccagcatcacctgctctggagataaattgggggataaatatgcttgctggtatcagcagaagccaggccagtcccctgtgctggtcatctatcaagatagcaagcggccctcagggatccctgagcgattctctggctccaactctgggaacacagccactctgaccatcagcgggacccaggctatggatgaggctgactattactgtcaggcgtgggacagcagcactgctgtgttcggaggaggcacccagctgaccgccctc

SEQ ID NO: 1801 - DNA, 750 bp, synthetic construct
  misc_feature 1..750: note = Synthetic
  source 1..750: mol_type = other DNA
caggtgcagctggtggagtctgggggaggcgtggtccagcctgggaggtccctgagactctcctgtgcagcaactggattcaccttcagtagctatggcatgcactgggtccgccaggctccaggcaaggggctggagtggatggtagttatatggtctgatggacataataaatactatgcagactccgtgaagggccgattcaccatctccagagacaattccaagaacacgctgtatctgcaaatgaacagcctgagagccgaggacacggctgtgtattactgtgcgagggcacaactggaacgacggtacttctactacatggacgtctggggcaaagggaccacggtcaccgtctcctcaggcagcaccagcggcagcggcaagcccggctccggagagggcagcaccaagggccagactgtagtgacccaggaaccatcgttctcagtgtcccctggagggacagtcacactcacttgtggcttgacctctggctcagtctctactagttactaccccaactggtaccagcagaccccaggccaggctccacgcacgctcatctacagcacaaatattcgctcttctggggtccctgatcgcttctctggctccatccttgggaacaaagctgccctcaccatcacgggggcccaggcagatgatgaatctgattattactgtgtgctgtatatgggtagtggcatgtttattttcggcagtggaaccaaggtcactgtccta

SEQ ID NO: 1802 - DNA, 750 bp, synthetic construct
  misc_feature 1..750: note = Synthetic
  source 1..750: mol_type = other DNA
caggtgcagctggtggagtctgggggaggcgtggtccagcctgggaggtccctgagactctcctgtgcagcgtctggattcaccttcactagttatgacatgcactgggtccgccaggctccaggcaaggggctggagtgggtgacaattatatggtttgatggaagtaataaatactatgcagactccgtgaagggccgattcaccatctccagagacaattccaagaacacgctgtatctgcaaatgaacagcctgagcgccgaggacacggctgtgtattactgtgcgagaggagacaactggaacgaccggtactactactactactacatggacgtctggggcaaagggaccacggtcaccgtctcctcaggcagcaccagcggcagcggcaagcccggctccggagagggcagcaccaagggcgaaattgtgctgactcagtctccagactttcagtctgtgactccaaaggagaaagtcaccatcacctgccgggccagtcagagcattggtagtagcttacactggtaccagcagaaaccagatcagtctccaatgctcctcatcaagtttgcttcccagtccatctcaggggtcccctcgaggttcagtggcagtggatctgggacagatttcaccctcaccatcaatagcctggaagctgaagatgctgcagcgtattactgtcatcagagtagtagtttaccgtggacgttcggccaagggaccaaggtggaaatcaaa

SEQ ID NO: 1803 - DNA, 765 bp, synthetic construct
  misc_feature 1..765: note = Synthetic
  source 1..765: mol_type = other DNA
caggttcagctggtgcagtctggagctgaggtgaagaagcctggggcctcagtgaaggtctcctgcaaggcttctggttacacctttaccagctatggtatcagctgggtgcgacaggcccctggacaagggcttgagtggatggggtggatcagcgcttacaatggtcacacagactatacacagaaactccagggcagagtcaccatgaccacagacacatccacgaccacagcctacatggaactgaggagcctgagctctgccgacacggccgtgtattactgtgtgagagaagtggtacttcccaccacggactactactacttttacatggacgtctggggcaaagggaccacggtcaccgtctcctcaggcagcaccagcggcagcggcaagcccggctccggagagggcagcaccaagggcgatattgtgatgacccagcctccactctcctcgcctgtcacccttggacagccggcctccatctcctgcaggtctagtcaaagcctcgtacacagtgatggaaacacctacttgagttggcttcagcagaggccaggccagcctccaagactcctaatttataaggtttctaaccggttctctggggtcccagacagattcagtggcagtggggcagggacagatttcacactgaaaatcagcagggtggaagctgaggatgtcggggtttattactgcacgcaagctacacaatttcctcacacttttggccaggggaccaagctggagatcaaa

SEQ ID NO: 1804 - DNA, 762 bp, synthetic construct
  misc_feature 1..762: note = Synthetic
  source 1..762: mol_type = other DNA
caggtccagctggtacagtctggggctgaggtgaagaagcctggggcctcagtgaaggtctcctgcaaggtttccggatacaccctcactgaattatccatgcactgggtgcgacaggctcctggaaaagggcttgagtggatgggaggttttgatcctgaagatggtgaaacaatctacgcacagaagttccagggcagagtcaccatgaccgaggacacatctacagacacagcctacatggagctgagcagcctgagatctgaggacacggccgtgtattactgtgcaacaggacgtattactatggttcggggagttattatcccctactactactactacatggacgtctggggcaaagggaccacggtcaccgtctcctcaggcagcaccagcggcagcggcaagcccggctccggagagggcagcaccaagggcgacatccagatgacccagtctccatcctcactgtctgcatctgtaggagacagagtcaccatcacttgtcgggcgagtcagggtattagcagctggttagcctggtatcagcagaaaccagagaaagcccctaagtccctgatctatgctgcatccagtttgcaaagtggggtcccatcaaggttcagcggcagtggatctgggacagatttcactctcaccatcagcagcctgcagcctgaagattttgcaacttattactgccaacagtataatagttacccgtacacttttggccaggggaccaagctggagatcaaa

SEQ ID NO: 1805 - DNA, 756 bp, synthetic construct
  misc_feature 1..756: note = Synthetic
  source 1..756: mol_type = other DNA
caggttcagctggtgcagtctggaactgaggtgaagaagcctggggcctcagtgaaggtctcctgcaaggcttctggttacacctttaccaactatggtatcggctgggtgcgacaggcccctggacaagggcttgagtggatgggatggatcatcgcttacaatggttacacaaagtatgcacagattctccagggcagagtcaccatgaccacagacacatccacgaacacagcttatatggaactgaggagcctgagatctgacgacacggccgtgtattactgtgcgagacagcagctcgggggggactaccactactacatggacgtctggggcaaagggaccacggtcaccgtctcctcaggcagcaccagcggcagcggcaagcccggctccggagagggcagcaccaagggcgatattgtgatgacccagactccactctctctgtccgtcacccctggacagccggcctccatctcctgcaagtctagtaagagcctcctgcatagtgatggaaagacctatttgtattggtacctgcagaagccaggccagcctccacagctcctgatctatgaagtttccaaccggttctctggagtgccagataggttcagtggcagcgggtcagggacagatttcacactgaaaatcagccgggtggaggctgaggatgttggggtttattactgcatgcaaagtatacaatttccgtggacgttcggccaagggaccaaggtggaaatcaag

SEQ ID NO: 1806 - DNA, 756 bp, synthetic construct
  misc_feature 1..756: note = Synthetic
  source 1..756: mol_type = other DNA
caggttcagctggtgcagtctggaactgaggtgaagaagcctggggcctcagtgaaggtctcctgcaaggcttctggttacacctttaccaactatggtatcggctgggtgcgacaggcccctggacaagggcttgagtggatgggatggatcatcgcttacaatggttacacaaagtatgcacagattctccagggcagagtcaccatgaccacggacacatccacgaacacagcctatatggaactgaggagcctgagatctgacgacacggccgtgtattactgtgcgcgacagcagctcgggggggactaccactactacatggacgtctggggcaaagggaccacggtcaccgtctcttcaggcagcaccagcggcagcggcaagcccggctccggagagggcagcaccaagggcgatattgtgatgacccagactccactctctctgtccgtcacccctggacagccggcctccatctcctgcaagtctagtaagagcctcctgcatagtgatggaaagacctatttgtattggtacctgcagaagccaggccagcctccacagctcctgatctatgaagtttccacccggttctctggagtgccagataggttcagtggcagcgggtcagggacagatttcacactgaaaatcagccgggtggaggctgaggatgttggggtttattactgcatgcaaagtatacagtttccgtggacgttcggccaagggaccaaggtggaaatcaaa

SEQ ID NO: 1807 - DNA, 750 bp, synthetic construct
  misc_feature 1..750: note = Synthetic
  source 1..750: mol_type = other DNA
caggtgcagctggtgcagtctgggactgaggtgaagaagcctggggcctcagtgaaggtctcctgtaagacttctggatacaccttcaccagttatgatatcaactgggtgcgacaggccactggacaagggcttgagtggatgggatggatgaaccctatcagtggtgacacaggctctgcacagaagttccagggcagagtcaccatgaccaggaacacctccataggcacagcctacatggagctgagcagcctgagatctgaggacacggccgtttattactgtgcgagaggcggatattgtagtagtaccagctgctactactactacatggacgtctggggcaaagggaccacggtcaccgtctcctcaggcagcaccagcggcagcggcaagcccggctccggagagggcagcaccaagggcgacatccagatgacccagtctccatcctcactgtctgcctctgtaggagacagagtcaccatcacttgtcgggcgagtcagggtattagcaactggttagcctggtatcagcagaaaccagagaaagcccctaagtccctgatctatgctgcatccagtttgcaaggtggggtcccatcaagattcagcggcagtggatctgggacagatttcactctcaccatcagcagcctgcagcctgaagattttgcaacttattactgccaacagtatgatagttacccgtacacttttggccaggggaccaagctggagatcaaa

SEQ ID NO: 1808 - DNA, 750 bp, synthetic construct
  misc_feature 1..750: note = Synthetic
  source 1..750: mol_type = other DNA
caggtgcagctggtgcagtctggggctgaggtgaagaagcctggggcctcagtgaaggtctcctgcaaggcttctggatacaccttcaccagttatgatatcaactgggtgcgacaggccactggacaagggcttgagtggatgggatggatgatccctaacagtggtgacacaggctctgcacagaagttccagggcagagtcaccatgaccaggaacacctccataagcacagcctacatggagctgagcagcctgagatctgaggacacggccgtttattactgtgcgagaggcggatattgtaatagtaccagttgctactactactacatggacgtctggggcaaagggaccacggtcaccgtctcctcaggcagcaccagcggcagcggcaagcccggctccggagagggcagcaccaagggcgacatccagatgacccagtctccatcctcactgtctgcatctgtaggagacagagtcaccatcacttgtcgggcgagtcagggtattagcagctggttagcctggtatcagcagaaaccagagaaagcccctaagtccctgatctatgctgcatccagtttacaaggtggggtcccatcaaggttcagcggcagtggatctgggacagatttcactctcaccatcagcagcctgcagcctgaagattttgcaacttattactgccaacagtatgatagttacccgtacacttttggccaggggaccaagctggagatcaaa

SEQ ID NO: 1809 - DNA, 753 bp, synthetic construct
  misc_feature 1..753: note = Synthetic
  source 1..753: mol_type = other DNA
gaggtgcagttgttggagtctgggggaggcttggtacaacctggggggtccctgagactctcctgtgcagcctctggattcacctttagcagctatgtcatgaactgggtccgccaggctccagggaaggggctggaatgggtctcatctgttagtggtagtggtaataactcattctacgcagactccgtgaagggccggttcaccatctccagagacaattccaagaacacgctgtatctgcaaatgaacagcctgagagccgaggacacggccgtatattactgtgcgagtcgtagttccagttatctctactactactactacatggacgtctggggcaaagggaccaccgtcaccgtctcctcaggcagcaccagcggcagcggcaagcccggctccggagagggcagcaccaagggcgaaattgtgttgacgcagtctccaggcaccctgtctttgtctccaggggaaagagccaccctctcctgcagggccagtcagagtgttagcagcagctacttagcctggtaccagcagaaacctggccaggctcccaggctcctcatctatggtgcatccagcagggccactggcatcccagacaggttcagtgacagtgggtctgggacagacttcactctcaccatcagcagactggagcctgaagattttgcagtgtattactgtcagcactatggtagctcacctccgaggatcactttcggccctgggaccaaagtggatatcaaa

SEQ ID NO: 1810 - DNA, 750 bp, synthetic construct
  misc_feature 1..750: note = Synthetic
  source 1..750: mol_type = other DNA
caagtgcagctggtggagagcggcggcggagtggtgcaacctggaagaagcctgcggctgagctgcgctgctagcggcttcaccttcagcagccacgacatgcactgggtgcggcaggcccctggcaagggcctggactgggtcgccgtgatctggagcgacggcaacaagaagtactacgtggacagcgccaagggcagattcaccatcagccgcgacaatagcaagaacaccgtgtacctgcagatgaacagcctgagagccgaggacaccgccatctactattgcgccagaggcgataattggaacgacgagcacagctactattactacatggacgtgtggggcaaaggcacaaccgtgaccgtgtcctccggcagcaccagcggcagcggcaagcccggctccggagagggcagcaccaagggcgagatcgtgctgacccagagccccgacttccagtctgtgacacctaaggaaaaggttacaattacctgtagagcttcccagaccatcggctcttctctgcactggtaccagcagaaacctgatcagtctccaaagctgctgatcaagcacgccagccagagcttctctggcgtccccagccggttttctggcagcggcagcggaacagattttacactgacagtgaactcactggaagccgaggatgccgccacctactactgccatcagagctccagcctcccttggaccttcggccagggcacgaaggtggaaatcaaa

SEQ ID NO: 1811 - DNA, 750 bp, synthetic construct
  misc_feature 1..750: note = Synthetic
  source 1..750: mol_type = other DNA
caagtgcagctggtggaaagcggcggcggagtggtgcaacctggcagatctctgcggctgtcttgtgccgcctctggatttacattcagctctcatgatatgcactgggtgcggcaggcccctggcaaaggcctggactgggtcgccgtgatctggagcgacggcaacaacaagtactacgccgacagcgccaagggaagattcaccatcagccgggacaattctaaaaacaccgtgtacctgcagatgaacagcctgagagctgaggacaccgccatctactattgcgccagaggagataattggaacgacgagcacagctactactactatatggacgtgtggggcaagggcacaacagtgaccgtgtcctccggcagcaccagcggcagcggcaagcccggctccggagagggcagcaccaagggcgagatcgtgctgacacagtccccagattttcagagcgtgacccccaaggaaaaggtgacaatcacctgcagagccagccagaccatcggcagcagcctgcactggtaccagcagaaacccgatcagtctcctaagctgctgatcaagcacgccagccagagcttcagcggcgttcccagcaggttcagcggaagcggcagcggcaccgacttcaccctgaccgtgaactctctcgaggccgaggacgccgctacatactactgccaccagagcagctccctgccttggaccttcggccagggcaccaaggtcgaaattaag

SEQ ID NO: 1812 - DNA, 747 bp, synthetic construct
  misc_feature 1..747: note = Synthetic
  source 1..747: mol_type = other DNA
caactgcagctggtgcagagcggagccgaggtgaagaagcctggcgctagcgttaaggtgtcctgcaaggcctccggctacacctttaccaactacggcatctcctggctgcgccaggccccaggccagggcctggagtggatgggctggatctccggatacaacgacaacacccactacgcccagaaattccagggtagagtgactatgaccaccgataccagcacaacaacagcctacatggaactgagaaacctgcggagcgacgacaccgccgtgtactactgcgcccgggacggcattgccgctagacctgtgtactactattacatggacgtgtggggcaagggcaccaccgtgacagtgtcttctggcagcaccagcggcagcggcaagcccggctccggagagggcagcaccaagggcgatatccagatgacccagagccccagcagcctgagcgccagcgtgggcgaccgggtcacaatcacctgcagagccagccagagcatcagcaattacctgaactggtaccaccagaagcccggcaaagcccctaagctgctgatctacgctgcttctagcctcgagagcggcgtgcctagcagattcagcggcagcggcagcggaacagatttcaccctgacaatcagctctctgcaacctgaggacttcgccacatactattgtcagcagtcctacagcaatcctctgaccttcggcggcggcacaaaggtggaatctaag

SEQ ID NO: 1813 - DNA, 744 bp, synthetic construct
  misc_feature 1..744: note = Synthetic
  source 1..744: mol_type = other DNA
caagtgcagctggtggagagcgggggaggtgtcgtgcagcctggaagaagcctcagactgtcttgtgtggccagcggctttaccttcagctctaatgacatctactgggtgcggcaggcccctggcaagggcctggaatgggtcgctgtgatctggtacgacggcagcaacaaatactacgccgattctgtgaagggcagattcaccatcagcagagataattctaagaacaccctgtacctgcagatgaacagcctgagagccgaggataccgccgtgtactattgcgccaggggcgacaactggaacgacgagcaccattaccactactacatggacgtgtggggcaaaggcaccaccgtgaccgtgggcagcaccagcggcagcggcaagcccggctccggagagggcagcaccaagggcgagattgttctgacccagagccctgatttccagagcgtgacccccaaggaaaaggtgacaatcacctgccgggccagccaaagcatcggctccagcctgcactggtatcagcagaagcccgaccagtccccaaagctgctgatcaaattcgcctctcagtcattcagcggcgtgccttcccggttcagcggaagcggcagcggcacagactttaccctgacaatccacagcctggaagccgaggacgccgctacatactactgccaccagagcggcagcctgccctggacattcggccagggcacgaaggtggagatcaag

SEQ ID NO: 1814 - DNA, 738 bp, synthetic construct
  misc_feature 1..738: note = Synthetic
  source 1..738: mol_type = other DNA
caagtgcagctggtggaaagcggcggcggtgttgtgcaacctggcagaagcctgcggctgtcatgcgccgccagcggcttcaccttcagctcttacggcatgcactgggtgcggcaggcccctggaaagggactggaatgggtcgccgtgatcagctacgacggctccaacaagtactacgccgacagcgtgaaaggcagattcaccatctctagggacaacagcaagaccaccctctacctgcagatgaacagcctgagagccgaggacaccgccgtgtactattgtgccagagatcactactactactacatggacgtgtggggcaagggcaccaccgtgaccgtgtcttctggcagcaccagcggcagcggcaagcccggctccggagagggcagcaccaagggccagaccgtggtgactcaggagcccagcttcagcgtcagccccggcggaacagtgaccctgacatgcggcctgagcagcggcagcgtgtccaccagctactatcctagctggtaccagcagacaccaggccaggctcctagaaccctgatctacagcaccaacatccggagcagcggcgtgcctgatagatttagcggctctatcctgggaaataaagccgctctgaccattacaggcgcccaggctgatgacgagagcgactactactgcgtgctgtacatgggctctgatatcgtggttttcggcggcggcacaaagctgacagtgctg

SEQ ID NO: 1815 - DNA, 744 bp, synthetic construct
  misc_feature 1..744: note = Synthetic
  source 1..744: mol_type = other DNA
caactgcagctgcaggagagcggccctggactggtgaagcccagcgagacactgagcctgacatgcaccgtgtccggaggctctatcagcagcagcagctactactggggatggattagacagccccccggcaagggcctggaatggatcggcagcctgtactacagcggcagcacctactacaaccccagcctgaagtctagagtgaccatcagcgtggacaccagcaagaaccagttcagcctgaaactgagctctgtcacagccgccgataccgccgtgtactactgcgccgctgtgcagctggaaaggcggggctacttctacatggacgtgtggggcaaaggcaccaccgtgacagtgtctagcggcagcaccagcggcagcggcaagcccggctccggagagggcagcaccaagggcgagatcgtgctgacacagtcccctgctaccctgagcctgagccctggcgagcgggccaccctgagctgcagagccagccagagcgtgtccagctactttgcctggtatcagcagaagcctggccaggccccacggctgctgatctacgacgcctctaatagagccacaggcatcccagctagattcagcggctccggctccggaaccgatttcaccctgaccatctctagcctcgagcctgaggacttcgccgtttactattgtcagcaaagaagcaactggcctctgacatttggcggaggcacaaaggtggaaatcaag

SEQ ID NO: 1816 - DNA, 750 bp, synthetic construct
  misc_feature 1..750: note = Synthetic
  source 1..750: mol_type = other DNA
caagtgcaactggtggaaagcggcggcggcgttgtgcagcctggcagaagcctgcggctgtcatgcgccgccagcggttttaccttctctaattacggcatgcactgggtgcggcaggctcccggcaaaggcctggaatggatggccgtgatctggtccgatggccacaacaagtactacgccgatagcgtgaaaggcagattcaccattagcagagataattctaagaacaccctgtacctgcagatgaacagcctgcgcgccgaggacaccgccgtgtactattgtgccagagcccagctggagcggagatacttctactatatggacgtgtggggcaagggcaccaccgtgacagtgtctagcggcagcaccagcggcagcggcaagcccggctccggagagggcagcaccaagggccagaccgtcgtgacccaggagcctagcttcagcgtgtccccaggcggaaccgtcacactgacatgcggcctcacaagcggcagcgtgtccaccagctactaccccaactggtaccagcagacacctggacaggcccctagaaccctgatctacagcaccaacatccggagcagcggagtgcccgacagattttctggcagcatcctgggcaacaaggccgctctgaccatcaccggcgctcaggccgacgacgagagcgactactactgcgtgctgtacatgggcagcggcatgttcatcttcggcagcggcacaaaggtgacagtgctg

SEQ ID NO: 1817 - DNA, 750 bp, synthetic construct
  misc_feature 1..750: note = Synthetic
  source 1..750: mol_type = other DNA
caggttcagctggtgcagagcggagccgaggtgaaaaagcccggcgcaagcgtgaaggtgtcttgcaaggcctccggatataccttcaccagctacgatatcaactgggtgcggcaggccacaggccagggtctcgaatggatgggctggatgatccccaattctggcgacacaggcagcgcccaaaagttccagggcagagtgacaatgaccagaaacaccagcatcggaacagcctacatggaactgagctccctgagaagcgaggataccgccgtgtactattgtgccagaggcggctactgcaacagcacctcctgctactactactacatggacgtgtggggcaaaggcacaaccgtcaccgtgagctctggcagcaccagcggcagcggcaagcccggctccggagagggcagcaccaagggcgacatccagatgacacagagccctagcagcctgtctgcttccgtgggcgatagagtgacaatcacctgccgggcctcccagggcatcagctcctggctggcctggtaccagcagaagcctgagaaggcccctaagagcctgatctacgccgcttctagcctgcagggaggcgtgccaagtcggttcagcggcagcggcagcggcacagacttcaccctgaccatttcttctctgcaacctgaggacttcgccacctactactgtcagcaatacgacagctacccctacacctttggccagggcaccaagctggaaatcaag

SEQ ID NO: 1818 - DNA, 753 bp, synthetic construct
  misc_feature 1..753: note = Synthetic
  source 1..753: mol_type = other DNA
caggttcaactggtgcagagcggcgccgaggtgaagaagcctggcgccagcgtgaaagtgtcctgcaaggccagcggatacacgtttaccagctacgacatcaactgggtcagacaggccaccggccagggcctggaatggatgggatggatgaaccccaacagcggcaacaccgtgtacgcccagaaattccagggcagagtgaccatgacacggaacaccagcatcagcaccgcctacatggaactgagctctctgagatccgaggatacagccgtgtactactgcgccagaggcggagatttctggagcggctaccacgactactactactacatggacgtgtggggcaagggcaccaccgtgaccgtgtcttctggcagcaccagcggcagcggcaagcccggctccggagagggcagcaccaagggcgatatccaggtcacacagagccctacctttctgagcgcttctgtgggcgaccgggtgaccatcacatgccgggccagccagggtattagcagctacctggcttggtaccagcagaagcccggcaaagcccctaagctgctgatctacggcgcttctaccctgcagtccggcgtgcccagcagattcagcggcagcggaagcggaacagagttcaccctgacaatctccagcctccaacctgaggacttcgccacatactattgtcagcaactgaatagctatccttggacattcggccagggcaccaaggtggaaatcaag

SEQ ID NO: 1819 - DNA, 747 bp, synthetic construct
  misc_feature 1..747: note = Synthetic
  source 1..747: mol_type = other DNA
caagtgcagctgcaggagagcggtcctggcctggttaagcctagcgagacactgtctctgacttgcaccgtgtccggcggatctatcagcagctactactggtcctggatcagacagcccgccggcaaaggcctggaatggattggaagaatctacaccagcggcagcaccaactacaaccccagcctgaagtccagagtgacaatgagcgtggacacatctaagaaccagtttagcctgaaactgagcagcgtgaccgccgccgatacagctgtgtactattgtgcccgggaagaataccagctgctgcctgccctgtactactattactacatggacgtgtggggcaagggcaccaccgtgaccgtgtccagcggcagcaccagcggcagcggcaagcccggctccggagagggcagcaccaagggcagctacgagctgacccagcctccatctgtctccgtgtctccaggccaaacagccagcatcacctgcagcggagataagctgggcgacaagtacgcctgctggtaccagcagaagcccggccagagccctgtgctggtgatctaccaggacagcaagcggcctagcggcatccccgagagattcagcggctccaacagcggcaataccgctacactgacaatcagcggcacacaggccatggatgaggccgactactactgccaggcctgggacagctctaccgccgtgttcggcggcggaacccagctcaccgccctg

SEQ ID NO: 1820 - DNA, 750 bp, synthetic construct
  misc_feature 1..750: note = Synthetic
  source 1..750: mol_type = other DNA
caagtgcagctggtggaatctggcggcggcgtggtgcagcctggtaggagcctgcggctgtcatgcgccgccacaggcttcaccttcagcagctacggcatgcactgggtcagacaggcccctggcaagggactggagtggatggtggtgatctggtccgatggccacaataaatactacgccgacagcgtgaagggcagatttaccattagccgggacaacagcaagaacaccctgtacctgcagatgaacagcctgagagctgaagataccgccgtgtactactgcgccagagcccagctcgagcggagatacttctactatatggacgtgtggggcaaaggcacaacagtgaccgtttcttctggcagcaccagcggcagcggcaagcccggctccggagagggcagcaccaagggccagaccgtggtcacccaggagcctagctttagcgtgtccccaggaggtacagtgaccctgacatgcggcctgactagcggatctgtgtccaccagctactaccccaactggtaccagcagacacctggccaggcccctagaaccctgatctacagcaccaatatccggagctccggcgtgcccgacagattcagcggaagcatcctgggcaacaaggccgctctgaccatcaccggcgcccaagctgatgacgagagcgactactattgtgtgctgtacatgggcagcggcatgttcatcttcggctctggcaccaaggtgaccgtgctg

SEQ ID NO: 1821 - DNA, 750 bp, synthetic construct
  misc_feature 1..750: note = Synthetic
  source 1..750: mol_type = other DNA
caagtgcagctggtcgagagcggaggcggcgttgtgcaacctggaaggagcctgcggctgagctgcgccgcttctggcttcacctttactagctacgacatgcactgggtgcggcaggcccctggcaagggcctggaatgggtcaccatcatctggttcgacggcagcaacaagtactacgccgatagcgtgaagggcagattcaccatcagcagagataatagcaagaataccctgtacctgcagatgaactctctctccgccgaggacaccgccgtgtactactgcgccagaggcgacaactggaacgacagatactattattactactacatggacgtgtggggcaaaggcaccaccgtgacagtgtccagcggcagcaccagcggcagcggcaagcccggctccggagagggcagcaccaagggcgagatcgtgctgacccagtctccagatttccagtccgtgacccctaaggaaaaggtgaccatcacatgcagagccagccagtccatcggctctagcctgcactggtaccagcagaagcccgaccagtctcctatgctgctgatcaaattcgcctctcagagcatcagcggcgtgcccagccggttcagcggcagcggctccggcaccgacttcacactgacaatcaacagtctggaggccgaggatgccgctgcttactactgtcaccagagcagcagcctgccttggacatttggccagggcaccaaggtggaaattaag

SEQ ID NO: 1822 - DNA, 765 bp, synthetic construct
  misc_feature 1..765: note = Synthetic
  source 1..765: mol_type = other DNA
caagtgcagctggtccagagcggcgctgaggtgaagaaacctggcgcctctgtgaaagtgtcctgcaaggccagcggctacacctttaccagctacggcattagctgggtgcggcaggcccctggccagggtcttgagtggatgggctggatcagcgcctacaacggccacacagattatacacaaaagctgcagggcagagtgaccatgacaaccgataccagcaccaccacagcctacatggaactgagaagcctgagctctgccgacaccgccgtgtactactgcgtgcgggaagtggtgctgcctaccacagactactactacttctacatggacgtgtggggcaagggcaccacagtgacagtcagctccggcagcaccagcggcagcggcaagcccggctccggagagggcagcaccaagggcgacatcgtgatgacccagcctcctctgagcagccctgtgacactgggccagccagctagcatcagctgtagatcttctcagtccctggtgcacagcgacggcaatacctacctgtcttggctgcagcagcggcctggccagccccccagactgctgatctacaaggtgtccaaccgcttcagcggcgtgccagacagattcagcggctctggcgccggcaccgacttcaccctgaagatcagcagagtcgaggccgaagatgtgggagtttactattgcacccaagctacacagttcccccacacctttggccagggcaccaagctcgagatcaag

SEQ ID NO: 1823 - DNA, 762 bp, synthetic construct
  misc_feature 1..762: note = Synthetic
  source 1..762: mol_type = other DNA
caagttcagctggtgcagagcggagccgaggtgaaaaagcccggcgcttctgtgaaggtgtcctgcaaggtgtctggctacaccctgacagagctgagcatgcactgggtccggcaggcccctggcaaaggcctggaatggatgggaggcttcgaccccgaagacggggagacaatctacgcccagaaattccagggcagagtgacaatgaccgaggacaccagcaccgatacagcctacatggaactgtcttccctgcggagcgaggacaccgccgtgtactactgcgccaccggcagaatcaccatggtgcggggcgtcatcatcccctactactattactacatggacgtgtggggcaagggcaccaccgtgaccgtgtcctctggcagcaccagcggcagcggcaagcccggctccggagagggcagcaccaagggcgatatccagatgacacagagcccaagcagcctgagcgccagcgtgggcgacagagtgaccatcacatgcagagccagccagggcatcagcagctggctggcttggtaccagcaaaagcctgagaaggcccctaagagcctcatctacgccgctagcagcctgcagtccggcgtgccaagcagattcagcggctctggctctggcacagacttcaccctgaccatttccagcctgcaacctgaggattttgccacatactattgtcagcagtacaacagctacccttacaccttcggccagggcaccaagctggaaatcaag

SEQ ID NO: 1824 - DNA, 756 bp, synthetic construct
  misc_feature 1..756: note = Synthetic
  source 1..756: mol_type = other DNA
caagtgcagctggtgcagagcggcaccgaggtgaagaagccaggcgcctctgtgaaagtgtcttgtaaagccagcggctacacctttaccaattacggcatcggctgggtgcggcaggcccctggacagggactggaatggatgggctggatcatcgcctacaacggctacacaaagtacgcccagatcctgcagggcagagtgacaatgaccaccgacaccagcaccaacaccgcttatatggaactgagaagcctgcggagcgacgacaccgccgtgtactattgcgccagacagcagctgggcggagattaccactactacatggacgtgtggggcaagggcaccaccgtcacagtgtccagcggcagcaccagcggcagcggcaagcccggctccggagagggcagcaccaagggcgatatcgtgatgacccagacccccctgagcctgtccgtgaccccaggacaacctgccagcattagctgcaagagcagcaagtccctgctgcacagcgacggcaagacatacctgtactggtacctgcaaaagcccggccagcctcctcagctgctcatctacgaggtgtccaaccggttctctggcgtgcctgatagattcagcggaagcggcagcggaacagacttcacactgaagatcagcagagtcgaggccgaggacgtgggcgtttactactgcatgcagagcatccagttcccctggacattcggccagggcacaaaagtggaaatcaag

SEQ ID NO: 1825 - DNA, 756 bp, synthetic construct
  misc_feature 1..756: note = Synthetic
  source 1..756: mol_type = other DNA
caagtgcagctggtgcaaagcggcaccgaggtgaaaaagcccggcgcctctgtgaaggtctcctgcaaggccagcggatacacatttacaaattacggcatcggctgggtgcggcaggcccctggccagggcctggaatggatgggctggatcatcgcctacaacggctacaccaagtacgcccagatcctgcaaggcagagtcaccatgaccacagacaccagcaccaacaccgcttatatggaactgagaagcctgcggagcgacgatacagccgtgtactactgcgccagacagcagctcggcggcgactaccactactacatggacgtgtggggcaagggcaccaccgtgaccgtgtccagcggcagcaccagcggcagcggcaagcccggctccggagagggcagcaccaagggcgacatcgtgatgacccagacccctctgagcctgagcgtgacacctggacagcccgcttctattagctgtaaaagcagcaagtccctgctgcacagcgacggcaagacctacctgtactggtacctgcagaaacctggccagcctccacagctgctgatctacgaggtgtctacaagattcagcggagtgcctgatagattcagcggcagcggatctggaacagatttcaccctgaagatcagccgggttgaggccgaggacgtgggcgtgtactattgcatgcagtccatccagttcccctggaccttcggccagggcacaaaggtggaaatcaag

SEQ ID NO: 1826 - DNA, 750 bp, synthetic construct
  misc_feature 1..750: note = Synthetic
  source 1..750: mol_type = other DNA
caagtgcagctggtgcagagcggaacagaggtgaaaaagcctggcgccagcgtgaaggtgtcttgtaaaaccagcggttatacattcacctcctacgacattaactgggtgcggcaggccaccggccagggcctggaatggatgggctggatgaaccccatctccggcgacacaggcagcgcccagaagttccagggaagagtgaccatgaccagaaataccagcatcggcaccgcctacatggaactgagcagcctgcggagcgaggacaccgccgtgtactactgcgccagaggcggatactgtagcagtacatcttgctactactattacatggacgtgtggggcaagggcacaacagtgacagtcagcagcggcagcaccagcggcagcggcaagcccggctccggagagggcagcaccaagggcgatatccagatgacacagtcccctagctctctgtctgcttctgttggagatagagtgaccatcacctgccgggccagccagggcatcagcaactggctggcctggtaccagcagaagcccgagaaggcccctaagagcctgatctacgccgctagctccctccagggcggcgtgccatctagattcagcggctcaggcagcggaaccgacttcaccctgaccatcagctccctgcaacctgaggattttgccacatactactgccagcaatacgacagctacccctacaccttcggccagggcaccaagctggaaatcaag

SEQ ID NO: 1827 - DNA, 750 bp, synthetic construct
  misc_feature 1..750: note = Synthetic
  source 1..750: mol_type = other DNA
caagtgcagctggtgcagagcggcgccgaggtgaagaagcctggcgcttccgtgaaggtgtcctgtaaagcttctggatacaccttcacctcttatgatattaactgggtgcggcaggccaccggccagggcctggaatggatgggctggatgatccccaacagcggcgataccggctccgcccagaaattccagggaagagttaccatgacaagaaacaccagcatcagcaccgcctacatggaactgagcagcctgcggagcgaggacaccgctgtgtactactgcgccagaggcggctactgtaatagcacaagctgctactattactacatggacgtgtggggcaagggcaccacagtgacagtcagctccggcagcaccagcggcagcggcaagcccggctccggagagggcagcaccaagggcgacatccagatgacacagagccctagcagcctgagcgcctctgtgggcgaccgggtgaccatcacctgcagagccagccagggcatcagcagctggctggcctggtaccagcagaagcccgagaaggcccctaagtccctgatctacgccgccagctccctccagggcggagtgccatctagattcagcggctctggatctggcacagacttcaccctgaccatcagctctctgcagcctgaggattttgccacatactactgccagcaatacgacagctacccctacacattcggccaaggcacaaagctggaaatcaag

SEQ ID NO: 1828 - DNA, 753 bp, synthetic construct
  misc_feature 1..753: note = Synthetic
  source 1..753: mol_type = other DNA
gaggtgcagctgctggaaagcggaggcggcctggtgcaacctggaggttctctgcggctgagctgcgccgctagcggcttcacatttagcagctacgtgatgaactgggtgcggcaggctcctggaaagggcctggaatgggtctccagcgtgtccggcagcggcaacaacagcttttacgccgatagcgtgaagggcagattcaccatcagccgggacaacagcaagaacaccctctacctgcagatgaattctctgagagccgaggacaccgccgtgtactactgcgccagcaggtcctcttcttacctgtactactactattacatggacgtgtggggcaaaggcacaacagtgaccgtctccagcggcagcaccagcggcagcggcaagcccggctccggagagggcagcaccaagggcgagatcgtgctgacccaaagccccggcaccctgagcctgagccctggcgagagagccaccctgtcttgtagagcctctcagagcgtttctagctcctacctggcctggtaccagcagaagcccggacaggcccctagactgctgatctacggcgccagcagcagagctacaggcatccccgatagattcagcgacagcggctcaggcacagacttcaccctgacaattagccggctggaacccgaggatttcgccgtgtactattgccagcactacggcagctctcctccaagaatcaccttcggccctggcaccaaggtggacatcaaa

SEQ ID NO: 1829 - protein, 247 aa, synthetic construct
  REGION 1..247: note = Synthetic
EIVLTQSPDFQSVTPKEKVTITCRASQTIGSSLHWYQQKPDQSPKLLIKHASQSFSGVPSRFSGSGSGTDFTLTVNSLEAEDAATYYCHQSSSLPWTFGQGTKVEIKGGGGSGGGGSGGGGSQVQLVESGGGVVQPGRSLRLSCAASGFTFSSHDMHWVRQAPGKGLDWVAVIWSDGNKKYYVDSAKGRFTISRDNSKNTVYLQMNSLRAEDTAIYYCARGDNWNDEHSYYYYMDVWGKGTTVTVSS

SEQ ID NO: 1830 - protein, 247 aa, synthetic construct
  REGION 1..247: note = Synthetic
EIVLTQSPDFQSVTPKEKVTITCRASQTIGSSLHWYQQKPDQSPKLLIKHASQSFSGVPSRFSGSGSGTDFTLTVNSLEAEDAATYYCHQSSSLPWTFGQGTKVEIKGGGGSGGGGSGGGGSQVQLVESGGGVVQPGRSLRLSCAASGFTFSSHDMHWVRQAPGKGLDWVAVIWSDGNNKYYADSAKGRFTISRDNSKNTVYLQMNSLRAEDTAIYYCARGDNWNDEHSYYYYMDVWGKGTTVTVSS

SEQ ID NO: 1831 - protein, 246 aa, synthetic construct
  REGION 1..246: note = Synthetic
DIQMTQSPSSLSASVGDRVTITCRASQSISNYLNWYHQKPGKAPKLLIYAASSLESGVPSRFSGSGSGTDFTLTISSLQPEDFATYYCQQSYSNPLTFGGGTKVESKGGGGSGGGGSGGGGSQLQLVQSGAEVKKPGASVKVSCKASGYTFTNYGISWLRQAPGQGLEWMGWISGYNDNTHYAQKFQGRVTMTTDTSTTTAYMELRNLRSDDTAVYYCARDGIAARPVYYYYMDVWGKGTTVTVSS

SEQ ID NO: 1832 - protein, 247 aa, synthetic construct
  REGION 1..247: note = Synthetic
EIVLTQSPDFQSVTPKEKVTITCRASQSIGSSLHWYQQKPDQSPKLLIKFASQSFSGVPSRFSGSGSGTDFTLTIHSLEAEDAATYYCHQSGSLPWTFGQGTKVEIKGGGGSGGGGSGGGGSQVQLVESGGGVVQPGRSLRLSCVASGFTFSSNDIYWVRQAPGKGLEWVAVIWYDGSNKYYADSVKGRFTISRDNSKNTLYLQMNSLRAEDTAVYYCARGDNWNDEHHYHYYMDVWGKGTTVTVSS

SEQ ID NO: 1833 - protein, 240 aa, synthetic construct
  REGION 1..240: note = Synthetic
VTQEPSFSVSPGGTVTLTCGLSSGSVSTSYYPSWYQQTPGQAPRTLIYSTNIRSSGVPDRFSGSILGNKAALTITGAQADDESDYYCVLYMGSDIVVFGGGTKLTVLGGGGSGGGGSGGGGSQVQLVESGGGVVQPGRSLRLSCAASGFTFSSYGMHWVRQAPGKGLEWVAVISYDGSNKYYADSVKGRFTISRDNSKTTLYLQMNSLRAEDTAVYYCARDHYYYYMDVWGKGTTVTVSS

SEQ ID NO: 1834 - protein, 245 aa, synthetic construct
  REGION 1..245: note = Synthetic
EIVLTQSPATLSLSPGERATLSCRASQSVSSYFAWYQQKPGQAPRLLIYDASNRATGIPARFSGSGSGTDFTLTISSLEPEDFAVYYCQQRSNWPLTFGGGTKVEIKGGGGSGGGGSGGGGSQLQLQESGPGLVKPSETLSLTCTVSGGSISSSSYYWGWIRQPPGKGLEWIGSLYYSGSTYYNPSLKSRVTISVDTSKNQFSLKLSSVTAADTAVYYCAAVQLERRGYFYMDVWGKGTTVTVSS

SEQ ID NO: 1835 - protein, 247 aa, synthetic construct
  REGION 1..247: note = Synthetic
QTVVTQEPSFSVSPGGTVTLTCGLTSGSVSTSYYPNWYQQTPGQAPRTLIYSTNIRSSGVPDRFSGSILGNKAALTITGAQADDESDYYCVLYMGSGMFIFGSGTKVTVLGGGGSGGGGSGGGGSQVQLVESGGGVVQPGRSLRLSCAASGFTFSNYGMHWVRQAPGKGLEWMAVIWSDGHNKYYADSVKGRFTISRDNSKNTLYLQMNSLRAEDTAVYYCARAQLERRYFYYMDVWGKGTTVTVSS

SEQ ID NO: 1836 - protein, 247 aa, synthetic construct
  REGION 1..247: note = Synthetic
DIQMTQSPSSLSASVGDRVTITCRASQGISSWLAWYQQKPEKAPKSLIYAASSLQGGVPSRFSGSGSGTDFTLTISSLQPEDFATYYCQQYDSYPYTFGQGTKLEIKGGGGSGGGGSGGGGSQVQLVQSGAEVKKPGASVKVSCKASGYTFTSYDINWVRQATGQGLEWMGWMIPNSGDTGSAQKFQGRVTMTRNTSIGTAYMELSSLRSEDTAVYYCARGGYCNSTSCYYYYMDVWGKGTTVTVSS

SEQ ID NO: 1837 - protein, 248 aa, synthetic construct
  REGION 1..248: note = Synthetic
DIQVTQSPTFLSASVGDRVTITCRASQGISSYLAWYQQKPGKAPKLLIYGASTLQSGVPSRFSGSGSGTEFTLTISSLQPEDFATYYCQQLNSYPWTFGQGTKVEIKGGGGSGGGGSGGGGSQVQLVQSGAEVKKPGASVKVSCKASGYTFTSYDINWVRQATGQGLEWMGWMNPNSGNTVYAQKFQGRVTMTRNTSISTAYMELSSLRSEDTAVYYCARGGDFWSGYHDYYYYMDVWGKGTTVTVSS

SEQ ID NO: 1838 - protein, 246 aa, synthetic construct
  REGION 1..246: note = Synthetic
SYELTQPPSVSVSPGQTASITCSGDKLGDKYACWYQQKPGQSPVLVIYQDSKRPSGIPERFSGSNSGNTATLTISGTQAMDEADYYCQAWDSSTAVFGGGTQLTALGGGGSGGGGSGGGGSQVQLQESGPGLVKPSETLSLTCTVSGGSISSYYWSWIRQPAGKGLEWIGRIYTSGSTNYNPSLKSRVTMSVDTSKNQFSLKLSSVTAADTAVYYCAREEYQLLPALYYYYYMDVWGKGTTVTVSS

SEQ ID NO: 1839 - protein, 247 aa, synthetic construct
  REGION 1..247: note = Synthetic
QTVVTQEPSFSVSPGGTVTLTCGLTSGSVSTSYYPNWYQQTPGQAPRTLIYSTNIRSSGVPDRFSGSILGNKAALTITGAQADDESDYYCVLYMGSGMFIFGSGTKVTVLGGGGSGGGGSGGGGSQVQLVESGGGVVQPGRSLRLSCAATGFTFSSYGMHWVRQAPGKGLEWMVVIWSDGHNKYYADSVKGRFTISRDNSKNTLYLQMNSLRAEDTAVYYCARAQLERRYFYYMDVWGKGTTVTVSS

SEQ ID NO: 1840 - protein, 247 aa, synthetic construct
  REGION 1..247: note = Synthetic
EIVLTQSPDFQSVTPKEKVTITCRASQSIGSSLHWYQQKPDQSPMLLIKFASQSISGVPSRFSGSGSGTDFTLTINSLEAEDAAAYYCHQSSSLPWTFGQGTKVEIKGGGGSGGGGSGGGGSQVQLVESGGGVVQPGRSLRLSCAASGFTFTSYDMHWVRQAPGKGLEWVTIIWFDGSNKYYADSVKGRFTISRDNSKNTLYLQMNSLSAEDTAVYYCARGDNWNDRYYYYYYMDVWGKGTTVTVSS

SEQ ID NO: 1841 - protein, 252 aa, synthetic construct
  REGION 1..252: note = Synthetic
DIVMTQPPLSSPVTLGQPASISCRSSQSLVHSDGNTYLSWLQQRPGQPPRLLIYKVSNRFSGVPDRFSGSGAGTDFTLKISRVEAEDVGVYYCTQATQFPHTFGQGTKLEIKGGGGSGGGGSGGGGSQVQLVQSGAEVKKPGASVKVSCKASGYTFTSYGISWVRQAPGQGLEWMGWISAYNGHTDYTQKLQGRVTMTTDTSTTTAYMELRSLSSADTAVYYCVREVVLPTTDYYYFYMDVWGKGTTVTVSS

SEQ ID NO: 1842 - protein, 251 aa, synthetic construct
  REGION 1..251: note = Synthetic
DIQMTQSPSSLSASVGDRVTITCRASQGISSWLAWYQQKPEKAPKSLIYAASSLQSGVPSRFSGSGSGTDFTLTISSLQPEDFATYYCQQYNSYPYTFGQGTKLEIKGGGGSGGGGSGGGGSQVQLVQSGAEVKKPGASVKVSCKVSGYTLTELSMHWVRQAPGKGLEWMGGFDPEDGETIYAQKFQGRVTMTEDTSTDTAYMELSSLRSEDTAVYYCATGRITMVRGVIIPYYYYYMDVWGKGTTVTVSS

SEQ ID NO: 1843 - protein, 249 aa, synthetic construct
  REGION 1..249: note = Synthetic
DIVMTQTPLSLSVTPGQPASISCKSSKSLLHSDGKTYLYWYLQKPGQPPQLLIYEVSNRFSGVPDRFSGSGSGTDFTLKISRVEAEDVGVYYCMQSIQFPWTFGQGTKVEIKGGGGSGGGGSGGGGSQVQLVQSGTEVKKPGASVKVSCKASGYTFTNYGIGWVRQAPGQGLEWMGWIIAYNGYTKYAQILQGRVTMTTDTSTNTAYMELRSLRSDDTAVYYCARQQLGGDYHYYMDVWGKGTTVTVSS

SEQ ID NO: 1844 - protein, 249 aa, synthetic construct
  REGION 1..249: note = Synthetic
DIVMTQTPLSLSVTPGQPASISCKSSKSLLHSDGKTYLYWYLQKPGQPPQLLIYEVSTRFSGVPDRFSGSGSGTDFTLKISRVEAEDVGVYYCMQSIQFPWTFGQGTKVEIKGGGGSGGGGSGGGGSQVQLVQSGTEVKKPGASVKVSCKASGYTFTNYGIGWVRQAPGQGLEWMGWIIAYNGYTKYAQILQGRVTMTTDTSTNTAYMELRSLRSDDTAVYYCARQQLGGDYHYYMDVWGKGTTVTVSS

SEQ ID NO: 1845 - protein, 247 aa, synthetic construct
  REGION 1..247: note = Synthetic
DIQMTQSPSSLSASVGDRVTITCRASQGISNWLAWYQQKPEKAPKSLIYAASSLQGGVPSRFSGSGSGTDFTLTISSLQPEDFATYYCQQYDSYPYTFGQGTKLEIKGGGGSGGGGSGGGGSQVQLVQSGTEVKKPGASVKVSCKTSGYTFTSYDINWVRQATGQGLEWMGWMNPISGDTGSAQKFQGRVTMTRNTSIGTAYMELSSLRSEDTAVYYCARGGYCSSTSCYYYYMDVWGKGTTVTVSS

SEQ ID NO: 1846 - protein, 247 aa, synthetic construct
  REGION 1..247: note = Synthetic
DIQMTQSPSSLSASVGDRVTITCRASQGISSWLAWYQQKPEKAPKSLIYAASSLQGGVPSRFSGSGSGTDFTLTISSLQPEDFATYYCQQYDSYPYTFGQGTKLEIKGGGGSGGGGSGGGGSQVQLVQSGAEVKKPGASVKVSCKASGYTFTSYDINWVRQATGQGLEWMGWMIPNSGDTGSAQKFQGRVTMTRNTSISTAYMELSSLRSEDTAVYYCARGGYCNSTSCYYYYMDVWGKGTTVTVSS

SEQ ID NO: 1847 - protein, 248 aa, synthetic construct
  REGION 1..248: note = Synthetic
EIVLTQSPGTLSLSPGERATLSCRASQSVSSSYLAWYQQKPGQAPRLLIYGASSRATGIPDRFSDSGSGTDFTLTISRLEPEDFAVYYCQHYGSSPPRITFGPGTKVDIKGGGGSGGGGSGGGGSEVQLLESGGGLVQPGGSLRLSCAASGFTFSSYVMNWVRQAPGKGLEWVSSVSGSGNNSFYADSVKGRFTISRDNSKNTLYLQMNSLRAEDTAVYYCASRSSSYLYYYYYMDVWGKGTTVTVSS

SEQ ID NO: 1848 - DNA, 741 bp, synthetic construct
  misc_feature 1..741: note = Synthetic
  source 1..741: mol_type = other DNA
gaaattgtgctgactcagtctccagactttcagtctgtgactccaaaggagaaagtcaccatcacctgccgggccagtcagaccattggcagtagcttacactggtaccagcagaaaccagatcagtctccaaagctcctcatcaagcatgcttcccagtccttctcaggggtcccctcgaggttcagtggcagtggatctgggacagatttcaccctcaccgtcaatagcctggaagctgaagatgctgcaacgtattactgtcatcagagtagtagtttaccgtggacgttcggccaagggaccaaggtggaaatcaaaggcggcggtggatctggaggcggaggctctggaggcggcggctcccaggtgcagctggtggagtctgggggaggcgtggtccagcctgggaggtccctgagactttcctgtgcagcgtctggattcaccttcagcagtcatgacatgcactgggtccgccaggctccaggcaaggggctggactgggtggcagttatatggagtgatggaaataaaaaatactatgtagactccgcgaagggccggttcaccatctccagagacaattccaagaacacggtgtatctgcaaatgaacagcctgagagccgaggacacggctatatattactgtgcgagaggtgacaactggaacgacgaacactcctactattactacatggacgtctggggcaaggggaccacggtcaccgtctcctca

SEQ ID NO: 1849 - DNA, 741 bp, synthetic construct
  misc_feature 1..741: note = Synthetic
  source 1..741: mol_type = other DNA
gaaattgtgctgactcagtctccagactttcagtctgtgactccaaaggagaaagtcaccatcacctgccgggccagtcagaccattggcagtagcttacactggtaccagcagaaaccagatcagtctccaaagctcctcatcaagcatgcttcccagtccttctcaggggtcccctcgaggttcagtggcagtggatctgggacagatttcaccctcaccgtcaatagcctggaagctgaagatgctgcaacgtattactgtcatcagagtagtagtttaccgtggacgttcggccaagggaccaaggtggaaatcaaaggcggcggtggatctggaggcggaggctctggaggcggcggctcccaggtgcagctggtggagtctgggggaggcgtggtccagcctgggaggtccctgagactttcctgtgcagcgtctggattcaccttcagtagtcatgacatgcactgggtccgccaggctccaggcaaggggctggactgggtggcagttatatggagtgatggaaataataaatactatgcagactccgcgaagggccggttcaccatctccagagacaattccaagaacacggtgtatctgcaaatgaacagcctgagagccgaggacacggctatatattactgtgcgagaggtgacaactggaacgacgaacactcctactattactacatggacgtctggggcaaggggaccacggtcaccgtctcctca

SEQ ID NO: 1850 - DNA, 738 bp, synthetic construct
  misc_feature 1..738: note = Synthetic
  source 1..738: mol_type = other DNA
gacatacagatgacccagtctccatcctccctgtctgcatctgtaggagacagagtcaccatcacttgccgggcaagccagagcattagcaactatttaaattggtatcaccagaaaccagggaaagcccctaagctcctgatctatgctgcatccagtttggaaagtggggtcccatcaaggttcagtggcagtggatctgggacagatttcactctcaccatcagcagtctgcaacctgaagattttgcaacttactactgtcaacagagttacagtaacccgctcactttcggcggagggaccaaggtggagagcaaaggcggcggtggatctggaggcggaggctctggaggcggcggctcccagcttcagctggtgcagtctggagctgaggtgaagaagcctggggcctcagtgaaggtctcctgcaaggcttctggttacacctttaccaactatggtatcagctggttgcgacaggcccctggacaagggcttgagtggatgggatggatcagtggttacaatgataacacacactatgcacagaagttccagggcagagtcaccatgaccacagacacatccacgaccacagcctacatggaactgaggaacctgagatctgacgacacggccgtgtattactgtgcgagagatgggatagcagctcgtccagtctactactactacatggacgtctggggcaaagggaccacggtcaccgtctcctca

SEQ ID NO: 1851 - DNA, 741 bp, synthetic construct
  misc_feature 1..741: note = Synthetic
  source 1..741: mol_type = other DNA
gaaattgtgctgactcagtctccagactttcagtctgtgactccaaaggagaaagtcaccatcacctgccgggccagtcagagcattggtagtagcttacactggtaccagcagaaaccagatcagtctccaaagctcctcatcaagtttgcttcccagtccttctcaggggtcccctcgaggttcagtggcagtggatctgggacagatttcaccctcaccatccatagcctggaagctgaagatgctgcaacgtattactgtcatcagagtggtagtttaccgtggacgttcggccaagggaccaaggtggaaatcaaaggcggcggtggatctggaggcggaggctctggaggcggcggctcccaggtgcagctggtggagtctgggggaggcgtggtccagcctgggaggtccctgagactctcctgtgtagcgtctggattcaccttcagtagcaatgacatatactgggtccgccaggccccaggcaaggggctggagtgggtggcagttatatggtatgatggaagtaataaatactatgcagactccgtgaagggccgattcaccatctccagagacaattccaagaacacgctgtatctgcaaatgaacagcctgagagccgaggacacggctgtgtattactgtgcgagaggtgacaactggaacgacgaacaccactaccactactacatggacgtctggggcaaagggaccacggtcaccgtctcctca

SEQ ID NO: 1852 - DNA, 721 bp, synthetic construct
  misc_feature 1..721: note = Synthetic
  source 1..721: mol_type = other DNA
ggtgacccaggagccatcgttctcagtgtcccctggagggacagtcacactcacttgtggcttgagctctggctcagtctctactagttactaccccagctggtaccagcagaccccaggccaggctccacgcacgctcatctacagcacaaacattcgctcttctggggtccctgatcgcttctctggctccatccttgggaacaaagctgccctcaccatcacgggggcccaggcagatgatgaatctgattattactgtgtgctgtatatgggtagtgacattgtggtattcggcggagggaccaagctgaccgtcctaggcggcggtggatctggaggcggaggctctggaggcggcggctcccaggtgcagttggtggagtctgggggaggcgtggtccagcctgggaggtccctgagactctcctgtgcagcctctggattcaccttcagtagctatggcatgcactgggtccgccaggctccaggcaaggggctggagtgggtggcagttatatcatatgatggaagtaataaatactatgcagactccgtgaagggccgattcaccatctccagggacaattccaagaccacgctgtatctgcaaatgaacagcctgagagctgaggacacggctgtgtattactgtgcgagagatcactactactactacatggacgtctggggcaaagggaccacggtcaccgtctcctca

SEQ ID NO: 1853 - DNA, 735 bp, synthetic construct
  misc_feature 1..735: note = Synthetic
  source 1..735: mol_type = other DNA
gaaattgtgttgacacagtctccagccaccctgtctttgtctccaggggaaagagccaccctctcctgcagggccagtcagagtgttagcagctactttgcctggtaccaacagaaacctggccaggctcccaggctcctcatctatgatgcatccaacagggccactggcatcccagccaggttcagtggcagtgggtctgggacagacttcactctcaccatcagcagcctggagcctgaagattttgcagtttattactgtcagcagcgtagcaactggcctctcactttcggcggagggaccaaggtggagatcaaaggcggcggtggatctggaggcggaggctctggaggcggcggctcccaactgcagctgcaggagtcgggcccaggactggtgaagccttcggagaccctgtccctcacctgcactgtctctggtggctccatcagcagtagtagttactactggggctggatccgccagcccccagggaaggggctggagtggattgggagtctctattatagtgggagcacctactacaacccgtccctcaagagtcgagtcaccatatccgttgacacgtccaagaaccagttctccctgaagctgagctctgtgaccgccgcagacacggctgtgtattactgtgcggccgtacaactggaacgacgtgggtacttctacatggacgtctggggcaaagggaccacggtcaccgtctcctca

SEQ ID NO: 1854 - DNA, 741 bp, synthetic construct
  misc_feature 1..741: note = Synthetic
  source 1..741: mol_type = other DNA
cagactgtagtgacccaggaaccatcgttctcagtgtcccctggagggacagtcacactcacttgtggcttgacctctggctcagtctctactagttactaccccaactggtaccagcagaccccaggccaggctccacgcacgctcatctatagtacaaatattcgctcttctggggtccctgatcgcttctctggctccatccttgggaacaaagctgccctcaccatcacgggggcccaggcagatgatgaatctgattattactgtgtgctgtatatgggtagtggcatgtttattttcggcagtggaaccaaggtcactgtcctaggcggcggtggatctggaggcggaggctctggaggcggcggctcccaggtgcagctggtggagtctgggggaggcgtggtccagcctgggaggtccctgagactctcctgtgcagcatctggattcaccttcagtaactatggcatgcactgggtccgccaggctccaggcaaggggctggagtggatggcagttatatggtctgatggacataataaatactatgcagactccgtgaagggccgattcaccatctccagagacaattccaagaacacgctgtatctgcaaatgaacagcctgagagccgaggacacggctgtgtattactgtgcgagggcacaattggaacgacggtacttctactacatggacgtctggggcaaagggaccacggtcaccgtctcctca

SEQ ID NO: 1855 - DNA, 741 bp, synthetic construct
  misc_feature 1..741: note = Synthetic
  source 1..741: mol_type = other DNA
gacatccagatgacccagtctccatcctcactgtctgcatctgtaggagacagagtcaccatcacttgtcgggcgagtcagggtattagcagctggttagcctggtatcagcagaaaccagagaaagcccctaagtccctgatctatgctgcatccagtttacagggtggggtcccatcaaggttcagcggcagtggatctgggacagatttcactctcaccatcagcagcctgcagcctgaagattttgcaacttattactgccaacagtatgatagttacccgtacacttttggccaggggaccaagctggagatcaaaggcggcggtggatctggaggcggaggctctggaggcggcggctcccaggtgcagctggtgcagtctggggctgaggtgaagaagcctggggcctcagtgaaggtctcctgcaaggcttctggatacaccttcaccagttatgatatcaactgggtgcgacaggccactggacaagggcttgagtggatgggatggatgatccctaacagtggtgacacaggctctgcacagaagttccagggcagagtcaccatgaccaggaacacctccataggcacagcctacatggagctgagcagcctgagatctgaggacacggccgtttattactgtgcgagaggcggatattgtaatagtaccagttgctactactactacatggacgtctggggcaaagggaccacggtcaccgtctcctca

SEQ ID NO: 1856 - DNA, 744 bp, synthetic construct
  misc_feature 1..744: note = Synthetic
  source 1..744: mol_type = other DNA
gacatccaggtgacccagtctccaaccttcctgtctgcatctgtaggagacagagtcaccatcacttgccgggccagtcagggcattagcagttatttagcctggtatcagcaaaaaccagggaaagcccctaagctcctgatctatggtgcatccactttgcaaagtggggtcccatcaaggttcagcggcagtggatctgggacagaattcactctcacaatcagcagcctgcagcctgaagattttgcaacttattactgtcaacagcttaatagttacccgtggacgttcggccaagggaccaaggtggaaatcaaaggcggcggtggatctggaggcggaggctctggaggcggcggctcccaggtgcagctggtgcagtctggggctgaggtgaagaagcctggggcctcagtgaaggtctcctgcaaggcttctggatacaccttcaccagttatgatatcaactgggtgcgacaggccactggacaagggcttgagtggatgggatggatgaaccctaatagtggtaacacagtctatgcacagaagttccagggcagagtcaccatgaccaggaacacctccataagcacagcctacatggagctgagcagcctgagatctgaggacacggccgtgtattactgtgcgagaggaggcgatttttggagtggttaccatgactactactactacatggacgtctggggcaaagggaccacggtcaccgtctcctca

SEQ ID NO: 1857 - DNA, 738 bp, synthetic construct
  misc_feature 1..738: note = Synthetic
  source 1..738: mol_type = other DNA
tcctatgagctgactcagccaccctcagtgtccgtgtccccaggacagacagccagcatcacctgctctggagataaattgggggataaatatgcttgctggtatcagcagaagccaggccagtcccctgtgctggtcatctatcaagatagcaagcggccctcagggatccctgagcgattctctggctccaactctgggaacacagccactctgaccatcagcgggacccaggctatggatgaggctgactattactgtcaggcgtgggacagcagcactgctgtgttcggaggaggcacccagctgaccgccctcggcggcggtggatctggaggcggaggctctggaggcggcggctcccaggtgcagctgcaggagtcgggcccaggactggtgaagccttcggagaccctgtccctcacctgcactgtctctggtggctccatcagtagttactactggagctggatccggcagcccgccgggaagggactggagtggattgggcgtatctataccagtgggagcaccaactacaacccctccctcaagagtcgagtcaccatgtcagtagacacgtccaagaaccagttctccctgaagctgagctctgtgaccgccgcggacacggccgtgtattactgtgcgagagaggagtaccagctgctaccggccctctactactactactacatggacgtctggggcaaagggaccacggtcaccgtctcctca

SEQ ID NO: 1858 - DNA, 741 bp, synthetic construct
  misc_feature 1..741: note = Synthetic
  source 1..741: mol_type = other DNA
cagactgtagtgacccaggaaccatcgttctcagtgtcccctggagggacagtcacactcacttgtggcttgacctctggctcagtctctactagttactaccccaactggtaccagcagaccccaggccaggctccacgcacgctcatctacagcacaaatattcgctcttctggggtccctgatcgcttctctggctccatccttgggaacaaagctgccctcaccatcacgggggcccaggcagatgatgaatctgattattactgtgtgctgtatatgggtagtggcatgtttattttcggcagtggaaccaaggtcactgtcctaggcggcggtggatctggaggcggaggctctggaggcggcggctcccaggtgcagctggtggagtctgggggaggcgtggtccagcctgggaggtccctgagactctcctgtgcagcaactggattcaccttcagtagctatggcatgcactgggtccgccaggctccaggcaaggggctggagtggatggtagttatatggtctgatggacataataaatactatgcagactccgtgaagggccgattcaccatctccagagacaattccaagaacacgctgtatctgcaaatgaacagcctgagagccgaggacacggctgtgtattactgtgcgagggcacaactggaacgacggtacttctactacatggacgtctggggcaaagggaccacggtcaccgtctcctca

SEQ ID NO: 1859 - DNA, 741 bp, synthetic construct
  misc_feature 1..741: note = Synthetic
  source 1..741: mol_type = other DNA
gaaattgtgctgactcagtctccagactttcagtctgtgactccaaaggagaaagtcaccatcacctgccgggccagtcagagcattggtagtagcttacactggtaccagcagaaaccagatcagtctccaatgctcctcatcaagtttgcttcccagtccatctcaggggtcccctcgaggttcagtggcagtggatctgggacagatttcaccctcaccatcaatagcctggaagctgaagatgctgcagcgtattactgtcatcagagtagtagtttaccgtggacgttcggccaagggaccaaggtggaaatcaaaggcggcggtggatctggaggcggaggctctggaggcggcggctcccaggtgcagctggtggagtctgggggaggcgtggtccagcctgggaggtccctgagactctcctgtgcagcgtctggattcaccttcactagttatgacatgcactgggtccgccaggctccaggcaaggggctggagtgggtgacaattatatggtttgatggaagtaataaatactatgcagactccgtgaagggccgattcaccatctccagagacaattccaagaacacgctgtatctgcaaatgaacagcctgagcgccgaggacacggctgtgtattactgtgcgagaggagacaactggaacgaccggtactactactactactacatggacgtctggggcaaagggaccacggtcaccgtctcctca

SEQ ID NO: 1860 - DNA, 756 bp, synthetic construct
  misc_feature 1..756: note = Synthetic
  source 1..756: mol_type = other DNA
gatattgtgatgacccagcctccactctcctcgcctgtcacccttggacagccggcctccatctcctgcaggtctagtcaaagcctcgtacacagtgatggaaacacctacttgagttggcttcagcagaggccaggccagcctccaagactcctaatttataaggtttctaaccggttctctggggtcccagacagattcagtggcagtggggcagggacagatttcacactgaaaatcagcagggtggaagctgaggatgtcggggtttattactgcacgcaagctacacaatttcctcacacttttggccaggggaccaagctggagatcaaaggcggcggtggatctggaggcggaggctctggaggcggcggctcccaggttcagctggtgcagtctggagctgaggtgaagaagcctggggcctcagtgaaggtctcctgcaaggcttctggttacacctttaccagctatggtatcagctgggtgcgacaggcccctggacaagggcttgagtggatggggtggatcagcgcttacaatggtcacacagactatacacagaaactccagggcagagtcaccatgaccacagacacatccacgaccacagcctacatggaactgaggagcctgagctctgccgacacggccgtgtattactgtgtgagagaagtggtacttcccaccacggactactactacttttacatggacgtctggggcaaagggaccacggtcaccgtctcctca

SEQ ID NO: 1861 - DNA, 753 bp, synthetic construct
  misc_feature 1..753: note = Synthetic
  source 1..753: mol_type = other DNA
gacatccagatgacccagtctccatcctcactgtctgcatctgtaggagacagagtcaccatcacttgtcgggcgagtcagggtattagcagctggttagcctggtatcagcagaaaccagagaaagcccctaagtccctgatctatgctgcatccagtttgcaaagtggggtcccatcaaggttcagcggcagtggatctgggacagatttcactctcaccatcagcagcctgcagcctgaagattttgcaacttattactgccaacagtataatagttacccgtacacttttggccaggggaccaagctggagatcaaaggcggcggtggatctggaggcggaggctctggaggcggcggctcccaggtccagctggtacagtctggggctgaggtgaagaagcctggggcctcagtgaaggtctcctgcaaggtttccggatacaccctcactgaattatccatgcactgggtgcgacaggctcctggaaaagggcttgagtggatgggaggttttgatcctgaagatggtgaaacaatctacgcacagaagttccagggcagagtcaccatgaccgaggacacatctacagacacagcctacatggagctgagcagcctgagatctgaggacacggccgtgtattactgtgcaacaggacgtattactatggttcggggagttattatcccctactactactactacatggacgtctggggcaaagggaccacggtcaccgtctcctca

SEQ ID NO: 1862 - DNA, 747 bp, synthetic construct
  misc_feature 1..747: note = Synthetic
  source 1..747: mol_type = other DNA
gatattgtgatgacccagactccactctctctgtccgtcacccctggacagccggcctccatctcctgcaagtctagtaagagcctcctgcatagtgatggaaagacctatttgtattggtacctgcagaagccaggccagcctccacagctcctgatctatgaagtttccaaccggttctctggagtgccagataggttcagtggcagcgggtcagggacagatttcacactgaaaatcagccgggtggaggctgaggatgttggggtttattactgcatgcaaagtatacaatttccgtggacgttcggccaagggaccaaggtggaaatcaagggcggcggtggatctggaggcggaggctctggaggcggcggctcccaggttcagctggtgcagtctggaactgaggtgaagaagcctggggcctcagtgaaggtctcctgcaaggcttctggttacacctttaccaactatggtatcggctgggtgcgacaggcccctggacaagggcttgagtggatgggatggatcatcgcttacaatggttacacaaagtatgcacagattctccagggcagagtcaccatgaccacagacacatccacgaacacagcttatatggaactgaggagcctgagatctgacgacacggccgtgtattactgtgcgagacagcagctcgggggggactaccactactacatggacgtctggggcaaagggaccacggtcaccgtctcctca

SEQ ID NO: 1863 - DNA, 747 bp, synthetic construct
  misc_feature 1..747: note = Synthetic
  source 1..747: mol_type = other DNA
gatattgtgatgacccagactccactctctctgtccgtcacccctggacagccggcctccatctcctgcaagtctagtaagagcctcctgcatagtgatggaaagacctatttgtattggtacctgcagaagccaggccagcctccacagctcctgatctatgaagtttccacccggttctctggagtgccagataggttcagtggcagcgggtcagggacagatttcacactgaaaatcagccgggtggaggctgaggatgttggggtttattactgcatgcaaagtatacagtttccgtggacgttcggccaagggaccaaggtggaaatcaaaggcggcggtggatctggaggcggaggctctggaggcggcggctcccaggttcagctggtgcagtctggaactgaggtgaagaagcctggggcctcagtgaaggtctcctgcaaggcttctggttacacctttaccaactatggtatcggctgggtgcgacaggcccctggacaagggcttgagtggatgggatggatcatcgcttacaatggttacacaaagtatgcacagattctccagggcagagtcaccatgaccacggacacatccacgaacacagcctatatggaactgaggagcctgagatctgacgacacggccgtgtattactgtgcgcgacagcagctcgggggggactaccactactacatggacgtctggggcaaagggaccacggtcaccgtctcttca

SEQ ID NO: 1864 - DNA, 741 bp, synthetic construct
  misc_feature 1..741: note = Synthetic
  source 1..741: mol_type = other DNA
gacatccagatgacccagtctccatcctcactgtctgcctctgtaggagacagagtcaccatcacttgtcgggcgagtcagggtattagcaactggttagcctggtatcagcagaaaccagagaaagcccctaagtccctgatctatgctgcatccagtttgcaaggtggggtcccatcaagattcagcggcagtggatctgggacagatttcactctcaccatcagcagcctgcagcctgaagattttgcaacttattactgccaacagtatgatagttacccgtacacttttggccaggggaccaagctggagatcaaaggcggcggtggatctggaggcggaggctctggaggcggcggctcccaggtgcagctggtgcagtctgggactgaggtgaagaagcctggggcctcagtgaaggtctcctgtaagacttctggatacaccttcaccagttatgatatcaactgggtgcgacaggccactggacaagggcttgagtggatgggatggatgaaccctatcagtggtgacacaggctctgcacagaagttccagggcagagtcaccatgaccaggaacacctccataggcacagcctacatggagctgagcagcctgagatctgaggacacggccgtttattactgtgcgagaggcggatattgtagtagtaccagctgctactactactacatggacgtctggggcaaagggaccacggtcaccgtctcctca

SEQ ID NO: 1865 - DNA, 741 bp, synthetic construct
  misc_feature 1..741: note = Synthetic
  source 1..741: mol_type = other DNA
gacatccagatgacccagtctccatcctcactgtctgcatctgtaggagacagagtcaccatcacttgtcgggcgagtcagggtattagcagctggttagcctggtatcagcagaaaccagagaaagcccctaagtccctgatctatgctgcatccagtttacaaggtggggtcccatcaaggttcagcggcagtggatctgggacagatttcactctcaccatcagcagcctgcagcctgaagattttgcaacttattactgccaacagtatgatagttacccgtacacttttggccaggggaccaagctggagatcaaaggcggcggtggatctggaggcggaggctctggaggcggcggctcccaggtgcagctggtgcagtctggggctgaggtgaagaagcctggggcctcagtgaaggtctcctgcaaggcttctggatacaccttcaccagttatgatatcaactgggtgcgacaggccactggacaagggcttgagtggatgggatggatgatccctaacagtggtgacacaggctctgcacagaagttccagggcagagtcaccatgaccaggaacacctccataagcacagcctacatggagctgagcagcctgagatctgaggacacggccgtttattactgtgcgagaggcggatattgtaatagtaccagttgctactactactacatggacgtctggggcaaagggaccacggtcaccgtctcctca

SEQ ID NO: 1866 - DNA, 744 bp, synthetic construct
  misc_feature 1..744: note = Synthetic
  source 1..744: mol_type = other DNA
gaaattgtgttgacgcagtctccaggcaccctgtctttgtctccaggggaaagagccaccctctcctgcagggccagtcagagtgttagcagcagctacttagcctggtaccagcagaaacctggccaggctcccaggctcctcatctatggtgcatccagcagggccactggcatcccagacaggttcagtgacagtgggtctgggacagacttcactctcaccatcagcagactggagcctgaagattttgcagtgtattactgtcagcactatggtagctcacctccgaggatcactttcggccctgggaccaaagtggatatcaaaggcggcggtggatctggaggcggaggctctggaggcggcggctccgaggtgcagttgttggagtctgggggaggcttggtacaacctggggggtccctgagactctcctgtgcagcctctggattcacctttagcagctatgtcatgaactgggtccgccaggctccagggaaggggctggaatgggtctcatctgttagtggtagtggtaataactcattctacgcagactccgtgaagggccggttcaccatctccagagacaattccaagaacacgctgtatctgcaaatgaacagcctgagagccgaggacacggccgtatattactgtgcgagtcgtagttccagttatctctactactactactacatggacgtctggggcaaagggaccaccgtcaccgtctcctca

SEQ ID NO: 1867 - protein, 250 aa, synthetic construct
  REGION 1..250: note = Synthetic
EIVLTQSPDFQSVTPKEKVTITCRASQTIGSSLHWYQQKPDQSPKLLIKHASQSFSGVPSRFSGSGSGTDFTLTVNSLEAEDAATYYCHQSSSLPWTFGQGTKVEIKGSTSGSGKPGSGEGSTKGQVQLVESGGGVVQPGRSLRLSCAASGFTFSSHDMHWVRQAPGKGLDWVAVIWSDGNKKYYVDSAKGRFTISRDNSKNTVYLQMNSLRAEDTAIYYCARGDNWNDEHSYYYYMDVWGKGTTVTVSS

SEQ ID NO: 1868 - protein, 250 aa, synthetic construct
  REGION 1..250: note = Synthetic
EIVLTQSPDFQSVTPKEKVTITCRASQTIGSSLHWYQQKPDQSPKLLIKHASQSFSGVPSRFSGSGSGTDFTLTVNSLEAEDAATYYCHQSSSLPWTFGQGTKVEIKGSTSGSGKPGSGEGSTKGQVQLVESGGGVVQPGRSLRLSCAASGFTFSSHDMHWVRQAPGKGLDWVAVIWSDGNNKYYADSAKGRFTISRDNSKNTVYLQMNSLRAEDTAIYYCARGDNWNDEHSYYYYMDVWGKGTTVTVSS

SEQ ID NO: 1869 - protein, 249 aa, synthetic construct
  REGION 1..249: note = Synthetic
DIQMTQSPSSLSASVGDRVTITCRASQSISNYLNWYHQKPGKAPKLLIYAASSLESGVPSRFSGSGSGTDFTLTISSLQPEDFATYYCQQSYSNPLTFGGGTKVESKGSTSGSGKPGSGEGSTKGQLQLVQSGAEVKKPGASVKVSCKASGYTFTNYGISWLRQAPGQGLEWMGWISGYNDNTHYAQKFQGRVTMTTDTSTTTAYMELRNLRSDDTAVYYCARDGIAARPVYYYYMDVWGKGTTVTVSS

SEQ ID NO: 1870 - protein, 250 aa, synthetic construct
  REGION 1..250: note = Synthetic
EIVLTQSPDFQSVTPKEKVTITCRASQSIGSSLHWYQQKPDQSPKLLIKFASQSFSGVPSRFSGSGSGTDFTLTIHSLEAEDAATYYCHQSGSLPWTFGQGTKVEIKGSTSGSGKPGSGEGSTKGQVQLVESGGGVVQPGRSLRLSCVASGFTFSSNDIYWVRQAPGKGLEWVAVIWYDGSNKYYADSVKGRFTISRDNSKNTLYLQMNSLRAEDTAVYYCARGDNWNDEHHYHYYMDVWGKGTTVTVSS

SEQ ID NO: 1871 - protein, 243 aa, synthetic construct
  REGION 1..243: note = Synthetic
VTQEPSFSVSPGGTVTLTCGLSSGSVSTSYYPSWYQQTPGQAPRTLIYSTNIRSSGVPDRFSGSILGNKAALTITGAQADDESDYYCVLYMGSDIVVFGGGTKLTVLGSTSGSGKPGSGEGSTKGQVQLVESGGGVVQPGRSLRLSCAASGFTFSSYGMHWVRQAPGKGLEWVAVISYDGSNKYYADSVKGRFTISRDNSKTTLYLQMNSLRAEDTAVYYCARDHYYYYMDVWGKGTTVTVSS

SEQ ID NO: 1872 - protein, 248 aa, synthetic construct
  REGION 1..248: note = Synthetic
EIVLTQSPATLSLSPGERATLSCRASQSVSSYFAWYQQKPGQAPRLLIYDASNRATGIPARFSGSGSGTDFTLTISSLEPEDFAVYYCQQRSNWPLTFGGGTKVEIKGSTSGSGKPGSGEGSTKGQLQLQESGPGLVKPSETLSLTCTVSGGSISSSSYYWGWIRQPPGKGLEWIGSLYYSGSTYYNPSLKSRVTISVDTSKNQFSLKLSSVTAADTAVYYCAAVQLERRGYFYMDVWGKGTTVTVSS

SEQ ID NO: 1873 - protein, 250 aa, synthetic construct
  REGION 1..250: note = Synthetic
QTVVTQEPSFSVSPGGTVTLTCGLTSGSVSTSYYPNWYQQTPGQAPRTLIYSTNIRSSGVPDRFSGSILGNKAALTITGAQADDESDYYCVLYMGSGMFIFGSGTKVTVLGSTSGSGKPGSGEGSTKGQVQLVESGGGVVQPGRSLRLSCAASGFTFSNYGMHWVRQAPGKGLEWMAVIWSDGHNKYYADSVKGRFTISRDNSKNTLYLQMNSLRAEDTAVYYCARAQLERRYFYYMDVWGKGTTVTVSS

SEQ ID NO: 1874 - protein, 250 aa, synthetic construct
  REGION 1..250: note = Synthetic
DIQMTQSPSSLSASVGDRVTITCRASQGISSWLAWYQQKPEKAPKSLIYAASSLQGGVPSRFSGSGSGTDFTLTISSLQPEDFATYYCQQYDSYPYTFGQGTKLEIKGSTSGSGKPGSGEGSTKGQVQLVQSGAEVKKPGASVKVSCKASGYTFTSYDINWVRQATGQGLEWMGWMIPNSGDTGSAQKFQGRVTMTRNTSIGTAYMELSSLRSEDTAVYYCARGGYCNSTSCYYYYMDVWGKGTTVTVSS

SEQ ID NO: 1875 - protein, 251 aa, synthetic construct
  REGION 1..251: note = Synthetic
DIQVTQSPTFLSASVGDRVTITCRASQGISSYLAWYQQKPGKAPKLLIYGASTLQSGVPSRFSGSGSGTEFTLTISSLQPEDFATYYCQQLNSYPWTFGQGTKVEIKGSTSGSGKPGSGEGSTKGQVQLVQSGAEVKKPGASVKVSCKASGYTFTSYDINWVRQATGQGLEWMGWMNPNSGNTVYAQKFQGRVTMTRNTSISTAYMELSSLRSEDTAVYYCARGGDFWSGYHDYYYYMDVWGKGTTVTVSS

SEQ ID NO: 1876 - protein, 249 aa, synthetic construct
  REGION 1..249: note = Synthetic
SYELTQPPSVSVSPGQTASITCSGDKLGDKYACWYQQKPGQSPVLVIYQDSKRPSGIPERFSGSNSGNTATLTISGTQAMDEADYYCQAWDSSTAVFGGGTQLTALGSTSGSGKPGSGEGSTKGQVQLQESGPGLVKPSETLSLTCTVSGGSISSYYWSWIRQPAGKGLEWIGRIYTSGSTNYNPSLKSRVTMSVDTSKNQFSLKLSSVTAADTAVYYCAREEYQLLPALYYYYYMDVWGKGTTVTVSS

SEQ ID NO: 1877 - protein, 250 aa, synthetic construct
  REGION 1..250: note = Synthetic
QTVVTQEPSFSVSPGGTVTLTCGLTSGSVSTSYYPNWYQQTPGQAPRTLIYSTNIRSSGVPDRFSGSILGNKAALTITGAQADDESDYYCVLYMGSGMFIFGSGTKVTVLGSTSGSGKPGSGEGSTKGQVQLVESGGGVVQPGRSLRLSCAATGFTFSSYGMHWVRQAPGKGLEWMVVIWSDGHNKYYADSVKGRFTISRDNSKNTLYLQMNSLRAEDTAVYYCARAQLERRYFYYMDVWGKGTTVTVSS

SEQ ID NO: 1878 - protein, 250 aa, synthetic construct
  REGION 1..250: note = Synthetic
EIVLTQSPDFQSVTPKEKVTITCRASQSIGSSLHWYQQKPDQSPMLLIKFASQSISGVPSRFSGSGSGTDFTLTINSLEAEDAAAYYCHQSSSLPWTFGQGTKVEIKGSTSGSGKPGSGEGSTKGQVQLVESGGGVVQPGRSLRLSCAASGFTFTSYDMHWVRQAPGKGLEWVTIIWFDGSNKYYADSVKGRFTISRDNSKNTLYLQMNSLSAEDTAVYYCARGDNWNDRYYYYYYMDVWGKGTTVTVSS

SEQ ID NO: 1879 - protein, 255 aa, synthetic construct
  REGION 1..255: note = Synthetic
DIVMTQPPLSSPVTLGQPASISCRSSQSLVHSDGNTYLSWLQQRPGQPPRLLIYKVSNRFSGVPDRFSGSGAGTDFTLKISRVEAEDVGVYYCTQATQFPHTFGQGTKLEIKGSTSGSGKPGSGEGSTKGQVQLVQSGAEVKKPGASVKVSCKASGYTFTSYGISWVRQAPGQGLEWMGWISAYNGHTDYTQKLQGRVTMTTDTSTTTAYMELRSLSSADTAVYYCVREVVLPTTDYYYFYMDVWGKGTTVTVSS

SEQ ID NO: 1880 - protein, 254 aa, synthetic construct
  REGION 1..254: note = Synthetic
DIQMTQSPSSLSASVGDRVTITCRASQGISSWLAWYQQKPEKAPKSLIYAASSLQSGVPSRFSGSGSGTDFTLTISSLQPEDFATYYCQQYNSYPYTFGQGTKLEIKGSTSGSGKPGSGEGSTKGQVQLVQSGAEVKKPGASVKVSCKVSGYTLTELSMHWVRQAPGKGLEWMGGFDPEDGETIYAQKFQGRVTMTEDTSTDTAYMELSSLRSEDTAVYYCATGRITMVRGVIIPYYYYYMDVWGKGTTVTVSS

SEQ ID NO: 1881 - protein, 252 aa, synthetic construct
  REGION 1..252: note = Synthetic
DIVMTQTPLSLSVTPGQPASISCKSSKSLLHSDGKTYLYWYLQKPGQPPQLLIYEVSNRFSGVPDRFSGSGSGTDFTLKISRVEAEDVGVYYCMQSIQFPWTFGQGTKVEIKGSTSGSGKPGSGEGSTKGQVQLVQSGTEVKKPGASVKVSCKASGYTFTNYGIGWVRQAPGQGLEWMGWIIAYNGYTKYAQILQGRVTMTTDTSTNTAYMELRSLRSDDTAVYYCARQQLGGDYHYYMDVWGKGTTVTVSS

SEQ ID NO: 1882 - protein, 252 aa, synthetic construct
  REGION 1..252: note = Synthetic
DIVMTQTPLSLSVTPGQPASISCKSSKSLLHSDGKTYLYWYLQKPGQPPQLLIYEVSTRFSGVPDRFSGSGSGTDFTLKISRVEAEDVGVYYCMQSIQFPWTFGQGTKVEIKGSTSGSGKPGSGEGSTKGQVQLVQSGTEVKKPGASVKVSCKASGYTFTNYGIGWVRQAPGQGLEWMGWIIAYNGYTKYAQILQGRVTMTTDTSTNTAYMELRSLRSDDTAVYYCARQQLGGDYHYYMDVWGKGTTVTVSS

SEQ ID NO: 1883 - protein, 250 aa, synthetic construct
  REGION 1..250: note = Synthetic
DIQMTQSPSSLSASVGDRVTITCRASQGISNWLAWYQQKPEKAPKSLIYAASSLQGGVPSRFSGSGSGTDFTLTISSLQPEDFATYYCQQYDSYPYTFGQGTKLEIKGSTSGSGKPGSGEGSTKGQVQLVQSGTEVKKPGASVKVSCKTSGYTFTSYDINWVRQATGQGLEWMGWMNPISGDTGSAQKFQGRVTMTRNTSIGTAYMELSSLRSEDTAVYYCARGGYCSSTSCYYYYMDVWGKGTTVTVSS

SEQ ID NO: 1884 - protein, 250 aa, synthetic construct
  REGION 1..250: note = Synthetic
DIQMTQSPSSLSASVGDRVTITCRASQGISSWLAWYQQKPEKAPKSLIYAASSLQGGVPSRFSGSGSGTDFTLTISSLQPEDFATYYCQQYDSYPYTFGQGTKLEIKGSTSGSGKPGSGEGSTKGQVQLVQSGAEVKKPGASVKVSCKASGYTFTSYDINWVRQATGQGLEWMGWMIPNSGDTGSAQKFQGRVTMTRNTSISTAYMELSSLRSEDTAVYYCARGGYCNSTSCYYYYMDVWGKGTTVTVSS

SEQ ID NO: 1885 - protein, 251 aa, synthetic construct
  REGION 1..251: note = Synthetic
EIVLTQSPGTLSLSPGERATLSCRASQSVSSSYLAWYQQKPGQAPRLLIYGASSRATGIPDRFSDSGSGTDFTLTISRLEPEDFAVYYCQHYGSSPPRITFGPGTKVDIKGSTSGSGKPGSGEGSTKGEVQLLESGGGLVQPGGSLRLSCAASGFTFSSYVMNWVRQAPGKGLEWVSSVSGSGNNSFYADSVKGRFTISRDNSKNTLYLQMNSLRAEDTAVYYCASRSSSYLYYYYYMDVWGKGTTVTVSS

SEQ ID NO: 1886 - DNA, 750 bp, synthetic construct
  misc_feature 1..750: note = Synthetic
  source 1..750: mol_type = other DNA
gaaattgtgctgactcagtctccagactttcagtctgtgactccaaaggagaaagtcaccatcacctgccgggccagtcagaccattggcagtagcttacactggtaccagcagaaaccagatcagtctccaaagctcctcatcaagcatgcttcccagtccttctcaggggtcccctcgaggttcagtggcagtggatctgggacagatttcaccctcaccgtcaatagcctggaagctgaagatgctgcaacgtattactgtcatcagagtagtagtttaccgtggacgttcggccaagggaccaaggtggaaatcaaaggcagcaccagcggcagcggcaagcccggctccggagagggcagcaccaagggccaggtgcagctggtggagtctgggggaggcgtggtccagcctgggaggtccctgagactttcctgtgcagcgtctggattcaccttcagcagtcatgacatgcactgggtccgccaggctccaggcaaggggctggactgggtggcagttatatggagtgatggaaataaaaaatactatgtagactccgcgaagggccggttcaccatctccagagacaattccaagaacacggtgtatctgcaaatgaacagcctgagagccgaggacacggctatatattactgtgcgagaggtgacaactggaacgacgaacactcctactattactacatggacgtctggggcaaggggaccacggtcaccgtctcctca

SEQ ID NO: 1887 - DNA, 750 bp, synthetic construct
  misc_feature 1..750: note = Synthetic
  source 1..750: mol_type = other DNA
gaaattgtgctgactcagtctccagactttcagtctgtgactccaaaggagaaagtcaccatcacctgccgggccagtcagaccattggcagtagcttacactggtaccagcagaaaccagatcagtctccaaagctcctcatcaagcatgcttcccagtccttctcaggggtcccctcgaggttcagtggcagtggatctgggacagatttcaccctcaccgtcaatagcctggaagctgaagatgctgcaacgtattactgtcatcagagtagtagtttaccgtggacgttcggccaagggaccaaggtggaaatcaaaggcagcaccagcggcagcggcaagcccggctccggagagggcagcaccaagggccaggtgcagctggtggagtctgggggaggcgtggtccagcctgggaggtccctgagactttcctgtgcagcgtctggattcaccttcagtagtcatgacatgcactgggtccgccaggctccaggcaaggggctggactgggtggcagttatatggagtgatggaaataataaatactatgcagactccgcgaagggccggttcaccatctccagagacaattccaagaacacggtgtatctgcaaatgaacagcctgagagccgaggacacggctatatattactgtgcgagaggtgacaactggaacgacgaacactcctactattactacatggacgtctggggcaaggggaccacggtcaccgtctcctca

SEQ ID NO: 1888 - DNA, 747 bp, synthetic construct
  misc_feature 1..747: note = Synthetic
  source 1..747: mol_type = other DNA
gacatacagatgacccagtctccatcctccctgtctgcatctgtaggagacagagtcaccatcacttgccgggcaagccagagcattagcaactatttaaattggtatcaccagaaaccagggaaagcccctaagctcctgatctatgctgcatccagtttggaaagtggggtcccatcaaggttcagtggcagtggatctgggacagatttcactctcaccatcagcagtctgcaacctgaagattttgcaacttactactgtcaacagagttacagtaacccgctcactttcggcggagggaccaaggtggagagcaaaggcagcaccagcggcagcggcaagcccggctccggagagggcagcaccaagggccagcttcagctggtgcagtctggagctgaggtgaagaagcctggggcctcagtgaaggtctcctgcaaggcttctggttacacctttaccaactatggtatcagctggttgcgacaggcccctggacaagggcttgagtggatgggatggatcagtggttacaatgataacacacactatgcacagaagttccagggcagagtcaccatgaccacagacacatccacgaccacagcctacatggaactgaggaacctgagatctgacgacacggccgtgtattactgtgcgagagatgggatagcagctcgtccagtctactactactacatggacgtctggggcaaagggaccacggtcaccgtctcctca

SEQ ID NO: 1889 - DNA, 750 bp, synthetic construct
  misc_feature 1..750: note = Synthetic
  source 1..750: mol_type = other DNA
gaaattgtgctgactcagtctccagactttcagtctgtgactccaaaggagaaagtcaccatcacctgccgggccagtcagagcattggtagtagcttacactggtaccagcagaaaccagatcagtctccaaagctcctcatcaagtttgcttcccagtccttctcaggggtcccctcgaggttcagtggcagtggatctgggacagatttcaccctcaccatccatagcctggaagctgaagatgctgcaacgtattactgtcatcagagtggtagtttaccgtggacgttcggccaagggaccaaggtggaaatcaaaggcagcaccagcggcagcggcaagcccggctccggagagggcagcaccaagggccaggtgcagctggtggagtctgggggaggcgtggtccagcctgggaggtccctgagactctcctgtgtagcgtctggattcaccttcagtagcaatgacatatactgggtccgccaggccccaggcaaggggctggagtgggtggcagttatatggtatgatggaagtaataaatactatgcagactccgtgaagggccgattcaccatctccagagacaattccaagaacacgctgtatctgcaaatgaacagcctgagagccgaggacacggctgtgtattactgtgcgagaggtgacaactggaacgacgaacaccactaccactactacatggacgtctggggcaaagggaccacggtcaccgtctcctca

SEQ ID NO: 1890 - DNA, 730 bp, synthetic construct
  misc_feature 1..730: note = Synthetic
  source 1..730: mol_type = other DNA
ggtgacccaggagccatcgttctcagtgtcccctggagggacagtcacactcacttgtggcttgagctctggctcagtctctactagttactaccccagctggtaccagcagaccccaggccaggctccacgcacgctcatctacagcacaaacattcgctcttctggggtccctgatcgcttctctggctccatccttgggaacaaagctgccctcaccatcacgggggcccaggcagatgatgaatctgattattactgtgtgctgtatatgggtagtgacattgtggtattcggcggagggaccaagctgaccgtcctaggcagcaccagcggcagcggcaagcccggctccggagagggcagcaccaagggccaggtgcagttggtggagtctgggggaggcgtggtccagcctgggaggtccctgagactctcctgtgcagcctctggattcaccttcagtagctatggcatgcactgggtccgccaggctccaggcaaggggctggagtgggtggcagttatatcatatgatggaagtaataaatactatgcagactccgtgaagggccgattcaccatctccagggacaattccaagaccacgctgtatctgcaaatgaacagcctgagagctgaggacacggctgtgtattactgtgcgagagatcactactactactacatggacgtctggggcaaagggaccacggtcaccgtctcctca

SEQ ID NO: 1891 - DNA, 744 bp, synthetic construct
  misc_feature 1..744: note = Synthetic
  source 1..744: mol_type = other DNA
gaaattgtgttgacacagtctccagccaccctgtctttgtctccaggggaaagagccaccctctcctgcagggccagtcagagtgttagcagctactttgcctggtaccaacagaaacctggccaggctcccaggctcctcatctatgatgcatccaacagggccactggcatcccagccaggttcagtggcagtgggtctgggacagacttcactctcaccatcagcagcctggagcctgaagattttgcagtttattactgtcagcagcgtagcaactggcctctcactttcggcggagggaccaaggtggagatcaaaggcagcaccagcggcagcggcaagcccggctccggagagggcagcaccaagggccaactgcagctgcaggagtcgggcccaggactggtgaagccttcggagaccctgtccctcacctgcactgtctctggtggctccatcagcagtagtagttactactggggctggatccgccagcccccagggaaggggctggagtggattgggagtctctattatagtgggagcacctactacaacccgtccctcaagagtcgagtcaccatatccgttgacacgtccaagaaccagttctccctgaagctgagctctgtgaccgccgcagacacggctgtgtattactgtgcggccgtacaactggaacgacgtgggtacttctacatggacgtctggggcaaagggaccacggtcaccgtctcctca

SEQ ID NO: 1892 - DNA, 750 bp, synthetic construct
  misc_feature 1..750: note = Synthetic
  source 1..750: mol_type = other DNA
cagactgtagtgacccaggaaccatcgttctcagtgtcccctggagggacagtcacactcacttgtggcttgacctctggctcagtctctactagttactaccccaactggtaccagcagaccccaggccaggctccacgcacgctcatctatagtacaaatattcgctcttctggggtccctgatcgcttctctggctccatccttgggaacaaagctgccctcaccatcacgggggcccaggcagatgatgaatctgattattactgtgtgctgtatatgggtagtggcatgtttattttcggcagtggaaccaaggtcactgtcctaggcagcaccagcggcagcggcaagcccggctccggagagggcagcaccaagggccaggtgcagctggtggagtctgggggaggcgtggtccagcctgggaggtccctgagactctcctgtgcagcatctggattcaccttcagtaactatggcatgcactgggtccgccaggctccaggcaaggggctggagtggatggcagttatatggtctgatggacataataaatactatgcagactccgtgaagggccgattcaccatctccagagacaattccaagaacacgctgtatctgcaaatgaacagcctgagagccgaggacacggctgtgtattactgtgcgagggcacaattggaacgacggtacttctactacatggacgtctggggcaaagggaccacggtcaccgtctcctca

SEQ ID NO: 1893 - DNA, 750 bp, synthetic construct
  misc_feature 1..750: note = Synthetic
  source 1..750: mol_type = other DNA
gacatccagatgacccagtctccatcctcactgtctgcatctgtaggagacagagtcaccatcacttgtcgggcgagtcagggtattagcagctggttagcctggtatcagcagaaaccagagaaagcccctaagtccctgatctatgctgcatccagtttacagggtggggtcccatcaaggttcagcggcagtggatctgggacagatttcactctcaccatcagcagcctgcagcctgaagattttgcaacttattactgccaacagtatgatagttacccgtacacttttggccaggggaccaagctggagatcaaaggcagcaccagcggcagcggcaagcccggctccggagagggcagcaccaagggccaggtgcagctggtgcagtctggggctgaggtgaagaagcctggggcctcagtgaaggtctcctgcaaggcttctggatacaccttcaccagttatgatatcaactgggtgcgacaggccactggacaagggcttgagtggatgggatggatgatccctaacagtggtgacacaggctctgcacagaagttccagggcagagtcaccatgaccaggaacacctccataggcacagcctacatggagctgagcagcctgagatctgaggacacggccgtttattactgtgcgagaggcggatattgtaatagtaccagttgctactactactacatggacgtctggggcaaagggaccacggtcaccgtctcctca

SEQ ID NO: 1894 - DNA, 753 bp, synthetic construct
  misc_feature 1..753: note = Synthetic
  source 1..753: mol_type = other DNA
gacatccaggtgacccagtctccaaccttcctgtctgcatctgtaggagacagagtcaccatcacttgccgggccagtcagggcattagcagttatttagcctggtatcagcaaaaaccagggaaagcccctaagctcctgatctatggtgcatccactttgcaaagtggggtcccatcaaggttcagcggcagtggatctgggacagaattcactctcacaatcagcagcctgcagcctgaagattttgcaacttattactgtcaacagcttaatagttacccgtggacgttcggccaagggaccaaggtggaaatcaaaggcagcaccagcggcagcggcaagcccggctccggagagggcagcaccaagggccaggtgcagctggtgcagtctggggctgaggtgaagaagcctggggcctcagtgaaggtctcctgcaaggcttctggatacaccttcaccagttatgatatcaactgggtgcgacaggccactggacaagggcttgagtggatgggatggatgaaccctaatagtggtaacacagtctatgcacagaagttccagggcagagtcaccatgaccaggaacacctccataagcacagcctacatggagctgagcagcctgagatctgaggacacggccgtgtattactgtgcgagaggaggcgatttttggagtggttaccatgactactactactacatggacgtctggggcaaagggaccacggtcaccgtctcctca

SEQ ID NO: 1895 - DNA, 747 bp, synthetic construct
  misc_feature 1..747: note = Synthetic
  source 1..747: mol_type = other DNA
tcctatgagctgactcagccaccctcagtgtccgtgtccccaggacagacagccagcatcacctgctctggagataaattgggggataaatatgcttgctggtatcagcagaagccaggccagtcccctgtgctggtcatctatcaagatagcaagcggccctcagggatccctgagcgattctctggctccaactctgggaacacagccactctgaccatcagcgggacccaggctatggatgaggctgactattactgtcaggcgtgggacagcagcactgctgtgttcggaggaggcacccagctgaccgccctcggcagcaccagcggcagcggcaagcccggctccggagagggcagcaccaagggccaggtgcagctgcaggagtcgggcccaggactggtgaagccttcggagaccctgtccctcacctgcactgtctctggtggctccatcagtagttactactggagctggatccggcagcccgccgggaagggactggagtggattgggcgtatctataccagtgggagcaccaactacaacccctccctcaagagtcgagtcaccatgtcagtagacacgtccaagaaccagttctccctgaagctgagctctgtgaccgccgcggacacggccgtgtattactgtgcgagagaggagtaccagctgctaccggccctctactactactactacatggacgtctggggcaaagggaccacggtcaccgtctcctca

SEQ ID NO: 1896 - DNA, 750 bp, synthetic construct
  misc_feature 1..750: note = Synthetic
  source 1..750: mol_type = other DNA
cagactgtagtgacccaggaaccatcgttctcagtgtcccctggagggacagtcacactcacttgtggcttgacctctggctcagtctctactagttactaccccaactggtaccagcagaccccaggccaggctccacgcacgctcatctacagcacaaatattcgctcttctggggtccctgatcgcttctctggctccatccttgggaacaaagctgccctcaccatcacgggggcccaggcagatgatgaatctgattattactgtgtgctgtatatgggtagtggcatgtttattttcggcagtggaaccaaggtcactgtcctaggcagcaccagcggcagcggcaagcccggctccggagagggcagcaccaagggccaggtgcagctggtggagtctgggggaggcgtggtccagcctgggaggtccctgagactctcctgtgcagcaactggattcaccttcagtagctatggcatgcactgggtccgccaggctccaggcaaggggctggagtggatggtagttatatggtctgatggacataataaatactatgcagactccgtgaagggccgattcaccatctccagagacaattccaagaacacgctgtatctgcaaatgaacagcctgagagccgaggacacggctgtgtattactgtgcgagggcacaactggaacgacggtacttctactacatggacgtctggggcaaagggaccacggtcaccgtctcctca

SEQ ID NO: 1897 - DNA, 750 bp, synthetic construct
  misc_feature 1..750: note = Synthetic
  source 1..750: mol_type = other DNA
gaaattgtgctgactcagtctccagactttcagtctgtgactccaaaggagaaagtcaccatcacctgccgggccagtcagagcattggtagtagcttacactggtaccagcagaaaccagatcagtctccaatgctcctcatcaagtttgcttcccagtccatctcaggggtcccctcgaggttcagtggcagtggatctgggacagatttcaccctcaccatcaatagcctggaagctgaagatgctgcagcgtattactgtcatcagagtagtagtttaccgtggacgttcggccaagggaccaaggtggaaatcaaaggcagcaccagcggcagcggcaagcccggctccggagagggcagcaccaagggccaggtgcagctggtggagtctgggggaggcgtggtccagcctgggaggtccctgagactctcctgtgcagcgtctggattcaccttcactagttatgacatgcactgggtccgccaggctccaggcaaggggctggagtgggtgacaattatatggtttgatggaagtaataaatactatgcagactccgtgaagggccgattcaccatctccagagacaattccaagaacacgctgtatctgcaaatgaacagcctgagcgccgaggacacggctgtgtattactgtgcgagaggagacaactggaacgaccggtactactactactactacatggacgtctggggcaaagggaccacggtcaccgtctcctca

SEQ ID NO: 1898 - DNA, 765 bp, synthetic construct
  misc_feature 1..765: note = Synthetic
  source 1..765: mol_type = other DNA
gatattgtgatgacccagcctccactctcctcgcctgtcacccttggacagccggcctccatctcctgcaggtctagtcaaagcctcgtacacagtgatggaaacacctacttgagttggcttcagcagaggccaggccagcctccaagactcctaatttataaggtttctaaccggttctctggggtcccagacagattcagtggcagtggggcagggacagatttcacactgaaaatcagcagggtggaagctgaggatgtcggggtttattactgcacgcaagctacacaatttcctcacacttttggccaggggaccaagctggagatcaaaggcagcaccagcggcagcggcaagcccggctccggagagggcagcaccaagggccaggttcagctggtgcagtctggagctgaggtgaagaagcctggggcctcagtgaaggtctcctgcaaggcttctggttacacctttaccagctatggtatcagctgggtgcgacaggcccctggacaagggcttgagtggatggggtggatcagcgcttacaatggtcacacagactatacacagaaactccagggcagagtcaccatgaccacagacacatccacgaccacagcctacatggaactgaggagcctgagctctgccgacacggccgtgtattactgtgtgagagaagtggtacttcccaccacggactactactacttttacatggacgtctggggcaaagggaccacggtcaccgtctcctca

SEQ ID NO: 1899 - DNA, 762 bp, synthetic construct
  misc_feature 1..762: note = Synthetic
  source 1..762: mol_type = other DNA
gacatccagatgacccagtctccatcctcactgtctgcatctgtaggagacagagtcaccatcacttgtcgggcgagtcagggtattagcagctggttagcctggtatcagcagaaaccagagaaagcccctaagtccctgatctatgctgcatccagtttgcaaagtggggtcccatcaaggttcagcggcagtggatctgggacagatttcactctcaccatcagcagcctgcagcctgaagattttgcaacttattactgccaacagtataatagttacccgtacacttttggccaggggaccaagctggagatcaaaggcagcaccagcggcagcggcaagcccggctccggagagggcagcaccaagggccaggtccagctggtacagtctggggctgaggtgaagaagcctggggcctcagtgaaggtctcctgcaaggtttccggatacaccctcactgaattatccatgcactgggtgcgacaggctcctggaaaagggcttgagtggatgggaggttttgatcctgaagatggtgaaacaatctacgcacagaagttccagggcagagtcaccatgaccgaggacacatctacagacacagcctacatggagctgagcagcctgagatctgaggacacggccgtgtattactgtgcaacaggacgtattactatggttcggggagttattatcccctactactactactacatggacgtctggggcaaagggaccacggtcaccgtctcctca

SEQ ID NO: 1900 - DNA, 756 bp, synthetic construct
  misc_feature 1..756: note = Synthetic
  source 1..756: mol_type = other DNA
gatattgtgatgacccagactccactctctctgtccgtcacccctggacagccggcctccatctcctgcaagtctagtaagagcctcctgcatagtgatggaaagacctatttgtattggtacctgcagaagccaggccagcctccacagctcctgatctatgaagtttccaaccggttctctggagtgccagataggttcagtggcagcgggtcagggacagatttcacactgaaaatcagccgggtggaggctgaggatgttggggtttattactgcatgcaaagtatacaatttccgtggacgttcggccaagggaccaaggtggaaatcaagggcagcaccagcggcagcggcaagcccggctccggagagggcagcaccaagggccaggttcagctggtgcagtctggaactgaggtgaagaagcctggggcctcagtgaaggtctcctgcaaggcttctggttacacctttaccaactatggtatcggctgggtgcgacaggcccctggacaagggcttgagtggatgggatggatcatcgcttacaatggttacacaaagtatgcacagattctccagggcagagtcaccatgaccacagacacatccacgaacacagcttatatggaactgaggagcctgagatctgacgacacggccgtgtattactgtgcgagacagcagctcgggggggactaccactactacatggacgtctggggcaaagggaccacggtcaccgtctcctca

SEQ ID NO: 1901 - DNA, 756 bp, synthetic construct
  misc_feature 1..756: note = Synthetic
  source 1..756: mol_type = other DNA
gatattgtgatgacccagactccactctctctgtccgtcacccctggacagccggcctccatctcctgcaagtctagtaagagcctcctgcatagtgatggaaagacctatttgtattggtacctgcagaagccaggccagcctccacagctcctgatctatgaagtttccacccggttctctggagtgccagataggttcagtggcagcgggtcagggacagatttcacactgaaaatcagccgggtggaggctgaggatgttggggtttattactgcatgcaaagtatacagtttccgtggacgttcggccaagggaccaaggtggaaatcaaaggcagcaccagcggcagcggcaagcccggctccggagagggcagcaccaagggccaggttcagctggtgcagtctggaactgaggtgaagaagcctggggcctcagtgaaggtctcctgcaaggcttctggttacacctttaccaactatggtatcggctgggtgcgacaggcccctggacaagggcttgagtggatgggatggatcatcgcttacaatggttacacaaagtatgcacagattctccagggcagagtcaccatgaccacggacacatccacgaacacagcctatatggaactgaggagcctgagatctgacgacacggccgtgtattactgtgcgcgacagcagctcgggggggactaccactactacatggacgtctggggcaaagggaccacggtcaccgtctcttca

SEQ ID NO: 1902 - DNA, 750 bp, synthetic construct
  misc_feature 1..750: note = Synthetic
  source 1..750: mol_type = other DNA
gacatccagatgacccagtctccatcctcactgtctgcctctgtaggagacagagtcaccatcacttgtcgggcgagtcagggtattagcaactggttagcctggtatcagcagaaaccagagaaagcccctaagtccctgatctatgctgcatccagtttgcaaggtggggtcccatcaagattcagcggcagtggatctgggacagatttcactctcaccatcagcagcctgcagcctgaagattttgcaacttattactgccaacagtatgatagttacccgtacacttttggccaggggaccaagctggagatcaaaggcagcaccagcggcagcggcaagcccggctccggagagggcagcaccaagggccaggtgcagctggtgcagtctgggactgaggtgaagaagcctggggcctcagtgaaggtctcctgtaagacttctggatacaccttcaccagttatgatatcaactgggtgcgacaggccactggacaagggcttgagtggatgggatggatgaaccctatcagtggtgacacaggctctgcacagaagttccagggcagagtcaccatgaccaggaacacctccataggcacagcctacatggagctgagcagcctgagatctgaggacacggccgtttattactgtgcgagaggcggatattgtagtagtaccagctgctactactactacatggacgtctggggcaaagggaccacggtcaccgtctcctca

SEQ ID NO: 1903 - DNA, 750 bp, synthetic construct
  misc_feature 1..750: note = Synthetic
  source 1..750: mol_type = other DNA
gacatccagatgacccagtctccatcctcactgtctgcatctgtaggagacagagtcaccatcacttgtcgggcgagtcagggtattagcagctggttagcctggtatcagcagaaaccagagaaagcccctaagtccctgatctatgctgcatccagtttacaaggtggggtcccatcaaggttcagcggcagtggatctgggacagatttcactctcaccatcagcagcctgcagcctgaagattttgcaacttattactgccaacagtatgatagttacccgtacacttttggccaggggaccaagctggagatcaaaggcagcaccagcggcagcggcaagcccggctccggagagggcagcaccaagggccaggtgcagctggtgcagtctggggctgaggtgaagaagcctggggcctcagtgaaggtctcctgcaaggcttctggatacaccttcaccagttatgatatcaactgggtgcgacaggccactggacaagggcttgagtggatgggatggatgatccctaacagtggtgacacaggctctgcacagaagttccagggcagagtcaccatgaccaggaacacctccataagcacagcctacatggagctgagcagcctgagatctgaggacacggccgtttattactgtgcgagaggcggatattgtaatagtaccagttgctactactactacatggacgtctggggcaaagggaccacggtcaccgtctcctca

SEQ ID NO: 1904 - DNA, 753 bp, synthetic construct
  misc_feature 1..753: note = Synthetic
  source 1..753: mol_type = other DNA
gaaattgtgttgacgcagtctccaggcaccctgtctttgtctccaggggaaagagccaccctctcctgcagggccagtcagagtgttagcagcagctacttagcctggtaccagcagaaacctggccaggctcccaggctcctcatctatggtgcatccagcagggccactggcatcccagacaggttcagtgacagtgggtctgggacagacttcactctcaccatcagcagactggagcctgaagattttgcagtgtattactgtcagcactatggtagctcacctccgaggatcactttcggccctgggaccaaagtggatatcaaaggcagcaccagcggcagcggcaagcccggctccggagagggcagcaccaagggcgaggtgcagttgttggagtctgggggaggcttggtacaacctggggggtccctgagactctcctgtgcagcctctggattcacctttagcagctatgtcatgaactgggtccgccaggctccagggaaggggctggaatgggtctcatctgttagtggtagtggtaataactcattctacgcagactccgtgaagggccggttcaccatctccagagacaattccaagaacacgctgtatctgcaaatgaacagcctgagagccgaggacacggccgtatattactgtgcgagtcgtagttccagttatctctactactactactacatggacgtctggggcaaagggaccaccgtcaccgtctcctca

SEQ ID NO: 1905 - DNA, 750 bp, synthetic construct
  misc_feature 1..750: note = Synthetic
  source 1..750: mol_type = other DNA
gagatcgtgctgacccagagccccgacttccagtctgtgacacctaaggaaaaggttacaattacctgtagagcttcccagaccatcggctcttctctgcactggtaccagcagaaacctgatcagtctccaaagctgctgatcaagcacgccagccagagcttctctggcgtccccagccggttttctggcagcggcagcggaacagattttacactgacagtgaactcactggaagccgaggatgccgccacctactactgccatcagagctccagcctcccttggaccttcggccagggcacgaaggtggaaatcaaaggcagcaccagcggcagcggcaagcccggctccggagagggcagcaccaagggccaagtgcagctggtggagagcggcggcggagtggtgcaacctggaagaagcctgcggctgagctgcgctgctagcggcttcaccttcagcagccacgacatgcactgggtgcggcaggcccctggcaagggcctggactgggtcgccgtgatctggagcgacggcaacaagaagtactacgtggacagcgccaagggcagattcaccatcagccgcgacaatagcaagaacaccgtgtacctgcagatgaacagcctgagagccgaggacaccgccatctactattgcgccagaggcgataattggaacgacgagcacagctactattactacatggacgtgtggggcaaaggcacaaccgtgaccgtgtcctcc

SEQ ID NO: 1906 - DNA, 750 bp, synthetic construct
  misc_feature 1..750: note = Synthetic
  source 1..750: mol_type = other DNA
gagatcgtgctgacacagtccccagattttcagagcgtgacccccaaggaaaaggtgacaatcacctgcagagccagccagaccatcggcagcagcctgcactggtaccagcagaaacccgatcagtctcctaagctgctgatcaagcacgccagccagagcttcagcggcgttcccagcaggttcagcggaagcggcagcggcaccgacttcaccctgaccgtgaactctctcgaggccgaggacgccgctacatactactgccaccagagcagctccctgccttggaccttcggccagggcaccaaggtcgaaattaagggcagcaccagcggcagcggcaagcccggctccggagagggcagcaccaagggccaagtgcagctggtggaaagcggcggcggagtggtgcaacctggcagatctctgcggctgtcttgtgccgcctctggatttacattcagctctcatgatatgcactgggtgcggcaggcccctggcaaaggcctggactgggtcgccgtgatctggagcgacggcaacaacaagtactacgccgacagcgccaagggaagattcaccatcagccgggacaattctaaaaacaccgtgtacctgcagatgaacagcctgagagctgaggacaccgccatctactattgcgccagaggagataattggaacgacgagcacagctactactactatatggacgtgtggggcaagggcacaacagtgaccgtgtcctcc

SEQ ID NO: 1907 - DNA, 747 bp, synthetic construct
  misc_feature 1..747: note = Synthetic
  source 1..747: mol_type = other DNA
gatatccagatgacccagagccccagcagcctgagcgccagcgtgggcgaccgggtcacaatcacctgcagagccagccagagcatcagcaattacctgaactggtaccaccagaagcccggcaaagcccctaagctgctgatctacgctgcttctagcctcgagagcggcgtgcctagcagattcagcggcagcggcagcggaacagatttcaccctgacaatcagctctctgcaacctgaggacttcgccacatactattgtcagcagtcctacagcaatcctctgaccttcggcggcggcacaaaggtggaatctaagggcagcaccagcggcagcggcaagcccggctccggagagggcagcaccaagggccaactgcagctggtgcagagcggagccgaggtgaagaagcctggcgctagcgttaaggtgtcctgcaaggcctccggctacacctttaccaactacggcatctcctggctgcgccaggccccaggccagggcctggagtggatgggctggatctccggatacaacgacaacacccactacgcccagaaattccagggtagagtgactatgaccaccgataccagcacaacaacagcctacatggaactgagaaacctgcggagcgacgacaccgccgtgtactactgcgcccgggacggcattgccgctagacctgtgtactactattacatggacgtgtggggcaagggcaccaccgtgacagtgtcttct

SEQ ID NO: 1908 - DNA, 744 bp, synthetic construct
  misc_feature 1..744: note = Synthetic
  source 1..744: mol_type = other DNA
gagattgttctgacccagagccctgatttccagagcgtgacccccaaggaaaaggtgacaatcacctgccgggccagccaaagcatcggctccagcctgcactggtatcagcagaagcccgaccagtccccaaagctgctgatcaaattcgcctctcagtcattcagcggcgtgccttcccggttcagcggaagcggcagcggcacagactttaccctgacaatccacagcctggaagccgaggacgccgctacatactactgccaccagagcggcagcctgccctggacattcggccagggcacgaaggtggagatcaagggcagcaccagcggcagcggcaagcccggctccggagagggcagcaccaagggccaagtgcagctggtggagagcgggggaggtgtcgtgcagcctggaagaagcctcagactgtcttgtgtggccagcggctttaccttcagctctaatgacatctactgggtgcggcaggcccctggcaagggcctggaatgggtcgctgtgatctggtacgacggcagcaacaaatactacgccgattctgtgaagggcagattcaccatcagcagagataattctaagaacaccctgtacctgcagatgaacagcctgagagccgaggataccgccgtgtactattgcgccaggggcgacaactggaacgacgagcaccattaccactactacatggacgtgtggggcaaaggcaccaccgtgaccgtg

SEQ ID NO: 1909 - DNA, 738 bp, synthetic construct; identical to SEQ ID NO: 1814
  misc_feature 1..738: note = Synthetic
  source 1..738: mol_type = other DNA

SEQ ID NO: 1910 - DNA, 744 bp, synthetic construct
  misc_feature 1..744: note = Synthetic
  source 1..744: mol_type = other DNA
gagatcgtgctgacacagtcccctgctaccctgagcctgagccctggcgagcgggccaccctgagctgcagagccagccagagcgtgtccagctactttgcctggtatcagcagaagcctggccaggccccacggctgctgatctacgacgcctctaatagagccacaggcatcccagctagattcagcggctccggctccggaaccgatttcaccctgaccatctctagcctcgagcctgaggacttcgccgtttactattgtcagcaaagaagcaactggcctctgacatttggcggaggcacaaaggtggaaatcaagggcagcaccagcggcagcggcaagcccggctccggagagggcagcaccaagggccaactgcagctgcaggagagcggccctggactggtgaagcccagcgagacactgagcctgacatgcaccgtgtccggaggctctatcagcagcagcagctactactggggatggattagacagccccccggcaagggcctggaatggatcggcagcctgtactacagcggcagcacctactacaaccccagcctgaagtctagagtgaccatcagcgtggacaccagcaagaaccagttcagcctgaaactgagctctgtcacagccgccgataccgccgtgtactactgcgccgctgtgcagctggaaaggcggggctacttctacatggacgtgtggggcaaaggcaccaccgtgacagtgtctagc

SEQ ID NO: 1911 - DNA, 750 bp, synthetic construct
  misc_feature 1..750: note = Synthetic
  source 1..750: mol_type = other DNA
cagaccgtcgtgacccaggagcctagcttcagcgtgtccccaggcggaaccgtcacactgacatgcggcctcacaagcggcagcgtgtccaccagctactaccccaactggtaccagcagacacctggacaggcccctagaaccctgatctacagcaccaacatccggagcagcggagtgcccgacagattttctggcagcatcctgggcaacaaggccgctctgaccatcaccggcgctcaggccgacgacgagagcgactactactgcgtgctgtacatgggcagcggcatgttcatcttcggcagcggcacaaaggtgacagtgctgggcagcaccagcggcagcggcaagcccggctccggagagggcagcaccaagggccaagtgcaactggtggaaagcggcggcggcgttgtgcagcctggcagaagcctgcggctgtcatgcgccgccagcggttttaccttctctaattacggcatgcactgggtgcggcaggctcccggcaaaggcctggaatggatggccgtgatctggtccgatggccacaacaagtactacgccgatagcgtgaaaggcagattcaccattagcagagataattctaagaacaccctgtacctgcagatgaacagcctgcgcgccgaggacaccgccgtgtactattgtgccagagcccagctggagcggagatacttctactatatggacgtgtggggcaagggcaccaccgtgacagtgtctagc

SEQ ID NO: 1912 - DNA, 750 bp, synthetic construct
  misc_feature 1..750: note = Synthetic
  source 1..750: mol_type = other DNA
gacatccagatgacacagagccctagcagcctgtctgcttccgtgggcgatagagtgacaatcacctgccgggcctcccagggcatcagctcctggctggcctggtaccagcagaagcctgagaaggcccctaagagcctgatctacgccgcttctagcctgcagggaggcgtgccaagtcggttcagcggcagcggcagcggcacagacttcaccctgaccatttcttctctgcaacctgaggacttcgccacctactactgtcagcaatacgacagctacccctacacctttggccagggcaccaagctggaaatcaagtggcagcaccagcggcagcggcaagcccggctccggagagggcagcaccaagggccaggttcagctggtgcagagcggagccgaggtgaaaaagcccggcgcaagcgtgaaggtgtcttgcaaggcctccggatataccttcaccagctacgatatcaactgggtgcggcaggccacaggccagggtctcgaatggatgggctggatgatccccaattctggcgacacaggcagcgcccaaaagttccagggcagagtgacaatgaccagaaacaccagcatcggaacagcctacatggaactgagctccctgagaagcgaggataccgccgtgtactattgtgccagaggcggctactgcaacagcacctcctgctactactactacatggacgtgtggggcaaaggcacaaccgtcaccgtgagctc

SEQ ID NO: 1913 - DNA, 753 bp, synthetic construct
  misc_feature 1..753: note = Synthetic
  source 1..753: mol_type = other DNA
gatatccaggtcacacagagccctacctttctgagcgcttctgtgggcgaccgggtgaccatcacatgccgggccagccagggtattagcagctacctggcttggtaccagcagaagcccggcaaagcccctaagctgctgatctacggcgcttctaccctgcagtccggcgtgcccagcagattcagcggcagcggaagcggaacagagttcaccctgacaatctccagcctccaacctgaggacttcgccacatactattgtcagcaactgaatagctatccttggacattcggccagggcaccaaggtggaaatcaagggcagcaccagcggcagcggcaagcccggctccggagagggcagcaccaagggccaggttcaactggtgcagagcggcgccgaggtgaagaagcctggcgccagcgtgaaagtgtcctgcaaggccagcggatacacgtttaccagctacgacatcaactgggtcagacaggccaccggccagggcctggaatggatgggatggatgaaccccaacagcggcaacaccgtgtacgcccagaaattccagggcagagtgaccatgacacggaacaccagcatcagcaccgcctacatggaactgagctctctgagatccgaggatacagccgtgtactactgcgccagaggcggagatttctggagcggctaccacgactactactactacatggacgtgtggggcaagggcaccaccgtgaccgtgtcttct

SEQ ID NO: 1914 - DNA, 747 bp, synthetic construct
  misc_feature 1..747: note = Synthetic
  source 1..747: mol_type = other DNA
agctacgagctgacccagcctccatctgtctccgtgtctccaggccaaacagccagcatcacctgcagcggagataagctgggcgacaagtacgcctgctggtaccagcagaagcccggccagagccctgtgctggtgatctaccaggacagcaagcggcctagcggcatccccgagagattcagcggctccaacagcggcaataccgctacactgacaatcagcggcacacaggccatggatgaggccgactactactgccaggcctgggacagctctaccgccgtgttcggcggcggaacccagctcaccgccctgggcagcaccagcggcagcggcaagcccggctccggagagggcagcaccaagggccaagtgcagctgcaggagagcggtcctggcctggttaagcctagcgagacactgtctctgacttgcaccgtgtccggcggatctatcagcagctactactggtcctggatcagacagcccgccggcaaaggcctggaatggattggaagaatctacaccagcggcagcaccaactacaaccccagcctgaagtccagagtgacaatgagcgtggacacatctaagaaccagtttagcctgaaactgagcagcgtgaccgccgccgatacagctgtgtactattgtgcccgggaagaataccagctgctgcctgccctgtactactattactacatggacgtgtggggcaagggcaccaccgtgaccgtgtccagc

SEQ ID NO: 1915 - DNA, 750 bp, synthetic construct
  misc_feature 1..750: note = Synthetic
  source 1..750: mol_type = other DNA
cagaccgtggtcacccaggagcctagctttagcgtgtccccaggaggtacagtgaccctgacatgcggcctgactagcggatctgtgtccaccagctactaccccaactggtaccagcagacacctggccaggcccctagaaccctgatctacagcaccaatatccggagctccggcgtgcccgacagattcagcggaagcatcctgggcaacaaggccgctctgaccatcaccggcgcccaagctgatgacgagagcgactactattgtgtgctgtacatgggcagcggcatgttcatcttcggctctggcaccaaggtgaccgtgctgggcagcaccagcggcagcggcaagcccggctccggagagggcagcaccaagggccaagtgcagctggtggaatctggcggcggcgtggtgcagcctggtaggagcctgcggctgtcatgcgccgccacaggcttcaccttcagcagctacggcatgcactgggtcagacaggcccctggcaagggactggagtggatggtggtgatctggtccgatggccacaataaatactacgccgacagcgtgaagggcagatttaccattagccgggacaacagcaagaacaccctgtacctgcagatgaacagcctgagagctgaagataccgccgtgtactactgcgccagagcccagctcgagcggagatacttctactatatggacgtgtggggcaaaggcacaacagtgaccgtttcttct

SEQ ID NO: 1916 - DNA, 750 bp, synthetic construct
  misc_feature 1..750: note = Synthetic
  source 1..750: mol_type = other DNA
gagatcgtgctgacccagtctccagatttccagtccgtgacccctaaggaaaaggtgaccatcacatgcagagccagccagtccatcggctctagcctgcactggtaccagcagaagcccgaccagtctcctatgctgctgatcaaattcgcctctcagagcatcagcggcgtgcccagccggttcagcggcagcggctccggcaccgacttcacactgacaatcaacagtctggaggccgaggatgccgctgcttactactgtcaccagagcagcagcctgccttggacatttggccagggcaccaaggtggaaattaagggcagcaccagcggcagcggcaagcccggctccggagagggcagcaccaagggccaagtgcagctggtcgagagcggaggcggcgttgtgcaacctggaaggagcctgcggctgagctgcgccgcttctggcttcacctttactagctacgacatgcactgggtgcggcaggcccctggcaagggcctggaatgggtcaccatcatctggttcgacggcagcaacaagtactacgccgatagcgtgaagggcagattcaccatcagcagagataatagcaagaataccctgtacctgcagatgaactctctctccgccgaggacaccgccgtgtactactgcgccagaggcgacaactggaacgacagatactattattactactacatggacgtgtggggcaaaggcaccaccgtgacagtgtccagc

SEQ ID NO: 1917 - DNA, 765 bp, synthetic construct
  misc_feature 1..765: note = Synthetic
  source 1..765: mol_type = other DNA
gacatcgtgatgacccagcctcctctgagcagccctgtgacactgggccagccagctagcatcagctgtagatcttctcagtccctggtgcacagcgacggcaatacctacctgtcttggctgcagcagcggcctggccagccccccagactgctgatctacaaggtgtccaaccgcttcagcggcgtgccagacagattcagcggctctggcgccggcaccgacttcaccctgaagatcagcagagtcgaggccgaagatgtgggagtttactattgcacccaagctacacagttcccccacacctttggccagggcaccaagctcgagatcaagggcagcaccagcggcagcggcaagcccggctccggagagggcagcaccaagggccaagtgcagctggtccagagcggcgctgaggtgaagaaacctggcgcctctgtgaaagtgtcctgcaaggccagcggctacacctttaccagctacggcattagctgggtgcggcaggcccctggccagggtcttgagtggatgggctggatcagcgcctacaacggccacacagattatacacaaaagctgcagggcagagtgaccatgacaaccgataccagcaccaccacagcctacatggaactgagaagcctgagctctgccgacaccgccgtgtactactgcgtgcgggaagtggtgctgcctaccacagactactactacttctacatggacgtgtggggcaagggcaccacagtgacagtcagctcc

SEQ ID NO: 1918 - DNA, 762 bp, synthetic construct
  misc_feature 1..762: note = Synthetic
  source 1..762: mol_type = other DNA
gatatccagatgacacagagcccaagcagcctgagcgccagcgtgggcgacagagtgaccatcacatgcagagccagccagggcatcagcagctggctggcttggtaccagcaaaagcctgagaaggcccctaagagcctcatctacgccgctagcagcctgcagtccggcgtgccaagcagattcagcggctctggctctggcacagacttcaccctgaccatttccagcctgcaacctgaggattttgccacatactattgtcagcagtacaacagctacccttacaccttcggccagggcaccaagctggaaatcaagggcagcaccagcggcagcggcaagcccggctccggagagggcagcaccaagggccaagttcagctggtgcagagcggagccgaggtgaaaaagcccggcgcttctgtgaaggtgtcctgcaaggtgtctggctacaccctgacagagctgagcatgcactgggtccggcaggcccctggcaaaggcctggaatggatgggaggcttcgaccccgaagacggggagacaatctacgcccagaaattccagggcagagtgacaatgaccgaggacaccagcaccgatacagcctacatggaactgtcttccctgcggagcgaggacaccgccgtgtactactgcgccaccggcagaatcaccatggtgcggggcgtcatcatcccctactactattactacatggacgtgtggggcaagggcaccaccgtgaccgtgtcctct

SEQ ID NO: 1919 - DNA, 756 bp, synthetic construct
  misc_feature 1..756: note = Synthetic
  source 1..756: mol_type = other DNA
gatatcgtgatgacccagacccccctgagcctgtccgtgaccccaggacaacctgccagcattagctgcaagagcagcaagtccctgctgcacagcgacggcaagacatacctgtactggtacctgcaaaagcccggccagcctcctcagctgctcatctacgaggtgtccaaccggttctctggcgtgcctgatagattcagcggaagcggcagcggaacagacttcacactgaagatcagcagagtcgaggccgaggacgtgggcgtttactactgcatgcagagcatccagttcccctggacattcggccagggcacaaaagtggaaatcaagggcagcaccagcggcagcggcaagcccggctccggagagggcagcaccaagggccaagtgcagctggtgcagagcggcaccgaggtgaagaagccaggcgcctctgtgaaagtgtcttgtaaagccagcggctacacctttaccaattacggcatcggctgggtgcggcaggcccctggacagggactggaatggatgggctggatcatcgcctacaacggctacacaaagtacgcccagatcctgcagggcagagtgacaatgaccaccgacaccagcaccaacaccgcttatatggaactgagaagcctgcggagcgacgacaccgccgtgtactattgcgccagacagcagctgggcggagattaccactactacatggacgtgtggggcaagggcaccaccgtcacagtgtccagc

SEQ ID NO: 1920 - DNA, 756 bp, synthetic construct
  misc_feature 1..756: note = Synthetic
  source 1..756: mol_type = other DNA
gacatcgtgatgacccagacccctctgagcctgagcgtgacacctggacagcccgcttctattagctgtaaaagcagcaagtccctgctgcacagcgacggcaagacctacctgtactggtacctgcagaaacctggccagcctccacagctgctgatctacgaggtgtctacaagattcagcggagtgcctgatagattcagcggcagcggatctggaacagatttcaccctgaagatcagccgggttgaggccgaggacgtgggcgtgtactattgcatgcagtccatccagttcccctggaccttcggccagggcacaaaggtggaaatcaagggcagcaccagcggcagcggcaagcccggctccggagagggcagcaccaagggccaagtgcagctggtgcaaagcggcaccgaggtgaaaaagcccggcgcctctgtgaaggtctcctgcaaggccagcggatacacatttacaaattacggcatcggctgggtgcggcaggcccctggccagggcctggaatggatgggctggatcatcgcctacaacggctacaccaagtacgcccagatcctgcaaggcagagtcaccatgaccacagacaccagcaccaacaccgcttatatggaactgagaagcctgcggagcgacgatacagccgtgtactactgcgccagacagcagctcggcggcgactaccactactacatggacgtgtggggcaagggcaccaccgtgaccgtgtccagc

SEQ ID NO: 1921 - DNA, 750 bp, synthetic construct
  misc_feature 1..750: note = Synthetic
  source 1..750: mol_type = other DNA
gatatccagatgacacagtcccctagctctctgtctgcttctgttggagatagagtgaccatcacctgccgggccagccagggcatcagcaactggctggcctggtaccagcagaagcccgagaaggcccctaagagcctgatctacgccgctagctccctccagggcggcgtgccatctagattcagcggctcaggcagcggaaccgacttcaccctgaccatcagctccctgcaacctgaggattttgccacatactactgccagcaatacgacagctacccctacaccttcggccagggcaccaagctggaaatcaagggcagcaccagcggcagcggcaagcccggctccggagagggcagcaccaagggccaagtgcagctggtgcagagcggaacagaggtgaaaaagcctggcgccagcgtgaaggtgtcttgtaaaaccagcggttatacattcacctcctacgacattaactgggtgcggcaggccaccggccagggcctggaatggatgggctggatgaaccccatctccggcgacacaggcagcgcccagaagttccagggaagagtgaccatgaccagaaataccagcatcggcaccgcctacatggaactgagcagcctgcggagcgaggacaccgccgtgtactactgcgccagaggcggatactgtagcagtacatcttgctactactattacatggacgtgtggggcaagggcacaacagtgacagtcagcagc

SEQ ID NO: 1922 - DNA, 750 bp, synthetic construct
  misc_feature 1..750: note = Synthetic
  source 1..750: mol_type = other DNA
gacatccagatgacacagagccctagcagcctgagcgcctctgtgggcgaccgggtgaccatcacctgcagagccagccagggcatcagcagctggctggcctggtaccagcagaagcccgagaaggcccctaagtccctgatctacgccgccagctccctccagggcggagtgccatctagattcagcggctctggatctggcacagacttcaccctgaccatcagctctctgcagcctgaggattttgccacatactactgccagcaatacgacagctacccctacacattcggccaaggcacaaagctggaaatcaagggcagcaccagcggcagcggcaagcccggctccggagagggcagcaccaagggccaagtgcagctggtgcagagcggcgccgaggtgaagaagcctggcgcttccgtgaaggtgtcctgtaaagcttctggatacaccttcacctcttatgatattaactgggtgcggcaggccaccggccagggcctggaatggatgggctggatgatccccaacagcggcgataccggctccgcccagaaattccagggaagagttaccatgacaagaaacaccagcatcagcaccgcctacatggaactgagcagcctgcggagcgaggacaccgctgtgtactactgcgccagaggcggctactgtaatagcacaagctgctactattactacatggacgtgtggggcaagggcaccacagtgacagtcagctcc

SEQ ID NO: 1923 - DNA, 753 bp, synthetic construct
  misc_feature 1..753: note = Synthetic
  source 1..753: mol_type = other DNA
gagatcgtgctgacccaaagccccggcaccctgagcctgagccctggcgagagagccaccctgtcttgtagagcctctcagagcgtttctagctcctacctggcctggtaccagcagaagcccggacaggcccctagactgctgatctacggcgccagcagcagagctacaggcatccccgatagattcagcgacagcggctcaggcacagacttcaccctgacaattagccggctggaacccgaggatttcgccgtgtactattgccagcactacggcagctctcctccaagaatcaccttcggccctggcaccaaggtggacatcaaaggcagcaccagcggcagcggcaagcccggctccggagagggcagcaccaagggcgaggtgcagctgctggaaagcggaggcggcctggtgcaacctggaggttctctgcggctgagctgcgccgctagcggcttcacatttagcagctacgtgatgaactgggtgcggcaggctcctggaaagggcctggaatgggtctccagcgtgtccggcagcggcaacaacagcttttacgccgatagcgtgaagggcagattcaccatcagccgggacaacagcaagaacaccctctacctgcagatgaattctctgagagccgaggacaccgccgtgtactactgcgccagcaggtcctcttcttacctgtactactactattacatggacgtgtggggcaaaggcacaacagtgaccgtctccagc

SEQ ID NO: 1924 - protein, 486 aa, synthetic construct
  REGION 1..486: note = Synthetic
MALPVTALLLPLALLLHAARPQVQLVESGGGVVQPGRSLRLSCAASGFTFSSHDMHWVRQAPGKGLDWVAVIWSDGNKKYYVDSAKGRFTISRDNSKNTVYLQMNSLRAEDTAIYYCARGDNWNDEHSYYYYMDVWGKGTTVTVSSGGGGSGGGGSGGGGSEIVLTQSPDFQSVTPKEKVTITCRASQTIGSSLHWYQQKPDQSPKLLIKHASQSFSGVPSRFSGSGSGTDFTLTVNSLEAEDAATYYCHQSSSLPWTFGQGTKVEIKTTTPAPRPPTPAPTIASQPLSLRPEACRPAAGGAVHTRGLDFACDIYIWAPLAGTCGVLLLSLVITLYCRRDQRLPPDAHKPPGGGSFRTPIQEEQADAHSTLAKIRVKFSRSADAPAYQQGQNQLYNELNLGRREEYDVLDKRRGRDPEMGGKPRRKNPQEGLYNELQKDKMAEAYSEIGMKGERRRGKGHDGLYQGLSTATKDTYDALHMQALPPR

SEQ ID NO: 1925 - protein, 486 aa, synthetic construct
  REGION 1..486: note = Synthetic
MALPVTALLLPLALLLHAARPQVQLVESGGGVVQPGRSLRLSCAASGFTFSSHDMHWVRQAPGKGLDWVAVIWSDGNNKYYADSAKGRFTISRDNSKNTVYLQMNSLRAEDTAIYYCARGDNWNDEHSYYYYMDVWGKGTTVTVSSGGGGSGGGGSGGGGSEIVLTQSPDFQSVTPKEKVTITCRASQTIGSSLHWYQQKPDQSPKLLIKHASQSFSGVPSRFSGSGSGTDFTLTVNSLEAEDAATYYCHQSSSLPWTFGQGTKVEIKTTTPAPRPPTPAPTIASQPLSLRPEACRPAAGGAVHTRGLDFACDIYIWAPLAGTCGVLLLSLVITLYCRRDQRLPPDAHKPPGGGSFRTPIQEEQADAHSTLAKIRVKFSRSADAPAYQQGQNQLYNELNLGRREEYDVLDKRRGRDPEMGGKPRRKNPQEGLYNELQKDKMAEAYSEIGMKGERRRGKGHDGLYQGLSTATKDTYDALHMQALPPR

SEQ ID NO: 1926 - protein, 485 aa, synthetic construct
  REGION 1..485: note = Synthetic
MALPVTALLLPLALLLHAARPQLQLVQSGAEVKKPGASVKVSCKASGYTFTNYGISWLRQAPGQGLEWMGWISGYNDNTHYAQKFQGRVTMTTDTSTTTAYMELRNLRSDDTAVYYCARDGIAARPVYYYYMDVWGKGTTVTVSSGGGGSGGGGSGGGGSDIQMTQSPSSLSASVGDRVTITCRASQSISNYLNWYHQKPGKAPKLLIYAASSLESGVPSRFSGSGSGTDFTLTISSLQPEDFATYYCQQSYSNPLTFGGGTKVESKTTTPAPRPPTPAPTIASQPLSLRPEACRPAAGGAVHTRGLDFACDIYIWAPLAGTCGVLLLSLVITLYCRRDQRLPPDAHKPPGGGSFRTPIQEEQADAHSTLAKIRVKFSRSADAPAYQQGQNQLYNELNLGRREEYDVLDKRRGRDPEMGGKPRRKNPQEGLYNELQKDKMAEAYSEIGMKGERRRGKGHDGLYQGLSTATKDTYDALHMQALPPR

SEQ ID NO: 1927 - protein, 486 aa, synthetic construct
  REGION 1..486: note = Synthetic
MALPVTALLLPLALLLHAARPQVQLVESGGGVVQPGRSLRLSCVASGFTFSSNDIYWVRQAPGKGLEWVAVIWYDGSNKYYADSVKGRFTISRDNSKNTLYLQMNSLRAEDTAVYYCARGDNWNDEHHYHYYMDVWGKGTTVTVSSGGGGSGGGGSGGGGSEIVLTQSPDFQSVTPKEKVTITCRASQSIGSSLHWYQQKPDQSPKLLIKFASQSFSGVPSRFSGSGSGTDFTLTIHSLEAEDAATYYCHQSGSLPWTFGQGTKVEIKTTTPAPRPPTPAPTIASQPLSLRPEACRPAAGGAVHTRGLDFACDIYIWAPLAGTCGVLLLSLVITLYCRRDQRLPPDAHKPPGGGSFRTPIQEEQADAHSTLAKIRVKFSRSADAPAYQQGQNQLYNELNLGRREEYDVLDKRRGRDPEMGGKPRRKNPQEGLYNELQKDKMAEAYSEIGMKGERRRGKGHDGLYQGLSTATKDTYDALHMQALPPR

SEQ ID NO: 1928 - protein, 479 aa, synthetic construct
  REGION 1..479: note = Synthetic
MALPVTALLLPLALLLHAARPQVQLVESGGGVVQPGRSLRLSCAASGFTFSSYGMHWVRQAPGKGLEWVAVISYDGSNKYYADSVKGRFTISRDNSKTTLYLQMNSLRAEDTAVYYCARDHYYYYMDVWGKGTTVTVSSGGGGSGGGGSGGGGSVTQEPSFSVSPGGTVTLTCGLSSGSVSTSYYPSWYQQTPGQAPRTLIYSTNIRSSGVPDRFSGSILGNKAALTITGAQADDESDYYCVLYMGSDIVVFGGGTKLTVLTTTPAPRPPTPAPTIASQPLSLRPEACRPAAGGAVHTRGLDFACDIYIWAPLAGTCGVLLLSLVITLYCRRDQRLPPDAHKPPGGGSFRTPIQEEQADAHSTLAKIRVKFSRSADAPAYQQGQNQLYNELNLGRREEYDVLDKRRGRDPEMGGKPRRKNPQEGLYNELQKDKMAEAYSEIGMKGERRRGKGHDGLYQGLSTATKDTYDALHMQALPPR

SEQ ID NO: 1929 - protein, 484 aa, synthetic construct
  REGION 1..484: note = Synthetic
MALPVTALLLPLALLLHAARPQLQLQESGPGLVKPSETLSLTCTVSGGSISSSSYYWGWIRQPPGKGLEWIGSLYYSGSTYYNPSLKSRVTISVDTSKNQFSLKLSSVTAADTAVYYCAAVQLERRGYFYMDVWGKGTTVTVSSGGGGSGGGGSGGGGSEIVLTQSPATLSLSPGERATLSCRASQSVSSYFAWYQQKPGQAPRLLIYDASNRATGIPARFSGSGSGTDFTLTISSLEPEDFAVYYCQQRSNWPLTFGGGTKVEIKTTTPAPRPPTPAPTIASQPLSLRPEACRPAAGGAVHTRGLDFACDIYIWAPLAGTCGVLLLSLVITLYCRRDQRLPPDAHKPPGGGSFRTPIQEEQADAHSTLAKIRVKFSRSADAPAYQQGQNQLYNELNLGRREEYDVLDKRRGRDPEMGGKPRRKNPQEGLYNELQKDKMAEAYSEIGMKGERRRGKGHDGLYQGLSTATKDTYDALHMQALPPR

SEQ ID NO: 1930 - protein, 486 aa, synthetic construct
  REGION 1..486: note = Synthetic
MALPVTALLLPLALLLHAARPQVQLVESGGGVVQPGRSLRLSCAASGFTFSNYGMHWVRQAPGKGLEWMAVIWSDGHNKYYADSVKGRFTISRDNSKNTLYLQMNSLRAEDTAVYYCARAQLERRYFYYMDVWGKGTTVTVSSGGGGSGGGGSGGGGSQTVVTQEPSFSVSPGGTVTLTCGLTSGSVSTSYYPNWYQQTPGQAPRTLIYSTNIRSSGVPDRFSGSILGNKAALTITGAQADDESDYYCVLYMGSGMFIFGSGTKVTVLTTTPAPRPPTPAPTIASQPLSLRPEACRPAAGGAVHTRGLDFACDIYIWAPLAGTCGVLLLSLVITLYCRRDQRLPPDAHKPPGGGSFRTPIQEEQADAHSTLAKIRVKFSRSADAPAYQQGQNQLYNELNLGRREEYDVLDKRRGRDPEMGGKPRRKNPQEGLYNELQKDKMAEAYSEIGMKGERRRGKGHDGLYQGLSTATKDTYDALHMQALPPR

SEQ ID NO: 1931 - protein, 486 aa, synthetic construct
  REGION 1..486: note = Synthetic
MALPVTALLLPLALLLHAARPQVQLVQSGAEVKKPGASVKVSCKASGYTFTSYDINWVRQATGQGLEWMGWMIPNSGDTGSAQKFQGRVTMTRNTSIGTAYMELSSLRSEDTAVYYCARGGYCNSTSCYYYYMDVWGKGTTVTVSSGGGGSGGGGSGGGGSDIQMTQSPSSLSASVGDRVTITCRASQGISSWLAWYQQKPEKAPKSLIYAASSLQGGVPSRFSGSGSGTDFTLTISSLQPEDFATYYCQQYDSYPYTFGQGTKLEIKTTTPAPRPPTPAPTIASQPLSLRPEACRPAAGGAVHTRGLDFACDIYIWAPLAGTCGVLLLSLVITLYCRRDQRLPPDAHKPPGGGSFRTPIQEEQADAHSTLAKIRVKFSRSADAPAYQQGQNQLYNELNLGRREEYDVLDKRRGRDPEMGGKPRRKNPQEGLYNELQKDKMAEAYSEIGMKGERRRGKGHDGLYQGLSTATKDTYDALHMQALPPR

SEQ ID NO: 1932 - protein, 487 aa, synthetic construct
  REGION 1..487: note = Synthetic
MALPVTALLLPLALLLHAARPQVQLVQSGAEVKKPGASVKVSCKASGYTFTSYDINWVRQATGQGLEWMGWMNPNSGNTVYAQKFQGRVTMTRNTSISTAYMELSSLRSEDTAVYYCARGGDFWSGYHDYYYYMDVWGKGTTVTVSSGGGGSGGGGSGGGGSDIQVTQSPTFLSASVGDRVTITCRASQGISSYLAWYQQKPGKAPKLLIYGASTLQSGVPSRFSGSGSGTEFTLTISSLQPEDFATYYCQQLNSYPWTFGQGTKVEIKTTTPAPRPPTPAPTIASQPLSLRPEACRPAAGGAVHTRGLDFACDIYIWAPLAGTCGVLLLSLVITLYCRRDQRLPPDAHKPPGGGSFRTPIQEEQADAHSTLAKIRVKFSRSADAPAYQQGQNQLYNELNLGRREEYDVLDKRRGRDPEMGGKPRRKNPQEGLYNELQKDKMAEAYSEIGMKGERRRGKGHDGLYQGLSTATKDTYDALHMQALPPR

SEQ ID NO: 1933 - protein, 485 aa, synthetic construct
  REGION 1..485: note = Synthetic
MALPVTALLLPLALLLHAARPQVQLQESGPGLVKPSETLSLTCTVSGGSISSYYWSWIRQPAGKGLEWIGRIYTSGSTNYNPSLKSRVTMSVDTSKNQFSLKLSSVTAADTAVYYCAREEYQLLPALYYYYYMDVWGKGTTVTVSSGGGGSGGGGSGGGGSSYELTQPPSVSVSPGQTASITCSGDKLGDKYACWYQQKPGQSPVLVIYQDSKRPSGIPERFSGSNSGNTATLTISGTQAMDEADYYCQAWDSSTAVFGGGTQLTALTTTPAPRPPTPAPTIASQPLSLRPEACRPAAGGAVHTRGLDFACDIYIWAPLAGTCGVLLLSLVITLYCRRDQRLPPDAHKPPGGGSFRTPIQEEQADAHSTLAKIRVKFSRSADAPAYQQGQNQLYNELNLGRREEYDVLDKRRGRDPEMGGKPRRKNPQEGLYNELQKDKMAEAYSEIGMKGERRRGKGHDGLYQGLSTATKDTYDALHMQALPPR

SEQ ID NO: 1934 - protein, 486 aa, synthetic construct
  REGION 1..486: note = Synthetic
MALPVTALLLPLALLLHAARPQVQLVESGGGVVQPGRSLRLSCAATGFTFSSYGMHWVRQAPGKGLEWMVVIWSDGHNKYYADSVKGRFTISRDNSKNTLYLQMNSLRAEDTAVYYCARAQLERRYFYYMDVWGKGTTVTVSSGGGGSGGGGSGGGGSQTVVTQEPSFSVSPGGTVTLTCGLTSGSVSTSYYPNWYQQTPGQAPRTLIYSTNIRSSGVPDRFSGSILGNKAALTITGAQADDESDYYCVLYMGSGMFIFGSGTKVTVLTTTPAPRPPTPAPTIASQPLSLRPEACRPAAGGAVHTRGLDFACDIYIWAPLAGTCGVLLLSLVITLYCRRDQRLPPDAHKPPGGGSFRTPIQEEQADAHSTLAKIRVKFSRSADAPAYQQGQNQLYNELNLGRREEYDVLDKRRGRDPEMGGKPRRKNPQEGLYNELQKDKMAEAYSEIGMKGERRRGKGHDGLYQGLSTATKDTYDALHMQALPPR

SEQ ID NO: 1935 - protein, 486 aa, synthetic construct
  REGION 1..486: note = Synthetic
MALPVTALLLPLALLLHAARPQVQLVESGGGVVQPGRSLRLSCAASGFTFTSYDMHWVRQAPGKGLEWVTIIWFDGSNKYYADSVKGRFTISRDNSKNTLYLQMNSLSAEDTAVYYCARGDNWNDRYYYYYYMDVWGKGTTVTVSSGGGGSGGGGSGGGGSEIVLTQSPDFQSVTPKEKVTITCRASQSIGSSLHWYQQKPDQSPMLLIKFASQSISGVPSRFSGSGSGTDFTLTINSLEAEDAAAYYCHQSSSLPWTFGQGTKVEIKTTTPAPRPPTPAPTIASQPLSLRPEACRPAAGGAVHTRGLDFACDIYIWAPLAGTCGVLLLSLVITLYCRRDQRLPPDAHKPPGGGSFRTPIQEEQADAHSTLAKIRVKFSRSADAPAYQQGQNQLYNELNLGRREEYDVLDKRRGRDPEMGGKPRRKNPQEGLYNELQKDKMAEAYSEIGMKGERRRGKGHDGLYQGLSTATKDTYDALHMQALPPR

SEQ ID NO: 1936 - protein, 491 aa, synthetic construct
  REGION 1..491: note = Synthetic
MALPVTALLLPLALLLHAARPQVQLVQSGAEVKKPGASVKVSCKASGYTFTSYGISWVRQAPGQGLEWMGWISAYNGHTDYTQKLQGRVTMTTDTSTTTAYMELRSLSSADTAVYYCVREVVLPTTDYYYFYMDVWGKGTTVTVSSGGGGSGGGGSGGGGSDIVMTQPPLSSPVTLGQPASISCRSSQSLVHSDGNTYLSWLQQRPGQPPRLLIYKVSNRFSGVPDRFSGSGAGTDFTLKISRVEAEDVGVYYCTQATQFPHTFGQGTKLEIKTTTPAPRPPTPAPTIASQPLSLRPEACRPAAGGAVHTRGLDFACDIYIWAPLAGTCGVLLLSLVITLYCRRDQRLPPDAHKPPGGGSFRTPIQEEQADAHSTLAKIRVKFSRSADAPAYQQGQNQLYNELNLGRREEYDVLDKRRGRDPEMGGKPRRKNPQEGLYNELQKDKMAEAYSEIGMKGERRRGKGHDGLYQGLSTATKDTYDALHMQALPPR

SEQ ID NO: 1937 - protein, 490 aa, synthetic construct
  REGION 1..490: note = Synthetic
MALPVTALLLPLALLLHAARPQVQLVQSGAEVKKPGASVKVSCKVSGYTLTELSMHWVRQAPGKGLEWMGGFDPEDGETIYAQKFQGRVTMTEDTSTDTAYMELSSLRSEDTAVYYCATGRITMVRGVIIPYYYYYMDVWGKGTTVTVSSGGGGSGGGGSGGGGSDIQMTQSPSSLSASVGDRVTITCRASQGISSWLAWYQQKPEKAPKSLIYAASSLQSGVPSRFSGSGSGTDFTLTISSLQPEDFATYYCQQYNSYPYTFGQGTKLEIKTTTPAPRPPTPAPTIASQPLSLRPEACRPAAGGAVHTRGLDFACDIYIWAPLAGTCGVLLLSLVITLYCRRDQRLPPDAHKPPGGGSFRTPIQEEQADAHSTLAKIRVKFSRSADAPAYQQGQNQLYNELNLGRREEYDVLDKRRGRDPEMGGKPRRKNPQEGLYNELQKDKMAEAYSEIGMKGERRRGKGHDGLYQGLSTATKDTYDALHMQALPPR

SEQ ID NO: 1938 - protein, 488 aa, synthetic construct
  REGION 1..488: note = Synthetic
MALPVTALLLPLALLLHAARPQVQLVQSGTEVKKPGASVKVSCKASGYTFTNYGIGWVRQAPGQGLEWMGWIIAYNGYTKYAQILQGRVTMTTDTSTNTAYMELRSLRSDDTAVYYCARQQLGGDYHYYMDVWGKGTTVTVSSGGGGSGGGGSGGGGSDIVMTQTPLSLSVTPGQPASISCKSSKSLLHSDGKTYLYWYLQKPGQPPQLLIYEVSNRFSGVPDRFSGSGSGTDFTLKISRVEAEDVGVYYCMQSIQFPWTFGQGTKVEIKTTTPAPRPPTPAPTIASQPLSLRPEACRPAAGGAVHTRGLDFACDIYIWAPLAGTCGVLLLSLVITLYCRRDQRLPPDAHKPPGGGSFRTPIQEEQADAHSTLAKIRVKFSRSADAPAYQQGQNQLYNELNLGRREEYDVLDKRRGRDPEMGGKPRRKNPQEGLYNELQKDKMAEAYSEIGMKGERRRGKGHDGLYQGLSTATKDTYDALHMQALPPR

SEQ ID NO: 1939 - protein, 488 aa, synthetic construct
  REGION 1..488: note = Synthetic
MALPVTALLLPLALLLHAARPQVQLVQSGTEVKKPGASVKVSCKASGYTFTNYGIGWVRQAPGQGLEWMGWIIAYNGYTKYAQILQGRVTMTTDTSTNTAYMELRSLRSDDTAVYYCARQQLGGDYHYYMDVWGKGTTVTVSSGGGGSGGGGSGGGGSDIVMTQTPLSLSVTPGQPASISCKSSKSLLHSDGKTYLYWYLQKPGQPPQLLIYEVSTRFSGVPDRFSGSGSGTDFTLKISRVEAEDVGVYYCMQSIQFPWTFGQGTKVEIKTTTPAPRPPTPAPTIASQPLSLRPEACRPAAGGAVHTRGLDFACDIYIWAPLAGTCGVLLLSLVITLYCRRDQRLPPDAHKPPGGGSFRTPIQEEQADAHSTLAKIRVKFSRSADAPAYQQGQNQLYNELNLGRREEYDVLDKRRGRDPEMGGKPRRKNPQEGLYNELQKDKMAEAYSEIGMKGERRRGKGHDGLYQGLSTATKDTYDALHMQALPPR

SEQ ID NO: 1940 - protein, 486 aa, synthetic construct
  REGION 1..486: note = Synthetic
MALPVTALLLPLALLLHAARPQVQLVQSGTEVKKPGASVKVSCKTSGYTFTSYDINWVRQATGQGLEWMGWMNPISGDTGSAQKFQGRVTMTRNTSIGTAYMELSSLRSEDTAVYYCARGGYCSSTSCYYYYMDVWGKGTTVTVSSGGGGSGGGGSGGGGSDIQMTQSPSSLSASVGDRVTITCRASQGISNWLAWYQQKPEKAPKSLIYAASSLQGGVPSRFSGSGSGTDFTLTISSLQPEDFATYYCQQYDSYPYTFGQGTKLEIKTTTPAPRPPTPAPTIASQPLSLRPEACRPAAGGAVHTRGLDFACDIYIWAPLAGTCGVLLLSLVITLYCRRDQRLPPDAHKPPGGGSFRTPIQEEQADAHSTLAKIRVKFSRSADAPAYQQGQNQLYNELNLGRREEYDVLDKRRGRDPEMGGKPRRKNPQEGLYNELQKDKMAEAYSEIGMKGERRRGKGHDGLYQGLSTATKDTYDALHMQALPPR

SEQ ID NO: 1941 - protein, 486 aa, synthetic construct
  REGION 1..486: note = Synthetic
MALPVTALLLPLALLLHAARPQVQLVQSGAEVKKPGASVKVSCKASGYTFTSYDINWVRQATGQGLEWMGWMIPNSGDTGSAQKFQGRVTMTRNTSISTAYMELSSLRSEDTAVYYCARGGYCNSTSCYYYYMDVWGKGTTVTVSSGGGGSGGGGSGGGGSDIQMTQSPSSLSASVGDRVTITCRASQGISSWLAWYQQKPEKAPKSLIYAASSLQGGVPSRFSGSGSGTDFTLTISSLQPEDFATYYCQQYDSYPYTFGQGTKLEIKTTTPAPRPPTPAPTIASQPLSLRPEACRPAAGGAVHTRGLDFACDIYIWAPLAGTCGVLLLSLVITLYCRRDQRLPPDAHKPPGGGSFRTPIQEEQADAHSTLAKIRVKFSRSADAPAYQQGQNQLYNELNLGRREEYDVLDKRRGRDPEMGGKPRRKNPQEGLYNELQKDKMAEAYSEIGMKGERRRGKGHDGLYQGLSTATKDTYDALHMQALPPR

SEQ ID NO: 1942 - protein, 487 aa, synthetic construct
  REGION 1..487: note = Synthetic
MALPVTALLLPLALLLHAARPEVQLLESGGGLVQPGGSLRLSCAASGFTFSSYVMNWVRQAPGKGLEWVSSVSGSGNNSFYADSVKGRFTISRDNSKNTLYLQMNSLRAEDTAVYYCASRSSSYLYYYYYMDVWGKGTTVTVSSGGGGSGGGGSGGGGSEIVLTQSPGTLSLSPGERATLSCRASQSVSSSYLAWYQQKPGQAPRLLIYGASSRATGIPDRFSDSGSGTDFTLTISRLEPEDFAVYYCQHYGSSPPRITFGPGTKVDIKTTTPAPRPPTPAPTIASQPLSLRPEACRPAAGGAVHTRGLDFACDIYIWAPLAGTCGVLLLSLVITLYCRRDQRLPPDAHKPPGGGSFRTPIQEEQADAHSTLAKIRVKFSRSADAPAYQQGQNQLYNELNLGRREEYDVLDKRRGRDPEMGGKPRRKNPQEGLYNELQKDKMAEAYSEIGMKGERRRGKGHDGLYQGLSTATKDTYDALHMQALPPR

SEQ ID NO: 1943 - DNA, 1458 bp, synthetic construct
  misc_feature 1..1458: note = Synthetic
  source 1..1458: mol_type = other DNA
atggccttaccagtgaccgccttgctcctgccgctggccttgctgctccacgccgccaggccgcaggtgcagctggtggagtctgggggaggcgtggtccagcctgggaggtccctgagactttcctgtgcagcgtctggattcaccttcagcagtcatgacatgcactgggtccgccaggctccaggcaaggggctggactgggtggcagttatatggagtgatggaaataaaaaatactatgtagactccgcgaagggccggttcaccatctccagagacaattccaagaacacggtgtatctgcaaatgaacagcctgagagccgaggacacggctatatattactgtgcgagaggtgacaactggaacgacgaacactcctactattactacatggacgtctggggcaaggggaccacggtcaccgtctcctcaggcggcggtggatctggaggcggaggctctggaggcggcggctccgaaattgtgctgactcagtctccagactttcagtctgtgactccaaaggagaaagtcaccatcacctgccgggccagtcagaccattggcagtagcttacactggtaccagcagaaaccagatcagtctccaaagctcctcatcaagcatgcttcccagtccttctcaggggtcccctcgaggttcagtggcagtggatctgggacagatttcaccctcaccgtcaatagcctggaagctgaagatgctgcaacgtattactgtcatcagagtagtagtttaccgtggacgttcggccaagggaccaaggtggaaatcaaaaccacgacgccagcgccgcggccaccaacaccggcgcccaccatcgcgtcgcagcccctgtccctgcgcccagaggcgtgccggccagcggcggggggcgcagtgcacacgagggggctggacttcgcctgtgatatctacatctgggcgcccttggccgggacttgtggggtccttctcctgtcactggttatcaccctttactgccggagggaccagaggctgccccccgatgcccacaagccccctgggggaggcagtttccggacccccatccaagaggagcaggccgacgcccactccaccctggccaagatcagagtgaagttcagcaggagcgcagacgcccccgcgtaccagcagggccagaaccagctctataacgagctcaatctaggacgaagagaggagtacgatgttttggacaagagacgtggccgggaccctgagatggggggaaagccgagaaggaagaaccctcaggaaggcctgtacaatgaactgcagaaagataagatggcggaggcctacagtgagattgggatgaaaggcgagcgccggaggggcaaggggcacgatggcctttaccagggtctcagtacagccaccaaggacacctacgacgcccttcacatgcaggccctgccccctcgc

SEQ ID NO: 1944 - DNA, 1458 bp, synthetic construct
  misc_feature 1..1458: note = Synthetic
  source 1..1458: mol_type = other DNA
atggccttaccagtgaccgccttgctcctgccgctggccttgctgctccacgccgccaggccgcaggtgcagctggtggagtctgggggaggcgtggtccagcctgggaggtccctgagactttcctgtgcagcgtctggattcaccttcagtagtcatgacatgcactgggtccgccaggctccaggcaaggggctggactgggtggcagttatatggagtgatggaaataataaatactatgcagactccgcgaagggccggttcaccatctccagagacaattccaagaacacggtgtatctgcaaatgaacagcctgagagccgaggacacggctatatattactgtgcgagaggtgacaactggaacgacgaacactcctactattactacatggacgtctggggcaaggggaccacggtcaccgtctcctcaggcggcggtggatctggaggcggaggctctggaggcggcggctccgaaattgtgctgactcagtctccagactttcagtctgtgactccaaaggagaaagtcaccatcacctgccgggccagtcagaccattggcagtagcttacactggtaccagcagaaaccagatcagtctccaaagctcctcatcaagcatgcttcccagtccttctcaggggtcccctcgaggttcagtggcagtggatctgggacagatttcaccctcaccgtcaatagcctggaagctgaagatgctgcaacgtattactgtcatcagagtagtagtttaccgtggacgttcggccaagggaccaaggtggaaatcaaaaccacgacgccagcgccgcggccaccaacaccggcgcccaccatcgcgtcgcagcccctgtccctgcgcccagaggcgtgccggccagcggcggggggcgcagtgcacacgagggggctggacttcgcctgtgatatctacatctgggcgcccttggccgggacttgtggggtccttctcctgtcactggttatcaccctttactgccggagggaccagaggctgccccccgatgcccacaagccccctgggggaggcagtttccggacccccatccaagaggagcaggccgacgcccactccaccctggccaagatcagagtgaagttcagcaggagcgcagacgcccccgcgtaccagcagggccagaaccagctctataacgagctcaatctaggacgaagagaggagtacgatgttttggacaagagacgtggccgggaccctgagatggggggaaagccgagaaggaagaaccctcaggaaggcctgtacaatgaactgcagaaagataagatggcggaggcctacagtgagattgggatgaaaggcgagcgccggaggggcaaggggcacgatggcctttaccagggtctcagtacagccaccaaggacacctacgacgcccttcacatgcaggccctgccccctcgc

SEQ ID NO: 1945 - DNA, 1455 bp, synthetic construct
  misc_feature 1..1455: note = Synthetic
  source 1..1455: mol_type = other DNA
atggccttaccagtgaccgccttgctcctgccgctggccttgctgctccacgccgccaggccgcagcttcagctggtgcagtctggagctgaggtgaagaagcctggggcctcagtgaaggtctcctgcaaggcttctggttacacctttaccaactatggtatcagctggttgcgacaggcccctggacaagggcttgagtggatgggatggatcagtggttacaatgataacacacactatgcacagaagttccagggcagagtcaccatgaccacagacacatccacgaccacagcctacatggaactgaggaacctgagatctgacgacacggccgtgtattactgtgcgagagatgggatagcagctcgtccagtctactactactacatggacgtctggggcaaagggaccacggtcaccgtctcctcaggcggcggtggatctggaggcggaggctctggaggcggcggctccgacatacagatgacccagtctccatcctccctgtctgcatctgtaggagacagagtcaccatcacttgccgggcaagccagagcattagcaactatttaaattggtatcaccagaaaccagggaaagcccctaagctcctgatctatgctgcatccagtttggaaagtggggtcccatcaaggttcagtggcagtggatctgggacagatttcactctcaccatcagcagtctgcaacctgaagattttgcaacttactactgtcaacagagttacagtaacccgctcactttcggcggagggaccaaggtggagagcaaaaccacgacgccagcgccgcggccaccaacaccggcgcccaccatcgcgtcgcagcccctgtccctgcgcccagaggcgtgccggccagcggcggggggcgcagtgcacacgagggggctggacttcgcctgtgatatctacatctgggcgcccttggccgggacttgtggggtccttctcctgtcactggttatcaccctttactgccggagggaccagaggctgccccccgatgcccacaagccccctgggggaggcagtttccggacccccatccaagaggagcaggccgacgcccactccaccctggccaagatcagagtgaagttcagcaggagcgcagacgcccccgcgtaccagcagggccagaaccagctctataacgagctcaatctaggacgaagagaggagtacgatgttttggacaagagacgtggccgggaccctgagatggggggaaagccgagaaggaagaaccctcaggaaggcctgtacaatgaactgcagaaagataagatggcggaggcctacagtgagattgggatgaaaggcgagcgccggaggggcaaggggcacgatggcctttaccagggtctcagtacagccaccaaggacacctacgacgcccttcacatgcaggccctgccccctcgc

SEQ ID NO: 1946 - DNA, 1458 bp, synthetic construct
  misc_feature 1..1458: note = Synthetic
  source 1..1458: mol_type = other DNA
atggccttaccagtgaccgccttgctcctgccgctggccttgctgctccacgccgccaggccgcaggtgcagctggtggagtctgggggaggcgtggtccagcctgggaggtccctgagactctcctgtgtagcgtctggattcaccttcagtagcaatgacatatactgggtccgccaggccccaggcaaggggctggagtgggtggcagttatatggtatgatggaagtaataaatactatgcagactccgtgaagggccgattcaccatctccagagacaattccaagaacacgctgtatctgcaaatgaacagcctgagagccgaggacacggctgtgtattactgtgcgagaggtgacaactggaacgacgaacaccactaccactactacatggacgtctggggcaaagggaccacggtcaccgtctcctcaggcggcggtggatctggaggcggaggctctggaggcggcggctccgaaattgtgctgactcagtctccagactttcagtctgtgactccaaaggagaaagtcaccatcacctgccgggccagtcagagcattggtagtagcttacactggtaccagcagaaaccagatcagtctccaaagctcctcatcaagtttgcttcccagtccttctcaggggtcccctcgaggttcagtggcagtggatctgggacagatttcaccctcaccatccatagcctggaagctgaagatgctgcaacgtattactgtcatcagagtggtagtttaccgtggacgttcggccaagggaccaaggtggaaatcaaaaccacgacgccagcgccgcggccaccaacaccggcgcccaccatcgcgtcgcagcccctgtccctgcgcccagaggcgtgccggccagcggcggggggcgcagtgcacacgagggggctggacttcgcctgtgatatctacatctgggcgcccttggccgggacttgtggggtccttctcctgtcactggttatcaccctttactgccggagggaccagaggctgccccccgatgcccacaagccccctgggggaggcagtttccggacccccatccaagaggagcaggccgacgcccactccaccctggccaagatcagagtgaagttcagcaggagcgcagacgcccccgcgtaccagcagggccagaaccagctctataacgagctcaatctaggacgaagagaggagtacgatgttttggacaagagacgtggccgggaccctgagatggggggaaagccgagaaggaagaaccctcaggaaggcctgtacaatgaactgcagaaagataagatggcggaggcctacagtgagattgggatgaaaggcgagcgccggaggggcaaggggcacgatggcctttaccagggtctcagtacagccaccaaggacacctacgacgcccttcacatgcaggccctgccccctcgc

SEQ ID NO: 1947 - DNA, 1438 bp, synthetic construct
  misc_feature 1..1438: note = Synthetic
  source 1..1438: mol_type = other DNA
atggccttaccagtgaccgccttgctcctgccgctggccttgctgctccacgccgccaggccgcaggtgcagttggtggagtctgggggaggcgtggtccagcctgggaggtccctgagactctcctgtgcagcctctggattcaccttcagtagctatggcatgcactgggtccgccaggctccaggcaaggggctggagtgggtggcagttatatcatatgatggaagtaataaatactatgcagactccgtgaagggccgattcaccatctccagggacaattccaagaccacgctgtatctgcaaatgaacagcctgagagctgaggacacggctgtgtattactgtgcgagagatcactactactactacatggacgtctggggcaaagggaccacggtcaccgtctcctcaggcggcggtggatctggaggcggaggctctggaggcggcggctccggtgacccaggagccatcgttctcagtgtcccctggagggacagtcacactcacttgtggcttgagctctggctcagtctctactagttactaccccagctggtaccagcagaccccaggccaggctccacgcacgctcatctacagcacaaacattcgctcttctggggtccctgatcgcttctctggctccatccttgggaacaaagctgccctcaccatcacgggggcccaggcagatgatgaatctgattattactgtgtgctgtatatgggtagtgacattgtggtattcggcggagggaccaagctgaccgtcctaaccacgacgccagcgccgcggccaccaacaccggcgcccaccatcgcgtcgcagcccctgtccctgcgcccagaggcgtgccggccagcggcggggggcgcagtgcacacgagggggctggacttcgcctgtgatatctacatctgggcgcccttggccgggacttgtggggtccttctcctgtcactggttatcaccctttactgccggagggaccagaggctgccccccgatgcccacaagccccctgggggaggcagtttccggacccccatccaagaggagcaggccgacgcccactccaccctggccaagatcagagtgaagttcagcaggagcgcagacgcccccgcgtaccagcagggccagaaccagctctataacgagctcaatctaggacgaagagaggagtacgatgttttggacaagagacgtggccgggaccctgagatggggggaaagccgagaaggaagaaccctcaggaaggcctgtacaatgaactgcagaaagataagatggcggaggcctacagtgagattgggatgaaaggcgagcgccggaggggcaaggggcacgatggcctttaccagggtctcagtacagccaccaaggacacctacgacgcccttcacatgcaggccctgccccctcgc

SEQ ID NO: 1948 - DNA, 1452 bp, synthetic construct
  misc_feature 1..1452: note = Synthetic
  source 1..1452: mol_type = other DNA
atggccttaccagtgaccgccttgctcctgccgctggccttgctgctccacgccgccaggccgcaactgcagctgcaggagtcgggcccaggactggtgaagccttcggagaccctgtccctcacctgcactgtctctggtggctccatcagcagtagtagttactactggggctggatccgccagcccccagggaaggggctggagtggattgggagtctctattatagtgggagcacctactacaacccgtccctcaagagtcgagtcaccatatccgttgacacgtccaagaaccagttctccctgaagctgagctctgtgaccgccgcagacacggctgtgtattactgtgcggccgtacaactggaacgacgtgggtacttctacatggacgtctggggcaaagggaccacggtcaccgtctcctcaggcggcggtggatctggaggcggaggctctggaggcggcggctccgaaattgtgttgacacagtctccagccaccctgtctttgtctccaggggaaagagccaccctctcctgcagggccagtcagagtgttagcagctactttgcctggtaccaacagaaacctggccaggctcccaggctcctcatctatgatgcatccaacagggccactggcatcccagccaggttcagtggcagtgggtctgggacagacttcactctcaccatcagcagcctggagcctgaagattttgcagtttattactgtcagcagcgtagcaactggcctctcactttcggcggagggaccaaggtggagatcaaaaccacgacgccagcgccgcggccaccaacaccggcgcccaccatcgcgtcgcagcccctgtccctgcgcccagaggcgtgccggccagcggcggggggcgcagtgcacacgagggggctggacttcgcctgtgatatctacatctgggcgcccttggccgggacttgtggggtccttctcctgtcactggttatcaccctttactgccggagggaccagaggctgccccccgatgcccacaagccccctgggggaggcagtttccggacccccatccaagaggagcaggccgacgcccactccaccctggccaagatcagagtgaagttcagcaggagcgcagacgcccccgcgtaccagcagggccagaaccagctctataacgagctcaatctaggacgaagagaggagtacgatgttttggacaagagacgtggccgggaccctgagatggggggaaagccgagaaggaagaaccctcaggaaggcctgtacaatgaactgcagaaagataagatggcggaggcctacagtgagattgggatgaaaggcgagcgccggaggggcaaggggcacgatggcctttaccagggtctcagtacagccaccaaggacacctacgacgcccttcacatgcaggccctgccccctcgc

SEQ ID NO: 1949 - DNA, 1458 bp, synthetic construct
  misc_feature 1..1458: note = Synthetic
  source 1..1458: mol_type = other DNA
atggccttaccagtgaccgccttgctcctgccgctggccttgctgctccacgccgccaggccgcaggtgcagctggtggagtctgggggaggcgtggtccagcctgggaggtccctgagactctcctgtgcagcatctggattcaccttcagtaactatggcatgcactgggtccgccaggctccaggcaaggggctggagtggatggcagttatatggtctgatggacataataaatactatgcagactccgtgaagggccgattcaccatctccagagacaattccaagaacacgctgtatctgcaaatgaacagcctgagagccgaggacacggctgtgtattactgtgcgagggcacaattggaacgacggtacttctactacatggacgtctggggcaaagggaccacggtcaccgtctcctcaggcggcggtggatctggaggcggaggctctggaggcggcggctcccagactgtagtgacccaggaaccatcgttctcagtgtcccctggagggacagtcacactcacttgtggcttgacctctggctcagtctctactagttactaccccaactggtaccagcagaccccaggccaggctccacgcacgctcatctatagtacaaatattcgctcttctggggtccctgatcgcttctctggctccatccttgggaacaaagctgccctcaccatcacgggggcccaggcagatgatgaatctgattattactgtgtgctgtatatgggtagtggcatgtttattttcggcagtggaaccaaggtcactgtcctaaccacgacgccagcgccgcggccaccaacaccggcgcccaccatcgcgtcgcagcccctgtccctgcgcccagaggcgtgccggccagcggcggggggcgcagtgcacacgagggggctggacttcgcctgtgatatctacatctgggcgcccttggccgggacttgtggggtccttctcctgtcactggttatcaccctttactgccggagggaccagaggctgccccccgatgcccacaagccccctgggggaggcagtttccggacccccatccaagaggagcaggccgacgcccactccaccctggccaagatcagagtgaagttcagcaggagcgcagacgcccccgcgtaccagcagggccagaaccagctctataacgagctcaatctaggacgaagagaggagtacgatgttttggacaagagacgtggccgggaccctgagatggggggaaagccgagaaggaagaaccctcaggaaggcctgtacaatgaactgcagaaagataagatggcggaggcctacagtgagattgggatgaaaggcgagcgccggaggggcaaggggcacgatggcctttaccagggtctcagtacagccaccaaggacacctacgacgcccttcacatgcaggccctgccccctcgc

SEQ ID NO: 1950 - DNA, 1458 bp, synthetic construct
  misc_feature 1..1458: note = Synthetic
  source 1..1458: mol_type = other DNA
atggccttaccagtgaccgccttgctcctgccgctggccttgctgctccacgccgccaggccgcaggtgcagctggtgcagtctggggctgaggtgaagaagcctggggcctcagtgaaggtctcctgcaaggcttctggatacaccttcaccagttatgatatcaactgggtgcgacaggccactggacaagggcttgagtggatgggatggatgatccctaacagtggtgacacaggctctgcacagaagttccagggcagagtcaccatgaccaggaacacctccataggcacagcctacatggagctgagcagcctgagatctgaggacacggccgtttattactgtgcgagaggcggatattgtaatagtaccagttgctactactactacatggacgtctggggcaaagggaccacggtcaccgtctcctcaggcggcggtggatctggaggcggaggctctggaggcggcggctccgacatccagatgacccagtctccatcctcactgtctgcatctgtaggagacagagtcaccatcacttgtcgggcgagtcagggtattagcagctggttagcctggtatcagcagaaaccagagaaagcccctaagtccctgatctatgctgcatccagtttacagggtggggtcccatcaaggttcagcggcagtggatctgggacagatttcactctcaccatcagcagcctgcagcctgaagattttgcaacttattactgccaacagtatgatagttacccgtacacttttggccaggggaccaagctggagatcaaaaccacgacgccagcgccgcggccaccaacaccggcgcccaccatcgcgtcgcagcccctgtccctgcgcccagaggcgtgccggccagcggcggggggcgcagtgcacacgagggggctggacttcgcctgtgatatctacatctgggcgcccttggccgggacttgtggggtccttctcctgtcactggttatcaccctttactgccggagggaccagaggctgccccccgatgcccacaagccccctgggggaggcagtttccggacccccatccaagaggagcaggccgacgcccactccaccctggccaagatcagagtgaagttcagcaggagcgcagacgcccccgcgtaccagcagggccagaaccagctctataacgagctcaatctaggacgaagagaggagtacgatgttttggacaagagacgtggccgggaccctgagatggggggaaagccgagaaggaagaaccctcaggaaggcctgtacaatgaactgcagaaagataagatggcggaggcctacagtgagattgggatgaaaggcgagcgccggaggggcaaggggcacgatggcctttaccagggtctcagtacagccaccaaggacacctacgacgcccttcacatgcaggccctgccccctcgc

SEQ ID NO: 1951 - DNA, 1461 bp, synthetic construct
  misc_feature 1..1461: note = Synthetic
  source 1..1461: mol_type = other DNA
atggccttaccagtgaccgccttgctcctgccgctggccttgctgctccacgccgccaggccgcaggtgcagctggtgcagtctggggctgaggtgaagaagcctggggcctcagtgaaggtctcctgcaaggcttctggatacaccttcaccagttatgatatcaactgggtgcgacaggccactggacaagggcttgagtggatgggatggatgaaccctaatagtggtaacacagtctatgcacagaagttccagggcagagtcaccatgaccaggaacacctccataagcacagcctacatggagctgagcagcctgagatctgaggacacggccgtgtattactgtgcgagaggaggcgatttttggagtggttaccatgactactactactacatggacgtctggggcaaagggaccacggtcaccgtctcctcaggcggcggtggatctggaggcggaggctctggaggcggcggctccgacatccaggtgacccagtctccaaccttcctgtctgcatctgtaggagacagagtcaccatcacttgccgggccagtcagggcattagcagttatttagcctggtatcagcaaaaaccagggaaagcccctaagctcctgatctatggtgcatccactttgcaaagtggggtcccatcaaggttcagcggcagtggatctgggacagaattcactctcacaatcagcagcctgcagcctgaagattttgcaacttattactgtcaacagcttaatagttacccgtggacgttcggccaagggaccaaggtggaaatcaaaaccacgacgccagcgccgcggccaccaacaccggcgcccaccatcgcgtcgcagcccctgtccctgcgcccagaggcgtgccggccagcggcggggggcgcagtgcacacgagggggctggacttcgcctgtgatatctacatctgggcgcccttggccgggacttgtggggtccttctcctgtcactggttatcaccctttactgccggagggaccagaggctgccccccgatgcccacaagccccctgggggaggcagtttccggacccccatccaagaggagcaggccgacgcccactccaccctggccaagatcagagtgaagttcagcaggagcgcagacgcccccgcgtaccagcagggccagaaccagctctataacgagctcaatctaggacgaagagaggagtacgatgttttggacaagagacgtggccgggaccctgagatggggggaaagccgagaaggaagaaccctcaggaaggcctgtacaatgaactgcagaaagataagatggcggaggcctacagtgagattgggatgaaaggcgagcgccggaggggcaaggggcacgatggcctttaccagggtctcagtacagccaccaaggacacctacgacgcccttcacatgcaggccctgccccctcgc

SEQ ID NO: 1952 - DNA, 1455 bp, synthetic construct
  misc_feature 1..1455: note = Synthetic
  source 1..1455: mol_type = other DNA
atggccttaccagtgaccgccttgctcctgccgctggccttgctgctccacgccgccaggccgcaggtgcagctgcaggagtcgggcccaggactggtgaagccttcggagaccctgtccctcacctgcactgtctctggtggctccatcagtagttactactggagctggatccggcagcccgccgggaagggactggagtggattgggcgtatctataccagtgggagcaccaactacaacccctccctcaagagtcgagtcaccatgtcagtagacacgtccaagaaccagttctccctgaagctgagctctgtgaccgccgcggacacggccgtgtattactgtgcgagagaggagtaccagctgctaccggccctctactactactactacatggacgtctggggcaaagggaccacggtcaccgtctcctcaggcggcggtggatctggaggcggaggctctggaggcggcggctcctcctatgagctgactcagccaccctcagtgtccgtgtccccaggacagacagccagcatcacctgctctggagataaattgggggataaatatgcttgctggtatcagcagaagccaggccagtcccctgtgctggtcatctatcaagatagcaagcggccctcagggatccctgagcgattctctggctccaactctgggaacacagccactctgaccatcagcgggacccaggctatggatgaggctgactattactgtcaggcgtgggacagcagcactgctgtgttcggaggaggcacccagctgaccgccctcaccacgacgccagcgccgcggccaccaacaccggcgcccaccatcgcgtcgcagcccctgtccctgcgcccagaggcgtgccggccagcggcggggggcgcagtgcacacgagggggctggacttcgcctgtgatatctacatctgggcgcccttggccgggacttgtggggtccttctcctgtcactggttatcaccctttactgccggagggaccagaggctgccccccgatgcccacaagccccctgggggaggcagtttccggacccccatccaagaggagcaggccgacgcccactccaccctggccaagatcagagtgaagttcagcaggagcgcagacgcccccgcgtaccagcagggccagaaccagctctataacgagctcaatctaggacgaagagaggagtacgatgttttggacaagagacgtggccgggaccctgagatggggggaaagccgagaaggaagaaccctcaggaaggcctgtacaatgaactgcagaaagataagatggcggaggcctacagtgagattgggatgaaaggcgagcgccggaggggcaaggggcacgatggcctttaccagggtctcagtacagccaccaaggacacctacgacgcccttcacatgcaggccctgccccctcgc

SEQ ID NO: 1953 - DNA, 1458 bp, synthetic construct
  misc_feature 1..1458: note = Synthetic
  source 1..1458: mol_type = other DNA
atggccttaccagtgaccgccttgctcctgccgctggccttgctgctccacgccgccaggccgcaggtgcagctggtggagtctgggggaggcgtggtccagcctgggaggtccctgagactctcctgtgcagcaactggattcaccttcagtagctatggcatgcactgggtccgccaggctccaggcaaggggctggagtggatggtagttatatggtctgatggacataataaatactatgcagactccgtgaagggccgattcaccatctccagagacaattccaagaacacgctgtatctgcaaatgaacagcctgagagccgaggacacggctgtgtattactgtgcgagggcacaactggaacgacggtacttctactacatggacgtctggggcaaagggaccacggtcaccgtctcctcaggcggcggtggatctggaggcggaggctctggaggcggcggctcccagactgtagtgacccaggaaccatcgttctcagtgtcccctggagggacagtcacactcacttgtggcttgacctctggctcagtctctactagttactaccccaactggtaccagcagaccccaggccaggctccacgcacgctcatctacagcacaaatattcgctcttctggggtccctgatcgcttctctggctccatccttgggaacaaagctgccctcaccatcacgggggcccaggcagatgatgaatctgattattactgtgtgctgtatatgggtagtggcatgtttattttcggcagtggaaccaaggtcactgtcctaaccacgacgccagcgccgcggccaccaacaccggcgcccaccatcgcgtcgcagcccctgtccctgcgcccagaggcgtgccggccagcggcggggggcgcagtgcacacgagggggctggacttcgcctgtgatatctacatctgggcgcccttggccgggacttgtggggtccttctcctgtcactggttatcaccctttactgccggagggaccagaggctgccccccgatgcccacaagccccctgggggaggcagtttccggacccccatccaagaggagcaggccgacgcccactccaccctggccaagatcagagtgaagttcagcaggagcgcagacgcccccgcgtaccagcagggccagaaccagctctataacgagctcaatctaggacgaagagaggagtacgatgttttggacaagagacgtggccgggaccctgagatggggggaaagccgagaaggaagaaccctcaggaaggcctgtacaatgaactgcagaaagataagatggcggaggcctacagtgagattgggatgaaaggcgagcgccggaggggcaaggggcacgatggcctttaccagggtctcagtacagccaccaaggacacctacgacgcccttcacatgcaggccctgccccctcgc

SEQ ID NO: 1954 - DNA, 1458 bp, synthetic construct
  misc_feature 1..1458: note = Synthetic
  source 1..1458: mol_type = other DNA
atggccttaccagtgaccgccttgctcctgccgctggccttgctgctccacgccgccaggccgcaggtgcagctggtggagtctgggggaggcgtggtccagcctgggaggtccctgagactctcctgtgcagcgtctggattcaccttcactagttatgacatgcactgggtccgccaggctccaggcaaggggctggagtgggtgacaattatatggtttgatggaagtaataaatactatgcagactccgtgaagggccgattcaccatctccagagacaattccaagaacacgctgtatctgcaaatgaacagcctgagcgccgaggacacggctgtgtattactgtgcgagaggagacaactggaacgaccggtactactactactactacatggacgtctggggcaaagggaccacggtcaccgtctcctcaggcggcggtggatctggaggcggaggctctggaggcggcggctccgaaattgtgctgactcagtctccagactttcagtctgtgactccaaaggagaaagtcaccatcacctgccgggccagtcagagcattggtagtagcttacactggtaccagcagaaaccagatcagtctccaatgctcctcatcaagtttgcttcccagtccatctcaggggtcccctcgaggttcagtggcagtggatctgggacagatttcaccctcaccatcaatagcctggaagctgaagatgctgcagcgtattactgtcatcagagtagtagtttaccgtggacgttcggccaagggaccaaggtggaaatcaaaaccacgacgccagcgccgcggccaccaacaccggcgcccaccatcgcgtcgcagcccctgtccctgcgcccagaggcgtgccggccagcggcggggggcgcagtgcacacgagggggctggacttcgcctgtgatatctacatctgggcgcccttggccgggacttgtggggtccttctcctgtcactggttatcaccctttactgccggagggaccagaggctgccccccgatgcccacaagccccctgggggaggcagtttccggacccccatccaagaggagcaggccgacgcccactccaccctggccaagatcagagtgaagttcagcaggagcgcagacgcccccgcgtaccagcagggccagaaccagctctataacgagctcaatctaggacgaagagaggagtacgatgttttggacaagagacgtggccgggaccctgagatggggggaaagccgagaaggaagaaccctcaggaaggcctgtacaatgaactgcagaaagataagatggcggaggcctacagtgagattgggatgaaaggcgagcgccggaggggcaaggggcacgatggcctttaccagggtctcagtacagccaccaaggacacctacgacgcccttcacatgcaggccctgccccctcgc

SEQ ID NO: 1955 - DNA, 1473 bp, synthetic construct
  misc_feature 1..1473: note = Synthetic
  source 1..1473: mol_type = other DNA
atggccttaccagtgaccgccttgctcctgccgctggccttgctgctccacgccgccaggccgcaggttcagctggtgcagtctggagctgaggtgaagaagcctggggcctcagtgaaggtctcctgcaaggcttctggttacacctttaccagctatggtatcagctgggtgcgacaggcccctggacaagggcttgagtggatggggtggatcagcgcttacaatggtcacacagactatacacagaaactccagggcagagtcaccatgaccacagacacatccacgaccacagcctacatggaactgaggagcctgagctctgccgacacggccgtgtattactgtgtgagagaagtggtacttcccaccacggactactactacttttacatggacgtctggggcaaagggaccacggtcaccgtctcctcaggcggcggtggatctggaggcggaggctctggaggcggcggctccgatattgtgatgacccagcctccactctcctcgcctgtcacccttggacagccggcctccatctcctgcaggtctagtcaaagcctcgtacacagtgatggaaacacctacttgagttggcttcagcagaggccaggccagcctccaagactcctaatttataaggtttctaaccggttctctggggtcccagacagattcagtggcagtggggcagggacagatttcacactgaaaatcagcagggtggaagctgaggatgtcggggtttattactgcacgcaagctacacaatttcctcacacttttggccaggggaccaagctggagatcaaaaccacgacgccagcgccgcggccaccaacaccggcgcccaccatcgcgtcgcagcccctgtccctgcgcccagaggcgtgccggccagcggcggggggcgcagtgcacacgagggggctggacttcgcctgtgatatctacatctgggcgcccttggccgggacttgtggggtccttctcctgtcactggttatcaccctttactgccggagggaccagaggctgccccccgatgcccacaagccccctgggggaggcagtttccggacccccatccaagaggagcaggccgacgcccactccaccctggccaagatcagagtgaagttcagcaggagcgcagacgcccccgcgtaccagcagggccagaaccagctctataacgagctcaatctaggacgaagagaggagtacgatgttttggacaagagacgtggccgggaccctgagatggggggaaagccgagaaggaagaaccctcaggaaggcctgtacaatgaactgcagaaagataagatggcggaggcctacagtgagattgggatgaaaggcgagcgccggaggggcaaggggcacgatggcctttaccagggtctcagtacagccaccaaggacacctacgacgcccttcacatgcaggccctgccccctcgc

SEQ ID NO: 1956 - DNA, 1470 bp, synthetic construct
  misc_feature 1..1470: note = Synthetic
  source 1..1470: mol_type = other DNA
atggccttaccagtgaccgccttgctcctgccgctggccttgctgctccacgccgccaggccgcaggtccagctggtacagtctggggctgaggtgaagaagcctggggcctcagtgaaggtctcctgcaaggtttccggatacaccctcactgaattatccatgcactgggtgcgacaggctcctggaaaagggcttgagtggatgggaggttttgatcctgaagatggtgaaacaatctacgcacagaagttccagggcagagtcaccatgaccgaggacacatctacagacacagcctacatggagctgagcagcctgagatctgaggacacggccgtgtattactgtgcaacaggacgtattactatggttcggggagttattatcccctactactactactacatggacgtctggggcaaagggaccacggtcaccgtctcctcaggcggcggtggatctggaggcggaggctctggaggcggcggctccgacatccagatgacccagtctccatcctcactgtctgcatctgtaggagacagagtcaccatcacttgtcgggcgagtcagggtattagcagctggttagcctggtatcagcagaaaccagagaaagcccctaagtccctgatctatgctgcatccagtttgcaaagtggggtcccatcaaggttcagcggcagtggatctgggacagatttcactctcaccatcagcagcctgcagcctgaagattttgcaacttattactgccaacagtataatagttacccgtacacttttggccaggggaccaagctggagatcaaaaccacgacgccagcgccgcggccaccaacaccggcgcccaccatcgcgtcgcagcccctgtccctgcgcccagaggcgtgccggccagcggcggggggcgcagtgcacacgagggggctggacttcgcctgtgatatctacatctgggcgcccttggccgggacttgtggggtccttctcctgtcactggttatcaccctttactgccggagggaccagaggctgccccccgatgcccacaagccccctgggggaggcagtttccggacccccatccaagaggagcaggccgacgcccactccaccctggccaagatcagagtgaagttcagcaggagcgcagacgcccccgcgtaccagcagggccagaaccagctctataacgagctcaatctaggacgaagagaggagtacgatgttttggacaagagacgtggccgggaccctgagatggggggaaagccgagaaggaagaaccctcaggaaggcctgtacaatgaactgcagaaagataagatggcggaggcctacagtgagattgggatgaaaggcgagcgccggaggggcaaggggcacgatggcctttaccagggtctcagtacagccaccaaggacacctacgacgcccttcacatgcaggccctgccccctcgc

SEQ ID NO: 1957 - DNA, 1464 bp, synthetic construct
  misc_feature 1..1464: note = Synthetic
  source 1..1464: mol_type = other DNA
atggccttaccagtgaccgccttgctcctgccgctggccttgctgctccacgccgccaggccgcaggttcagctggtgcagtctggaactgaggtgaagaagcctggggcctcagtgaaggtctcctgcaaggcttctggttacacctttaccaactatggtatcggctgggtgcgacaggcccctggacaagggcttgagtggatgggatggatcatcgcttacaatggttacacaaagtatgcacagattctccagggcagagtcaccatgaccacagacacatccacgaacacagcttatatggaactgaggagcctgagatctgacgacacggccgtgtattactgtgcgagacagcagctcgggggggactaccactactacatggacgtctggggcaaagggaccacggtcaccgtctcctcaggcggcggtggatctggaggcggaggctctggaggcggcggctccgatattgtgatgacccagactccactctctctgtccgtcacccctggacagccggcctccatctcctgcaagtctagtaagagcctcctgcatagtgatggaaagacctatttgtattggtacctgcagaagccaggccagcctccacagctcctgatctatgaagtttccaaccggttctctggagtgccagataggttcagtggcagcgggtcagggacagatttcacactgaaaatcagccgggtggaggctgaggatgttggggtttattactgcatgcaaagtatacaatttccgtggacgttcggccaagggaccaaggtggaaatcaagaccacgacgccagcgccgcggccaccaacaccggcgcccaccatcgcgtcgcagcccctgtccctgcgcccagaggcgtgccggccagcggcggggggcgcagtgcacacgagggggctggacttcgcctgtgatatctacatctgggcgcccttggccgggacttgtggggtccttctcctgtcactggttatcaccctttactgccggagggaccagaggctgccccccgatgcccacaagccccctgggggaggcagtttccggacccccatccaagaggagcaggccgacgcccactccaccctggccaagatcagagtgaagttcagcaggagcgcagacgcccccgcgtaccagcagggccagaaccagctctataacgagctcaatctaggacgaagagaggagtacgatgttttggacaagagacgtggccgggaccctgagatggggggaaagccgagaaggaagaaccctcaggaaggcctgtacaatgaactgcagaaagataagatggcggaggcctacagtgagattgggatgaaaggcgagcgccggaggggcaaggggcacgatggcctttaccagggtctcagtacagccaccaaggacacctacgacgcccttcacatgcaggccctgccccctcgc

SEQ ID NO: 1958 - DNA, 1464 bp, synthetic construct
  misc_feature 1..1464: note = Synthetic
  source 1..1464: mol_type = other DNA
atggccttaccagtgaccgccttgctcctgccgctggccttgctgctccacgccgccaggccgcaggttcagctggtgcagtctggaactgaggtgaagaagcctggggcctcagtgaaggtctcctgcaaggcttctggttacacctttaccaactatggtatcggctgggtgcgacaggcccctggacaagggcttgagtggatgggatggatcatcgcttacaatggttacacaaagtatgcacagattctccagggcagagtcaccatgaccacggacacatccacgaacacagcctatatggaactgaggagcctgagatctgacgacacggccgtgtattactgtgcgcgacagcagctcgggggggactaccactactacatggacgtctggggcaaagggaccacggtcaccgtctcttcaggcggcggtggatctggaggcggaggctctggaggcggcggctccgatattgtgatgacccagactccactctctctgtccgtcacccctggacagccggcctccatctcctgcaagtctagtaagagcctcctgcatagtgatggaaagacctatttgtattggtacctgcagaagccaggccagcctccacagctcctgatctatgaagtttccacccggttctctggagtgccagataggttcagtggcagcgggtcagggacagatttcacactgaaaatcagccgggtggaggctgaggatgttggggtttattactgcatgcaaagtatacagtttccgtggacgttcggccaagggaccaaggtggaaatcaaaaccacgacgccagcgccgcggccaccaacaccggcgcccaccatcgcgtcgcagcccctgtccctgcgcccagaggcgtgccggccagcggcggggggcgcagtgcacacgagggggctggacttcgcctgtgatatctacatctgggcgcccttggccgggacttgtggggtccttctcctgtcactggttatcaccctttactgccggagggaccagaggctgccccccgatgcccacaagccccctgggggaggcagtttccggacccccatccaagaggagcaggccgacgcccactccaccctggccaagatcagagtgaagttcagcaggagcgcagacgcccccgcgtaccagcagggccagaaccagctctataacgagctcaatctaggacgaagagaggagtacgatgttttggacaagagacgtggccgggaccctgagatggggggaaagccgagaaggaagaaccctcaggaaggcctgtacaatgaactgcagaaagataagatggcggaggcctacagtgagattgggatgaaaggcgagcgccggaggggcaaggggcacgatggcctttaccagggtctcagtacagccaccaaggacacctacgacgcccttcacatgcaggccctgccccctcgc

SEQ ID NO: 1959 - DNA, 1458 bp, synthetic construct
  misc_feature 1..1458: note = Synthetic
  source 1..1458: mol_type = other DNA
atggccttaccagtgaccgccttgctcctgccgctggccttgctgctccacgccgccaggccgcaggtgcagctggtgcagtctgggactgaggtgaagaagcctggggcctcagtgaaggtctcctgtaagacttctggatacaccttcaccagttatgatatcaactgggtgcgacaggccactggacaagggcttgagtggatgggatggatgaaccctatcagtggtgacacaggctctgcacagaagttccagggcagagtcaccatgaccaggaacacctccataggcacagcctacatggagctgagcagcctgagatctgaggacacggccgtttattactgtgcgagaggcggatattgtagtagtaccagctgctactactactacatggacgtctggggcaaagggaccacggtcaccgtctcctcaggcggcggtggatctggaggcggaggctctggaggcggcggctccgacatccagatgacccagtctccatcctcactgtctgcctctgtaggagacagagtcaccatcacttgtcgggcgagtcagggtattagcaactggttagcctggtatcagcagaaaccagagaaagcccctaagtccctgatctatgctgcatccagtttgcaaggtggggtcccatcaagattcagcggcagtggatctgggacagatttcactctcaccatcagcagcctgcagcctgaagattttgcaacttattactgccaacagtatgatagttacccgtacacttttggccaggggaccaagctggagatcaaaaccacgacgccagcgccgcggccaccaacaccggcgcccaccatcgcgtcgcagcccctgtccctgcgcccagaggcgtgccggccagcggcggggggcgcagtgcacacgagggggctggacttcgcctgtgatatctacatctgggcgcccttggccgggacttgtggggtccttctcctgtcactggttatcaccctttactgccggagggaccagaggctgccccccgatgcccacaagccccctgggggaggcagtttccggacccccatccaagaggagcaggccgacgcccactccaccctggccaagatcagagtgaagttcagcaggagcgcagacgcccccgcgtaccagcagggccagaaccagctctataacgagctcaatctaggacgaagagaggagtacgatgttttggacaagagacgtggccgggaccctgagatggggggaaagccgagaaggaagaaccctcaggaaggcctgtacaatgaactgcagaaagataagatggcggaggcctacagtgagattgggatgaaaggcgagcgccggaggggcaaggggcacgatggcctttaccagggtctcagtacagccaccaaggacacctacgacgcccttcacatgcaggccctgccccctcgc

SEQ ID NO: 1960 - DNA, 1458 bp, synthetic construct
  misc_feature 1..1458: note = Synthetic
  source 1..1458: mol_type = other DNA
atggccttaccagtgaccgccttgctcctgccgctggccttgctgctccacgccgccaggccgcaggtgcagctggtgcagtctggggctgaggtgaagaagcctggggcctcagtgaaggtctcctgcaaggcttctggatacaccttcaccagttatgatatcaactgggtgcgacaggccactggacaagggcttgagtggatgggatggatgatccctaacagtggtgacacaggctctgcacagaagttccagggcagagtcaccatgaccaggaacacctccataagcacagcctacatggagctgagcagcctgagatctgaggacacggccgtttattactgtgcgagaggcggatattgtaatagtaccagttgctactactactacatggacgtctggggcaaagggaccacggtcaccgtctcctcaggcggcggtggatctggaggcggaggctctggaggcggcggctccgacatccagatgacccagtctccatcctcactgtctgcatctgtaggagacagagtcaccatcacttgtcgggcgagtcagggtattagcagctggttagcctggtatcagcagaaaccagagaaagcccctaagtccctgatctatgctgcatccagtttacaaggtggggtcccatcaaggttcagcggcagtggatctgggacagatttcactctcaccatcagcagcctgcagcctgaagattttgcaacttattactgccaacagtatgatagttacccgtacacttttggccaggggaccaagctggagatcaaaaccacgacgccagcgccgcggccaccaacaccggcgcccaccatcgcgtcgcagcccctgtccctgcgcccagaggcgtgccggccagcggcggggggcgcagtgcacacgagggggctggacttcgcctgtgatatctacatctgggcgcccttggccgggacttgtggggtccttctcctgtcactggttatcaccctttactgccggagggaccagaggctgccccccgatgcccacaagccccctgggggaggcagtttccggacccccatccaagaggagcaggccgacgcccactccaccctggccaagatcagagtgaagttcagcaggagcgcagacgcccccgcgtaccagcagggccagaaccagctctataacgagctcaatctaggacgaagagaggagtacgatgttttggacaagagacgtggccgggaccctgagatggggggaaagccgagaaggaagaaccctcaggaaggcctgtacaatgaactgcagaaagataagatggcggaggcctacagtgagattgggatgaaaggcgagcgccggaggggcaaggggcacgatggcctttaccagggtctcagtacagccaccaaggacacctacgacgcccttcacatgcaggccctgccccctcgc

SEQ ID NO: 1961 - DNA, 1461 bp, synthetic construct
  misc_feature 1..1461: note = Synthetic
  source 1..1461: mol_type = other DNA
atggccttaccagtgaccgccttgctcctgccgctggccttgctgctccacgccgccaggccggaggtgcagttgttggagtctgggggaggcttggtacaacctggggggtccctgagactctcctgtgcagcctctggattcacctttagcagctatgtcatgaactgggtccgccaggctccagggaaggggctggaatgggtctcatctgttagtggtagtggtaataactcattctacgcagactccgtgaagggccggttcaccatctccagagacaattccaagaacacgctgtatctgcaaatgaacagcctgagagccgaggacacggccgtatattactgtgcgagtcgtagttccagttatctctactactactactacatggacgtctggggcaaagggaccaccgtcaccgtctcctcaggcggcggtggatctggaggcggaggctctggaggcggcggctccgaaattgtgttgacgcagtctccaggcaccctgtctttgtctccaggggaaagagccaccctctcctgcagggccagtcagagtgttagcagcagctacttagcctggtaccagcagaaacctggccaggctcccaggctcctcatctatggtgcatccagcagggccactggcatcccagacaggttcagtgacagtgggtctgggacagacttcactctcaccatcagcagactggagcctgaagattttgcagtgtattactgtcagcactatggtagctcacctccgaggatcactttcggccctgggaccaaagtggatatcaaaaccacgacgccagcgccgcggccaccaacaccggcgcccaccatcgcgtcgcagcccctgtccctgcgcccagaggcgtgccggccagcggcggggggcgcagtgcacacgagggggctggacttcgcctgtgatatctacatctgggcgcccttggccgggacttgtggggtccttctcctgtcactggttatcaccctttactgccggagggaccagaggctgccccccgatgcccacaagccccctgggggaggcagtttccggacccccatccaagaggagcaggccgacgcccactccaccctggccaagatcagagtgaagttcagcaggagcgcagacgcccccgcgtaccagcagggccagaaccagctctataacgagctcaatctaggacgaagagaggagtacgatgttttggacaagagacgtggccgggaccctgagatggggggaaagccgagaaggaagaaccctcaggaaggcctgtacaatgaactgcagaaagataagatggcggaggcctacagtgagattgggatgaaaggcgagcgccggaggggcaaggggcacgatggcctttaccagggtctcagtacagccaccaaggacacctacgacgcccttcacatgcaggccctgccccctcgc

SEQ ID NO: 1962 - DNA, 1458 bp, synthetic construct
  misc_feature 1..1458: note = Synthetic
  source 1..1458: mol_type = other DNA
atggccttaccagtgaccgccttgctcctgccgctggccttgctgctccacgccgccaggccgcaagtgcagctggtggagagcggcggcggagtggtgcaacctggaagaagcctgcggctgagctgcgctgctagcggcttcaccttcagcagccacgacatgcactgggtgcggcaggcccctggcaagggcctggactgggtcgccgtgatctggagcgacggcaacaagaagtactacgtggacagcgccaagggcagattcaccatcagccgcgacaatagcaagaacaccgtgtacctgcagatgaacagcctgagagccgaggacaccgccatctactattgcgccagaggcgataattggaacgacgagcacagctactattactacatggacgtgtggggcaaaggcacaaccgtgaccgtgtcctccggcggcggcggttctggcggaggaggctccgggggcggcggaagcgagatcgtgctgacccagagccccgacttccagtctgtgacacctaaggaaaaggttacaattacctgtagagcttcccagaccatcggctcttctctgcactggtaccagcagaaacctgatcagtctccaaagctgctgatcaagcacgccagccagagcttctctggcgtccccagccggttttctggcagcggcagcggaacagattttacactgacagtgaactcactggaagccgaggatgccgccacctactactgccatcagagctccagcctcccttggaccttcggccagggcacgaaggtggaaatcaaaaccacgacgccagcgccgcggccaccaacaccggcgcccaccatcgcgtcgcagcccctgtccctgcgcccagaggcgtgccggccagcggcggggggcgcagtgcacacgagggggctggacttcgcctgtgatatctacatctgggcgcccttggccgggacttgtggggtccttctcctgtcactggttatcaccctttactgccggagggaccagaggctgccccccgatgcccacaagccccctgggggaggcagtttccggacccccatccaagaggagcaggccgacgcccactccaccctggccaagatcagagtgaagttcagcaggagcgcagacgcccccgcgtaccagcagggccagaaccagctctataacgagctcaatctaggacgaagagaggagtacgatgttttggacaagagacgtggccgggaccctgagatggggggaaagccgagaaggaagaaccctcaggaaggcctgtacaatgaactgcagaaagataagatggcggaggcctacagtgagattgggatgaaaggcgagcgccggaggggcaaggggcacgatggcctttaccagggtctcagtacagccaccaaggacacctacgacgcccttcacatgcaggccctgccccctcgc

SEQ ID NO: 1963 - DNA, 1458 bp, synthetic construct
  misc_feature 1..1458: note = Synthetic
  source 1..1458: mol_type = other DNA
atggccttaccagtgaccgccttgctcctgccgctggccttgctgctccacgccgccaggccgcaagtgcagctggtggaaagcggcggcggagtggtgcaacctggcagatctctgcggctgtcttgtgccgcctctggatttacattcagctctcatgatatgcactgggtgcggcaggcccctggcaaaggcctggactgggtcgccgtgatctggagcgacggcaacaacaagtactacgccgacagcgccaagggaagattcaccatcagccgggacaattctaaaaacaccgtgtacctgcagatgaacagcctgagagctgaggacaccgccatctactattgcgccagaggagataattggaacgacgagcacagctactactactatatggacgtgtggggcaagggcacaacagtgaccgtgtcctccggcggcggaggtagcggcggaggcggcagcggcggcggcggctccgagatcgtgctgacacagtccccagattttcagagcgtgacccccaaggaaaaggtgacaatcacctgcagagccagccagaccatcggcagcagcctgcactggtaccagcagaaacccgatcagtctcctaagctgctgatcaagcacgccagccagagcttcagcggcgttcccagcaggttcagcggaagcggcagcggcaccgacttcaccctgaccgtgaactctctcgaggccgaggacgccgctacatactactgccaccagagcagctccctgccttggaccttcggccagggcaccaaggtcgaaattaagaccacgacgccagcgccgcggccaccaacaccggcgcccaccatcgcgtcgcagcccctgtccctgcgcccagaggcgtgccggccagcggcggggggcgcagtgcacacgagggggctggacttcgcctgtgatatctacatctgggcgcccttggccgggacttgtggggtccttctcctgtcactggttatcaccctttactgccggagggaccagaggctgccccccgatgcccacaagccccctgggggaggcagtttccggacccccatccaagaggagcaggccgacgcccactccaccctggccaagatcagagtgaagttcagcaggagcgcagacgcccccgcgtaccagcagggccagaaccagctctataacgagctcaatctaggacgaagagaggagtacgatgttttggacaagagacgtggccgggaccctgagatggggggaaagccgagaaggaagaaccctcaggaaggcctgtacaatgaactgcagaaagataagatggcggaggcctacagtgagattgggatgaaaggcgagcgccggaggggcaaggggcacgatggcctttaccagggtctcagtacagccaccaaggacacctacgacgcccttcacatgcaggccctgccccctcgc

SEQ ID NO: 1964 - DNA, 1455 bp, synthetic construct
  misc_feature 1..1455: note = Synthetic
  source 1..1455: mol_type = other DNA
atggccttaccagtgaccgccttgctcctgccgctggccttgctgctccacgccgccaggccgcaactgcagctggtgcagagcggagccgaggtgaagaagcctggcgctagcgttaaggtgtcctgcaaggcctccggctacacctttaccaactacggcatctcctggctgcgccaggccccaggccagggcctggagtggatgggctggatctccggatacaacgacaacacccactacgcccagaaattccagggtagagtgactatgaccaccgataccagcacaacaacagcctacatggaactgagaaacctgcggagcgacgacaccgccgtgtactactgcgcccgggacggcattgccgctagacctgtgtactactattacatggacgtgtggggcaagggcaccaccgtgacagtgtcttctggcggcggcggcagcggcggcggaggatctggcggcggaggatctgatatccagatgacccagagccccagcagcctgagcgccagcgtgggcgaccgggtcacaatcacctgcagagccagccagagcatcagcaattacctgaactggtaccaccagaagcccggcaaagcccctaagctgctgatctacgctgcttctagcctcgagagcggcgtgcctagcagattcagcggcagcggcagcggaacagatttcaccctgacaatcagctctctgcaacctgaggacttcgccacatactattgtcagcagtcctacagcaatcctctgaccttcggcggcggcacaaaggtggaatctaagaccacgacgccagcgccgcggccaccaacaccggcgcccaccatcgcgtcgcagcccctgtccctgcgcccagaggcgtgccggccagcggcggggggcgcagtgcacacgagggggctggacttcgcctgtgatatctacatctgggcgcccttggccgggacttgtggggtccttctcctgtcactggttatcaccctttactgccggagggaccagaggctgccccccgatgcccacaagccccctgggggaggcagtttccggacccccatccaagaggagcaggccgacgcccactccaccctggccaagatcagagtgaagttcagcaggagcgcagacgcccccgcgtaccagcagggccagaaccagctctataacgagctcaatctaggacgaagagaggagtacgatgttttggacaagagacgtggccgggaccctgagatggggggaaagccgagaaggaagaaccctcaggaaggcctgtacaatgaactgcagaaagataagatggcggaggcctacagtgagattgggatgaaaggcgagcgccggaggggcaaggggcacgatggcctttaccagggtctcagtacagccaccaaggacacctacgacgcccttcacatgcaggccctgccccctcgc

SEQ ID NO: 1965 - DNA, 1458 bp, synthetic construct
  misc_feature 1..1458: note = Synthetic
  source 1..1458: mol_type = other DNA
atggccttaccagtgaccgccttgctcctgccgctggccttgctgctccacgccgccaggccgcaagtgcagctggtggagagcgggggaggtgtcgtgcagcctggaagaagcctcagactgtcttgtgtggccagcggctttaccttcagctctaatgacatctactgggtgcggcaggcccctggcaagggcctggaatgggtcgctgtgatctggtacgacggcagcaacaaatactacgccgattctgtgaagggcagattcaccatcagcagagataattctaagaacaccctgtacctgcagatgaacagcctgagagccgaggataccgccgtgtactattgcgccaggggcgacaactggaacgacgagcaccattaccactactacatggacgtgtggggcaaaggcaccaccgtgaccgtgtccagcggcggcggaggctctggaggaggcggcagcggcggcggcggctccgagattgttctgacccagagccctgatttccagagcgtgacccccaaggaaaaggtgacaatcacctgccgggccagccaaagcatcggctccagcctgcactggtatcagcagaagcccgaccagtccccaaagctgctgatcaaattcgcctctcagtcattcagcggcgtgccttcccggttcagcggaagcggcagcggcacagactttaccctgacaatccacagcctggaagccgaggacgccgctacatactactgccaccagagcggcagcctgccctggacattcggccagggcacgaaggtggagatcaagaccacgacgccagcgccgcggccaccaacaccggcgcccaccatcgcgtcgcagcccctgtccctgcgcccagaggcgtgccggccagcggcggggggcgcagtgcacacgagggggctggacttcgcctgtgatatctacatctgggcgcccttggccgggacttgtggggtccttctcctgtcactggttatcaccctttactgccggagggaccagaggctgccccccgatgcccacaagccccctgggggaggcagtttccggacccccatccaagaggagcaggccgacgcccactccaccctggccaagatcagagtgaagttcagcaggagcgcagacgcccccgcgtaccagcagggccagaaccagctctataacgagctcaatctaggacgaagagaggagtacgatgttttggacaagagacgtggccgggaccctgagatggggggaaagccgagaaggaagaaccctcaggaaggcctgtacaatgaactgcagaaagataagatggcggaggcctacagtgagattgggatgaaaggcgagcgccggaggggcaaggggcacgatggcctttaccagggtctcagtacagccaccaaggacacctacgacgcccttcacatgcaggccctgccccctcgc

SEQ ID NO: 1966 - DNA, 1446 bp, synthetic construct
  misc_feature 1..1446: note = Synthetic
  source 1..1446: mol_type = other DNA
atggccttaccagtgaccgccttgctcctgccgctggccttgctgctccacgccgccaggccgcaagtgcagctggtggaaagcggcggcggtgttgtgcaacctggcagaagcctgcggctgtcatgcgccgccagcggcttcaccttcagctcttacggcatgcactgggtgcggcaggcccctggaaagggactggaatgggtcgccgtgatcagctacgacggctccaacaagtactacgccgacagcgtgaaaggcagattcaccatctctagggacaacagcaagaccaccctctacctgcagatgaacagcctgagagccgaggacaccgccgtgtactattgtgccagagatcactactactactacatggacgtgtggggcaagggcaccaccgtgaccgtgtcttctggcggcggaggcagcggcggaggcggcagcggcggcggcggctcccagaccgtggtgactcaggagcccagcttcagcgtcagccccggcggaacagtgaccctgacatgcggcctgagcagcggcagcgtgtccaccagctactatcctagctggtaccagcagacaccaggccaggctcctagaaccctgatctacagcaccaacatccggagcagcggcgtgcctgatagatttagcggctctatcctgggaaataaagccgctctgaccattacaggcgcccaggctgatgacgagagcgactactactgcgtgctgtacatgggctctgatatcgtggttttcggcggcggcacaaagctgacagtgctgaccacgacgccagcgccgcggccaccaacaccggcgcccaccatcgcgtcgcagcccctgtccctgcgcccagaggcgtgccggccagcggcggggggcgcagtgcacacgagggggctggacttcgcctgtgatatctacatctgggcgcccttggccgggacttgtggggtccttctcctgtcactggttatcaccctttactgccggagggaccagaggctgccccccgatgcccacaagccccctgggggaggcagtttccggacccccatccaagaggagcaggccgacgcccactccaccctggccaagatcagagtgaagttcagcaggagcgcagacgcccccgcgtaccagcagggccagaaccagctctataacgagctcaatctaggacgaagagaggagtacgatgttttggacaagagacgtggccgggaccctgagatggggggaaagccgagaaggaagaaccctcaggaaggcctgtacaatgaactgcagaaagataagatggcggaggcctacagtgagattgggatgaaaggcgagcgccggaggggcaaggggcacgatggcctttaccagggtctcagtacagccaccaaggacacctacgacgcccttcacatgcaggccctgccccctcgc

SEQ ID NO: 1967 - DNA, 1452 bp, synthetic construct
  misc_feature 1..1452: note = Synthetic
  source 1..1452: mol_type = other DNA
atggccttaccagtgaccgccttgctcctgccgctggccttgctgctccacgccgccaggccgcaactgcagctgcaggagagcggccctggactggtgaagcccagcgagacactgagcctgacatgcaccgtgtccggaggctctatcagcagcagcagctactactggggatggattagacagccccccggcaagggcctggaatggatcggcagcctgtactacagcggcagcacctactacaaccccagcctgaagtctagagtgaccatcagcgtggacaccagcaagaaccagttcagcctgaaactgagctctgtcacagccgccgataccgccgtgtactactgcgccgctgtgcagctggaaaggcggggctacttctacatggacgtgtggggcaaaggcaccaccgtgacagtgtctagcggcggcggcggaagcggcggcggtggcagtggcggcggcggctctgagatcgtgctgacacagtcccctgctaccctgagcctgagccctggcgagcgggccaccctgagctgcagagccagccagagcgtgtccagctactttgcctggtatcagcagaagcctggccaggccccacggctgctgatctacgacgcctctaatagagccacaggcatcccagctagattcagcggctccggctccggaaccgatttcaccctgaccatctctagcctcgagcctgaggacttcgccgtttactattgtcagcaaagaagcaactggcctctgacatttggcggaggcacaaaggtggaaatcaagaccacgacgccagcgccgcggccaccaacaccggcgcccaccatcgcgtcgcagcccctgtccctgcgcccagaggcgtgccggccagcggcggggggcgcagtgcacacgagggggctggacttcgcctgtgatatctacatctgggcgcccttggccgggacttgtggggtccttctcctgtcactggttatcaccctttactgccggagggaccagaggctgccccccgatgcccacaagccccctgggggaggcagtttccggacccccatccaagaggagcaggccgacgcccactccaccctggccaagatcagagtgaagttcagcaggagcgcagacgcccccgcgtaccagcagggccagaaccagctctataacgagctcaatctaggacgaagagaggagtacgatgttttggacaagagacgtggccgggaccctgagatggggggaaagccgagaaggaagaaccctcaggaaggcctgtacaatgaactgcagaaagataagatggcggaggcctacagtgagattgggatgaaaggcgagcgccggaggggcaaggggcacgatggcctttaccagggtctcagtacagccaccaaggacacctacgacgcccttcacatgcaggccctgccccctcgc

SEQ ID NO: 1968 - DNA, 1458 bp, synthetic construct
  misc_feature 1..1458: note = Synthetic
  source 1..1458: mol_type = other DNA
atggccttaccagtgaccgccttgctcctgccgctggccttgctgctccacgccgccaggccgcaagtgcaactggtggaaagcggcggcggcgttgtgcagcctggcagaagcctgcggctgtcatgcgccgccagcggttttaccttctctaattacggcatgcactgggtgcggcaggctcccggcaaaggcctggaatggatggccgtgatctggtccgatggccacaacaagtactacgccgatagcgtgaaaggcagattcaccattagcagagataattctaagaacaccctgtacctgcagatgaacagcctgcgcgccgaggacaccgccgtgtactattgtgccagagcccagctggagcggagatacttctactatatggacgtgtggggcaagggcaccaccgtgacagtgtctagcggcggaggcggctctggcggcggcggctctggaggcggaggaagccagaccgtcgtgacccaggagcctagcttcagcgtgtccccaggcggaaccgtcacactgacatgcggcctcacaagcggcagcgtgtccaccagctactaccccaactggtaccagcagacacctggacaggcccctagaaccctgatctacagcaccaacatccggagcagcggagtgcccgacagattttctggcagcatcctgggcaacaaggccgctctgaccatcaccggcgctcaggccgacgacgagagcgactactactgcgtgctgtacatgggcagcggcatgttcatcttcggcagcggcacaaaggtgacagtgctgaccacgacgccagcgccgcggccaccaacaccggcgcccaccatcgcgtcgcagcccctgtccctgcgcccagaggcgtgccggccagcggcggggggcgcagtgcacacgagggggctggacttcgcctgtgatatctacatctgggcgcccttggccgggacttgtggggtccttctcctgtcactggttatcaccctttactgccggagggaccagaggctgccccccgatgcccacaagccccctgggggaggcagtttccggacccccatccaagaggagcaggccgacgcccactccaccctggccaagatcagagtgaagttcagcaggagcgcagacgcccccgcgtaccagcagggccagaaccagctctataacgagctcaatctaggacgaagagaggagtacgatgttttggacaagagacgtggccgggaccctgagatggggggaaagccgagaaggaagaaccctcaggaaggcctgtacaatgaactgcagaaagataagatggcggaggcctacagtgagattgggatgaaaggcgagcgccggaggggcaaggggcacgatggcctttaccagggtctcagtacagccaccaaggacacctacgacgcccttcacatgcaggccctgccccctcgc

SEQ ID NO: 1969 - DNA, 1458 bp, synthetic construct
  misc_feature 1..1458: note = Synthetic
  source 1..1458: mol_type = other DNA
atggccttaccagtgaccgccttgctcctgccgctggccttgctgctccacgccgccaggccgcaggttcagctggtgcagagcggagccgaggtgaaaaagcccggcgcaagcgtgaaggtgtcttgcaaggcctccggatataccttcaccagctacgatatcaactgggtgcggcaggccacaggccagggtctcgaatggatgggctggatgatccccaattctggcgacacaggcagcgcccaaaagttccagggcagagtgacaatgaccagaaacaccagcatcggaacagcctacatggaactgagctccctgagaagcgaggataccgccgtgtactattgtgccagaggcggctactgcaacagcacctcctgctactactactacatggacgtgtggggcaaaggcacaaccgtcaccgtgagctctggcggcggcggcagcggaggcggcggaagcggcggaggcggaagcgacatccagatgacacagagccctagcagcctgtctgcttccgtgggcgatagagtgacaatcacctgccgggcctcccagggcatcagctcctggctggcctggtaccagcagaagcctgagaaggcccctaagagcctgatctacgccgcttctagcctgcagggaggcgtgccaagtcggttcagcggcagcggcagcggcacagacttcaccctgaccatttcttctctgcaacctgaggacttcgccacctactactgtcagcaatacgacagctacccctacacctttggccagggcaccaagctggaaatcaagaccacgacgccagcgccgcggccaccaacaccggcgcccaccatcgcgtcgcagcccctgtccctgcgcccagaggcgtgccggccagcggcggggggcgcagtgcacacgagggggctggacttcgcctgtgatatctacatctgggcgcccttggccgggacttgtggggtccttctcctgtcactggttatcaccctttactgccggagggaccagaggctgccccccgatgcccacaagccccctgggggaggcagtttccggacccccatccaagaggagcaggccgacgcccactccaccctggccaagatcagagtgaagttcagcaggagcgcagacgcccccgcgtaccagcagggccagaaccagctctataacgagctcaatctaggacgaagagaggagtacgatgttttggacaagagacgtggccgggaccctgagatggggggaaagccgagaaggaagaaccctcaggaaggcctgtacaatgaactgcagaaagataagatggcggaggcctacagtgagattgggatgaaaggcgagcgccggaggggcaaggggcacgatggcctttaccagggtctcagtacagccaccaaggacacctacgacgcccttcacatgcaggccctgccccctcgc

SEQ ID NO: 1970 - DNA, 1461 bp, synthetic construct
  misc_feature 1..1461: note = Synthetic
  source 1..1461: mol_type = other DNA
atggccttaccagtgaccgccttgctcctgccgctggccttgctgctccacgccgccaggccgcaggttcaactggtgcagagcggcgccgaggtgaagaagcctggcgccagcgtgaaagtgtcctgcaaggccagcggatacacgtttaccagctacgacatcaactgggtcagacaggccaccggccagggcctggaatggatgggatggatgaaccccaacagcggcaacaccgtgtacgcccagaaattccagggcagagtgaccatgacacggaacaccagcatcagcaccgcctacatggaactgagctctctgagatccgaggatacagccgtgtactactgcgccagaggcggagatttctggagcggctaccacgactactactactacatggacgtgtggggcaagggcaccaccgtgaccgtgtcttctggcggcggcggctccggcggaggcggcagcggaggaggcggctctgatatccaggtcacacagagccctacctttctgagcgcttctgtgggcgaccgggtgaccatcacatgccgggccagccagggtattagcagctacctggcttggtaccagcagaagcccggcaaagcccctaagctgctgatctacggcgcttctaccctgcagtccggcgtgcccagcagattcagcggcagcggaagcggaacagagttcaccctgacaatctccagcctccaacctgaggacttcgccacatactattgtcagcaactgaatagctatccttggacattcggccagggcaccaaggtggaaatcaagaccacgacgccagcgccgcggccaccaacaccggcgcccaccatcgcgtcgcagcccctgtccctgcgcccagaggcgtgccggccagcggcggggggcgcagtgcacacgagggggctggacttcgcctgtgatatctacatctgggcgcccttggccgggacttgtggggtccttctcctgtcactggttatcaccctttactgccggagggaccagaggctgccccccgatgcccacaagccccctgggggaggcagtttccggacccccatccaagaggagcaggccgacgcccactccaccctggccaagatcagagtgaagttcagcaggagcgcagacgcccccgcgtaccagcagggccagaaccagctctataacgagctcaatctaggacgaagagaggagtacgatgttttggacaagagacgtggccgggaccctgagatggggggaaagccgagaaggaagaaccctcaggaaggcctgtacaatgaactgcagaaagataagatggcggaggcctacagtgagattgggatgaaaggcgagcgccggaggggcaaggggcacgatggcctttaccagggtctcagtacagccaccaaggacacctacgacgcccttcacatgcaggccctgccccctcgc

SEQ ID NO: 1971 - DNA, 1455 bp, synthetic construct
  misc_feature 1..1455: note = Synthetic
  source 1..1455: mol_type = other DNA
atggccttaccagtgaccgccttgctcctgccgctggccttgctgctccacgccgccaggccgcaagtgcagctgcaggagagcggtcctggcctggttaagcctagcgagacactgtctctgacttgcaccgtgtccggcggatctatcagcagctactactggtcctggatcagacagcccgccggcaaaggcctggaatggattggaagaatctacaccagcggcagcaccaactacaaccccagcctgaagtccagagtgacaatgagcgtggacacatctaagaaccagtttagcctgaaactgagcagcgtgaccgccgccgatacagctgtgtactattgtgcccgggaagaataccagctgctgcctgccctgtactactattactacatggacgtgtggggcaagggcaccaccgtgaccgtgtccagcggaggcggcggcagcggaggcggcggctctggcggcggaggcagcagctacgagctgacccagcctccatctgtctccgtgtctccaggccaaacagccagcatcacctgcagcggagataagctgggcgacaagtacgcctgctggtaccagcagaagcccggccagagccctgtgctggtgatctaccaggacagcaagcggcctagcggcatccccgagagattcagcggctccaacagcggcaataccgctacactgacaatcagcggcacacaggccatggatgaggccgactactactgccaggcctgggacagctctaccgccgtgttcggcggcggaacccagctcaccgccctgaccacgacgccagcgccgcggccaccaacaccggcgcccaccatcgcgtcgcagcccctgtccctgcgcccagaggcgtgccggccagcggcggggggcgcagtgcacacgagggggctggacttcgcctgtgatatctacatctgggcgcccttggccgggacttgtggggtccttctcctgtcactggttatcaccctttactgccggagggaccagaggctgccccccgatgcccacaagccccctgggggaggcagtttccggacccccatccaagaggagcaggccgacgcccactccaccctggccaagatcagagtgaagttcagcaggagcgcagacgcccccgcgtaccagcagggccagaaccagctctataacgagctcaatctaggacgaagagaggagtacgatgttttggacaagagacgtggccgggaccctgagatggggggaaagccgagaaggaagaaccctcaggaaggcctgtacaatgaactgcagaaagataagatggcggaggcctacagtgagattgggatgaaaggcgagcgccggaggggcaaggggcacgatggcctttaccagggtctcagtacagccaccaaggacacctacgacgcccttcacatgcaggccctgccccctcgc

SEQ ID NO: 1972 - DNA, 1458 bp, synthetic construct
  misc_feature 1..1458: note = Synthetic
  source 1..1458: mol_type = other DNA
atggccttaccagtgaccgccttgctcctgccgctggccttgctgctccacgccgccaggccgcaagtgcagctggtggaatctggcggcggcgtggtgcagcctggtaggagcctgcggctgtcatgcgccgccacaggcttcaccttcagcagctacggcatgcactgggtcagacaggcccctggcaagggactggagtggatggtggtgatctggtccgatggccacaataaatactacgccgacagcgtgaagggcagatttaccattagccgggacaacagcaagaacaccctgtacctgcagatgaacagcctgagagctgaagataccgccgtgtactactgcgccagagcccagctcgagcggagatacttctactatatggacgtgtggggcaaaggcacaacagtgaccgtttcttctggcggcggcggatctggcggaggcggctccggaggcggcggcagccagaccgtggtcacccaggagcctagctttagcgtgtccccaggaggtacagtgaccctgacatgcggcctgactagcggatctgtgtccaccagctactaccccaactggtaccagcagacacctggccaggcccctagaaccctgatctacagcaccaatatccggagctccggcgtgcccgacagattcagcggaagcatcctgggcaacaaggccgctctgaccatcaccggcgcccaagctgatgacgagagcgactactattgtgtgctgtacatgggcagcggcatgttcatcttcggctctggcaccaaggtgaccgtgctgaccacgacgccagcgccgcggccaccaacaccggcgcccaccatcgcgtcgcagcccctgtccctgcgcccagaggcgtgccggccagcggcggggggcgcagtgcacacgagggggctggacttcgcctgtgatatctacatctgggcgcccttggccgggacttgtggggtccttctcctgtcactggttatcaccctttactgccggagggaccagaggctgccccccgatgcccacaagccccctgggggaggcagtttccggacccccatccaagaggagcaggccgacgcccactccaccctggccaagatcagagtgaagttcagcaggagcgcagacgcccccgcgtaccagcagggccagaaccagctctataacgagctcaatctaggacgaagagaggagtacgatgttttggacaagagacgtggccgggaccctgagatggggggaaagccgagaaggaagaaccctcaggaaggcctgtacaatgaactgcagaaagataagatggcggaggcctacagtgagattgggatgaaaggcgagcgccggaggggcaaggggcacgatggcctttaccagggtctcagtacagccaccaaggacacctacgacgcccttcacatgcaggccctgccccctcgc

SEQ ID NO: 1973 - DNA, 1458 bp, synthetic construct
  misc_feature 1..1458: note = Synthetic
  source 1..1458: mol_type = other DNA
atggccttaccagtgaccgccttgctcctgccgctggccttgctgctccacgccgccaggccgcaagtgcagctggtcgagagcggaggcggcgttgtgcaacctggaaggagcctgcggctgagctgcgccgcttctggcttcacctttactagctacgacatgcactgggtgcggcaggcccctggcaagggcctggaatgggtcaccatcatctggttcgacggcagcaacaagtactacgccgatagcgtgaagggcagattcaccatcagcagagataatagcaagaataccctgtacctgcagatgaactctctctccgccgaggacaccgccgtgtactactgcgccagaggcgacaactggaacgacagatactattattactactacatggacgtgtggggcaaaggcaccaccgtgacagtgtccagcggcggcggaggaagcggcggcggtggctctggaggcggaggcagcgagatcgtgctgacccagtctccagatttccagtccgtgacccctaaggaaaaggtgaccatcacatgcagagccagccagtccatcggctctagcctgcactggtaccagcagaagcccgaccagtctcctatgctgctgatcaaattcgcctctcagagcatcagcggcgtgcccagccggttcagcggcagcggctccggcaccgacttcacactgacaatcaacagtctggaggccgaggatgccgctgcttactactgtcaccagagcagcagcctgccttggacatttggccagggcaccaaggtggaaattaagaccacgacgccagcgccgcggccaccaacaccggcgcccaccatcgcgtcgcagcccctgtccctgcgcccagaggcgtgccggccagcggcggggggcgcagtgcacacgagggggctggacttcgcctgtgatatctacatctgggcgcccttggccgggacttgtggggtccttctcctgtcactggttatcaccctttactgccggagggaccagaggctgccccccgatgcccacaagccccctgggggaggcagtttccggacccccatccaagaggagcaggccgacgcccactccaccctggccaagatcagagtgaagttcagcaggagcgcagacgcccccgcgtaccagcagggccagaaccagctctataacgagctcaatctaggacgaagagaggagtacgatgttttggacaagagacgtggccgggaccctgagatggggggaaagccgagaaggaagaaccctcaggaaggcctgtacaatgaactgcagaaagataagatggcggaggcctacagtgagattgggatgaaaggcgagcgccggaggggcaaggggcacgatggcctttaccagggtctcagtacagccaccaaggacacctacgacgcccttcacatgcaggccctgccccctcgc

SEQ ID NO: 1974 - DNA, 1473 bp, synthetic construct
  misc_feature 1..1473: note = Synthetic
  source 1..1473: mol_type = other DNA
atggccttaccagtgaccgccttgctcctgccgctggccttgctgctccacgccgccaggccgcaagtgcagctggtccagagcggcgctgaggtgaagaaacctggcgcctctgtgaaagtgtcctgcaaggccagcggctacacctttaccagctacggcattagctgggtgcggcaggcccctggccagggtcttgagtggatgggctggatcagcgcctacaacggccacacagattatacacaaaagctgcagggcagagtgaccatgacaaccgataccagcaccaccacagcctacatggaactgagaagcctgagctctgccgacaccgccgtgtactactgcgtgcgggaagtggtgctgcctaccacagactactactacttctacatggacgtgtggggcaagggcaccacagtgacagtcagctccggcggaggaggcagcggcggcggaggcagcggcggaggcggcagcgacatcgtgatgacccagcctcctctgagcagccctgtgacactgggccagccagctagcatcagctgtagatcttctcagtccctggtgcacagcgacggcaatacctacctgtcttggctgcagcagcggcctggccagccccccagactgctgatctacaaggtgtccaaccgcttcagcggcgtgccagacagattcagcggctctggcgccggcaccgacttcaccctgaagatcagcagagtcgaggccgaagatgtgggagtttactattgcacccaagctacacagttcccccacacctttggccagggcaccaagctcgagatcaagaccacgacgccagcgccgcggccaccaacaccggcgcccaccatcgcgtcgcagcccctgtccctgcgcccagaggcgtgccggccagcggcggggggcgcagtgcacacgagggggctggacttcgcctgtgatatctacatctgggcgcccttggccgggacttgtggggtccttctcctgtcactggttatcaccctttactgccggagggaccagaggctgccccccgatgcccacaagccccctgggggaggcagtttccggacccccatccaagaggagcaggccgacgcccactccaccctggccaagatcagagtgaagttcagcaggagcgcagacgcccccgcgtaccagcagggccagaaccagctctataacgagctcaatctaggacgaagagaggagtacgatgttttggacaagagacgtggccgggaccctgagatggggggaaagccgagaaggaagaaccctcaggaaggcctgtacaatgaactgcagaaagataagatggcggaggcctacagtgagattgggatgaaaggcgagcgccggaggggcaaggggcacgatggcctttaccagggtctcagtacagccaccaaggacacctacgacgcccttcacatgcaggccctgccccctcgc

SEQ ID NO: 1975 - DNA, 1470 bp, synthetic construct
  misc_feature 1..1470: note = Synthetic
  source 1..1470: mol_type = other DNA
atggccttaccagtgaccgccttgctcctgccgctggccttgctgctccacgccgccaggccgcaagttcagctggtgcagagcggagccgaggtgaaaaagcccggcgcttctgtgaaggtgtcctgcaaggtgtctggctacaccctgacagagctgagcatgcactgggtccggcaggcccctggcaaaggcctggaatggatgggaggcttcgaccccgaagacggggagacaatctacgcccagaaattccagggcagagtgacaatgaccgaggacaccagcaccgatacagcctacatggaactgtcttccctgcggagcgaggacaccgccgtgtactactgcgccaccggcagaatcaccatggtgcggggcgtcatcatcccctactactattactacatggacgtgtggggcaagggcaccaccgtgaccgtgtcctctggcggaggaggatctggcggcggcggaagcggcggaggcggcagtgatatccagatgacacagagcccaagcagcctgagcgccagcgtgggcgacagagtgaccatcacatgcagagccagccagggcatcagcagctggctggcttggtaccagcaaaagcctgagaaggcccctaagagcctcatctacgccgctagcagcctgcagtccggcgtgccaagcagattcagcggctctggctctggcacagacttcaccctgaccatttccagcctgcaacctgaggattttgccacatactattgtcagcagtacaacagctacccttacaccttcggccagggcaccaagctggaaatcaagaccacgacgccagcgccgcggccaccaacaccggcgcccaccatcgcgtcgcagcccctgtccctgcgcccagaggcgtgccggccagcggcggggggcgcagtgcacacgagggggctggacttcgcctgtgatatctacatctgggcgcccttggccgggacttgtggggtccttctcctgtcactggttatcaccctttactgccggagggaccagaggctgccccccgatgcccacaagccccctgggggaggcagtttccggacccccatccaagaggagcaggccgacgcccactccaccctggccaagatcagagtgaagttcagcaggagcgcagacgcccccgcgtaccagcagggccagaaccagctctataacgagctcaatctaggacgaagagaggagtacgatgttttggacaagagacgtggccgggaccctgagatggggggaaagccgagaaggaagaaccctcaggaaggcctgtacaatgaactgcagaaagataagatggcggaggcctacagtgagattgggatgaaaggcgagcgccggaggggcaaggggcacgatggcctttaccagggtctcagtacagccaccaaggacacctacgacgcccttcacatgcaggccctgccccctcgc

SEQ ID NO: 1976 - DNA, 1464 bp, synthetic construct
  misc_feature 1..1464: note = Synthetic
  source 1..1464: mol_type = other DNA
atggccttaccagtgaccgccttgctcctgccgctggccttgctgctccacgccgccaggccgcaagtgcagctggtgcagagcggcaccgaggtgaagaagccaggcgcctctgtgaaagtgtcttgtaaagccagcggctacacctttaccaattacggcatcggctgggtgcggcaggcccctggacagggactggaatggatgggctggatcatcgcctacaacggctacacaaagtacgcccagatcctgcagggcagagtgacaatgaccaccgacaccagcaccaacaccgcttatatggaactgagaagcctgcggagcgacgacaccgccgtgtactattgcgccagacagcagctgggcggagattaccactactacatggacgtgtggggcaagggcaccaccgtcacagtgtccagcggcggtggcggatctggcggcggcggctctggaggcggcggctctgatatcgtgatgacccagacccccctgagcctgtccgtgaccccaggacaacctgccagcattagctgcaagagcagcaagtccctgctgcacagcgacggcaagacatacctgtactggtacctgcaaaagcccggccagcctcctcagctgctcatctacgaggtgtccaaccggttctctggcgtgcctgatagattcagcggaagcggcagcggaacagacttcacactgaagatcagcagagtcgaggccgaggacgtgggcgtttactactgcatgcagagcatccagttcccctggacattcggccagggcacaaaagtggaaatcaagaccacgacgccagcgccgcggccaccaacaccggcgcccaccatcgcgtcgcagcccctgtccctgcgcccagaggcgtgccggccagcggcggggggcgcagtgcacacgagggggctggacttcgcctgtgatatctacatctgggcgcccttggccgggacttgtggggtccttctcctgtcactggttatcaccctttactgccggagggaccagaggctgccccccgatgcccacaagccccctgggggaggcagtttccggacccccatccaagaggagcaggccgacgcccactccaccctggccaagatcagagtgaagttcagcaggagcgcagacgcccccgcgtaccagcagggccagaaccagctctataacgagctcaatctaggacgaagagaggagtacgatgttttggacaagagacgtggccgggaccctgagatggggggaaagccgagaaggaagaaccctcaggaaggcctgtacaatgaactgcagaaagataagatggcggaggcctacagtgagattgggatgaaaggcgagcgccggaggggcaaggggcacgatggcctttaccagggtctcagtacagccaccaaggacacctacgacgcccttcacatgcaggccctgccccctcgc

SEQ ID NO: 1977 - DNA, 1464 bp, synthetic construct
  misc_feature 1..1464: note = Synthetic
  source 1..1464: mol_type = other DNA
atggccttaccagtgaccgccttgctcctgccgctggccttgctgctccacgccgccaggccgcaagtgcagctggtgcaaagcggcaccgaggtgaaaaagcccggcgcctctgtgaaggtctcctgcaaggccagcggatacacatttacaaattacggcatcggctgggtgcggcaggcccctggccagggcctggaatggatgggctggatcatcgcctacaacggctacaccaagtacgcccagatcctgcaaggcagagtcaccatgaccacagacaccagcaccaacaccgcttatatggaactgagaagcctgcggagcgacgatacagccgtgtactactgcgccagacagcagctcggcggcgactaccactactacatggacgtgtggggcaagggcaccaccgtgaccgtgtccagcggaggcggcggatctggcggaggcggcagcggcggcggcggctctgacatcgtgatgacccagacccctctgagcctgagcgtgacacctggacagcccgcttctattagctgtaaaagcagcaagtccctgctgcacagcgacggcaagacctacctgtactggtacctgcagaaacctggccagcctccacagctgctgatctacgaggtgtctacaagattcagcggagtgcctgatagattcagcggcagcggatctggaacagatttcaccctgaagatcagccgggttgaggccgaggacgtgggcgtgtactattgcatgcagtccatccagttcccctggaccttcggccagggcacaaaggtggaaatcaagaccacgacgccagcgccgcggccaccaacaccggcgcccaccatcgcgtcgcagcccctgtccctgcgcccagaggcgtgccggccagcggcggggggcgcagtgcacacgagggggctggacttcgcctgtgatatctacatctgggcgcccttggccgggacttgtggggtccttctcctgtcactggttatcaccctttactgccggagggaccagaggctgccccccgatgcccacaagccccctgggggaggcagtttccggacccccatccaagaggagcaggccgacgcccactccaccctggccaagatcagagtgaagttcagcaggagcgcagacgcccccgcgtaccagcagggccagaaccagctctataacgagctcaatctaggacgaagagaggagtacgatgttttggacaagagacgtggccgggaccctgagatggggggaaagccgagaaggaagaaccctcaggaaggcctgtacaatgaactgcagaaagataagatggcggaggcctacagtgagattgggatgaaaggcgagcgccggaggggcaaggggcacgatggcctttaccagggtctcagtacagccaccaaggacacctacgacgcccttcacatgcaggccctgccccctcgc

SEQ ID NO: 1978 - DNA, 1458 bp, synthetic construct
  misc_feature 1..1458: note = Synthetic
  source 1..1458: mol_type = other DNA
atggccttaccagtgaccgccttgctcctgccgctggccttgctgctccacgccgccaggccgcaagtgcagctggtgcagagcggaacagaggtgaaaaagcctggcgccagcgtgaaggtgtcttgtaaaaccagcggttatacattcacctcctacgacattaactgggtgcggcaggccaccggccagggcctggaatggatgggctggatgaaccccatctccggcgacacaggcagcgcccagaagttccagggaagagtgaccatgaccagaaataccagcatcggcaccgcctacatggaactgagcagcctgcggagcgaggacaccgccgtgtactactgcgccagaggcggatactgtagcagtacatcttgctactactattacatggacgtgtggggcaagggcacaacagtgacagtcagcagcggcggcgggggcagcggcggaggcggaagcggcggcggcggcagcgatatccagatgacacagtcccctagctctctgtctgcttctgttggagatagagtgaccatcacctgccgggccagccagggcatcagcaactggctggcctggtaccagcagaagcccgagaaggcccctaagagcctgatctacgccgctagctccctccagggcggcgtgccatctagattcagcggctcaggcagcggaaccgacttcaccctgaccatcagctccctgcaacctgaggattttgccacatactactgccagcaatacgacagctacccctacaccttcggccagggcaccaagctggaaatcaagaccacgacgccagcgccgcggccaccaacaccggcgcccaccatcgcgtcgcagcccctgtccctgcgcccagaggcgtgccggccagcggcggggggcgcagtgcacacgagggggctggacttcgcctgtgatatctacatctgggcgcccttggccgggacttgtggggtccttctcctgtcactggttatcaccctttactgccggagggaccagaggctgccccccgatgcccacaagccccctgggggaggcagtttccggacccccatccaagaggagcaggccgacgcccactccaccctggccaagatcagagtgaagttcagcaggagcgcagacgcccccgcgtaccagcagggccagaaccagctctataacgagctcaatctaggacgaagagaggagtacgatgttttggacaagagacgtggccgggaccctgagatggggggaaagccgagaaggaagaaccctcaggaaggcctgtacaatgaactgcagaaagataagatggcggaggcctacagtgagattgggatgaaaggcgagcgccggaggggcaaggggcacgatggcctttaccagggtctcagtacagccaccaaggacacctacgacgcccttcacatgcaggccctgccccctcgc

SEQ ID NO: 1979 - DNA, 1458 bp, synthetic construct
  misc_feature 1..1458: note = Synthetic
  source 1..1458: mol_type = other DNA
atggccttaccagtgaccgccttgctcctgccgctggccttgctgctccacgccgccaggccgcaagtgcagctggtgcagagcggcgccgaggtgaagaagcctggcgcttccgtgaaggtgtcctgtaaagcttctggatacaccttcacctcttatgatattaactgggtgcggcaggccaccggccagggcctggaatggatgggctggatgatccccaacagcggcgataccggctccgcccagaaattccagggaagagttaccatgacaagaaacaccagcatcagcaccgcctacatggaactgagcagcctgcggagcgaggacaccgctgtgtactactgcgccagaggcggctactgtaatagcacaagctgctactattactacatggacgtgtggggcaagggcaccacagtgacagtcagctccggcggcggaggcagcggaggcggtggctctggcggcggcggaagcgacatccagatgacacagagccctagcagcctgagcgcctctgtgggcgaccgggtgaccatcacctgcagagccagccagggcatcagcagctggctggcctggtaccagcagaagcccgagaaggcccctaagtccctgatctacgccgccagctccctccagggcggagtgccatctagattcagcggctctggatctggcacagacttcaccctgaccatcagctctctgcagcctgaggattttgccacatactactgccagcaatacgacagctacccctacacattcggccaaggcacaaagctggaaatcaagaccacgacgccagcgccgcggccaccaacaccggcgcccaccatcgcgtcgcagcccctgtccctgcgcccagaggcgtgccggccagcggcggggggcgcagtgcacacgagggggctggacttcgcctgtgatatctacatctgggcgcccttggccgggacttgtggggtccttctcctgtcactggttatcaccctttactgccggagggaccagaggctgccccccgatgcccacaagccccctgggggaggcagtttccggacccccatccaagaggagcaggccgacgcccactccaccctggccaagatcagagtgaagttcagcaggagcgcagacgcccccgcgtaccagcagggccagaaccagctctataacgagctcaatctaggacgaagagaggagtacgatgttttggacaagagacgtggccgggaccctgagatggggggaaagccgagaaggaagaaccctcaggaaggcctgtacaatgaactgcagaaagataagatggcggaggcctacagtgagattgggatgaaaggcgagcgccggaggggcaaggggcacgatggcctttaccagggtctcagtacagccaccaaggacacctacgacgcccttcacatgcaggccctgccccctcgc

SEQ ID NO: 1980 - DNA, 1461 bp, synthetic construct
  misc_feature 1..1461: note = Synthetic
  source 1..1461: mol_type = other DNA
atggccttaccagtgaccgccttgctcctgccgctggccttgctgctccacgccgccaggccggaggtgcagctgctggaaagcggaggcggcctggtgcaacctggaggttctctgcggctgagctgcgccgctagcggcttcacatttagcagctacgtgatgaactgggtgcggcaggctcctggaaagggcctggaatgggtctccagcgtgtccggcagcggcaacaacagcttttacgccgatagcgtgaagggcagattcaccatcagccgggacaacagcaagaacaccctctacctgcagatgaattctctgagagccgaggacaccgccgtgtactactgcgccagcaggtcctcttcttacctgtactactactattacatggacgtgtggggcaaaggcacaacagtgaccgtctccagcggcggcggcggctccggcggcggaggaagcggcggaggcggcagcgagatcgtgctgacccaaagccccggcaccctgagcctgagccctggcgagagagccaccctgtcttgtagagcctctcagagcgtttctagctcctacctggcctggtaccagcagaagcccggacaggcccctagactgctgatctacggcgccagcagcagagctacaggcatccccgatagattcagcgacagcggctcaggcacagacttcaccctgacaattagccggctggaacccgaggatttcgccgtgtactattgccagcactacggcagctctcctccaagaatcaccttcggccctggcaccaaggtggacatcaaaaccacgacgccagcgccgcggccaccaacaccggcgcccaccatcgcgtcgcagcccctgtccctgcgcccagaggcgtgccggccagcggcggggggcgcagtgcacacgagggggctggacttcgcctgtgatatctacatctgggcgcccttggccgggacttgtggggtccttctcctgtcactggttatcaccctttactgccggagggaccagaggctgccccccgatgcccacaagccccctgggggaggcagtttccggacccccatccaagaggagcaggccgacgcccactccaccctggccaagatcagagtgaagttcagcaggagcgcagacgcccccgcgtaccagcagggccagaaccagctctataacgagctcaatctaggacgaagagaggagtacgatgttttggacaagagacgtggccgggaccctgagatggggggaaagccgagaaggaagaaccctcaggaaggcctgtacaatgaactgcagaaagataagatggcggaggcctacagtgagattgggatgaaaggcgagcgccggaggggcaaggggcacgatggcctttaccagggtctcagtacagccaccaaggacacctacgacgcccttcacatgcaggccctgccccctcgc

SEQ ID NO: 1981 - protein, 711 aa, synthetic construct
  REGION 1..711: note = Synthetic
MALPVTALLLPLALLLHAARPQVQLVESGGGVVQPGRSLRLSCAASGFTFSSHDMHWVRQAPGKGLDWVAVIWSDGNKKYYVDSAKGRFTISRDNSKNTVYLQMNSLRAEDTAIYYCARGDNWNDEHSYYYYMDVWGKGTTVTVSSGGGGSGGGGSGGGGSEIVLTQSPDFQSVTPKEKVTITCRASQTIGSSLHWYQQKPDQSPKLLIKHASQSFSGVPSRFSGSGSGTDFTLTVNSLEAEDAATYYCHQSSSLPWTFGQGTKVEIKTTTPAPRPPTPAPTIASQPLSLRPEACRPAAGGAVHTRGLDFACDIYIWAPLAGTCGVLLLSLVITLYCRRDQRLPPDAHKPPGGGSFRTPIQEEQADAHSTLAKIRVKFSRSADAPAYQQGQNQLYNELNLGRREEYDVLDKRRGRDPEMGGKPRRKNPQEGLYNELQKDKMAEAYSEIGMKGERRRGKGHDGLYQGLSTATKDTYDALHMQALPPRGSGEGRGSLLTCGDVEENPGPMALPVTALLLPLALLLHAARPNWVNVISDLKKIEDLIQSMHIDATLYTESDVHPSCKVTAMKCFLLELQVISLESGDASIHDTVENLIILANNSLSSNGNVTESGCKECEELEEKNIKEFLQSFVHIVQMFINTSTTTPAPRPPTPAPTIASQPLSLRPEACRPAAGGAVHTRGLDFACDIYIWAPLAGTCGVLLLSLVITLYC

SEQ ID NO: 1982 - protein, 711 aa, synthetic construct
  REGION 1..711: note = Synthetic
MALPVTALLLPLALLLHAARPQVQLVESGGGVVQPGRSLRLSCAASGFTFSSHDMHWVRQAPGKGLDWVAVIWSDGNNKYYADSAKGRFTISRDNSKNTVYLQMNSLRAEDTAIYYCARGDNWNDEHSYYYYMDVWGKGTTVTVSSGGGGSGGGGSGGGGSEIVLTQSPDFQSVTPKEKVTITCRASQTIGSSLHWYQQKPDQSPKLLIKHASQSFSGVPSRFSGSGSGTDFTLTVNSLEAEDAATYYCHQSSSLPWTFGQGTKVEIKTTTPAPRPPTPAPTIASQPLSLRPEACRPAAGGAVHTRGLDFACDIYIWAPLAGTCGVLLLSLVITLYCRRDQRLPPDAHKPPGGGSFRTPIQEEQADAHSTLAKIRVKFSRSADAPAYQQGQNQLYNELNLGRREEYDVLDKRRGRDPEMGGKPRRKNPQEGLYNELQKDKMAEAYSEIGMKGERRRGKGHDGLYQGLSTATKDTYDALHMQALPPRGSGEGRGSLLTCGDVEENPGPMALPVTALLLPLALLLHAARPNWVNVISDLKKIEDLIQSMHIDATLYTESDVHPSCKVTAMKCFLLELQVISLESGDASIHDTVENLIILANNSLSSNGNVTESGCKECEELEEKNIKEFLQSFVHIVQMFINTSTTTPAPRPPTPAPTIASQPLSLRPEACRPAAGGAVHTRGLDFACDIYIWAPLAGTCGVLLLSLVITLYC

SEQ ID NO: 1983 - protein, 710 aa, synthetic construct
  REGION 1..710: note = Synthetic
MALPVTALLLPLALLLHAARPQLQLVQSGAEVKKPGASVKVSCKASGYTFTNYGISWLRQAPGQGLEWMGWISGYNDNTHYAQKFQGRVTMTTDTSTTTAYMELRNLRSDDTAVYYCARDGIAARPVYYYYMDVWGKGTTVTVSSGGGGSGGGGSGGGGSDIQMTQSPSSLSASVGDRVTITCRASQSISNYLNWYHQKPGKAPKLLIYAASSLESGVPSRFSGSGSGTDFTLTISSLQPEDFATYYCQQSYSNPLTFGGGTKVESKTTTPAPRPPTPAPTIASQPLSLRPEACRPAAGGAVHTRGLDFACDIYIWAPLAGTCGVLLLSLVITLYCRRDQRLPPDAHKPPGGGSFRTPIQEEQADAHSTLAKIRVKFSRSADAPAYQQGQNQLYNELNLGRREEYDVLDKRRGRDPEMGGKPRRKNPQEGLYNELQKDKMAEAYSEIGMKGERRRGKGHDGLYQGLSTATKDTYDALHMQALPPRGSGEGRGSLLTCGDVEENPGPMALPVTALLLPLALLLHAARPNWVNVISDLKKIEDLIQSMHIDATLYTESDVHPSCKVTAMKCFLLELQVISLESGDASIHDTVENLIILANNSLSSNGNVTESGCKECEELEEKNIKEFLQSFVHIVQMFINTSTTTPAPRPPTPAPTIASQPLSLRPEACRPAAGGAVHTRGLDFACDIYIWAPLAGTCGVLLLSLVITLYC

SEQ ID NO: 1984 - protein, 711 aa, synthetic construct
  REGION 1..711: note = Synthetic
MALPVTALLLPLALLLHAARPQVQLVESGGGVVQPGRSLRLSCVASGFTFSSNDIYWVRQAPGKGLEWVAVIWYDGSNKYYADSVKGRFTISRDNSKNTLYLQMNSLRAEDTAVYYCARGDNWNDEHHYHYYMDVWGKGTTVTVSSGGGGSGGGGSGGGGSEIVLTQSPDFQSVTPKEKVTITCRASQSIGSSLHWYQQKPDQSPKLLIKFASQSFSGVPSRFSGSGSGTDFTLTIHSLEAEDAATYYCHQSGSLPWTFGQGTKVEIKTTTPAPRPPTPAPTIASQPLSLRPEACRPAAGGAVHTRGLDFACDIYIWAPLAGTCGVLLLSLVITLYCRRDQRLPPDAHKPPGGGSFRTPIQEEQADAHSTLAKIRVKFSRSADAPAYQQGQNQLYNELNLGRREEYDVLDKRRGRDPEMGGKPRRKNPQEGLYNELQKDKMAEAYSEIGMKGERRRGKGHDGLYQGLSTATKDTYDALHMQALPPRGSGEGRGSLLTCGDVEENPGPMALPVTALLLPLALLLHAARPNWVNVISDLKKIEDLIQSMHIDATLYTESDVHPSCKVTAMKCFLLELQVISLESGDASIHDTVENLIILANNSLSSNGNVTESGCKECEELEEKNIKEFLQSFVHIVQMFINTSTTTPAPRPPTPAPTIASQPLSLRPEACRPAAGGAVHTRGLDFACDIYIWAPLAGTCGVLLLSLVITLYC

SEQ ID NO: 1985 - protein, 704 aa, synthetic construct
  REGION 1..704: note = Synthetic
MALPVTALLLPLALLLHAARPQVQLVESGGGVVQPGRSLRLSCAASGFTFSSYGMHWVRQAPGKGLEWVAVISYDGSNKYYADSVKGRFTISRDNSKTTLYLQMNSLRAEDTAVYYCARDHYYYYMDVWGKGTTVTVSSGGGGSGGGGSGGGGSVTQEPSFSVSPGGTVTLTCGLSSGSVSTSYYPSWYQQTPGQAPRTLIYSTNIRSSGVPDRFSGSILGNKAALTITGAQADDESDYYCVLYMGSDIVVFGGGTKLTVLTTTPAPRPPTPAPTIASQPLSLRPEACRPAAGGAVHTRGLDFACDIYIWAPLAGTCGVLLLSLVITLYCRRDQRLPPDAHKPPGGGSFRTPIQEEQADAHSTLAKIRVKFSRSADAPAYQQGQNQLYNELNLGRREEYDVLDKRRGRDPEMGGKPRRKNPQEGLYNELQKDKMAEAYSEIGMKGERRRGKGHDGLYQGLSTATKDTYDALHMQALPPRGSGEGRGSLLTCGDVEENPGPMALPVTALLLPLALLLHAARPNWVNVISDLKKIEDLIQSMHIDATLYTESDVHPSCKVTAMKCFLLELQVISLESGDASIHDTVENLIILANNSLSSNGNVTESGCKECEELEEKNIKEFLQSFVHIVQMFINTSTTTPAPRPPTPAPTIASQPLSLRPEACRPAAGGAVHTRGLDFACDIYIWAPLAGTCGVLLLSLVITLYC

SEQ ID NO: 1986 - protein, 709 aa, synthetic construct
  REGION 1..709: note = Synthetic
MALPVTALLLPLALLLHAARPQLQLQESGPGLVKPSETLSLTCTVSGGSISSSSYYWGWIRQPPGKGLEWIGSLYYSGSTYYNPSLKSRVTISVDTSKNQFSLKLSSVTAADTAVYYCAAVQLERRGYFYMDVWGKGTTVTVSSGGGGSGGGGSGGGGSEIVLTQSPATLSLSPGERATLSCRASQSVSSYFAWYQQKPGQAPRLLIYDASNRATGIPARFSGSGSGTDFTLTISSLEPEDFAVYYCQQRSNWPLTFGGGTKVEIKTTTPAPRPPTPAPTIASQPLSLRPEACRPAAGGAVHTRGLDFACDIYIWAPLAGTCGVLLLSLVITLYCRRDQRLPPDAHKPPGGGSFRTPIQEEQADAHSTLAKIRVKFSRSADAPAYQQGQNQLYNELNLGRREEYDVLDKRRGRDPEMGGKPRRKNPQEGLYNELQKDKMAEAYSEIGMKGERRRGKGHDGLYQGLSTATKDTYDALHMQALPPRGSGEGRGSLLTCGDVEENPGPMALPVTALLLPLALLLHAARPNWVNVISDLKKIEDLIQSMHIDATLYTESDVHPSCKVTAMKCFLLELQVISLESGDASIHDTVENLIILANNSLSSNGNVTESGCKECEELEEKNIKEFLQSFVHIVQMFINTSTTTPAPRPPTPAPTIASQPLSLRPEACRPAAGGAVHTRGLDFACDIYIWAPLAGTCGVLLLSLVITLYC

SEQ ID NO: 1987 - protein, 711 aa, synthetic construct
  REGION 1..711: note = Synthetic
MALPVTALLLPLALLLHAARPQVQLVESGGGVVQPGRSLRLSCAASGFTFSNYGMHWVRQAPGKGLEWMAVIWSDGHNKYYADSVKGRFTISRDNSKNTLYLQMNSLRAEDTAVYYCARAQLERRYFYYMDVWGKGTTVTVSSGGGGSGGGGSGGGGSQTVVTQEPSFSVSPGGTVTLTCGLTSGSVSTSYYPNWYQQTPGQAPRTLIYSTNIRSSGVPDRFSGSILGNKAALTITGAQADDESDYYCVLYMGSGMFIFGSGTKVTVLTTTPAPRPPTPAPTIASQPLSLRPEACRPAAGGAVHTRGLDFACDIYIWAPLAGTCGVLLLSLVITLYCRRDQRLPPDAHKPPGGGSFRTPIQEEQADAHSTLAKIRVKFSRSADAPAYQQGQNQLYNELNLGRREEYDVLDKRRGRDPEMGGKPRRKNPQEGLYNELQKDKMAEAYSEIGMKGERRRGKGHDGLYQGLSTATKDTYDALHMQALPPRGSGEGRGSLLTCGDVEENPGPMALPVTALLLPLALLLHAARPNWVNVISDLKKIEDLIQSMHIDATLYTESDVHPSCKVTAMKCFLLELQVISLESGDASIHDTVENLIILANNSLSSNGNVTESGCKECEELEEKNIKEFLQSFVHIVQMFINTSTTTPAPRPPTPAPTIASQPLSLRPEACRPAAGGAVHTRGLDFACDIYIWAPLAGTCGVLLLSLVITLYC

SEQ ID NO: 1988 - protein, 711 aa, synthetic construct
  REGION 1..711: note = Synthetic
MALPVTALLLPLALLLHAARPQVQLVQSGAEVKKPGASVKVSCKASGYTFTSYDINWVRQATGQGLEWMGWMIPNSGDTGSAQKFQGRVTMTRNTSIGTAYMELSSLRSEDTAVYYCARGGYCNSTSCYYYYMDVWGKGTTVTVSSGGGGSGGGGSGGGGSDIQMTQSPSSLSASVGDRVTITCRASQGISSWLAWYQQKPEKAPKSLIYAASSLQGGVPSRFSGSGSGTDFTLTISSLQPEDFATYYCQQYDSYPYTFGQGTKLEIKTTTPAPRPPTPAPTIASQPLSLRPEACRPAAGGAVHTRGLDFACDIYIWAPLAGTCGVLLLSLVITLYCRRDQRLPPDAHKPPGGGSFRTPIQEEQADAHSTLAKIRVKFSRSADAPAYQQGQNQLYNELNLGRREEYDVLDKRRGRDPEMGGKPRRKNPQEGLYNELQKDKMAEAYSEIGMKGERRRGKGHDGLYQGLSTATKDTYDALHMQALPPRGSGEGRGSLLTCGDVEENPGPMALPVTALLLPLALLLHAARPNWVNVISDLKKIEDLIQSMHIDATLYTESDVHPSCKVTAMKCFLLELQVISLESGDASIHDTVENLIILANNSLSSNGNVTESGCKECEELEEKNIKEFLQSFVHIVQMFINTSTTTPAPRPPTPAPTIASQPLSLRPEACRPAAGGAVHTRGLDFACDIYIWAPLAGTCGVLLLSLVITLYC

SEQ ID NO: 1989 - protein, 712 aa, synthetic construct
  REGION 1..712: note = Synthetic
MALPVTALLLPLALLLHAARPQVQLVQSGAEVKKPGASVKVSCKASGYTFTSYDINWVRQATGQGLEWMGWMNPNSGNTVYAQKFQGRVTMTRNTSISTAYMELSSLRSEDTAVYYCARGGDFWSGYHDYYYYMDVWGKGTTVTVSSGGGGSGGGGSGGGGSDIQVTQSPTFLSASVGDRVTITCRASQGISSYLAWYQQKPGKAPKLLIYGASTLQSGVPSRFSGSGSGTEFTLTISSLQPEDFATYYCQQLNSYPWTFGQGTKVEIKTTTPAPRPPTPAPTIASQPLSLRPEACRPAAGGAVHTRGLDFACDIYIWAPLAGTCGVLLLSLVITLYCRRDQRLPPDAHKPPGGGSFRTPIQEEQADAHSTLAKIRVKFSRSADAPAYQQGQNQLYNELNLGRREEYDVLDKRRGRDPEMGGKPRRKNPQEGLYNELQKDKMAEAYSEIGMKGERRRGKGHDGLYQGLSTATKDTYDALHMQALPPRGSGEGRGSLLTCGDVEENPGPMALPVTALLLPLALLLHAARPNWVNVISDLKKIEDLIQSMHIDATLYTESDVHPSCKVTAMKCFLLELQVISLESGDASIHDTVENLIILANNSLSSNGNVTESGCKECEELEEKNIKEFLQSFVHIVQMFINTSTTTPAPRPPTPAPTIASQPLSLRPEACRPAAGGAVHTRGLDFACDIYIWAPLAGTCGVLLLSLVITLYC

SEQ ID NO: 1990 - protein, 710 aa, synthetic construct
  REGION 1..710: note = Synthetic
MALPVTALLLPLALLLHAARPQVQLQESGPGLVKPSETLSLTCTVSGGSISSYYWSWIRQPAGKGLEWIGRIYTSGSTNYNPSLKSRVTMSVDTSKNQFSLKLSSVTAADTAVYYCAREEYQLLPALYYYYYMDVWGKGTTVTVSSGGGGSGGGGSGGGGSSYELTQPPSVSVSPGQTASITCSGDKLGDKYACWYQQKPGQSPVLVIYQDSKRPSGIPERFSGSNSGNTATLTISGTQAMDEADYYCQAWDSSTAVFGGGTQLTALTTTPAPRPPTPAPTIASQPLSLRPEACRPAAGGAVHTRGLDFACDIYIWAPLAGTCGVLLLSLVITLYCRRDQRLPPDAHKPPGGGSFRTPIQEEQADAHSTLAKIRVKFSRSADAPAYQQGQNQLYNELNLGRREEYDVLDKRRGRDPEMGGKPRRKNPQEGLYNELQKDKMAEAYSEIGMKGERRRGKGHDGLYQGLSTATKDTYDALHMQALPPRGSGEGRGSLLTCGDVEENPGPMALPVTALLLPLALLLHAARPNWVNVISDLKKIEDLIQSMHIDATLYTESDVHPSCKVTAMKCFLLELQVISLESGDASIHDTVENLIILANNSLSSNGNVTESGCKECEELEEKNIKEFLQSFVHIVQMFINTSTTTPAPRPPTPAPTIASQPLSLRPEACRPAAGGAVHTRGLDFACDIYIWAPLAGTCGVLLLSLVITLYC

SEQ ID NO: 1991 - protein, 711 aa, synthetic construct
  REGION 1..711: note = Synthetic
MALPVTALLLPLALLLHAARPQVQLVESGGGVVQPGRSLRLSCAATGFTFSSYGMHWVRQAPGKGLEWMVVIWSDGHNKYYADSVKGRFTISRDNSKNTLYLQMNSLRAEDTAVYYCARAQLERRYFYYMDVWGKGTTVTVSSGGGGSGGGGSGGGGSQTVVTQEPSFSVSPGGTVTLTCGLTSGSVSTSYYPNWYQQTPGQAPRTLIYSTNIRSSGVPDRFSGSILGNKAALTITGAQADDESDYYCVLYMGSGMFIFGSGTKVTVLTTTPAPRPPTPAPTIASQPLSLRPEACRPAAGGAVHTRGLDFACDIYIWAPLAGTCGVLLLSLVITLYCRRDQRLPPDAHKPPGGGSFRTPIQEEQADAHSTLAKIRVKFSRSADAPAYQQGQNQLYNELNLGRREEYDVLDKRRGRDPEMGGKPRRKNPQEGLYNELQKDKMAEAYSEIGMKGERRRGKGHDGLYQGLSTATKDTYDALHMQALPPRGSGEGRGSLLTCGDVEENPGPMALPVTALLLPLALLLHAARPNWVNVISDLKKIEDLIQSMHIDATLYTESDVHPSCKVTAMKCFLLELQVISLESGDASIHDTVENLIILANNSLSSNGNVTESGCKECEELEEKNIKEFLQSFVHIVQMFINTSTTTPAPRPPTPAPTIASQPLSLRPEACRPAAGGAVHTRGLDFACDIYIWAPLAGTCGVLLLSLVITLYC

SEQ ID NO: 1992 - protein, 711 aa, synthetic construct
  REGION 1..711: note = Synthetic
MALPVTALLLPLALLLHAARPQVQLVESGGGVVQPGRSLRLSCAASGFTFTSYDMHWVRQAPGKGLEWVTIIWFDGSNKYYADSVKGRFTISRDNSKNTLYLQMNSLSAEDTAVYYCARGDNWNDRYYYYYYMDVWGKGTTVTVSSGGGGSGGGGSGGGGSEIVLTQSPDFQSVTPKEKVTITCRASQSIGSSLHWYQQKPDQSPMLLIKFASQSISGVPSRFSGSGSGTDFTLTINSLEAEDAAAYYCHQSSSLPWTFGQGTKVEIKTTTPAPRPPTPAPTIASQPLSLRPEACRPAAGGAVHTRGLDFACDIYIWAPLAGTCGVLLLSLVITLYCRRDQRLPPDAHKPPGGGSFRTPIQEEQADAHSTLAKIRVKFSRSADAPAYQQGQNQLYNELNLGRREEYDVLDKRRGRDPEMGGKPRRKNPQEGLYNELQKDKMAEAYSEIGMKGERRRGKGHDGLYQGLSTATKDTYDALHMQALPPRGSGEGRGSLLTCGDVEENPGPMALPVTALLLPLALLLHAARPNWVNVISDLKKIEDLIQSMHIDATLYTESDVHPSCKVTAMKCFLLELQVISLESGDASIHDTVENLIILANNSLSSNGNVTESGCKECEELEEKNIKEFLQSFVHIVQMFINTSTTTPAPRPPTPAPTIASQPLSLRPEACRPAAGGAVHTRGLDFACDIYIWAPLAGTCGVLLLSLVITLYC

SEQ ID NO: 1993 - protein, 716 aa, synthetic construct
  REGION 1..716: note = Synthetic
MALPVTALLLPLALLLHAARPQVQLVQSGAEVKKPGASVKVSCKASGYTFTSYGISWVRQAPGQGLEWMGWISAYNGHTDYTQKLQGRVTMTTDTSTTTAYMELRSLSSADTAVYYCVREVVLPTTDYYYFYMDVWGKGTTVTVSSGGGGSGGGGSGGGGSDIVMTQPPLSSPVTLGQPASISCRSSQSLVHSDGNTYLSWLQQRPGQPPRLLIYKVSNRFSGVPDRFSGSGAGTDFTLKISRVEAEDVGVYYCTQATQFPHTFGQGTKLEIKTTTPAPRPPTPAPTIASQPLSLRPEACRPAAGGAVHTRGLDFACDIYIWAPLAGTCGVLLLSLVITLYCRRDQRLPPDAHKPPGGGSFRTPIQEEQADAHSTLAKIRVKFSRSADAPAYQQGQNQLYNELNLGRREEYDVLDKRRGRDPEMGGKPRRKNPQEGLYNELQKDKMAEAYSEIGMKGERRRGKGHDGLYQGLSTATKDTYDALHMQALPPRGSGEGRGSLLTCGDVEENPGPMALPVTALLLPLALLLHAARPNWVNVISDLKKIEDLIQSMHIDATLYTESDVHPSCKVTAMKCFLLELQVISLESGDASIHDTVENLIILANNSLSSNGNVTESGCKECEELEEKNIKEFLQSFVHIVQMFINTSTTTPAPRPPTPAPTIASQPLSLRPEACRPAAGGAVHTRGLDFACDIYIWAPLAGTCGVLLLSLVITLYC

SEQ ID NO: 1994 - protein, 715 aa, synthetic construct
  REGION 1..715: note = Synthetic
MALPVTALLLPLALLLHAARPQVQLVQSGAEVKKPGASVKVSCKVSGYTLTELSMHWVRQAPGKGLEWMGGFDPEDGETIYAQKFQGRVTMTEDTSTDTAYMELSSLRSEDTAVYYCATGRITMVRGVIIPYYYYYMDVWGKGTTVTVSSGGGGSGGGGSGGGGSDIQMTQSPSSLSASVGDRVTITCRASQGISSWLAWYQQKPEKAPKSLIYAASSLQSGVPSRFSGSGSGTDFTLTISSLQPEDFATYYCQQYNSYPYTFGQGTKLEIKTTTPAPRPPTPAPTIASQPLSLRPEACRPAAGGAVHTRGLDFACDIYIWAPLAGTCGVLLLSLVITLYCRRDQRLPPDAHKPPGGGSFRTPIQEEQADAHSTLAKIRVKFSRSADAPAYQQGQNQLYNELNLGRREEYDVLDKRRGRDPEMGGKPRRKNPQEGLYNELQKDKMAEAYSEIGMKGERRRGKGHDGLYQGLSTATKDTYDALHMQALPPRGSGEGRGSLLTCGDVEENPGPMALPVTALLLPLALLLHAARPNWVNVISDLKKIEDLIQSMHIDATLYTESDVHPSCKVTAMKCFLLELQVISLESGDASIHDTVENLIILANNSLSSNGNVTESGCKECEELEEKNIKEFLQSFVHIVQMFINTSTTTPAPRPPTPAPTIASQPLSLRPEACRPAAGGAVHTRGLDFACDIYIWAPLAGTCGVLLLSLVITLYC

SEQ ID NO: 1995 - protein, 713 aa, synthetic construct
  REGION 1..713: note = Synthetic
MALPVTALLLPLALLLHAARPQVQLVQSGTEVKKPGASVKVSCKASGYTFTNYGIGWVRQAPGQGLEWMGWIIAYNGYTKYAQILQGRVTMTTDTSTNTAYMELRSLRSDDTAVYYCARQQLGGDYHYYMDVWGKGTTVTVSSGGGGSGGGGSGGGGSDIVMTQTPLSLSVTPGQPASISCKSSKSLLHSDGKTYLYWYLQKPGQPPQLLIYEVSNRFSGVPDRFSGSGSGTDFTLKISRVEAEDVGVYYCMQSIQFPWTFGQGTKVEIKTTTPAPRPPTPAPTIASQPLSLRPEACRPAAGGAVHTRGLDFACDIYIWAPLAGTCGVLLLSLVITLYCRRDQRLPPDAHKPPGGGSFRTPIQEEQADAHSTLAKIRVKFSRSADAPAYQQGQNQLYNELNLGRREEYDVLDKRRGRDPEMGGKPRRKNPQEGLYNELQKDKMAEAYSEIGMKGERRRGKGHDGLYQGLSTATKDTYDALHMQALPPRGSGEGRGSLLTCGDVEENPGPMALPVTALLLPLALLLHAARPNWVNVISDLKKIEDLIQSMHIDATLYTESDVHPSCKVTAMKCFLLELQVISLESGDASIHDTVENLIILANNSLSSNGNVTESGCKECEELEEKNIKEFLQSFVHIVQMFINTSTTTPAPRPPTPAPTIASQPLSLRPEACRPAAGGAVHTRGLDFACDIYIWAPLAGTCGVLLLSLVITLYC

SEQ ID NO: 1996 - protein, 713 aa, synthetic construct
  REGION 1..713: note = Synthetic
MALPVTALLLPLALLLHAARPQVQLVQSGTEVKKPGASVKVSCKASGYTFTNYGIGWVRQAPGQGLEWMGWIIAYNGYTKYAQILQGRVTMTTDTSTNTAYMELRSLRSDDTAVYYCARQQLGGDYHYYMDVWGKGTTVTVSSGGGGSGGGGSGGGGSDIVMTQTPLSLSVTPGQPASISCKSSKSLLHSDGKTYLYWYLQKPGQPPQLLIYEVSTRFSGVPDRFSGSGSGTDFTLKISRVEAEDVGVYYCMQSIQFPWTFGQGTKVEIKTTTPAPRPPTPAPTIASQPLSLRPEACRPAAGGAVHTRGLDFACDIYIWAPLAGTCGVLLLSLVITLYCRRDQRLPPDAHKPPGGGSFRTPIQEEQADAHSTLAKIRVKFSRSADAPAYQQGQNQLYNELNLGRREEYDVLDKRRGRDPEMGGKPRRKNPQEGLYNELQKDKMAEAYSEIGMKGERRRGKGHDGLYQGLSTATKDTYDALHMQALPPRGSGEGRGSLLTCGDVEENPGPMALPVTALLLPLALLLHAARPNWVNVISDLKKIEDLIQSMHIDATLYTESDVHPSCKVTAMKCFLLELQVISLESGDASIHDTVENLIILANNSLSSNGNVTESGCKECEELEEKNIKEFLQSFVHIVQMFINTSTTTPAPRPPTPAPTIASQPLSLRPEACRPAAGGAVHTRGLDFACDIYIWAPLAGTCGVLLLSLVITLYC

SEQ ID NO: 1997 - protein, 711 aa, synthetic construct
  REGION 1..711: note = Synthetic
MALPVTALLLPLALLLHAARPQVQLVQSGTEVKKPGASVKVSCKTSGYTFTSYDINWVRQATGQGLEWMGWMNPISGDTGSAQKFQGRVTMTRNTSIGTAYMELSSLRSEDTAVYYCARGGYCSSTSCYYYYMDVWGKGTTVTVSSGGGGSGGGGSGGGGSDIQMTQSPSSLSASVGDRVTITCRASQGISNWLAWYQQKPEKAPKSLIYAASSLQGGVPSRFSGSGSGTDFTLTISSLQPEDFATYYCQQYDSYPYTFGQGTKLEIKTTTPAPRPPTPAPTIASQPLSLRPEACRPAAGGAVHTRGLDFACDIYIWAPLAGTCGVLLLSLVITLYCRRDQRLPPDAHKPPGGGSFRTPIQEEQADAHSTLAKIRVKFSRSADAPAYQQGQNQLYNELNLGRREEYDVLDKRRGRDPEMGGKPRRKNPQEGLYNELQKDKMAEAYSEIGMKGERRRGKGHDGLYQGLSTATKDTYDALHMQALPPRGSGEGRGSLLTCGDVEENPGPMALPVTALLLPLALLLHAARPNWVNVISDLKKIEDLIQSMHIDATLYTESDVHPSCKVTAMKCFLLELQVISLESGDASIHDTVENLIILANNSLSSNGNVTESGCKECEELEEKNIKEFLQSFVHIVQMFINTSTTTPAPRPPTPAPTIASQPLSLRPEACRPAAGGAVHTRGLDFACDIYIWAPLAGTCGVLLLSLVITLYC

SEQ ID NO: 1998 - protein, 711 aa, synthetic construct
  REGION 1..711: note = Synthetic
MALPVTALLLPLALLLHAARPQVQLVQSGAEVKKPGASVKVSCKASGYTFTSYDINWVRQATGQGLEWMGWMIPNSGDTGSAQKFQGRVTMTRNTSISTAYMELSSLRSEDTAVYYCARGGYCNSTSCYYYYMDVWGKGTTVTVSSGGGGSGGGGSGGGGSDIQMTQSPSSLSASVGDRVTITCRASQGISSWLAWYQQKPEKAPKSLIYAASSLQGGVPSRFSGSGSGTDFTLTISSLQPEDFATYYCQQYDSYPYTFGQGTKLEIKTTTPAPRPPTPAPTIASQPLSLRPEACRPAAGGAVHTRGLDFACDIYIWAPLAGTCGVLLLSLVITLYCRRDQRLPPDAHKPPGGGSFRTPIQEEQADAHSTLAKIRVKFSRSADAPAYQQGQNQLYNELNLGRREEYDVLDKRRGRDPEMGGKPRRKNPQEGLYNELQKDKMAEAYSEIGMKGERRRGKGHDGLYQGLSTATKDTYDALHMQALPPRGSGEGRGSLLTCGDVEENPGPMALPVTALLLPLALLLHAARPNWVNVISDLKKIEDLIQSMHIDATLYTESDVHPSCKVTAMKCFLLELQVISLESGDASIHDTVENLIILANNSLSSNGNVTESGCKECEELEEKNIKEFLQSFVHIVQMFINTSTTTPAPRPPTPAPTIASQPLSLRPEACRPAAGGAVHTRGLDFACDIYIWAPLAGTCGVLLLSLVITLYC

SEQ ID NO: 1999 - protein, 712 aa, synthetic construct
  REGION 1..712: note = Synthetic
MALPVTALLLPLALLLHAARPEVQLLESGGGLVQPGGSLRLSCAASGFTFSSYVMNWVRQAPGKGLEWVSSVSGSGNNSFYADSVKGRFTISRDNSKNTLYLQMNSLRAEDTAVYYCASRSSSYLYYYYYMDVWGKGTTVTVSSGGGGSGGGGSGGGGSEIVLTQSPGTLSLSPGERATLSCRASQSVSSSYLAWYQQKPGQAPRLLIYGASSRATGIPDRFSDSGSGTDFTLTISRLEPEDFAVYYCQHYGSSPPRITFGPGTKVDIKTTTPAPRPPTPAPTIASQPLSLRPEACRPAAGGAVHTRGLDFACDIYIWAPLAGTCGVLLLSLVITLYCRRDQRLPPDAHKPPGGGSFRTPIQEEQADAHSTLAKIRVKFSRSADAPAYQQGQNQLYNELNLGRREEYDVLDKRRGRDPEMGGKPRRKNPQEGLYNELQKDKMAEAYSEIGMKGERRRGKGHDGLYQGLSTATKDTYDALHMQALPPRGSGEGRGSLLTCGDVEENPGPMALPVTALLLPLALLLHAARPNWVNVISDLKKIEDLIQSMHIDATLYTESDVHPSCKVTAMKCFLLELQVISLESGDASIHDTVENLIILANNSLSSNGNVTESGCKECEELEEKNIKEFLQSFVHIVQMFINTSTTTPAPRPPTPAPTIASQPLSLRPEACRPAAGGAVHTRGLDFACDIYIWAPLAGTCGVLLLSLVITLYC

SEQ ID NO: 2000 - DNA, 2136 bp, synthetic construct
  misc_feature 1..2136: note = Synthetic
  source 1..2136: mol_type = other DNA
atggccttaccagtgaccgccttgctcctgccgctggccttgctgctccacgccgccaggccgcaggtgcagctggtggagtctgggggaggcgtggtccagcctgggaggtccctgagactttcctgtgcagcgtctggattcaccttcagcagtcatgacatgcactgggtccgccaggctccaggcaaggggctggactgggtggcagttatatggagtgatggaaataaaaaatactatgtagactccgcgaagggccggttcaccatctccagagacaattccaagaacacggtgtatctgcaaatgaacagcctgagagccgaggacacggctatatattactgtgcgagaggtgacaactggaacgacgaacactcctactattactacatggacgtctggggcaaggggaccacggtcaccgtctcctcaggcggcggtggatctggaggcggaggctctggaggcggcggctccgaaattgtgctgactcagtctccagactttcagtctgtgactccaaaggagaaagtcaccatcacctgccgggccagtcagaccattggcagtagcttacactggtaccagcagaaaccagatcagtctccaaagctcctcatcaagcatgcttcccagtccttctcaggggtcccctcgaggttcagtggcagtggatctgggacagatttcaccctcaccgtcaatagcctggaagctgaagatgctgcaacgtattactgtcatcagagtagtagtttaccgtggacgttcggccaagggaccaaggtggaaatcaaaaccacgacgccagcgccgcggccaccaacaccggcgcccaccatcgcgtcgcagcccctgtccctgcgcccagaggcgtgccggccagcggcggggggcgcagtgcacacgagggggctggacttcgcctgtgatatctacatctgggcgcccttggccgggacttgtggggtccttctcctgtcactggttatcaccctttactgccggagggaccagaggctgccccccgatgcccacaagccccctgggggaggcagtttccggacccccatccaagaggagcaggccgacgcccactccaccctggccaagatcagagtgaagttcagcaggagcgcagacgcccccgcgtaccagcagggccagaaccagctctataacgagctcaatctaggacgaagagaggagtacgatgttttggacaagagacgtggccgggaccctgagatggggggaaagccgagaaggaagaaccctcaggaaggcctgtacaatgaactgcagaaagataagatggcggaggcctacagtgagattgggatgaaaggcgagcgccggaggggcaaggggcacgatggcctttaccagggtctcagtacagccaccaaggacacctacgacgcccttcacatgcaggccctgccccctcgcggctctggcgagggaaggggttccctgcttacttgcggcgacgtcgaagagaatcccggtccgatggccctcccagtaactgccctccttttgcccctcgcactccttcttcatgccgctcgccccaactgggtcaacgtgattagcgatttgaagaaaatcgaggaccttatacagtctatgcatattgacgctacactgtatactgagagtgatgtacacccgtcctgtaaggtaacggccatgaaatgctttcttctggagctccaggtcatcagcttggagtctggggacgcaagcatccacgatacggttgaaaacctcatcatccttgcgaacaactctctctcatctaatggaaacgttacagagagtgggtgtaaggagtgcgaagagttggaagaaaaaaacatcaaagaatttcttcaatccttcgttcacatagtgcaaatgttcattaacacgtccactaccacacccgccccgaggccacctacgccggcaccgactatcgccagtcaacccctctctctgcgccccgaggcttgccggcctgcggctggtggggcggtccacacccggggcctggattttgcgtgcgatatatacatctgggcacctcttgccggcacctgcggagtgctgcttctctcactcgttattacgctgtactgctaa

SEQ ID NO: 2001 - DNA, 2136 bp, synthetic construct
  misc_feature 1..2136: note = Synthetic
  source 1..2136: mol_type = other DNA
atggccttaccagtgaccgccttgctcctgccgctggccttgctgctccacgccgccaggccgcaggtgcagctggtggagtctgggggaggcgtggtccagcctgggaggtccctgagactttcctgtgcagcgtctggattcaccttcagtagtcatgacatgcactgggtccgccaggctccaggcaaggggctggactgggtggcagttatatggagtgatggaaataataaatactatgcagactccgcgaagggccggttcaccatctccagagacaattccaagaacacggtgtatctgcaaatgaacagcctgagagccgaggacacggctatatattactgtgcgagaggtgacaactggaacgacgaacactcctactattactacatggacgtctggggcaaggggaccacggtcaccgtctcctcaggcggcggtggatctggaggcggaggctctggaggcggcggctccgaaattgtgctgactcagtctccagactttcagtctgtgactccaaaggagaaagtcaccatcacctgccgggccagtcagaccattggcagtagcttacactggtaccagcagaaaccagatcagtctccaaagctcctcatcaagcatgcttcccagtccttctcaggggtcccctcgaggttcagtggcagtggatctgggacagatttcaccctcaccgtcaatagcctggaagctgaagatgctgcaacgtattactgtcatcagagtagtagtttaccgtggacgttcggccaagggaccaaggtggaaatcaaaaccacgacgccagcgccgcggccaccaacaccggcgcccaccatcgcgtcgcagcccctgtccctgcgcccagaggcgtgccggccagcggcggggggcgcagtgcacacgagggggctggacttcgcctgtgatatctacatctgggcgcccttggccgggacttgtggggtccttctcctgtcactggttatcaccctttactgccggagggaccagaggctgccccccgatgcccacaagccccctgggggaggcagtttccggacccccatccaagaggagcaggccgacgcccactccaccctggccaagatcagagtgaagttcagcaggagcgcagacgcccccgcgtaccagcagggccagaaccagctctataacgagctcaatctaggacgaagagaggagtacgatgttttggacaagagacgtggccgggaccctgagatggggggaaagccgagaaggaagaaccctcaggaaggcctgtacaatgaactgcagaaagataagatggcggaggcctacagtgagattgggatgaaaggcgagcgccggaggggcaaggggcacgatggcctttaccagggtctcagtacagccaccaaggacacctacgacgcccttcacatgcaggccctgccccctcgcggctctggcgagggaaggggttccctgcttacttgcggcgacgtcgaagagaatcccggtccgatggccctcccagtaactgccctccttttgcccctcgcactccttcttcatgccgctcgccccaactgggtcaacgtgattagcgatttgaagaaaatcgaggaccttatacagtctatgcatattgacgctacactgtatactgagagtgatgtacacccgtcctgtaaggtaacggccatgaaatgctttcttctggagctccaggtcatcagcttggagtctggggacgcaagcatccacgatacggttgaaaacctcatcatccttgcgaacaactctctctcatctaatggaaacgttacagagagtgggtgtaaggagtgcgaagagttggaagaaaaaaacatcaaagaatttcttcaatccttcgttcacatagtgcaaatgttcattaacacgtccactaccacacccgccccgaggccacctacgccggcaccgactatcgccagtcaacccctctctctgcgccccgaggcttgccggcctgcggctggtggggcggtccacacccggggcctggattttgcgtgcgatatatacatctgggcacctcttgccggcacctgcggagtgctgcttctctcactcgttattacgctgtactgctaa

SEQ ID NO: 2002 - DNA, 2133 bp, synthetic construct
  misc_feature 1..2133: note = Synthetic
  source 1..2133: mol_type = other DNA
atggccttaccagtgaccgccttgctcctgccgctggccttgctgctccacgccgccaggccgcagcttcagctggtgcagtctggagctgaggtgaagaagcctggggcctcagtgaaggtctcctgcaaggcttctggttacacctttaccaactatggtatcagctggttgcgacaggcccctggacaagggcttgagtggatgggatggatcagtggttacaatgataacacacactatgcacagaagttccagggcagagtcaccatgaccacagacacatccacgaccacagcctacatggaactgaggaacctgagatctgacgacacggccgtgtattactgtgcgagagatgggatagcagctcgtccagtctactactactacatggacgtctggggcaaagggaccacggtcaccgtctcctcaggcggcggtggatctggaggcggaggctctggaggcggcggctccgacatacagatgacccagtctccatcctccctgtctgcatctgtaggagacagagtcaccatcacttgccgggcaagccagagcattagcaactatttaaattggtatcaccagaaaccagggaaagcccctaagctcctgatctatgctgcatccagtttggaaagtggggtcccatcaaggttcagtggcagtggatctgggacagatttcactctcaccatcagcagtctgcaacctgaagattttgcaacttactactgtcaacagagttacagtaacccgctcactttcggcggagggaccaaggtggagagcaaaaccacgacgccagcgccgcggccaccaacaccggcgcccaccatcgcgtcgcagcccctgtccctgcgcccagaggcgtgccggccagcggcggggggcgcagtgcacacgagggggctggacttcgcctgtgatatctacatctgggcgcccttggccgggacttgtggggtccttctcctgtcactggttatcaccctttactgccggagggaccagaggctgccccccgatgcccacaagccccctgggggaggcagtttccggacccccatccaagaggagcaggccgacgcccactccaccctggccaagatcagagtgaagttcagcaggagcgcagacgcccccgcgtaccagcagggccagaaccagctctataacgagctcaatctaggacgaagagaggagtacgatgttttggacaagagacgtggccgggaccctgagatggggggaaagccgagaaggaagaaccctcaggaaggcctgtacaatgaactgcagaaagataagatggcggaggcctacagtgagattgggatgaaaggcgagcgccggaggggcaaggggcacgatggcctttaccagggtctcagtacagccaccaaggacacctacgacgcccttcacatgcaggccctgccccctcgcggctctggcgagggaaggggttccctgcttacttgcggcgacgtcgaagagaatcccggtccgatggccctcccagtaactgccctccttttgcccctcgcactccttcttcatgccgctcgccccaactgggtcaacgtgattagcgatttgaagaaaatcgaggaccttatacagtctatgcatattgacgctacactgtatactgagagtgatgtacacccgtcctgtaaggtaacggccatgaaatgctttcttctggagctccaggtcatcagcttggagtctggggacgcaagcatccacgatacggttgaaaacctcatcatccttgcgaacaactctctctcatctaatggaaacgttacagagagtgggtgtaaggagtgcgaagagttggaagaaaaaaacatcaaagaatttcttcaatccttcgttcacatagtgcaaatgttcattaacacgtccactaccacacccgccccgaggccacctacgccggcaccgactatcgccagtcaacccctctctctgcgccccgaggcttgccggcctgcggctggtggggcggtccacacccggggcctggattttgcgtgcgatatatacatctgggcacctcttgccggcacctgcggagtgctgcttctctcactcgttattacgctgtactgctaa

SEQ ID NO: 2003 - DNA, 2136 bp, synthetic construct
  misc_feature 1..2136: note = Synthetic
  source 1..2136: mol_type = other DNA
atggccttaccagtgaccgccttgctcctgccgctggccttgctgctccacgccgccaggccgcaggtgcagctggtggagtctgggggaggcgtggtccagcctgggaggtccctgagactctcctgtgtagcgtctggattcaccttcagtagcaatgacatatactgggtccgccaggccccaggcaaggggctggagtgggtggcagttatatggtatgatggaagtaataaatactatgcagactccgtgaagggccgattcaccatctccagagacaattccaagaacacgctgtatctgcaaatgaacagcctgagagccgaggacacggctgtgtattactgtgcgagaggtgacaactggaacgacgaacaccactaccactactacatggacgtctggggcaaagggaccacggtcaccgtctcctcaggcggcggtggatctggaggcggaggctctggaggcggcggctccgaaattgtgctgactcagtctccagactttcagtctgtgactccaaaggagaaagtcaccatcacctgccgggccagtcagagcattggtagtagcttacactggtaccagcagaaaccagatcagtctccaaagctcctcatcaagtttgcttcccagtccttctcaggggtcccctcgaggttcagtggcagtggatctgggacagatttcaccctcaccatccatagcctggaagctgaagatgctgcaacgtattactgtcatcagagtggtagtttaccgtggacgttcggccaagggaccaaggtggaaatcaaaaccacgacgccagcgccgcggccaccaacaccggcgcccaccatcgcgtcgcagcccctgtccctgcgcccagaggcgtgccggccagcggcggggggcgcagtgcacacgagggggctggacttcgcctgtgatatctacatctgggcgcccttggccgggacttgtggggtccttctcctgtcactggttatcaccctttactgccggagggaccagaggctgccccccgatgcccacaagccccctgggggaggcagtttccggacccccatccaagaggagcaggccgacgcccactccaccctggccaagatcagagtgaagttcagcaggagcgcagacgcccccgcgtaccagcagggccagaaccagctctataacgagctcaatctaggacgaagagaggagtacgatgttttggacaagagacgtggccgggaccctgagatggggggaaagccgagaaggaagaaccctcaggaaggcctgtacaatgaactgcagaaagataagatggcggaggcctacagtgagattgggatgaaaggcgagcgccggaggggcaaggggcacgatggcctttaccagggtctcagtacagccaccaaggacacctacgacgcccttcacatgcaggccctgccccctcgcggctctggcgagggaaggggttccctgcttacttgcggcgacgtcgaagagaatcccggtccgatggccctcccagtaactgccctccttttgcccctcgcactccttcttcatgccgctcgccccaactgggtcaacgtgattagcgatttgaagaaaatcgaggaccttatacagtctatgcatattgacgctacactgtatactgagagtgatgtacacccgtcctgtaaggtaacggccatgaaatgctttcttctggagctccaggtcatcagcttggagtctggggacgcaagcatccacgatacggttgaaaacctcatcatccttgcgaacaactctctctcatctaatggaaacgttacagagagtgggtgtaaggagtgcgaagagttggaagaaaaaaacatcaaagaatttcttcaatccttcgttcacatagtgcaaatgttcattaacacgtccactaccacacccgccccgaggccacctacgccggcaccgactatcgccagtcaacccctctctctgcgccccgaggcttgccggcctgcggctggtggggcggtccacacccggggcctggattttgcgtgcgatatatacatctgggcacctcttgccggcacctgcggagtgctgcttctctcactcgttattacgctgtactgctaa

SEQ ID NO: 2004 - DNA, 2116 bp, synthetic construct
  misc_feature 1..2116: note = Synthetic
  source 1..2116: mol_type = other DNA
atggccttaccagtgaccgccttgctcctgccgctggccttgctgctccacgccgccaggccgcaggtgcagttggtggagtctgggggaggcgtggtccagcctgggaggtccctgagactctcctgtgcagcctctggattcaccttcagtagctatggcatgcactgggtccgccaggctccaggcaaggggctggagtgggtggcagttatatcatatgatggaagtaataaatactatgcagactccgtgaagggccgattcaccatctccagggacaattccaagaccacgctgtatctgcaaatgaacagcctgagagctgaggacacggctgtgtattactgtgcgagagatcactactactactacatggacgtctggggcaaagggaccacggtcaccgtctcctcaggcggcggtggatctggaggcggaggctctggaggcggcggctccggtgacccaggagccatcgttctcagtgtcccctggagggacagtcacactcacttgtggcttgagctctggctcagtctctactagttactaccccagctggtaccagcagaccccaggccaggctccacgcacgctcatctacagcacaaacattcgctcttctggggtccctgatcgcttctctggctccatccttgggaacaaagctgccctcaccatcacgggggcccaggcagatgatgaatctgattattactgtgtgctgtatatgggtagtgacattgtggtattcggcggagggaccaagctgaccgtcctaaccacgacgccagcgccgcggccaccaacaccggcgcccaccatcgcgtcgcagcccctgtccctgcgcccagaggcgtgccggccagcggcggggggcgcagtgcacacgagggggctggacttcgcctgtgatatctacatctgggcgcccttggccgggacttgtggggtccttctcctgtcactggttatcaccctttactgccggagggaccagaggctgccccccgatgcccacaagccccctgggggaggcagtttccggacccccatccaagaggagcaggccgacgcccactccaccctggccaagatcagagtgaagttcagcaggagcgcagacgcccccgcgtaccagcagggccagaaccagctctataacgagctcaatctaggacgaagagaggagtacgatgttttggacaagagacgtggccgggaccctgagatggggggaaagccgagaaggaagaaccctcaggaaggcctgtacaatgaactgcagaaagataagatggcggaggcctacagtgagattgggatgaaaggcgagcgccggaggggcaaggggcacgatggcctttaccagggtctcagtacagccaccaaggacacctacgacgcccttcacatgcaggccctgccccctcgcggctctggcgagggaaggggttccctgcttacttgcggcgacgtcgaagagaatcccggtccgatggccctcccagtaactgccctccttttgcccctcgcactccttcttcatgccgctcgccccaactgggtcaacgtgattagcgatttgaagaaaatcgaggaccttatacagtctatgcatattgacgctacactgtatactgagagtgatgtacacccgtcctgtaaggtaacggccatgaaatgctttcttctggagctccaggtcatcagcttggagtctggggacgcaagcatccacgatacggttgaaaacctcatcatccttgcgaacaactctctctcatctaatggaaacgttacagagagtgggtgtaaggagtgcgaagagttggaagaaaaaaacatcaaagaatttcttcaatccttcgttcacatagtgcaaatgttcattaacacgtccactaccacacccgccccgaggccacctacgccggcaccgactatcgccagtcaacccctctctctgcgccccgaggcttgccggcctgcggctggtggggcggtccacacccggggcctggattttgcgtgcgatatatacatctgggcacctcttgccggcacctgcggagtgctgcttctctcactcgttattacgctgtactgctaa

SEQ ID NO: 2005 - DNA, 2130 bp, synthetic construct
  misc_feature 1..2130: note = Synthetic
  source 1..2130: mol_type = other DNA
atggccttaccagtgaccgccttgctcctgccgctggccttgctgctccacgccgccaggccgcaactgcagctgcaggagtcgggcccaggactggtgaagccttcggagaccctgtccctcacctgcactgtctctggtggctccatcagcagtagtagttactactggggctggatccgccagcccccagggaaggggctggagtggattgggagtctctattatagtgggagcacctactacaacccgtccctcaagagtcgagtcaccatatccgttgacacgtccaagaaccagttctccctgaagctgagctctgtgaccgccgcagacacggctgtgtattactgtgcggccgtacaactggaacgacgtgggtacttctacatggacgtctggggcaaagggaccacggtcaccgtctcctcaggcggcggtggatctggaggcggaggctctggaggcggcggctccgaaattgtgttgacacagtctccagccaccctgtctttgtctccaggggaaagagccaccctctcctgcagggccagtcagagtgttagcagctactttgcctggtaccaacagaaacctggccaggctcccaggctcctcatctatgatgcatccaacagggccactggcatcccagccaggttcagtggcagtgggtctgggacagacttcactctcaccatcagcagcctggagcctgaagattttgcagtttattactgtcagcagcgtagcaactggcctctcactttcggcggagggaccaaggtggagatcaaaaccacgacgccagcgccgcggccaccaacaccggcgcccaccatcgcgtcgcagcccctgtccctgcgcccagaggcgtgccggccagcggcggggggcgcagtgcacacgagggggctggacttcgcctgtgatatctacatctgggcgcccttggccgggacttgtggggtccttctcctgtcactggttatcaccctttactgccggagggaccagaggctgccccccgatgcccacaagccccctgggggaggcagtttccggacccccatccaagaggagcaggccgacgcccactccaccctggccaagatcagagtgaagttcagcaggagcgcagacgcccccgcgtaccagcagggccagaaccagctctataacgagctcaatctaggacgaagagaggagtacgatgttttggacaagagacgtggccgggaccctgagatggggggaaagccgagaaggaagaaccctcaggaaggcctgtacaatgaactgcagaaagataagatggcggaggcctacagtgagattgggatgaaaggcgagcgccggaggggcaaggggcacgatggcctttaccagggtctcagtacagccaccaaggacacctacgacgcccttcacatgcaggccctgccccctcgcggctctggcgagggaaggggttccctgcttacttgcggcgacgtcgaagagaatcccggtccgatggccctcccagtaactgccctccttttgcccctcgcactccttcttcatgccgctcgccccaactgggtcaacgtgattagcgatttgaagaaaatcgaggaccttatacagtctatgcatattgacgctacactgtatactgagagtgatgtacacccgtcctgtaaggtaacggccatgaaatgctttcttctggagctccaggtcatcagcttggagtctggggacgcaagcatccacgatacggttgaaaacctcatcatccttgcgaacaactctctctcatctaatggaaacgttacagagagtgggtgtaaggagtgcgaagagttggaagaaaaaaacatcaaagaatttcttcaatccttcgttcacatagtgcaaatgttcattaacacgtccactaccacacccgccccgaggccacctacgccggcaccgactatcgccagtcaacccctctctctgcgccccgaggcttgccggcctgcggctggtggggcggtccacacccggggcctggattttgcgtgcgatatatacatctgggcacctcttgccggcacctgcggagtgctgcttctctcactcgttattacgctgtactgctaa

SEQ ID NO: 2006 - DNA, 2136 bp, synthetic construct
  misc_feature 1..2136: note = Synthetic
  source 1..2136: mol_type = other DNA
atggccttaccagtgaccgccttgctcctgccgctggccttgctgctccacgccgccaggccgcaggtgcagctggtggagtctgggggaggcgtggtccagcctgggaggtccctgagactctcctgtgcagcatctggattcaccttcagtaactatggcatgcactgggtccgccaggctccaggcaaggggctggagtggatggcagttatatggtctgatggacataataaatactatgcagactccgtgaagggccgattcaccatctccagagacaattccaagaacacgctgtatctgcaaatgaacagcctgagagccgaggacacggctgtgtattactgtgcgagggcacaattggaacgacggtacttctactacatggacgtctggggcaaagggaccacggtcaccgtctcctcaggcggcggtggatctggaggcggaggctctggaggcggcggctcccagactgtagtgacccaggaaccatcgttctcagtgtcccctggagggacagtcacactcacttgtggcttgacctctggctcagtctctactagttactaccccaactggtaccagcagaccccaggccaggctccacgcacgctcatctatagtacaaatattcgctcttctggggtccctgatcgcttctctggctccatccttgggaacaaagctgccctcaccatcacgggggcccaggcagatgatgaatctgattattactgtgtgctgtatatgggtagtggcatgtttattttcggcagtggaaccaaggtcactgtcctaaccacgacgccagcgccgcggccaccaacaccggcgcccaccatcgcgtcgcagcccctgtccctgcgcccagaggcgtgccggccagcggcggggggcgcagtgcacacgagggggctggacttcgcctgtgatatctacatctgggcgcccttggccgggacttgtggggtccttctcctgtcactggttatcaccctttactgccggagggaccagaggctgccccccgatgcccacaagccccctgggggaggcagtttccggacccccatccaagaggagcaggccgacgcccactccaccctggccaagatcagagtgaagttcagcaggagcgcagacgcccccgcgtaccagcagggccagaaccagctctataacgagctcaatctaggacgaagagaggagtacgatgttttggacaagagacgtggccgggaccctgagatggggggaaagccgagaaggaagaaccctcaggaaggcctgtacaatgaactgcagaaagataagatggcggaggcctacagtgagattgggatgaaaggcgagcgccggaggggcaaggggcacgatggcctttaccagggtctcagtacagccaccaaggacacctacgacgcccttcacatgcaggccctgccccctcgcggctctggcgagggaaggggttccctgcttacttgcggcgacgtcgaagagaatcccggtccgatggccctcccagtaactgccctccttttgcccctcgcactccttcttcatgccgctcgccccaactgggtcaacgtgattagcgatttgaagaaaatcgaggaccttatacagtctatgcatattgacgctacactgtatactgagagtgatgtacacccgtcctgtaaggtaacggccatgaaatgctttcttctggagctccaggtcatcagcttggagtctggggacgcaagcatccacgatacggttgaaaacctcatcatccttgcgaacaactctctctcatctaatggaaacgttacagagagtgggtgtaaggagtgcgaagagttggaagaaaaaaacatcaaagaatttcttcaatccttcgttcacatagtgcaaatgttcattaacacgtccactaccacacccgccccgaggccacctacgccggcaccgactatcgccagtcaacccctctctctgcgccccgaggcttgccggcctgcggctggtggggcggtccacacccggggcctggattttgcgtgcgatatatacatctgggcacctcttgccggcacctgcggagtgctgcttctctcactcgttattacgctgtactgctaa

SEQ ID NO: 2007 - DNA, 2136 bp, synthetic construct
  misc_feature 1..2136: note = Synthetic
  source 1..2136: mol_type = other DNA
atggccttaccagtgaccgccttgctcctgccgctggccttgctgctccacgccgccaggccgcaggtgcagctggtgcagtctggggctgaggtgaagaagcctggggcctcagtgaaggtctcctgcaaggcttctggatacaccttcaccagttatgatatcaactgggtgcgacaggccactggacaagggcttgagtggatgggatggatgatccctaacagtggtgacacaggctctgcacagaagttccagggcagagtcaccatgaccaggaacacctccataggcacagcctacatggagctgagcagcctgagatctgaggacacggccgtttattactgtgcgagaggcggatattgtaatagtaccagttgctactactactacatggacgtctggggcaaagggaccacggtcaccgtctcctcaggcggcggtggatctggaggcggaggctctggaggcggcggctccgacatccagatgacccagtctccatcctcactgtctgcatctgtaggagacagagtcaccatcacttgtcgggcgagtcagggtattagcagctggttagcctggtatcagcagaaaccagagaaagcccctaagtccctgatctatgctgcatccagtttacagggtggggtcccatcaaggttcagcggcagtggatctgggacagatttcactctcaccatcagcagcctgcagcctgaagattttgcaacttattactgccaacagtatgatagttacccgtacacttttggccaggggaccaagctggagatcaaaaccacgacgccagcgccgcggccaccaacaccggcgcccaccatcgcgtcgcagcccctgtccctgcgcccagaggcgtgccggccagcggcggggggcgcagtgcacacgagggggctggacttcgcctgtgatatctacatctgggcgcccttggccgggacttgtggggtccttctcctgtcactggttatcaccctttactgccggagggaccagaggctgccccccgatgcccacaagccccctgggggaggcagtttccggacccccatccaagaggagcaggccgacgcccactccaccctggccaagatcagagtgaagttcagcaggagcgcagacgcccccgcgtaccagcagggccagaaccagctctataacgagctcaatctaggacgaagagaggagtacgatgttttggacaagagacgtggccgggaccctgagatggggggaaagccgagaaggaagaaccctcaggaaggcctgtacaatgaactgcagaaagataagatggcggaggcctacagtgagattgggatgaaaggcgagcgccggaggggcaaggggcacgatggcctttaccagggtctcagtacagccaccaaggacacctacgacgcccttcacatgcaggccctgccccctcgcggctctggcgagggaaggggttccctgcttacttgcggcgacgtcgaagagaatcccggtccgatggccctcccagtaactgccctccttttgcccctcgcactccttcttcatgccgctcgccccaactgggtcaacgtgattagcgatttgaagaaaatcgaggaccttatacagtctatgcatattgacgctacactgtatactgagagtgatgtacacccgtcctgtaaggtaacggccatgaaatgctttcttctggagctccaggtcatcagcttggagtctggggacgcaagcatccacgatacggttgaaaacctcatcatccttgcgaacaactctctctcatctaatggaaacgttacagagagtgggtgtaaggagtgcgaagagttggaagaaaaaaacatcaaagaatttcttcaatccttcgttcacatagtgcaaatgttcattaacacgtccactaccacacccgccccgaggccacctacgccggcaccgactatcgccagtcaacccctctctctgcgccccgaggcttgccggcctgcggctggtggggcggtccacacccggggcctggattttgcgtgcgatatatacatctgggcacctcttgccggcacctgcggagtgctgcttctctcactcgttattacgctgtactgctaa

SEQ ID NO: 2008 - DNA, 2139 bp, synthetic construct
  misc_feature 1..2139: note = Synthetic
  source 1..2139: mol_type = other DNA
atggccttaccagtgaccgccttgctcctgccgctggccttgctgctccacgccgccaggccgcaggtgcagctggtgcagtctggggctgaggtgaagaagcctggggcctcagtgaaggtctcctgcaaggcttctggatacaccttcaccagttatgatatcaactgggtgcgacaggccactggacaagggcttgagtggatgggatggatgaaccctaatagtggtaacacagtctatgcacagaagttccagggcagagtcaccatgaccaggaacacctccataagcacagcctacatggagctgagcagcctgagatctgaggacacggccgtgtattactgtgcgagaggaggcgatttttggagtggttaccatgactactactactacatggacgtctggggcaaagggaccacggtcaccgtctcctcaggcggcggtggatctggaggcggaggctctggaggcggcggctccgacatccaggtgacccagtctccaaccttcctgtctgcatctgtaggagacagagtcaccatcacttgccgggccagtcagggcattagcagttatttagcctggtatcagcaaaaaccagggaaagcccctaagctcctgatctatggtgcatccactttgcaaagtggggtcccatcaaggttcagcggcagtggatctgggacagaattcactctcacaatcagcagcctgcagcctgaagattttgcaacttattactgtcaacagcttaatagttacccgtggacgttcggccaagggaccaaggtggaaatcaaaaccacgacgccagcgccgcggccaccaacaccggcgcccaccatcgcgtcgcagcccctgtccctgcgcccagaggcgtgccggccagcggcggggggcgcagtgcacacgagggggctggacttcgcctgtgatatctacatctgggcgcccttggccgggacttgtggggtccttctcctgtcactggttatcaccctttactgccggagggaccagaggctgccccccgatgcccacaagccccctgggggaggcagtttccggacccccatccaagaggagcaggccgacgcccactccaccctggccaagatcagagtgaagttcagcaggagcgcagacgcccccgcgtaccagcagggccagaaccagctctataacgagctcaatctaggacgaagagaggagtacgatgttttggacaagagacgtggccgggaccctgagatggggggaaagccgagaaggaagaaccctcaggaaggcctgtacaatgaactgcagaaagataagatggcggaggcctacagtgagattgggatgaaaggcgagcgccggaggggcaaggggcacgatggcctttaccagggtctcagtacagccaccaaggacacctacgacgcccttcacatgcaggccctgccccctcgcggctctggcgagggaaggggttccctgcttacttgcggcgacgtcgaagagaatcccggtccgatggccctcccagtaactgccctccttttgcccctcgcactccttcttcatgccgctcgccccaactgggtcaacgtgattagcgatttgaagaaaatcgaggaccttatacagtctatgcatattgacgctacactgtatactgagagtgatgtacacccgtcctgtaaggtaacggccatgaaatgctttcttctggagctccaggtcatcagcttggagtctggggacgcaagcatccacgatacggttgaaaacctcatcatccttgcgaacaactctctctcatctaatggaaacgttacagagagtgggtgtaaggagtgcgaagagttggaagaaaaaaacatcaaagaatttcttcaatccttcgttcacatagtgcaaatgttcattaacacgtccactaccacacccgccccgaggccacctacgccggcaccgactatcgccagtcaacccctctctctgcgccccgaggcttgccggcctgcggctggtggggcggtccacacccggggcctggattttgcgtgcgatatatacatctgggcacctcttgccggcacctgcggagtgctgcttctctcactcgttattacgctgtactgctaa

SEQ ID NO: 2009 - DNA, 2133 bp, synthetic construct
  misc_feature 1..2133: note = Synthetic
  source 1..2133: mol_type = other DNA
atggccttaccagtgaccgccttgctcctgccgctggccttgctgctccacgccgccaggccgcaggtgcagctgcaggagtcgggcccaggactggtgaagccttcggagaccctgtccctcacctgcactgtctctggtggctccatcagtagttactactggagctggatccggcagcccgccgggaagggactggagtggattgggcgtatctataccagtgggagcaccaactacaacccctccctcaagagtcgagtcaccatgtcagtagacacgtccaagaaccagttctccctgaagctgagctctgtgaccgccgcggacacggccgtgtattactgtgcgagagaggagtaccagctgctaccggccctctactactactactacatggacgtctggggcaaagggaccacggtcaccgtctcctcaggcggcggtggatctggaggcggaggctctggaggcggcggctcctcctatgagctgactcagccaccctcagtgtccgtgtccccaggacagacagccagcatcacctgctctggagataaattgggggataaatatgcttgctggtatcagcagaagccaggccagtcccctgtgctggtcatctatcaagatagcaagcggccctcagggatccctgagcgattctctggctccaactctgggaacacagccactctgaccatcagcgggacccaggctatggatgaggctgactattactgtcaggcgtgggacagcagcactgctgtgttcggaggaggcacccagctgaccgccctcaccacgacgccagcgccgcggccaccaacaccggcgcccaccatcgcgtcgcagcccctgtccctgcgcccagaggcgtgccggccagcggcggggggcgcagtgcacacgagggggctggacttcgcctgtgatatctacatctgggcgcccttggccgggacttgtggggtccttctcctgtcactggttatcaccctttactgccggagggaccagaggctgccccccgatgcccacaagccccctgggggaggcagtttccggacccccatccaagaggagcaggccgacgcccactccaccctggccaagatcagagtgaagttcagcaggagcgcagacgcccccgcgtaccagcagggccagaaccagctctataacgagctcaatctaggacgaagagaggagtacgatgttttggacaagagacgtggccgggaccctgagatggggggaaagccgagaaggaagaaccctcaggaaggcctgtacaatgaactgcagaaagataagatggcggaggcctacagtgagattgggatgaaaggcgagcgccggaggggcaaggggcacgatggcctttaccagggtctcagtacagccaccaaggacacctacgacgcccttcacatgcaggccctgccccctcgcggctctggcgagggaaggggttccctgcttacttgcggcgacgtcgaagagaatcccggtccgatggccctcccagtaactgccctccttttgcccctcgcactccttcttcatgccgctcgccccaactgggtcaacgtgattagcgatttgaagaaaatcgaggaccttatacagtctatgcatattgacgctacactgtatactgagagtgatgtacacccgtcctgtaaggtaacggccatgaaatgctttcttctggagctccaggtcatcagcttggagtctggggacgcaagcatccacgatacggttgaaaacctcatcatccttgcgaacaactctctctcatctaatggaaacgttacagagagtgggtgtaaggagtgcgaagagttggaagaaaaaaacatcaaagaatttcttcaatccttcgttcacatagtgcaaatgttcattaacacgtccactaccacacccgccccgaggccacctacgccggcaccgactatcgccagtcaacccctctctctgcgccccgaggcttgccggcctgcggctggtggggcggtccacacccggggcctggattttgcgtgcgatatatacatctgggcacctcttgccggcacctgcggagtgctgcttctctcactcgttattacgctgtactgctaa

SEQ ID NO: 2010 - DNA, 2136 bp, synthetic construct
  misc_feature 1..2136: note = Synthetic
  source 1..2136: mol_type = other DNA
atggccttaccagtgaccgccttgctcctgccgctggccttgctgctccacgccgccaggccgcaggtgcagctggtggagtctgggggaggcgtggtccagcctgggaggtccctgagactctcctgtgcagcaactggattcaccttcagtagctatggcatgcactgggtccgccaggctccaggcaaggggctggagtggatggtagttatatggtctgatggacataataaatactatgcagactccgtgaagggccgattcaccatctccagagacaattccaagaacacgctgtatctgcaaatgaacagcctgagagccgaggacacggctgtgtattactgtgcgagggcacaactggaacgacggtacttctactacatggacgtctggggcaaagggaccacggtcaccgtctcctcaggcggcggtggatctggaggcggaggctctggaggcggcggctcccagactgtagtgacccaggaaccatcgttctcagtgtcccctggagggacagtcacactcacttgtggcttgacctctggctcagtctctactagttactaccccaactggtaccagcagaccccaggccaggctccacgcacgctcatctacagcacaaatattcgctcttctggggtccctgatcgcttctctggctccatccttgggaacaaagctgccctcaccatcacgggggcccaggcagatgatgaatctgattattactgtgtgctgtatatgggtagtggcatgtttattttcggcagtggaaccaaggtcactgtcctaaccacgacgccagcgccgcggccaccaacaccggcgcccaccatcgcgtcgcagcccctgtccctgcgcccagaggcgtgccggccagcggcggggggcgcagtgcacacgagggggctggacttcgcctgtgatatctacatctgggcgcccttggccgggacttgtggggtccttctcctgtcactggttatcaccctttactgccggagggaccagaggctgccccccgatgcccacaagccccctgggggaggcagtttccggacccccatccaagaggagcaggccgacgcccactccaccctggccaagatcagagtgaagttcagcaggagcgcagacgcccccgcgtaccagcagggccagaaccagctctataacgagctcaatctaggacgaagagaggagtacgatgttttggacaagagacgtggccgggaccctgagatggggggaaagccgagaaggaagaaccctcaggaaggcctgtacaatgaactgcagaaagataagatggcggaggcctacagtgagattgggatgaaaggcgagcgccggaggggcaaggggcacgatggcctttaccagggtctcagtacagccaccaaggacacctacgacgcccttcacatgcaggccctgccccctcgcggctctggcgagggaaggggttccctgcttacttgcggcgacgtcgaagagaatcccggtccgatggccctcccagtaactgccctccttttgcccctcgcactccttcttcatgccgctcgccccaactgggtcaacgtgattagcgatttgaagaaaatcgaggaccttatacagtctatgcatattgacgctacactgtatactgagagtgatgtacacccgtcctgtaaggtaacggccatgaaatgctttcttctggagctccaggtcatcagcttggagtctggggacgcaagcatccacgatacggttgaaaacctcatcatccttgcgaacaactctctctcatctaatggaaacgttacagagagtgggtgtaaggagtgcgaagagttggaagaaaaaaacatcaaagaatttcttcaatccttcgttcacatagtgcaaatgttcattaacacgtccactaccacacccgccccgaggccacctacgccggcaccgactatcgccagtcaacccctctctctgcgccccgaggcttgccggcctgcggctggtggggcggtccacacccggggcctggattttgcgtgcgatatatacatctgggcacctcttgccggcacctgcggagtgctgcttctctcactcgttattacgctgtactgctaa

SEQ ID NO: 2011 - DNA, 2136 bp, synthetic construct
  misc_feature 1..2136: note = Synthetic
  source 1..2136: mol_type = other DNA
atggccttaccagtgaccgccttgctcctgccgctggccttgctgctccacgccgccaggccgcaggtgcagctggtggagtctgggggaggcgtggtccagcctgggaggtccctgagactctcctgtgcagcgtctggattcaccttcactagttatgacatgcactgggtccgccaggctccaggcaaggggctggagtgggtgacaattatatggtttgatggaagtaataaatactatgcagactccgtgaagggccgattcaccatctccagagacaattccaagaacacgctgtatctgcaaatgaacagcctgagcgccgaggacacggctgtgtattactgtgcgagaggagacaactggaacgaccggtactactactactactacatggacgtctggggcaaagggaccacggtcaccgtctcctcaggcggcggtggatctggaggcggaggctctggaggcggcggctccgaaattgtgctgactcagtctccagactttcagtctgtgactccaaaggagaaagtcaccatcacctgccgggccagtcagagcattggtagtagcttacactggtaccagcagaaaccagatcagtctccaatgctcctcatcaagtttgcttcccagtccatctcaggggtcccctcgaggttcagtggcagtggatctgggacagatttcaccctcaccatcaatagcctggaagctgaagatgctgcagcgtattactgtcatcagagtagtagtttaccgtggacgttcggccaagggaccaaggtggaaatcaaaaccacgacgccagcgccgcggccaccaacaccggcgcccaccatcgcgtcgcagcccctgtccctgcgcccagaggcgtgccggccagcggcggggggcgcagtgcacacgagggggctggacttcgcctgtgatatctacatctgggcgcccttggccgggacttgtggggtccttctcctgtcactggttatcaccctttactgccggagggaccagaggctgccccccgatgcccacaagccccctgggggaggcagtttccggacccccatccaagaggagcaggccgacgcccactccaccctggccaagatcagagtgaagttcagcaggagcgcagacgcccccgcgtaccagcagggccagaaccagctctataacgagctcaatctaggacgaagagaggagtacgatgttttggacaagagacgtggccgggaccctgagatggggggaaagccgagaaggaagaaccctcaggaaggcctgtacaatgaactgcagaaagataagatggcggaggcctacagtgagattgggatgaaaggcgagcgccggaggggcaaggggcacgatggcctttaccagggtctcagtacagccaccaaggacacctacgacgcccttcacatgcaggccctgccccctcgcggctctggcgagggaaggggttccctgcttacttgcggcgacgtcgaagagaatcccggtccgatggccctcccagtaactgccctccttttgcccctcgcactccttcttcatgccgctcgccccaactgggtcaacgtgattagcgatttgaagaaaatcgaggaccttatacagtctatgcatattgacgctacactgtatactgagagtgatgtacacccgtcctgtaaggtaacggccatgaaatgctttcttctggagctccaggtcatcagcttggagtctggggacgcaagcatccacgatacggttgaaaacctcatcatccttgcgaacaactctctctcatctaatggaaacgttacagagagtgggtgtaaggagtgcgaagagttggaagaaaaaaacatcaaagaatttcttcaatccttcgttcacatagtgcaaatgttcattaacacgtccactaccacacccgccccgaggccacctacgccggcaccgactatcgccagtcaacccctctctctgcgccccgaggcttgccggcctgcggctggtggggcggtccacacccggggcctggattttgcgtgcgatatatacatctgggcacctcttgccggcacctgcggagtgctgcttctctcactcgttattacgctgtactgctaa

SEQ ID NO: 2012 - DNA, 2151 bp, synthetic construct
  misc_feature 1..2151: note = Synthetic
  source 1..2151: mol_type = other DNA
atggccttaccagtgaccgccttgctcctgccgctggccttgctgctccacgccgccaggccgcaggttcagctggtgcagtctggagctgaggtgaagaagcctggggcctcagtgaaggtctcctgcaaggcttctggttacacctttaccagctatggtatcagctgggtgcgacaggcccctggacaagggcttgagtggatggggtggatcagcgcttacaatggtcacacagactatacacagaaactccagggcagagtcaccatgaccacagacacatccacgaccacagcctacatggaactgaggagcctgagctctgccgacacggccgtgtattactgtgtgagagaagtggtacttcccaccacggactactactacttttacatggacgtctggggcaaagggaccacggtcaccgtctcctcaggcggcggtggatctggaggcggaggctctggaggcggcggctccgatattgtgatgacccagcctccactctcctcgcctgtcacccttggacagccggcctccatctcctgcaggtctagtcaaagcctcgtacacagtgatggaaacacctacttgagttggcttcagcagaggccaggccagcctccaagactcctaatttataaggtttctaaccggttctctggggtcccagacagattcagtggcagtggggcagggacagatttcacactgaaaatcagcagggtggaagctgaggatgtcggggtttattactgcacgcaagctacacaatttcctcacacttttggccaggggaccaagctggagatcaaaaccacgacgccagcgccgcggccaccaacaccggcgcccaccatcgcgtcgcagcccctgtccctgcgcccagaggcgtgccggccagcggcggggggcgcagtgcacacgagggggctggacttcgcctgtgatatctacatctgggcgcccttggccgggacttgtggggtccttctcctgtcactggttatcaccctttactgccggagggaccagaggctgccccccgatgcccacaagccccctgggggaggcagtttccggacccccatccaagaggagcaggccgacgcccactccaccctggccaagatcagagtgaagttcagcaggagcgcagacgcccccgcgtaccagcagggccagaaccagctctataacgagctcaatctaggacgaagagaggagtacgatgttttggacaagagacgtggccgggaccctgagatggggggaaagccgagaaggaagaaccctcaggaaggcctgtacaatgaactgcagaaagataagatggcggaggcctacagtgagattgggatgaaaggcgagcgccggaggggcaaggggcacgatggcctttaccagggtctcagtacagccaccaaggacacctacgacgcccttcacatgcaggccctgccccctcgcggctctggcgagggaaggggttccctgcttacttgcggcgacgtcgaagagaatcccggtccgatggccctcccagtaactgccctccttttgcccctcgcactccttcttcatgccgctcgccccaactgggtcaacgtgattagcgatttgaagaaaatcgaggaccttatacagtctatgcatattgacgctacactgtatactgagagtgatgtacacccgtcctgtaaggtaacggccatgaaatgctttcttctggagctccaggtcatcagcttggagtctggggacgcaagcatccacgatacggttgaaaacctcatcatccttgcgaacaactctctctcatctaatggaaacgttacagagagtgggtgtaaggagtgcgaagagttggaagaaaaaaacatcaaagaatttcttcaatccttcgttcacatagtgcaaatgttcattaacacgtccactaccacacccgccccgaggccacctacgccggcaccgactatcgccagtcaacccctctctctgcgccccgaggcttgccggcctgcggctggtggggcggtccacacccggggcctggattttgcgtgcgatatatacatctgggcacctcttgccggcacctgcggagtgctgcttctctcactcgttattacgctgtactgctaa

SEQ ID NO: 2013 - DNA, 2148 bp, synthetic construct
  misc_feature 1..2148: note = Synthetic
  source 1..2148: mol_type = other DNA
atggccttaccagtgaccgccttgctcctgccgctggccttgctgctccacgccgccaggccgcaggtccagctggtacagtctggggctgaggtgaagaagcctggggcctcagtgaaggtctcctgcaaggtttccggatacaccctcactgaattatccatgcactgggtgcgacaggctcctggaaaagggcttgagtggatgggaggttttgatcctgaagatggtgaaacaatctacgcacagaagttccagggcagagtcaccatgaccgaggacacatctacagacacagcctacatggagctgagcagcctgagatctgaggacacggccgtgtattactgtgcaacaggacgtattactatggttcggggagttattatcccctactactactactacatggacgtctggggcaaagggaccacggtcaccgtctcctcaggcggcggtggatctggaggcggaggctctggaggcggcggctccgacatccagatgacccagtctccatcctcactgtctgcatctgtaggagacagagtcaccatcacttgtcgggcgagtcagggtattagcagctggttagcctggtatcagcagaaaccagagaaagcccctaagtccctgatctatgctgcatccagtttgcaaagtggggtcccatcaaggttcagcggcagtggatctgggacagatttcactctcaccatcagcagcctgcagcctgaagattttgcaacttattactgccaacagtataatagttacccgtacacttttggccaggggaccaagctggagatcaaaaccacgacgccagcgccgcggccaccaacaccggcgcccaccatcgcgtcgcagcccctgtccctgcgcccagaggcgtgccggccagcggcggggggcgcagtgcacacgagggggctggacttcgcctgtgatatctacatctgggcgcccttggccgggacttgtggggtccttctcctgtcactggttatcaccctttactgccggagggaccagaggctgccccccgatgcccacaagccccctgggggaggcagtttccggacccccatccaagaggagcaggccgacgcccactccaccctggccaagatcagagtgaagttcagcaggagcgcagacgcccccgcgtaccagcagggccagaaccagctctataacgagctcaatctaggacgaagagaggagtacgatgttttggacaagagacgtggccgggaccctgagatggggggaaagccgagaaggaagaaccctcaggaaggcctgtacaatgaactgcagaaagataagatggcggaggcctacagtgagattgggatgaaaggcgagcgccggaggggcaaggggcacgatggcctttaccagggtctcagtacagccaccaaggacacctacgacgcccttcacatgcaggccctgccccctcgcggctctggcgagggaaggggttccctgcttacttgcggcgacgtcgaagagaatcccggtccgatggccctcccagtaactgccctccttttgcccctcgcactccttcttcatgccgctcgccccaactgggtcaacgtgattagcgatttgaagaaaatcgaggaccttatacagtctatgcatattgacgctacactgtatactgagagtgatgtacacccgtcctgtaaggtaacggccatgaaatgctttcttctggagctccaggtcatcagcttggagtctggggacgcaagcatccacgatacggttgaaaacctcatcatccttgcgaacaactctctctcatctaatggaaacgttacagagagtgggtgtaaggagtgcgaagagttggaagaaaaaaacatcaaagaatttcttcaatccttcgttcacatagtgcaaatgttcattaacacgtccactaccacacccgccccgaggccacctacgccggcaccgactatcgccagtcaacccctctctctgcgccccgaggcttgccggcctgcggctggtggggcggtccacacccggggcctggattttgcgtgcgatatatacatctgggcacctcttgccggcacctgcggagtgctgcttctctcactcgttattacgctgtactgctaa

SEQ ID NO: 2014 - DNA, 2142 bp, synthetic construct
  misc_feature 1..2142: note = Synthetic
  source 1..2142: mol_type = other DNA
atggccttaccagtgaccgccttgctcctgccgctggccttgctgctccacgccgccaggccgcaggttcagctggtgcagtctggaactgaggtgaagaagcctggggcctcagtgaaggtctcctgcaaggcttctggttacacctttaccaactatggtatcggctgggtgcgacaggcccctggacaagggcttgagtggatgggatggatcatcgcttacaatggttacacaaagtatgcacagattctccagggcagagtcaccatgaccacagacacatccacgaacacagcttatatggaactgaggagcctgagatctgacgacacggccgtgtattactgtgcgagacagcagctcgggggggactaccactactacatggacgtctggggcaaagggaccacggtcaccgtctcctcaggcggcggtggatctggaggcggaggctctggaggcggcggctccgatattgtgatgacccagactccactctctctgtccgtcacccctggacagccggcctccatctcctgcaagtctagtaagagcctcctgcatagtgatggaaagacctatttgtattggtacctgcagaagccaggccagcctccacagctcctgatctatgaagtttccaaccggttctctggagtgccagataggttcagtggcagcgggtcagggacagatttcacactgaaaatcagccgggtggaggctgaggatgttggggtttattactgcatgcaaagtatacaatttccgtggacgttcggccaagggaccaaggtggaaatcaagaccacgacgccagcgccgcggccaccaacaccggcgcccaccatcgcgtcgcagcccctgtccctgcgcccagaggcgtgccggccagcggcggggggcgcagtgcacacgagggggctggacttcgcctgtgatatctacatctgggcgcccttggccgggacttgtggggtccttctcctgtcactggttatcaccctttactgccggagggaccagaggctgccccccgatgcccacaagccccctgggggaggcagtttccggacccccatccaagaggagcaggccgacgcccactccaccctggccaagatcagagtgaagttcagcaggagcgcagacgcccccgcgtaccagcagggccagaaccagctctataacgagctcaatctaggacgaagagaggagtacgatgttttggacaagagacgtggccgggaccctgagatggggggaaagccgagaaggaagaaccctcaggaaggcctgtacaatgaactgcagaaagataagatggcggaggcctacagtgagattgggatgaaaggcgagcgccggaggggcaaggggcacgatggcctttaccagggtctcagtacagccaccaaggacacctacgacgcccttcacatgcaggccctgccccctcgcggctctggcgagggaaggggttccctgcttacttgcggcgacgtcgaagagaatcccggtccgatggccctcccagtaactgccctccttttgcccctcgcactccttcttcatgccgctcgccccaactgggtcaacgtgattagcgatttgaagaaaatcgaggaccttatacagtctatgcatattgacgctacactgtatactgagagtgatgtacacccgtcctgtaaggtaacggccatgaaatgctttcttctggagctccaggtcatcagcttggagtctggggacgcaagcatccacgatacggttgaaaacctcatcatccttgcgaacaactctctctcatctaatggaaacgttacagagagtgggtgtaaggagtgcgaagagttggaagaaaaaaacatcaaagaatttcttcaatccttcgttcacatagtgcaaatgttcattaacacgtccactaccacacccgccccgaggccacctacgccggcaccgactatcgccagtcaacccctctctctgcgccccgaggcttgccggcctgcggctggtggggcggtccacacccggggcctggattttgcgtgcgatatatacatctgggcacctcttgccggcacctgcggagtgctgcttctctcactcgttattacgctgtactgctaa

SEQ ID NO: 2015 - DNA, 2142 bp, synthetic construct
  misc_feature 1..2142: note = Synthetic
  source 1..2142: mol_type = other DNA
atggccttaccagtgaccgccttgctcctgccgctggccttgctgctccacgccgccaggccgcaggttcagctggtgcagtctggaactgaggtgaagaagcctggggcctcagtgaaggtctcctgcaaggcttctggttacacctttaccaactatggtatcggctgggtgcgacaggcccctggacaagggcttgagtggatgggatggatcatcgcttacaatggttacacaaagtatgcacagattctccagggcagagtcaccatgaccacggacacatccacgaacacagcctatatggaactgaggagcctgagatctgacgacacggccgtgtattactgtgcgcgacagcagctcgggggggactaccactactacatggacgtctggggcaaagggaccacggtcaccgtctcttcaggcggcggtggatctggaggcggaggctctggaggcggcggctccgatattgtgatgacccagactccactctctctgtccgtcacccctggacagccggcctccatctcctgcaagtctagtaagagcctcctgcatagtgatggaaagacctatttgtattggtacctgcagaagccaggccagcctccacagctcctgatctatgaagtttccacccggttctctggagtgccagataggttcagtggcagcgggtcagggacagatttcacactgaaaatcagccgggtggaggctgaggatgttggggtttattactgcatgcaaagtatacagtttccgtggacgttcggccaagggaccaaggtggaaatcaaaaccacgacgccagcgccgcggccaccaacaccggcgcccaccatcgcgtcgcagcccctgtccctgcgcccagaggcgtgccggccagcggcggggggcgcagtgcacacgagggggctggacttcgcctgtgatatctacatctgggcgcccttggccgggacttgtggggtccttctcctgtcactggttatcaccctttactgccggagggaccagaggctgccccccgatgcccacaagccccctgggggaggcagtttccggacccccatccaagaggagcaggccgacgcccactccaccctggccaagatcagagtgaagttcagcaggagcgcagacgcccccgcgtaccagcagggccagaaccagctctataacgagctcaatctaggacgaagagaggagtacgatgttttggacaagagacgtggccgggaccctgagatggggggaaagccgagaaggaagaaccctcaggaaggcctgtacaatgaactgcagaaagataagatggcggaggcctacagtgagattgggatgaaaggcgagcgccggaggggcaaggggcacgatggcctttaccagggtctcagtacagccaccaaggacacctacgacgcccttcacatgcaggccctgccccctcgcggctctggcgagggaaggggttccctgcttacttgcggcgacgtcgaagagaatcccggtccgatggccctcccagtaactgccctccttttgcccctcgcactccttcttcatgccgctcgccccaactgggtcaacgtgattagcgatttgaagaaaatcgaggaccttatacagtctatgcatattgacgctacactgtatactgagagtgatgtacacccgtcctgtaaggtaacggccatgaaatgctttcttctggagctccaggtcatcagcttggagtctggggacgcaagcatccacgatacggttgaaaacctcatcatccttgcgaacaactctctctcatctaatggaaacgttacagagagtgggtgtaaggagtgcgaagagttggaagaaaaaaacatcaaagaatttcttcaatccttcgttcacatagtgcaaatgttcattaacacgtccactaccacacccgccccgaggccacctacgccggcaccgactatcgccagtcaacccctctctctgcgccccgaggcttgccggcctgcggctggtggggcggtccacacccggggcctggattttgcgtgcgatatatacatctgggcacctcttgccggcacctgcggagtgctgcttctctcactcgttattacgctgtactgctaa

SEQ ID NO: 2016 - DNA, 2136 bp, synthetic construct
  misc_feature 1..2136: note = Synthetic
  source 1..2136: mol_type = other DNA
atggccttaccagtgaccgccttgctcctgccgctggccttgctgctccacgccgccaggccgcaggtgcagctggtgcagtctgggactgaggtgaagaagcctggggcctcagtgaaggtctcctgtaagacttctggatacaccttcaccagttatgatatcaactgggtgcgacaggccactggacaagggcttgagtggatgggatggatgaaccctatcagtggtgacacaggctctgcacagaagttccagggcagagtcaccatgaccaggaacacctccataggcacagcctacatggagctgagcagcctgagatctgaggacacggccgtttattactgtgcgagaggcggatattgtagtagtaccagctgctactactactacatggacgtctggggcaaagggaccacggtcaccgtctcctcaggcggcggtggatctggaggcggaggctctggaggcggcggctccgacatccagatgacccagtctccatcctcactgtctgcctctgtaggagacagagtcaccatcacttgtcgggcgagtcagggtattagcaactggttagcctggtatcagcagaaaccagagaaagcccctaagtccctgatctatgctgcatccagtttgcaaggtggggtcccatcaagattcagcggcagtggatctgggacagatttcactctcaccatcagcagcctgcagcctgaagattttgcaacttattactgccaacagtatgatagttacccgtacacttttggccaggggaccaagctggagatcaaaaccacgacgccagcgccgcggccaccaacaccggcgcccaccatcgcgtcgcagcccctgtccctgcgcccagaggcgtgccggccagcggcggggggcgcagtgcacacgagggggctggacttcgcctgtgatatctacatctgggcgcccttggccgggacttgtggggtccttctcctgtcactggttatcaccctttactgccggagggaccagaggctgccccccgatgcccacaagccccctgggggaggcagtttccggacccccatccaagaggagcaggccgacgcccactccaccctggccaagatcagagtgaagttcagcaggagcgcagacgcccccgcgtaccagcagggccagaaccagctctataacgagctcaatctaggacgaagagaggagtacgatgttttggacaagagacgtggccgggaccctgagatggggggaaagccgagaaggaagaaccctcaggaaggcctgtacaatgaactgcagaaagataagatggcggaggcctacagtgagattgggatgaaaggcgagcgccggaggggcaaggggcacgatggcctttaccagggtctcagtacagccaccaaggacacctacgacgcccttcacatgcaggccctgccccctcgcggctctggcgagggaaggggttccctgcttacttgcggcgacgtcgaagagaatcccggtccgatggccctcccagtaactgccctccttttgcccctcgcactccttcttcatgccgctcgccccaactgggtcaacgtgattagcgatttgaagaaaatcgaggaccttatacagtctatgcatattgacgctacactgtatactgagagtgatgtacacccgtcctgtaaggtaacggccatgaaatgctttcttctggagctccaggtcatcagcttggagtctggggacgcaagcatccacgatacggttgaaaacctcatcatccttgcgaacaactctctctcatctaatggaaacgttacagagagtgggtgtaaggagtgcgaagagttggaagaaaaaaacatcaaagaatttcttcaatccttcgttcacatagtgcaaatgttcattaacacgtccactaccacacccgccccgaggccacctacgccggcaccgactatcgccagtcaacccctctctctgcgccccgaggcttgccggcctgcggctggtggggcggtccacacccggggcctggattttgcgtgcgatatatacatctgggcacctcttgccggcacctgcggagtgctgcttctctcactcgttattacgctgtactgctaa

SEQ ID NO: 2017 - DNA, 2136 bp, synthetic construct
  misc_feature 1..2136: note = Synthetic
  source 1..2136: mol_type = other DNA
atggccttaccagtgaccgccttgctcctgccgctggccttgctgctccacgccgccaggccgcaggtgcagctggtgcagtctggggctgaggtgaagaagcctggggcctcagtgaaggtctcctgcaaggcttctggatacaccttcaccagttatgatatcaactgggtgcgacaggccactggacaagggcttgagtggatgggatggatgatccctaacagtggtgacacaggctctgcacagaagttccagggcagagtcaccatgaccaggaacacctccataagcacagcctacatggagctgagcagcctgagatctgaggacacggccgtttattactgtgcgagaggcggatattgtaatagtaccagttgctactactactacatggacgtctggggcaaagggaccacggtcaccgtctcctcaggcggcggtggatctggaggcggaggctctggaggcggcggctccgacatccagatgacccagtctccatcctcactgtctgcatctgtaggagacagagtcaccatcacttgtcgggcgagtcagggtattagcagctggttagcctggtatcagcagaaaccagagaaagcccctaagtccctgatctatgctgcatccagtttacaaggtggggtcccatcaaggttcagcggcagtggatctgggacagatttcactctcaccatcagcagcctgcagcctgaagattttgcaacttattactgccaacagtatgatagttacccgtacacttttggccaggggaccaagctggagatcaaaaccacgacgccagcgccgcggccaccaacaccggcgcccaccatcgcgtcgcagcccctgtccctgcgcccagaggcgtgccggccagcggcggggggcgcagtgcacacgagggggctggacttcgcctgtgatatctacatctgggcgcccttggccgggacttgtggggtccttctcctgtcactggttatcaccctttactgccggagggaccagaggctgccccccgatgcccacaagccccctgggggaggcagtttccggacccccatccaagaggagcaggccgacgcccactccaccctggccaagatcagagtgaagttcagcaggagcgcagacgcccccgcgtaccagcagggccagaaccagctctataacgagctcaatctaggacgaagagaggagtacgatgttttggacaagagacgtggccgggaccctgagatggggggaaagccgagaaggaagaaccctcaggaaggcctgtacaatgaactgcagaaagataagatggcggaggcctacagtgagattgggatgaaaggcgagcgccggaggggcaaggggcacgatggcctttaccagggtctcagtacagccaccaaggacacctacgacgcccttcacatgcaggccctgccccctcgcggctctggcgagggaaggggttccctgcttacttgcggcgacgtcgaagagaatcccggtccgatggccctcccagtaactgccctccttttgcccctcgcactccttcttcatgccgctcgccccaactgggtcaacgtgattagcgatttgaagaaaatcgaggaccttatacagtctatgcatattgacgctacactgtatactgagagtgatgtacacccgtcctgtaaggtaacggccatgaaatgctttcttctggagctccaggtcatcagcttggagtctggggacgcaagcatccacgatacggttgaaaacctcatcatccttgcgaacaactctctctcatctaatggaaacgttacagagagtgggtgtaaggagtgcgaagagttggaagaaaaaaacatcaaagaatttcttcaatccttcgttcacatagtgcaaatgttcattaacacgtccactaccacacccgccccgaggccacctacgccggcaccgactatcgccagtcaacccctctctctgcgccccgaggcttgccggcctgcggctggtggggcggtccacacccggggcctggattttgcgtgcgatatatacatctgggcacctcttgccggcacctgcggagtgctgcttctctcactcgttattacgctgtactgctaa

SEQ ID NO: 2018 - DNA, 2139 bp, synthetic construct
  misc_feature 1..2139: note = Synthetic
  source 1..2139: mol_type = other DNA
atggccttaccagtgaccgccttgctcctgccgctggccttgctgctccacgccgccaggccggaggtgcagttgttggagtctgggggaggcttggtacaacctggggggtccctgagactctcctgtgcagcctctggattcacctttagcagctatgtcatgaactgggtccgccaggctccagggaaggggctggaatgggtctcatctgttagtggtagtggtaataactcattctacgcagactccgtgaagggccggttcaccatctccagagacaattccaagaacacgctgtatctgcaaatgaacagcctgagagccgaggacacggccgtatattactgtgcgagtcgtagttccagttatctctactactactactacatggacgtctggggcaaagggaccaccgtcaccgtctcctcaggcggcggtggatctggaggcggaggctctggaggcggcggctccgaaattgtgttgacgcagtctccaggcaccctgtctttgtctccaggggaaagagccaccctctcctgcagggccagtcagagtgttagcagcagctacttagcctggtaccagcagaaacctggccaggctcccaggctcctcatctatggtgcatccagcagggccactggcatcccagacaggttcagtgacagtgggtctgggacagacttcactctcaccatcagcagactggagcctgaagattttgcagtgtattactgtcagcactatggtagctcacctccgaggatcactttcggccctgggaccaaagtggatatcaaaaccacgacgccagcgccgcggccaccaacaccggcgcccaccatcgcgtcgcagcccctgtccctgcgcccagaggcgtgccggccagcggcggggggcgcagtgcacacgagggggctggacttcgcctgtgatatctacatctgggcgcccttggccgggacttgtggggtccttctcctgtcactggttatcaccctttactgccggagggaccagaggctgccccccgatgcccacaagccccctgggggaggcagtttccggacccccatccaagaggagcaggccgacgcccactccaccctggccaagatcagagtgaagttcagcaggagcgcagacgcccccgcgtaccagcagggccagaaccagctctataacgagctcaatctaggacgaagagaggagtacgatgttttggacaagagacgtggccgggaccctgagatggggggaaagccgagaaggaagaaccctcaggaaggcctgtacaatgaactgcagaaagataagatggcggaggcctacagtgagattgggatgaaaggcgagcgccggaggggcaaggggcacgatggcctttaccagggtctcagtacagccaccaaggacacctacgacgcccttcacatgcaggccctgccccctcgcggctctggcgagggaaggggttccctgcttacttgcggcgacgtcgaagagaatcccggtccgatggccctcccagtaactgccctccttttgcccctcgcactccttcttcatgccgctcgccccaactgggtcaacgtgattagcgatttgaagaaaatcgaggaccttatacagtctatgcatattgacgctacactgtatactgagagtgatgtacacccgtcctgtaaggtaacggccatgaaatgctttcttctggagctccaggtcatcagcttggagtctggggacgcaagcatccacgatacggttgaaaacctcatcatccttgcgaacaactctctctcatctaatggaaacgttacagagagtgggtgtaaggagtgcgaagagttggaagaaaaaaacatcaaagaatttcttcaatccttcgttcacatagtgcaaatgttcattaacacgtccactaccacacccgccccgaggccacctacgccggcaccgactatcgccagtcaacccctctctctgcgccccgaggcttgccggcctgcggctggtggggcggtccacacccggggcctggattttgcgtgcgatatatacatctgggcacctcttgccggcacctgcggagtgctgcttctctcactcgttattacgctgtactgctaa

SEQ ID NO: 2019 - DNA, 2136 bp, synthetic construct
  misc_feature 1..2136: note = Synthetic
  source 1..2136: mol_type = other DNA
atggccttaccagtgaccgccttgctcctgccgctggccttgctgctccacgccgccaggccgcaagtgcagctggtggagagcggcggcggagtggtgcaacctggaagaagcctgcggctgagctgcgctgctagcggcttcaccttcagcagccacgacatgcactgggtgcggcaggcccctggcaagggcctggactgggtcgccgtgatctggagcgacggcaacaagaagtactacgtggacagcgccaagggcagattcaccatcagccgcgacaatagcaagaacaccgtgtacctgcagatgaacagcctgagagccgaggacaccgccatctactattgcgccagaggcgataattggaacgacgagcacagctactattactacatggacgtgtggggcaaaggcacaaccgtgaccgtgtcctccggcggcggcggttctggcggaggaggctccgggggcggcggaagcgagatcgtgctgacccagagccccgacttccagtctgtgacacctaaggaaaaggttacaattacctgtagagcttcccagaccatcggctcttctctgcactggtaccagcagaaacctgatcagtctccaaagctgctgatcaagcacgccagccagagcttctctggcgtccccagccggttttctggcagcggcagcggaacagattttacactgacagtgaactcactggaagccgaggatgccgccacctactactgccatcagagctccagcctcccttggaccttcggccagggcacgaaggtggaaatcaaaaccacgacgccagcgccgcggccaccaacaccggcgcccaccatcgcgtcgcagcccctgtccctgcgcccagaggcgtgccggccagcggcggggggcgcagtgcacacgagggggctggacttcgcctgtgatatctacatctgggcgcccttggccgggacttgtggggtccttctcctgtcactggttatcaccctttactgccggagggaccagaggctgccccccgatgcccacaagccccctgggggaggcagtttccggacccccatccaagaggagcaggccgacgcccactccaccctggccaagatcagagtgaagttcagcaggagcgcagacgcccccgcgtaccagcagggccagaaccagctctataacgagctcaatctaggacgaagagaggagtacgatgttttggacaagagacgtggccgggaccctgagatggggggaaagccgagaaggaagaaccctcaggaaggcctgtacaatgaactgcagaaagataagatggcggaggcctacagtgagattgggatgaaaggcgagcgccggaggggcaaggggcacgatggcctttaccagggtctcagtacagccaccaaggacacctacgacgcccttcacatgcaggccctgccccctcgcggctctggcgagggaaggggttccctgcttacttgcggcgacgtcgaagagaatcccggtccgatggccctcccagtaactgccctccttttgcccctcgcactccttcttcatgccgctcgccccaactgggtcaacgtgattagcgatttgaagaaaatcgaggaccttatacagtctatgcatattgacgctacactgtatactgagagtgatgtacacccgtcctgtaaggtaacggccatgaaatgctttcttctggagctccaggtcatcagcttggagtctggggacgcaagcatccacgatacggttgaaaacctcatcatccttgcgaacaactctctctcatctaatggaaacgttacagagagtgggtgtaaggagtgcgaagagttggaagaaaaaaacatcaaagaatttcttcaatccttcgttcacatagtgcaaatgttcattaacacgtccactaccacacccgccccgaggccacctacgccggcaccgactatcgccagtcaacccctctctctgcgccccgaggcttgccggcctgcggctggtggggcggtccacacccggggcctggattttgcgtgcgatatatacatctgggcacctcttgccggcacctgcggagtgctgcttctctcactcgttattacgctgtactgctaa

SEQ ID NO: 2020 - DNA, 2136 bp, synthetic construct
  misc_feature 1..2136: note = Synthetic
  source 1..2136: mol_type = other DNA
atggccttaccagtgaccgccttgctcctgccgctggccttgctgctccacgccgccaggccgcaagtgcagctggtggaaagcggcggcggagtggtgcaacctggcagatctctgcggctgtcttgtgccgcctctggatttacattcagctctcatgatatgcactgggtgcggcaggcccctggcaaaggcctggactgggtcgccgtgatctggagcgacggcaacaacaagtactacgccgacagcgccaagggaagattcaccatcagccgggacaattctaaaaacaccgtgtacctgcagatgaacagcctgagagctgaggacaccgccatctactattgcgccagaggagataattggaacgacgagcacagctactactactatatggacgtgtggggcaagggcacaacagtgaccgtgtcctccggcggcggaggtagcggcggaggcggcagcggcggcggcggctccgagatcgtgctgacacagtccccagattttcagagcgtgacccccaaggaaaaggtgacaatcacctgcagagccagccagaccatcggcagcagcctgcactggtaccagcagaaacccgatcagtctcctaagctgctgatcaagcacgccagccagagcttcagcggcgttcccagcaggttcagcggaagcggcagcggcaccgacttcaccctgaccgtgaactctctcgaggccgaggacgccgctacatactactgccaccagagcagctccctgccttggaccttcggccagggcaccaaggtcgaaattaagaccacgacgccagcgccgcggccaccaacaccggcgcccaccatcgcgtcgcagcccctgtccctgcgcccagaggcgtgccggccagcggcggggggcgcagtgcacacgagggggctggacttcgcctgtgatatctacatctgggcgcccttggccgggacttgtggggtccttctcctgtcactggttatcaccctttactgccggagggaccagaggctgccccccgatgcccacaagccccctgggggaggcagtttccggacccccatccaagaggagcaggccgacgcccactccaccctggccaagatcagagtgaagttcagcaggagcgcagacgcccccgcgtaccagcagggccagaaccagctctataacgagctcaatctaggacgaagagaggagtacgatgttttggacaagagacgtggccgggaccctgagatggggggaaagccgagaaggaagaaccctcaggaaggcctgtacaatgaactgcagaaagataagatggcggaggcctacagtgagattgggatgaaaggcgagcgccggaggggcaaggggcacgatggcctttaccagggtctcagtacagccaccaaggacacctacgacgcccttcacatgcaggccctgccccctcgcggctctggcgagggaaggggttccctgcttacttgcggcgacgtcgaagagaatcccggtccgatggccctcccagtaactgccctccttttgcccctcgcactccttcttcatgccgctcgccccaactgggtcaacgtgattagcgatttgaagaaaatcgaggaccttatacagtctatgcatattgacgctacactgtatactgagagtgatgtacacccgtcctgtaaggtaacggccatgaaatgctttcttctggagctccaggtcatcagcttggagtctggggacgcaagcatccacgatacggttgaaaacctcatcatccttgcgaacaactctctctcatctaatggaaacgttacagagagtgggtgtaaggagtgcgaagagttggaagaaaaaaacatcaaagaatttcttcaatccttcgttcacatagtgcaaatgttcattaacacgtccactaccacacccgccccgaggccacctacgccggcaccgactatcgccagtcaacccctctctctgcgccccgaggcttgccggcctgcggctggtggggcggtccacacccggggcctggattttgcgtgcgatatatacatctgggcacctcttgccggcacctgcggagtgctgcttctctcactcgttattacgctgtactgctaa

SEQ ID NO: 2021 - DNA, 2133 bp, synthetic construct
  misc_feature 1..2133: note = Synthetic
  source 1..2133: mol_type = other DNA
atggccttaccagtgaccgccttgctcctgccgctggccttgctgctccacgccgccaggccgcaactgcagctggtgcagagcggagccgaggtgaagaagcctggcgctagcgttaaggtgtcctgcaaggcctccggctacacctttaccaactacggcatctcctggctgcgccaggccccaggccagggcctggagtggatgggctggatctccggatacaacgacaacacccactacgcccagaaattccagggtagagtgactatgaccaccgataccagcacaacaacagcctacatggaactgagaaacctgcggagcgacgacaccgccgtgtactactgcgcccgggacggcattgccgctagacctgtgtactactattacatggacgtgtggggcaagggcaccaccgtgacagtgtcttctggcggcggcggcagcggcggcggaggatctggcggcggaggatctgatatccagatgacccagagccccagcagcctgagcgccagcgtgggcgaccgggtcacaatcacctgcagagccagccagagcatcagcaattacctgaactggtaccaccagaagcccggcaaagcccctaagctgctgatctacgctgcttctagcctcgagagcggcgtgcctagcagattcagcggcagcggcagcggaacagatttcaccctgacaatcagctctctgcaacctgaggacttcgccacatactattgtcagcagtcctacagcaatcctctgaccttcggcggcggcacaaaggtggaatctaagaccacgacgccagcgccgcggccaccaacaccggcgcccaccatcgcgtcgcagcccctgtccctgcgcccagaggcgtgccggccagcggcggggggcgcagtgcacacgagggggctggacttcgcctgtgatatctacatctgggcgcccttggccgggacttgtggggtccttctcctgtcactggttatcaccctttactgccggagggaccagaggctgccccccgatgcccacaagccccctgggggaggcagtttccggacccccatccaagaggagcaggccgacgcccactccaccctggccaagatcagagtgaagttcagcaggagcgcagacgcccccgcgtaccagcagggccagaaccagctctataacgagctcaatctaggacgaagagaggagtacgatgttttggacaagagacgtggccgggaccctgagatggggggaaagccgagaaggaagaaccctcaggaaggcctgtacaatgaactgcagaaagataagatggcggaggcctacagtgagattgggatgaaaggcgagcgccggaggggcaaggggcacgatggcctttaccagggtctcagtacagccaccaaggacacctacgacgcccttcacatgcaggccctgccccctcgcggctctggcgagggaaggggttccctgcttacttgcggcgacgtcgaagagaatcccggtccgatggccctcccagtaactgccctccttttgcccctcgcactccttcttcatgccgctcgccccaactgggtcaacgtgattagcgatttgaagaaaatcgaggaccttatacagtctatgcatattgacgctacactgtatactgagagtgatgtacacccgtcctgtaaggtaacggccatgaaatgctttcttctggagctccaggtcatcagcttggagtctggggacgcaagcatccacgatacggttgaaaacctcatcatccttgcgaacaactctctctcatctaatggaaacgttacagagagtgggtgtaaggagtgcgaagagttggaagaaaaaaacatcaaagaatttcttcaatccttcgttcacatagtgcaaatgttcattaacacgtccactaccacacccgccccgaggccacctacgccggcaccgactatcgccagtcaacccctctctctgcgccccgaggcttgccggcctgcggctggtggggcggtccacacccggggcctggattttgcgtgcgatatatacatctgggcacctcttgccggcacctgcggagtgctgcttctctcactcgttattacgctgtactgctaa

SEQ ID NO: 2022 - DNA, 2136 bp, synthetic construct
  misc_feature 1..2136: note = Synthetic
  source 1..2136: mol_type = other DNA
atggccttaccagtgaccgccttgctcctgccgctggccttgctgctccacgccgccaggccgcaagtgcagctggtggagagcgggggaggtgtcgtgcagcctggaagaagcctcagactgtcttgtgtggccagcggctttaccttcagctctaatgacatctactgggtgcggcaggcccctggcaagggcctggaatgggtcgctgtgatctggtacgacggcagcaacaaatactacgccgattctgtgaagggcagattcaccatcagcagagataattctaagaacaccctgtacctgcagatgaacagcctgagagccgaggataccgccgtgtactattgcgccaggggcgacaactggaacgacgagcaccattaccactactacatggacgtgtggggcaaaggcaccaccgtgaccgtgtccagcggcggcggaggctctggaggaggcggcagcggcggcggcggctccgagattgttctgacccagagccctgatttccagagcgtgacccccaaggaaaaggtgacaatcacctgccgggccagccaaagcatcggctccagcctgcactggtatcagcagaagcccgaccagtccccaaagctgctgatcaaattcgcctctcagtcattcagcggcgtgccttcccggttcagcggaagcggcagcggcacagactttaccctgacaatccacagcctggaagccgaggacgccgctacatactactgccaccagagcggcagcctgccctggacattcggccagggcacgaaggtggagatcaagaccacgacgccagcgccgcggccaccaacaccggcgcccaccatcgcgtcgcagcccctgtccctgcgcccagaggcgtgccggccagcggcggggggcgcagtgcacacgagggggctggacttcgcctgtgatatctacatctgggcgcccttggccgggacttgtggggtccttctcctgtcactggttatcaccctttactgccggagggaccagaggctgccccccgatgcccacaagccccctgggggaggcagtttccggacccccatccaagaggagcaggccgacgcccactccaccctggccaagatcagagtgaagttcagcaggagcgcagacgcccccgcgtaccagcagggccagaaccagctctataacgagctcaatctaggacgaagagaggagtacgatgttttggacaagagacgtggccgggaccctgagatggggggaaagccgagaaggaagaaccctcaggaaggcctgtacaatgaactgcagaaagataagatggcggaggcctacagtgagattgggatgaaaggcgagcgccggaggggcaaggggcacgatggcctttaccagggtctcagtacagccaccaaggacacctacgacgcccttcacatgcaggccctgccccctcgcggctctggcgagggaaggggttccctgcttacttgcggcgacgtcgaagagaatcccggtccgatggccctcccagtaactgccctccttttgcccctcgcactccttcttcatgccgctcgccccaactgggtcaacgtgattagcgatttgaagaaaatcgaggaccttatacagtctatgcatattgacgctacactgtatactgagagtgatgtacacccgtcctgtaaggtaacggccatgaaatgctttcttctggagctccaggtcatcagcttggagtctggggacgcaagcatccacgatacggttgaaaacctcatcatccttgcgaacaactctctctcatctaatggaaacgttacagagagtgggtgtaaggagtgcgaagagttggaagaaaaaaacatcaaagaatttcttcaatccttcgttcacatagtgcaaatgttcattaacacgtccactaccacacccgccccgaggccacctacgccggcaccgactatcgccagtcaacccctctctctgcgccccgaggcttgccggcctgcggctggtggggcggtccacacccggggcctggattttgcgtgcgatatatacatctgggcacctcttgccggcacctgcggagtgctgcttctctcactcgttattacgctgtactgctaa

SEQ ID NO: 2023 - DNA, 2124 bp, synthetic construct
  misc_feature 1..2124: note = Synthetic
  source 1..2124: mol_type = other DNA
atggccttaccagtgaccgccttgctcctgccgctggccttgctgctccacgccgccaggccgcaagtgcagctggtggaaagcggcggcggtgttgtgcaacctggcagaagcctgcggctgtcatgcgccgccagcggcttcaccttcagctcttacggcatgcactgggtgcggcaggcccctggaaagggactggaatgggtcgccgtgatcagctacgacggctccaacaagtactacgccgacagcgtgaaaggcagattcaccatctctagggacaacagcaagaccaccctctacctgcagatgaacagcctgagagccgaggacaccgccgtgtactattgtgccagagatcactactactactacatggacgtgtggggcaagggcaccaccgtgaccgtgtcttctggcggcggaggcagcggcggaggcggcagcggcggcggcggctcccagaccgtggtgactcaggagcccagcttcagcgtcagccccggcggaacagtgaccctgacatgcggcctgagcagcggcagcgtgtccaccagctactatcctagctggtaccagcagacaccaggccaggctcctagaaccctgatctacagcaccaacatccggagcagcggcgtgcctgatagatttagcggctctatcctgggaaataaagccgctctgaccattacaggcgcccaggctgatgacgagagcgactactactgcgtgctgtacatgggctctgatatcgtggttttcggcggcggcacaaagctgacagtgctgaccacgacgccagcgccgcggccaccaacaccggcgcccaccatcgcgtcgcagcccctgtccctgcgcccagaggcgtgccggccagcggcggggggcgcagtgcacacgagggggctggacttcgcctgtgatatctacatctgggcgcccttggccgggacttgtggggtccttctcctgtcactggttatcaccctttactgccggagggaccagaggctgccccccgatgcccacaagccccctgggggaggcagtttccggacccccatccaagaggagcaggccgacgcccactccaccctggccaagatcagagtgaagttcagcaggagcgcagacgcccccgcgtaccagcagggccagaaccagctctataacgagctcaatctaggacgaagagaggagtacgatgttttggacaagagacgtggccgggaccctgagatggggggaaagccgagaaggaagaaccctcaggaaggcctgtacaatgaactgcagaaagataagatggcggaggcctacagtgagattgggatgaaaggcgagcgccggaggggcaaggggcacgatggcctttaccagggtctcagtacagccaccaaggacacctacgacgcccttcacatgcaggccctgccccctcgcggctctggcgagggaaggggttccctgcttacttgcggcgacgtcgaagagaatcccggtccgatggccctcccagtaactgccctccttttgcccctcgcactccttcttcatgccgctcgccccaactgggtcaacgtgattagcgatttgaagaaaatcgaggaccttatacagtctatgcatattgacgctacactgtatactgagagtgatgtacacccgtcctgtaaggtaacggccatgaaatgctttcttctggagctccaggtcatcagcttggagtctggggacgcaagcatccacgatacggttgaaaacctcatcatccttgcgaacaactctctctcatctaatggaaacgttacagagagtgggtgtaaggagtgcgaagagttggaagaaaaaaacatcaaagaatttcttcaatccttcgttcacatagtgcaaatgttcattaacacgtccactaccacacccgccccgaggccacctacgccggcaccgactatcgccagtcaacccctctctctgcgccccgaggcttgccggcctgcggctggtggggcggtccacacccggggcctggattttgcgtgcgatatatacatctgggcacctcttgccggcacctgcggagtgctgcttctctcactcgttattacgctgtactgctaa

SEQ ID NO: 2024 - DNA, 2130 bp, synthetic construct
  misc_feature 1..2130: note = Synthetic
  source 1..2130: mol_type = other DNA
atggccttaccagtgaccgccttgctcctgccgctggccttgctgctccacgccgccaggccgcaactgcagctgcaggagagcggccctggactggtgaagcccagcgagacactgagcctgacatgcaccgtgtccggaggctctatcagcagcagcagctactactggggatggattagacagccccccggcaagggcctggaatggatcggcagcctgtactacagcggcagcacctactacaaccccagcctgaagtctagagtgaccatcagcgtggacaccagcaagaaccagttcagcctgaaactgagctctgtcacagccgccgataccgccgtgtactactgcgccgctgtgcagctggaaaggcggggctacttctacatggacgtgtggggcaaaggcaccaccgtgacagtgtctagcggcggcggcggaagcggcggcggtggcagtggcggcggcggctctgagatcgtgctgacacagtcccctgctaccctgagcctgagccctggcgagcgggccaccctgagctgcagagccagccagagcgtgtccagctactttgcctggtatcagcagaagcctggccaggccccacggctgctgatctacgacgcctctaatagagccacaggcatcccagctagattcagcggctccggctccggaaccgatttcaccctgaccatctctagcctcgagcctgaggacttcgccgtttactattgtcagcaaagaagcaactggcctctgacatttggcggaggcacaaaggtggaaatcaagaccacgacgccagcgccgcggccaccaacaccggcgcccaccatcgcgtcgcagcccctgtccctgcgcccagaggcgtgccggccagcggcggggggcgcagtgcacacgagggggctggacttcgcctgtgatatctacatctgggcgcccttggccgggacttgtggggtccttctcctgtcactggttatcaccctttactgccggagggaccagaggctgccccccgatgcccacaagccccctgggggaggcagtttccggacccccatccaagaggagcaggccgacgcccactccaccctggccaagatcagagtgaagttcagcaggagcgcagacgcccccgcgtaccagcagggccagaaccagctctataacgagctcaatctaggacgaagagaggagtacgatgttttggacaagagacgtggccgggaccctgagatggggggaaagccgagaaggaagaaccctcaggaaggcctgtacaatgaactgcagaaagataagatggcggaggcctacagtgagattgggatgaaaggcgagcgccggaggggcaaggggcacgatggcctttaccagggtctcagtacagccaccaaggacacctacgacgcccttcacatgcaggccctgccccctcgcggctctggcgagggaaggggttccctgcttacttgcggcgacgtcgaagagaatcccggtccgatggccctcccagtaactgccctccttttgcccctcgcactccttcttcatgccgctcgccccaactgggtcaacgtgattagcgatttgaagaaaatcgaggaccttatacagtctatgcatattgacgctacactgtatactgagagtgatgtacacccgtcctgtaaggtaacggccatgaaatgctttcttctggagctccaggtcatcagcttggagtctggggacgcaagcatccacgatacggttgaaaacctcatcatccttgcgaacaactctctctcatctaatggaaacgttacagagagtgggtgtaaggagtgcgaagagttggaagaaaaaaacatcaaagaatttcttcaatccttcgttcacatagtgcaaatgttcattaacacgtccactaccacacccgccccgaggccacctacgccggcaccgactatcgccagtcaacccctctctctgcgccccgaggcttgccggcctgcggctggtggggcggtccacacccggggcctggattttgcgtgcgatatatacatctgggcacctcttgccggcacctgcggagtgctgcttctctcactcgttattacgctgtactgctaa

SEQ ID NO: 2025 - DNA, 2136 bp, synthetic construct
  misc_feature 1..2136: note = Synthetic
  source 1..2136: mol_type = other DNA
atggccttaccagtgaccgccttgctcctgccgctggccttgctgctccacgccgccaggccgcaagtgcaactggtggaaagcggcggcggcgttgtgcagcctggcagaagcctgcggctgtcatgcgccgccagcggttttaccttctctaattacggcatgcactgggtgcggcaggctcccggcaaaggcctggaatggatggccgtgatctggtccgatggccacaacaagtactacgccgatagcgtgaaaggcagattcaccattagcagagataattctaagaacaccctgtacctgcagatgaacagcctgcgcgccgaggacaccgccgtgtactattgtgccagagcccagctggagcggagatacttctactatatggacgtgtggggcaagggcaccaccgtgacagtgtctagcggcggaggcggctctggcggcggcggctctggaggcggaggaagccagaccgtcgtgacccaggagcctagcttcagcgtgtccccaggcggaaccgtcacactgacatgcggcctcacaagcggcagcgtgtccaccagctactaccccaactggtaccagcagacacctggacaggcccctagaaccctgatctacagcaccaacatccggagcagcggagtgcccgacagattttctggcagcatcctgggcaacaaggccgctctgaccatcaccggcgctcaggccgacgacgagagcgactactactgcgtgctgtacatgggcagcggcatgttcatcttcggcagcggcacaaaggtgacagtgctgaccacgacgccagcgccgcggccaccaacaccggcgcccaccatcgcgtcgcagcccctgtccctgcgcccagaggcgtgccggccagcggcggggggcgcagtgcacacgagggggctggacttcgcctgtgatatctacatctgggcgcccttggccgggacttgtggggtccttctcctgtcactggttatcaccctttactgccggagggaccagaggctgccccccgatgcccacaagccccctgggggaggcagtttccggacccccatccaagaggagcaggccgacgcccactccaccctggccaagatcagagtgaagttcagcaggagcgcagacgcccccgcgtaccagcagggccagaaccagctctataacgagctcaatctaggacgaagagaggagtacgatgttttggacaagagacgtggccgggaccctgagatggggggaaagccgagaaggaagaaccctcaggaaggcctgtacaatgaactgcagaaagataagatggcggaggcctacagtgagattgggatgaaaggcgagcgccggaggggcaaggggcacgatggcctttaccagggtctcagtacagccaccaaggacacctacgacgcccttcacatgcaggccctgccccctcgcggctctggcgagggaaggggttccctgcttacttgcggcgacgtcgaagagaatcccggtccgatggccctcccagtaactgccctccttttgcccctcgcactccttcttcatgccgctcgccccaactgggtcaacgtgattagcgatttgaagaaaatcgaggaccttatacagtctatgcatattgacgctacactgtatactgagagtgatgtacacccgtcctgtaaggtaacggccatgaaatgctttcttctggagctccaggtcatcagcttggagtctggggacgcaagcatccacgatacggttgaaaacctcatcatccttgcgaacaactctctctcatctaatggaaacgttacagagagtgggtgtaaggagtgcgaagagttggaagaaaaaaacatcaaagaatttcttcaatccttcgttcacatagtgcaaatgttcattaacacgtccactaccacacccgccccgaggccacctacgccggcaccgactatcgccagtcaacccctctctctgcgccccgaggcttgccggcctgcggctggtggggcggtccacacccggggcctggattttgcgtgcgatatatacatctgggcacctcttgccggcacctgcggagtgctgcttctctcactcgttattacgctgtactgctaa

SEQ ID NO: 2026 - DNA, 2136 bp, synthetic construct
  misc_feature 1..2136: note = Synthetic
  source 1..2136: mol_type = other DNA
atggccttaccagtgaccgccttgctcctgccgctggccttgctgctccacgccgccaggccgcaggttcagctggtgcagagcggagccgaggtgaaaaagcccggcgcaagcgtgaaggtgtcttgcaaggcctccggatataccttcaccagctacgatatcaactgggtgcggcaggccacaggccagggtctcgaatggatgggctggatgatccccaattctggcgacacaggcagcgcccaaaagttccagggcagagtgacaatgaccagaaacaccagcatcggaacagcctacatggaactgagctccctgagaagcgaggataccgccgtgtactattgtgccagaggcggctactgcaacagcacctcctgctactactactacatggacgtgtggggcaaaggcacaaccgtcaccgtgagctctggcggcggcggcagcggaggcggcggaagcggcggaggcggaagcgacatccagatgacacagagccctagcagcctgtctgcttccgtgggcgatagagtgacaatcacctgccgggcctcccagggcatcagctcctggctggcctggtaccagcagaagcctgagaaggcccctaagagcctgatctacgccgcttctagcctgcagggaggcgtgccaagtcggttcagcggcagcggcagcggcacagacttcaccctgaccatttcttctctgcaacctgaggacttcgccacctactactgtcagcaatacgacagctacccctacacctttggccagggcaccaagctggaaatcaagaccacgacgccagcgccgcggccaccaacaccggcgcccaccatcgcgtcgcagcccctgtccctgcgcccagaggcgtgccggccagcggcggggggcgcagtgcacacgagggggctggacttcgcctgtgatatctacatctgggcgcccttggccgggacttgtggggtccttctcctgtcactggttatcaccctttactgccggagggaccagaggctgccccccgatgcccacaagccccctgggggaggcagtttccggacccccatccaagaggagcaggccgacgcccactccaccctggccaagatcagagtgaagttcagcaggagcgcagacgcccccgcgtaccagcagggccagaaccagctctataacgagctcaatctaggacgaagagaggagtacgatgttttggacaagagacgtggccgggaccctgagatggggggaaagccgagaaggaagaaccctcaggaaggcctgtacaatgaactgcagaaagataagatggcggaggcctacagtgagattgggatgaaaggcgagcgccggaggggcaaggggcacgatggcctttaccagggtctcagtacagccaccaaggacacctacgacgcccttcacatgcaggccctgccccctcgcggctctggcgagggaaggggttccctgcttacttgcggcgacgtcgaagagaatcccggtccgatggccctcccagtaactgccctccttttgcccctcgcactccttcttcatgccgctcgccccaactgggtcaacgtgattagcgatttgaagaaaatcgaggaccttatacagtctatgcatattgacgctacactgtatactgagagtgatgtacacccgtcctgtaaggtaacggccatgaaatgctttcttctggagctccaggtcatcagcttggagtctggggacgcaagcatccacgatacggttgaaaacctcatcatccttgcgaacaactctctctcatctaatggaaacgttacagagagtgggtgtaaggagtgcgaagagttggaagaaaaaaacatcaaagaatttcttcaatccttcgttcacatagtgcaaatgttcattaacacgtccactaccacacccgccccgaggccacctacgccggcaccgactatcgccagtcaacccctctctctgcgccccgaggcttgccggcctgcggctggtggggcggtccacacccggggcctggattttgcgtgcgatatatacatctgggcacctcttgccggcacctgcggagtgctgcttctctcactcgttattacgctgtactgctaa

SEQ ID NO: 2027 - DNA, 2139 bp, synthetic construct
  misc_feature 1..2139: note = Synthetic
  source 1..2139: mol_type = other DNA
atggccttaccagtgaccgccttgctcctgccgctggccttgctgctccacgccgccaggccgcaggttcaactggtgcagagcggcgccgaggtgaagaagcctggcgccagcgtgaaagtgtcctgcaaggccagcggatacacgtttaccagctacgacatcaactgggtcagacaggccaccggccagggcctggaatggatgggatggatgaaccccaacagcggcaacaccgtgtacgcccagaaattccagggcagagtgaccatgacacggaacaccagcatcagcaccgcctacatggaactgagctctctgagatccgaggatacagccgtgtactactgcgccagaggcggagatttctggagcggctaccacgactactactactacatggacgtgtggggcaagggcaccaccgtgaccgtgtcttctggcggcggcggctccggcggaggcggcagcggaggaggcggctctgatatccaggtcacacagagccctacctttctgagcgcttctgtgggcgaccgggtgaccatcacatgccgggccagccagggtattagcagctacctggcttggtaccagcagaagcccggcaaagcccctaagctgctgatctacggcgcttctaccctgcagtccggcgtgcccagcagattcagcggcagcggaagcggaacagagttcaccctgacaatctccagcctccaacctgaggacttcgccacatactattgtcagcaactgaatagctatccttggacattcggccagggcaccaaggtggaaatcaagaccacgacgccagcgccgcggccaccaacaccggcgcccaccatcgcgtcgcagcccctgtccctgcgcccagaggcgtgccggccagcggcggggggcgcagtgcacacgagggggctggacttcgcctgtgatatctacatctgggcgcccttggccgggacttgtggggtccttctcctgtcactggttatcaccctttactgccggagggaccagaggctgccccccgatgcccacaagccccctgggggaggcagtttccggacccccatccaagaggagcaggccgacgcccactccaccctggccaagatcagagtgaagttcagcaggagcgcagacgcccccgcgtaccagcagggccagaaccagctctataacgagctcaatctaggacgaagagaggagtacgatgttttggacaagagacgtggccgggaccctgagatggggggaaagccgagaaggaagaaccctcaggaaggcctgtacaatgaactgcagaaagataagatggcggaggcctacagtgagattgggatgaaaggcgagcgccggaggggcaaggggcacgatggcctttaccagggtctcagtacagccaccaaggacacctacgacgcccttcacatgcaggccctgccccctcgcggctctggcgagggaaggggttccctgcttacttgcggcgacgtcgaagagaatcccggtccgatggccctcccagtaactgccctccttttgcccctcgcactccttcttcatgccgctcgccccaactgggtcaacgtgattagcgatttgaagaaaatcgaggaccttatacagtctatgcatattgacgctacactgtatactgagagtgatgtacacccgtcctgtaaggtaacggccatgaaatgctttcttctggagctccaggtcatcagcttggagtctggggacgcaagcatccacgatacggttgaaaacctcatcatccttgcgaacaactctctctcatctaatggaaacgttacagagagtgggtgtaaggagtgcgaagagttggaagaaaaaaacatcaaagaatttcttcaatccttcgttcacatagtgcaaatgttcattaacacgtccactaccacacccgccccgaggccacctacgccggcaccgactatcgccagtcaacccctctctctgcgccccgaggcttgccggcctgcggctggtggggcggtccacacccggggcctggattttgcgtgcgatatatacatctgggcacctcttgccggcacctgcggagtgctgcttctctcactcgttattacgctgtactgctaa

SEQ ID NO: 2028 - DNA, 2133 bp, synthetic construct
  misc_feature 1..2133: note = Synthetic
  source 1..2133: mol_type = other DNA
atggccttaccagtgaccgccttgctcctgccgctggccttgctgctccacgccgccaggccgcaagtgcagctgcaggagagcggtcctggcctggttaagcctagcgagacactgtctctgacttgcaccgtgtccggcggatctatcagcagctactactggtcctggatcagacagcccgccggcaaaggcctggaatggattggaagaatctacaccagcggcagcaccaactacaaccccagcctgaagtccagagtgacaatgagcgtggacacatctaagaaccagtttagcctgaaactgagcagcgtgaccgccgccgatacagctgtgtactattgtgcccgggaagaataccagctgctgcctgccctgtactactattactacatggacgtgtggggcaagggcaccaccgtgaccgtgtccagcggaggcggcggcagcggaggcggcggctctggcggcggaggcagcagctacgagctgacccagcctccatctgtctccgtgtctccaggccaaacagccagcatcacctgcagcggagataagctgggcgacaagtacgcctgctggtaccagcagaagcccggccagagccctgtgctggtgatctaccaggacagcaagcggcctagcggcatccccgagagattcagcggctccaacagcggcaataccgctacactgacaatcagcggcacacaggccatggatgaggccgactactactgccaggcctgggacagctctaccgccgtgttcggcggcggaacccagctcaccgccctgaccacgacgccagcgccgcggccaccaacaccggcgcccaccatcgcgtcgcagcccctgtccctgcgcccagaggcgtgccggccagcggcggggggcgcagtgcacacgagggggctggacttcgcctgtgatatctacatctgggcgcccttggccgggacttgtggggtccttctcctgtcactggttatcaccctttactgccggagggaccagaggctgccccccgatgcccacaagccccctgggggaggcagtttccggacccccatccaagaggagcaggccgacgcccactccaccctggccaagatcagagtgaagttcagcaggagcgcagacgcccccgcgtaccagcagggccagaaccagctctataacgagctcaatctaggacgaagagaggagtacgatgttttggacaagagacgtggccgggaccctgagatggggggaaagccgagaaggaagaaccctcaggaaggcctgtacaatgaactgcagaaagataagatggcggaggcctacagtgagattgggatgaaaggcgagcgccggaggggcaaggggcacgatggcctttaccagggtctcagtacagccaccaaggacacctacgacgcccttcacatgcaggccctgccccctcgcggctctggcgagggaaggggttccctgcttacttgcggcgacgtcgaagagaatcccggtccgatggccctcccagtaactgccctccttttgcccctcgcactccttcttcatgccgctcgccccaactgggtcaacgtgattagcgatttgaagaaaatcgaggaccttatacagtctatgcatattgacgctacactgtatactgagagtgatgtacacccgtcctgtaaggtaacggccatgaaatgctttcttctggagctccaggtcatcagcttggagtctggggacgcaagcatccacgatacggttgaaaacctcatcatccttgcgaacaactctctctcatctaatggaaacgttacagagagtgggtgtaaggagtgcgaagagttggaagaaaaaaacatcaaagaatttcttcaatccttcgttcacatagtgcaaatgttcattaacacgtccactaccacacccgccccgaggccacctacgccggcaccgactatcgccagtcaacccctctctctgcgccccgaggcttgccggcctgcggctggtggggcggtccacacccggggcctggattttgcgtgcgatatatacatctgggcacctcttgccggcacctgcggagtgctgcttctctcactcgttattacgctgtactgctaa

SEQ ID NO: 2029 - DNA, 2136 bp, synthetic construct
  misc_feature 1..2136: note = Synthetic
  source 1..2136: mol_type = other DNA
atggccttaccagtgaccgccttgctcctgccgctggccttgctgctccacgccgccaggccgcaagtgcagctggtggaatctggcggcggcgtggtgcagcctggtaggagcctgcggctgtcatgcgccgccacaggcttcaccttcagcagctacggcatgcactgggtcagacaggcccctggcaagggactggagtggatggtggtgatctggtccgatggccacaataaatactacgccgacagcgtgaagggcagatttaccattagccgggacaacagcaagaacaccctgtacctgcagatgaacagcctgagagctgaagataccgccgtgtactactgcgccagagcccagctcgagcggagatacttctactatatggacgtgtggggcaaaggcacaacagtgaccgtttcttctggcggcggcggatctggcggaggcggctccggaggcggcggcagccagaccgtggtcacccaggagcctagctttagcgtgtccccaggaggtacagtgaccctgacatgcggcctgactagcggatctgtgtccaccagctactaccccaactggtaccagcagacacctggccaggcccctagaaccctgatctacagcaccaatatccggagctccggcgtgcccgacagattcagcggaagcatcctgggcaacaaggccgctctgaccatcaccggcgcccaagctgatgacgagagcgactactattgtgtgctgtacatgggcagcggcatgttcatcttcggctctggcaccaaggtgaccgtgctgaccacgacgccagcgccgcggccaccaacaccggcgcccaccatcgcgtcgcagcccctgtccctgcgcccagaggcgtgccggccagcggcggggggcgcagtgcacacgagggggctggacttcgcctgtgatatctacatctgggcgcccttggccgggacttgtggggtccttctcctgtcactggttatcaccctttactgccggagggaccagaggctgccccccgatgcccacaagccccctgggggaggcagtttccggacccccatccaagaggagcaggccgacgcccactccaccctggccaagatcagagtgaagttcagcaggagcgcagacgcccccgcgtaccagcagggccagaaccagctctataacgagctcaatctaggacgaagagaggagtacgatgttttggacaagagacgtggccgggaccctgagatggggggaaagccgagaaggaagaaccctcaggaaggcctgtacaatgaactgcagaaagataagatggcggaggcctacagtgagattgggatgaaaggcgagcgccggaggggcaaggggcacgatggcctttaccagggtctcagtacagccaccaaggacacctacgacgcccttcacatgcaggccctgccccctcgcggctctggcgagggaaggggttccctgcttacttgcggcgacgtcgaagagaatcccggtccgatggccctcccagtaactgccctccttttgcccctcgcactccttcttcatgccgctcgccccaactgggtcaacgtgattagcgatttgaagaaaatcgaggaccttatacagtctatgcatattgacgctacactgtatactgagagtgatgtacacccgtcctgtaaggtaacggccatgaaatgctttcttctggagctccaggtcatcagcttggagtctggggacgcaagcatccacgatacggttgaaaacctcatcatccttgcgaacaactctctctcatctaatggaaacgttacagagagtgggtgtaaggagtgcgaagagttggaagaaaaaaacatcaaagaatttcttcaatccttcgttcacatagtgcaaatgttcattaacacgtccactaccacacccgccccgaggccacctacgccggcaccgactatcgccagtcaacccctctctctgcgccccgaggcttgccggcctgcggctggtggggcggtccacacccggggcctggattttgcgtgcgatatatacatctgggcacctcttgccggcacctgcggagtgctgcttctctcactcgttattacgctgtactgctaa

SEQ ID NO: 2030 - DNA, 2136 bp, synthetic construct
  misc_feature 1..2136: note = Synthetic
  source 1..2136: mol_type = other DNA
atggccttaccagtgaccgccttgctcctgccgctggccttgctgctccacgccgccaggccgcaagtgcagctggtcgagagcggaggcggcgttgtgcaacctggaaggagcctgcggctgagctgcgccgcttctggcttcacctttactagctacgacatgcactgggtgcggcaggcccctggcaagggcctggaatgggtcaccatcatctggttcgacggcagcaacaagtactacgccgatagcgtgaagggcagattcaccatcagcagagataatagcaagaataccctgtacctgcagatgaactctctctccgccgaggacaccgccgtgtactactgcgccagaggcgacaactggaacgacagatactattattactactacatggacgtgtggggcaaaggcaccaccgtgacagtgtccagcggcggcggaggaagcggcggcggtggctctggaggcggaggcagcgagatcgtgctgacccagtctccagatttccagtccgtgacccctaaggaaaaggtgaccatcacatgcagagccagccagtccatcggctctagcctgcactggtaccagcagaagcccgaccagtctcctatgctgctgatcaaattcgcctctcagagcatcagcggcgtgcccagccggttcagcggcagcggctccggcaccgacttcacactgacaatcaacagtctggaggccgaggatgccgctgcttactactgtcaccagagcagcagcctgccttggacatttggccagggcaccaaggtggaaattaagaccacgacgccagcgccgcggccaccaacaccggcgcccaccatcgcgtcgcagcccctgtccctgcgcccagaggcgtgccggccagcggcggggggcgcagtgcacacgagggggctggacttcgcctgtgatatctacatctgggcgcccttggccgggacttgtggggtccttctcctgtcactggttatcaccctttactgccggagggaccagaggctgccccccgatgcccacaagccccctgggggaggcagtttccggacccccatccaagaggagcaggccgacgcccactccaccctggccaagatcagagtgaagttcagcaggagcgcagacgcccccgcgtaccagcagggccagaaccagctctataacgagctcaatctaggacgaagagaggagtacgatgttttggacaagagacgtggccgggaccctgagatggggggaaagccgagaaggaagaaccctcaggaaggcctgtacaatgaactgcagaaagataagatggcggaggcctacagtgagattgggatgaaaggcgagcgccggaggggcaaggggcacgatggcctttaccagggtctcagtacagccaccaaggacacctacgacgcccttcacatgcaggccctgccccctcgcggctctggcgagggaaggggttccctgcttacttgcggcgacgtcgaagagaatcccggtccgatggccctcccagtaactgccctccttttgcccctcgcactccttcttcatgccgctcgccccaactgggtcaacgtgattagcgatttgaagaaaatcgaggaccttatacagtctatgcatattgacgctacactgtatactgagagtgatgtacacccgtcctgtaaggtaacggccatgaaatgctttcttctggagctccaggtcatcagcttggagtctggggacgcaagcatccacgatacggttgaaaacctcatcatccttgcgaacaactctctctcatctaatggaaacgttacagagagtgggtgtaaggagtgcgaagagttggaagaaaaaaacatcaaagaatttcttcaatccttcgttcacatagtgcaaatgttcattaacacgtccactaccacacccgccccgaggccacctacgccggcaccgactatcgccagtcaacccctctctctgcgccccgaggcttgccggcctgcggctggtggggcggtccacacccggggcctggattttgcgtgcgatatatacatctgggcacctcttgccggcacctgcggagtgctgcttctctcactcgttattacgctgtactgctaa

SEQ ID NO: 2031 - DNA, 2151 bp, synthetic construct
  misc_feature 1..2151: note = Synthetic
  source 1..2151: mol_type = other DNA
atggccttaccagtgaccgccttgctcctgccgctggccttgctgctccacgccgccaggccgcaagtgcagctggtccagagcggcgctgaggtgaagaaacctggcgcctctgtgaaagtgtcctgcaaggccagcggctacacctttaccagctacggcattagctgggtgcggcaggcccctggccagggtcttgagtggatgggctggatcagcgcctacaacggccacacagattatacacaaaagctgcagggcagagtgaccatgacaaccgataccagcaccaccacagcctacatggaactgagaagcctgagctctgccgacaccgccgtgtactactgcgtgcgggaagtggtgctgcctaccacagactactactacttctacatggacgtgtggggcaagggcaccacagtgacagtcagctccggcggaggaggcagcggcggcggaggcagcggcggaggcggcagcgacatcgtgatgacccagcctcctctgagcagccctgtgacactgggccagccagctagcatcagctgtagatcttctcagtccctggtgcacagcgacggcaatacctacctgtcttggctgcagcagcggcctggccagccccccagactgctgatctacaaggtgtccaaccgcttcagcggcgtgccagacagattcagcggctctggcgccggcaccgacttcaccctgaagatcagcagagtcgaggccgaagatgtgggagtttactattgcacccaagctacacagttcccccacacctttggccagggcaccaagctcgagatcaagaccacgacgccagcgccgcggccaccaacaccggcgcccaccatcgcgtcgcagcccctgtccctgcgcccagaggcgtgccggccagcggcggggggcgcagtgcacacgagggggctggacttcgcctgtgatatctacatctgggcgcccttggccgggacttgtggggtccttctcctgtcactggttatcaccctttactgccggagggaccagaggctgccccccgatgcccacaagccccctgggggaggcagtttccggacccccatccaagaggagcaggccgacgcccactccaccctggccaagatcagagtgaagttcagcaggagcgcagacgcccccgcgtaccagcagggccagaaccagctctataacgagctcaatctaggacgaagagaggagtacgatgttttggacaagagacgtggccgggaccctgagatggggggaaagccgagaaggaagaaccctcaggaaggcctgtacaatgaactgcagaaagataagatggcggaggcctacagtgagattgggatgaaaggcgagcgccggaggggcaaggggcacgatggcctttaccagggtctcagtacagccaccaaggacacctacgacgcccttcacatgcaggccctgccccctcgcggctctggcgagggaaggggttccctgcttacttgcggcgacgtcgaagagaatcccggtccgatggccctcccagtaactgccctccttttgcccctcgcactccttcttcatgccgctcgccccaactgggtcaacgtgattagcgatttgaagaaaatcgaggaccttatacagtctatgcatattgacgctacactgtatactgagagtgatgtacacccgtcctgtaaggtaacggccatgaaatgctttcttctggagctccaggtcatcagcttggagtctggggacgcaagcatccacgatacggttgaaaacctcatcatccttgcgaacaactctctctcatctaatggaaacgttacagagagtgggtgtaaggagtgcgaagagttggaagaaaaaaacatcaaagaatttcttcaatccttcgttcacatagtgcaaatgttcattaacacgtccactaccacacccgccccgaggccacctacgccggcaccgactatcgccagtcaacccctctctctgcgccccgaggcttgccggcctgcggctggtggggcggtccacacccggggcctggattttgcgtgcgatatatacatctgggcacctcttgccggcacctgcggagtgctgcttctctcactcgttattacgctgtactgctaa

SEQ ID NO: 2032 - DNA, 2148 bp, synthetic construct
  misc_feature 1..2148: note = Synthetic
  source 1..2148: mol_type = other DNA
atggccttaccagtgaccgccttgctcctgccgctggccttgctgctccacgccgccaggccgcaagttcagctggtgcagagcggagccgaggtgaaaaagcccggcgcttctgtgaaggtgtcctgcaaggtgtctggctacaccctgacagagctgagcatgcactgggtccggcaggcccctggcaaaggcctggaatggatgggaggcttcgaccccgaagacggggagacaatctacgcccagaaattccagggcagagtgacaatgaccgaggacaccagcaccgatacagcctacatggaactgtcttccctgcggagcgaggacaccgccgtgtactactgcgccaccggcagaatcaccatggtgcggggcgtcatcatcccctactactattactacatggacgtgtggggcaagggcaccaccgtgaccgtgtcctctggcggaggaggatctggcggcggcggaagcggcggaggcggcagtgatatccagatgacacagagcccaagcagcctgagcgccagcgtgggcgacagagtgaccatcacatgcagagccagccagggcatcagcagctggctggcttggtaccagcaaaagcctgagaaggcccctaagagcctcatctacgccgctagcagcctgcagtccggcgtgccaagcagattcagcggctctggctctggcacagacttcaccctgaccatttccagcctgcaacctgaggattttgccacatactattgtcagcagtacaacagctacccttacaccttcggccagggcaccaagctggaaatcaagaccacgacgccagcgccgcggccaccaacaccggcgcccaccatcgcgtcgcagcccctgtccctgcgcccagaggcgtgccggccagcggcggggggcgcagtgcacacgagggggctggacttcgcctgtgatatctacatctgggcgcccttggccgggacttgtggggtccttctcctgtcactggttatcaccctttactgccggagggaccagaggctgccccccgatgcccacaagccccctgggggaggcagtttccggacccccatccaagaggagcaggccgacgcccactccaccctggccaagatcagagtgaagttcagcaggagcgcagacgcccccgcgtaccagcagggccagaaccagctctataacgagctcaatctaggacgaagagaggagtacgatgttttggacaagagacgtggccgggaccctgagatggggggaaagccgagaaggaagaaccctcaggaaggcctgtacaatgaactgcagaaagataagatggcggaggcctacagtgagattgggatgaaaggcgagcgccggaggggcaaggggcacgatggcctttaccagggtctcagtacagccaccaaggacacctacgacgcccttcacatgcaggccctgccccctcgcggctctggcgagggaaggggttccctgcttacttgcggcgacgtcgaagagaatcccggtccgatggccctcccagtaactgccctccttttgcccctcgcactccttcttcatgccgctcgccccaactgggtcaacgtgattagcgatttgaagaaaatcgaggaccttatacagtctatgcatattgacgctacactgtatactgagagtgatgtacacccgtcctgtaaggtaacggccatgaaatgctttcttctggagctccaggtcatcagcttggagtctggggacgcaagcatccacgatacggttgaaaacctcatcatccttgcgaacaactctctctcatctaatggaaacgttacagagagtgggtgtaaggagtgcgaagagttggaagaaaaaaacatcaaagaatttcttcaatccttcgttcacatagtgcaaatgttcattaacacgtccactaccacacccgccccgaggccacctacgccggcaccgactatcgccagtcaacccctctctctgcgccccgaggcttgccggcctgcggctggtggggcggtccacacccggggcctggattttgcgtgcgatatatacatctgggcacctcttgccggcacctgcggagtgctgcttctctcactcgttattacgctgtactgctaa

SEQ ID NO: 2033 - DNA, 2142 bp, synthetic construct
  misc_feature 1..2142: note = Synthetic
  source 1..2142: mol_type = other DNA
atggccttaccagtgaccgccttgctcctgccgctggccttgctgctccacgccgccaggccgcaagtgcagctggtgcagagcggcaccgaggtgaagaagccaggcgcctctgtgaaagtgtcttgtaaagccagcggctacacctttaccaattacggcatcggctgggtgcggcaggcccctggacagggactggaatggatgggctggatcatcgcctacaacggctacacaaagtacgcccagatcctgcagggcagagtgacaatgaccaccgacaccagcaccaacaccgcttatatggaactgagaagcctgcggagcgacgacaccgccgtgtactattgcgccagacagcagctgggcggagattaccactactacatggacgtgtggggcaagggcaccaccgtcacagtgtccagcggcggtggcggatctggcggcggcggctctggaggcggcggctctgatatcgtgatgacccagacccccctgagcctgtccgtgaccccaggacaacctgccagcattagctgcaagagcagcaagtccctgctgcacagcgacggcaagacatacctgtactggtacctgcaaaagcccggccagcctcctcagctgctcatctacgaggtgtccaaccggttctctggcgtgcctgatagattcagcggaagcggcagcggaacagacttcacactgaagatcagcagagtcgaggccgaggacgtgggcgtttactactgcatgcagagcatccagttcccctggacattcggccagggcacaaaagtggaaatcaagaccacgacgccagcgccgcggccaccaacaccggcgcccaccatcgcgtcgcagcccctgtccctgcgcccagaggcgtgccggccagcggcggggggcgcagtgcacacgagggggctggacttcgcctgtgatatctacatctgggcgcccttggccgggacttgtggggtccttctcctgtcactggttatcaccctttactgccggagggaccagaggctgccccccgatgcccacaagccccctgggggaggcagtttccggacccccatccaagaggagcaggccgacgcccactccaccctggccaagatcagagtgaagttcagcaggagcgcagacgcccccgcgtaccagcagggccagaaccagctctataacgagctcaatctaggacgaagagaggagtacgatgttttggacaagagacgtggccgggaccctgagatggggggaaagccgagaaggaagaaccctcaggaaggcctgtacaatgaactgcagaaagataagatggcggaggcctacagtgagattgggatgaaaggcgagcgccggaggggcaaggggcacgatggcctttaccagggtctcagtacagccaccaaggacacctacgacgcccttcacatgcaggccctgccccctcgcggctctggcgagggaaggggttccctgcttacttgcggcgacgtcgaagagaatcccggtccgatggccctcccagtaactgccctccttttgcccctcgcactccttcttcatgccgctcgccccaactgggtcaacgtgattagcgatttgaagaaaatcgaggaccttatacagtctatgcatattgacgctacactgtatactgagagtgatgtacacccgtcctgtaaggtaacggccatgaaatgctttcttctggagctccaggtcatcagcttggagtctggggacgcaagcatccacgatacggttgaaaacctcatcatccttgcgaacaactctctctcatctaatggaaacgttacagagagtgggtgtaaggagtgcgaagagttggaagaaaaaaacatcaaagaatttcttcaatccttcgttcacatagtgcaaatgttcattaacacgtccactaccacacccgccccgaggccacctacgccggcaccgactatcgccagtcaacccctctctctgcgccccgaggcttgccggcctgcggctggtggggcggtccacacccggggcctggattttgcgtgcgatatatacatctgggcacctcttgccggcacctgcggagtgctgcttctctcactcgttattacgctgtactgctaa

SEQ ID NO: 2034 - DNA, 2142 bp, synthetic construct
  misc_feature 1..2142: note = Synthetic
  source 1..2142: mol_type = other DNA
atggccttaccagtgaccgccttgctcctgccgctggccttgctgctccacgccgccaggccgcaagtgcagctggtgcaaagcggcaccgaggtgaaaaagcccggcgcctctgtgaaggtctcctgcaaggccagcggatacacatttacaaattacggcatcggctgggtgcggcaggcccctggccagggcctggaatggatgggctggatcatcgcctacaacggctacaccaagtacgcccagatcctgcaaggcagagtcaccatgaccacagacaccagcaccaacaccgcttatatggaactgagaagcctgcggagcgacgatacagccgtgtactactgcgccagacagcagctcggcggcgactaccactactacatggacgtgtggggcaagggcaccaccgtgaccgtgtccagcggaggcggcggatctggcggaggcggcagcggcggcggcggctctgacatcgtgatgacccagacccctctgagcctgagcgtgacacctggacagcccgcttctattagctgtaaaagcagcaagtccctgctgcacagcgacggcaagacctacctgtactggtacctgcagaaacctggccagcctccacagctgctgatctacgaggtgtctacaagattcagcggagtgcctgatagattcagcggcagcggatctggaacagatttcaccctgaagatcagccgggttgaggccgaggacgtgggcgtgtactattgcatgcagtccatccagttcccctggaccttcggccagggcacaaaggtggaaatcaagaccacgacgccagcgccgcggccaccaacaccggcgcccaccatcgcgtcgcagcccctgtccctgcgcccagaggcgtgccggccagcggcggggggcgcagtgcacacgagggggctggacttcgcctgtgatatctacatctgggcgcccttggccgggacttgtggggtccttctcctgtcactggttatcaccctttactgccggagggaccagaggctgccccccgatgcccacaagccccctgggggaggcagtttccggacccccatccaagaggagcaggccgacgcccactccaccctggccaagatcagagtgaagttcagcaggagcgcagacgcccccgcgtaccagcagggccagaaccagctctataacgagctcaatctaggacgaagagaggagtacgatgttttggacaagagacgtggccgggaccctgagatggggggaaagccgagaaggaagaaccctcaggaaggcctgtacaatgaactgcagaaagataagatggcggaggcctacagtgagattgggatgaaaggcgagcgccggaggggcaaggggcacgatggcctttaccagggtctcagtacagccaccaaggacacctacgacgcccttcacatgcaggccctgccccctcgcggctctggcgagggaaggggttccctgcttacttgcggcgacgtcgaagagaatcccggtccgatggccctcccagtaactgccctccttttgcccctcgcactccttcttcatgccgctcgccccaactgggtcaacgtgattagcgatttgaagaaaatcgaggaccttatacagtctatgcatattgacgctacactgtatactgagagtgatgtacacccgtcctgtaaggtaacggccatgaaatgctttcttctggagctccaggtcatcagcttggagtctggggacgcaagcatccacgatacggttgaaaacctcatcatccttgcgaacaactctctctcatctaatggaaacgttacagagagtgggtgtaaggagtgcgaagagttggaagaaaaaaacatcaaagaatttcttcaatccttcgttcacatagtgcaaatgttcattaacacgtccactaccacacccgccccgaggccacctacgccggcaccgactatcgccagtcaacccctctctctgcgccccgaggcttgccggcctgcggctggtggggcggtccacacccggggcctggattttgcgtgcgatatatacatctgggcacctcttgccggcacctgcggagtgctgcttctctcactcgttattacgctgtactgctaa

SEQ ID NO: 2035 - DNA, 2136 bp, synthetic construct
  misc_feature 1..2136: note = Synthetic
  source 1..2136: mol_type = other DNA
atggccttaccagtgaccgccttgctcctgccgctggccttgctgctccacgccgccaggccgcaagtgcagctggtgcagagcggaacagaggtgaaaaagcctggcgccagcgtgaaggtgtcttgtaaaaccagcggttatacattcacctcctacgacattaactgggtgcggcaggccaccggccagggcctggaatggatgggctggatgaaccccatctccggcgacacaggcagcgcccagaagttccagggaagagtgaccatgaccagaaataccagcatcggcaccgcctacatggaactgagcagcctgcggagcgaggacaccgccgtgtactactgcgccagaggcggatactgtagcagtacatcttgctactactattacatggacgtgtggggcaagggcacaacagtgacagtcagcagcggcggcgggggcagcggcggaggcggaagcggcggcggcggcagcgatatccagatgacacagtcccctagctctctgtctgcttctgttggagatagagtgaccatcacctgccgggccagccagggcatcagcaactggctggcctggtaccagcagaagcccgagaaggcccctaagagcctgatctacgccgctagctccctccagggcggcgtgccatctagattcagcggctcaggcagcggaaccgacttcaccctgaccatcagctccctgcaacctgaggattttgccacatactactgccagcaatacgacagctacccctacaccttcggccagggcaccaagctggaaatcaagaccacgacgccagcgccgcggccaccaacaccggcgcccaccatcgcgtcgcagcccctgtccctgcgcccagaggcgtgccggccagcggcggggggcgcagtgcacacgagggggctggacttcgcctgtgatatctacatctgggcgcccttggccgggacttgtggggtccttctcctgtcactggttatcaccctttactgccggagggaccagaggctgccccccgatgcccacaagccccctgggggaggcagtttccggacccccatccaagaggagcaggccgacgcccactccaccctggccaagatcagagtgaagttcagcaggagcgcagacgcccccgcgtaccagcagggccagaaccagctctataacgagctcaatctaggacgaagagaggagtacgatgttttggacaagagacgtggccgggaccctgagatggggggaaagccgagaaggaagaaccctcaggaaggcctgtacaatgaactgcagaaagataagatggcggaggcctacagtgagattgggatgaaaggcgagcgccggaggggcaaggggcacgatggcctttaccagggtctcagtacagccaccaaggacacctacgacgcccttcacatgcaggccctgccccctcgcggctctggcgagggaaggggttccctgcttacttgcggcgacgtcgaagagaatcccggtccgatggccctcccagtaactgccctccttttgcccctcgcactccttcttcatgccgctcgccccaactgggtcaacgtgattagcgatttgaagaaaatcgaggaccttatacagtctatgcatattgacgctacactgtatactgagagtgatgtacacccgtcctgtaaggtaacggccatgaaatgctttcttctggagctccaggtcatcagcttggagtctggggacgcaagcatccacgatacggttgaaaacctcatcatccttgcgaacaactctctctcatctaatggaaacgttacagagagtgggtgtaaggagtgcgaagagttggaagaaaaaaacatcaaagaatttcttcaatccttcgttcacatagtgcaaatgttcattaacacgtccactaccacacccgccccgaggccacctacgccggcaccgactatcgccagtcaacccctctctctgcgccccgaggcttgccggcctgcggctggtggggcggtccacacccggggcctggattttgcgtgcgatatatacatctgggcacctcttgccggcacctgcggagtgctgcttctctcactcgttattacgctgtactgctaa

SEQ ID NO: 2036 - DNA, 2136 bp, synthetic construct
  misc_feature 1..2136: note = Synthetic
  source 1..2136: mol_type = other DNA
atggccttaccagtgaccgccttgctcctgccgctggccttgctgctccacgccgccaggccgcaagtgcagctggtgcagagcggcgccgaggtgaagaagcctggcgcttccgtgaaggtgtcctgtaaagcttctggatacaccttcacctcttatgatattaactgggtgcggcaggccaccggccagggcctggaatggatgggctggatgatccccaacagcggcgataccggctccgcccagaaattccagggaagagttaccatgacaagaaacaccagcatcagcaccgcctacatggaactgagcagcctgcggagcgaggacaccgctgtgtactactgcgccagaggcggctactgtaatagcacaagctgctactattactacatggacgtgtggggcaagggcaccacagtgacagtcagctccggcggcggaggcagcggaggcggtggctctggcggcggcggaagcgacatccagatgacacagagccctagcagcctgagcgcctctgtgggcgaccgggtgaccatcacctgcagagccagccagggcatcagcagctggctggcctggtaccagcagaagcccgagaaggcccctaagtccctgatctacgccgccagctccctccagggcggagtgccatctagattcagcggctctggatctggcacagacttcaccctgaccatcagctctctgcagcctgaggattttgccacatactactgccagcaatacgacagctacccctacacattcggccaaggcacaaagctggaaatcaagaccacgacgccagcgccgcggccaccaacaccggcgcccaccatcgcgtcgcagcccctgtccctgcgcccagaggcgtgccggccagcggcggggggcgcagtgcacacgagggggctggacttcgcctgtgatatctacatctgggcgcccttggccgggacttgtggggtccttctcctgtcactggttatcaccctttactgccggagggaccagaggctgccccccgatgcccacaagccccctgggggaggcagtttccggacccccatccaagaggagcaggccgacgcccactccaccctggccaagatcagagtgaagttcagcaggagcgcagacgcccccgcgtaccagcagggccagaaccagctctataacgagctcaatctaggacgaagagaggagtacgatgttttggacaagagacgtggccgggaccctgagatggggggaaagccgagaaggaagaaccctcaggaaggcctgtacaatgaactgcagaaagataagatggcggaggcctacagtgagattgggatgaaaggcgagcgccggaggggcaaggggcacgatggcctttaccagggtctcagtacagccaccaaggacacctacgacgcccttcacatgcaggccctgccccctcgcggctctggcgagggaaggggttccctgcttacttgcggcgacgtcgaagagaatcccggtccgatggccctcccagtaactgccctccttttgcccctcgcactccttcttcatgccgctcgccccaactgggtcaacgtgattagcgatttgaagaaaatcgaggaccttatacagtctatgcatattgacgctacactgtatactgagagtgatgtacacccgtcctgtaaggtaacggccatgaaatgctttcttctggagctccaggtcatcagcttggagtctggggacgcaagcatccacgatacggttgaaaacctcatcatccttgcgaacaactctctctcatctaatggaaacgttacagagagtgggtgtaaggagtgcgaagagttggaagaaaaaaacatcaaagaatttcttcaatccttcgttcacatagtgcaaatgttcattaacacgtccactaccacacccgccccgaggccacctacgccggcaccgactatcgccagtcaacccctctctctgcgccccgaggcttgccggcctgcggctggtggggcggtccacacccggggcctggattttgcgtgcgatatatacatctgggcacctcttgccggcacctgcggagtgctgcttctctcactcgttattacgctgtactgctaa

SEQ ID NO: 2037 - DNA, 2139 bp, synthetic construct
  misc_feature 1..2139: note = Synthetic
  source 1..2139: mol_type = other DNA
atggccttaccagtgaccgccttgctcctgccgctggccttgctgctccacgccgccaggccggaggtgcagctgctggaaagcggaggcggcctggtgcaacctggaggttctctgcggctgagctgcgccgctagcggcttcacatttagcagctacgtgatgaactgggtgcggcaggctcctggaaagggcctggaatgggtctccagcgtgtccggcagcggcaacaacagcttttacgccgatagcgtgaagggcagattcaccatcagccgggacaacagcaagaacaccctctacctgcagatgaattctctgagagccgaggacaccgccgtgtactactgcgccagcaggtcctcttcttacctgtactactactattacatggacgtgtggggcaaaggcacaacagtgaccgtctccagcggcggcggcggctccggcggcggaggaagcggcggaggcggcagcgagatcgtgctgacccaaagccccggcaccctgagcctgagccctggcgagagagccaccctgtcttgtagagcctctcagagcgtttctagctcctacctggcctggtaccagcagaagcccggacaggcccctagactgctgatctacggcgccagcagcagagctacaggcatccccgatagattcagcgacagcggctcaggcacagacttcaccctgacaattagccggctggaacccgaggatttcgccgtgtactattgccagcactacggcagctctcctccaagaatcaccttcggccctggcaccaaggtggacatcaaaaccacgacgccagcgccgcggccaccaacaccggcgcccaccatcgcgtcgcagcccctgtccctgcgcccagaggcgtgccggccagcggcggggggcgcagtgcacacgagggggctggacttcgcctgtgatatctacatctgggcgcccttggccgggacttgtggggtccttctcctgtcactggttatcaccctttactgccggagggaccagaggctgccccccgatgcccacaagccccctgggggaggcagtttccggacccccatccaagaggagcaggccgacgcccactccaccctggccaagatcagagtgaagttcagcaggagcgcagacgcccccgcgtaccagcagggccagaaccagctctataacgagctcaatctaggacgaagagaggagtacgatgttttggacaagagacgtggccgggaccctgagatggggggaaagccgagaaggaagaaccctcaggaaggcctgtacaatgaactgcagaaagataagatggcggaggcctacagtgagattgggatgaaaggcgagcgccggaggggcaaggggcacgatggcctttaccagggtctcagtacagccaccaaggacacctacgacgcccttcacatgcaggccctgccccctcgcggctctggcgagggaaggggttccctgcttacttgcggcgacgtcgaagagaatcccggtccgatggccctcccagtaactgccctccttttgcccctcgcactccttcttcatgccgctcgccccaactgggtcaacgtgattagcgatttgaagaaaatcgaggaccttatacagtctatgcatattgacgctacactgtatactgagagtgatgtacacccgtcctgtaaggtaacggccatgaaatgctttcttctggagctccaggtcatcagcttggagtctggggacgcaagcatccacgatacggttgaaaacctcatcatccttgcgaacaactctctctcatctaatggaaacgttacagagagtgggtgtaaggagtgcgaagagttggaagaaaaaaacatcaaagaatttcttcaatccttcgttcacatagtgcaaatgttcattaacacgtccactaccacacccgccccgaggccacctacgccggcaccgactatcgccagtcaacccctctctctgcgccccgaggcttgccggcctgcggctggtggggcggtccacacccggggcctggattttgcgtgcgatatatacatctgggcacctcttgccggcacctgcggagtgctgcttctctcactcgttattacgctgtactgctaa

SEQ ID NO: 2038 - protein, 492 aa, synthetic construct
  REGION 1..492: note = Synthetic
MALPVTALLLPLALLLHAARPQVQLVESGGGVVQPGRSLRLSCAASGFTFSSHDMHWVRQAPGKGLDWVAVIWSDGNKKYYVDSAKGRFTISRDNSKNTVYLQMNSLRAEDTAIYYCARGDNWNDEHSYYYYMDVWGKGTTVTVSSGSTSGSGKPGSGEGSTKGEIVLTQSPDFQSVTPKEKVTITCRASQTIGSSLHWYQQKPDQSPKLLIKHASQSFSGVPSRFSGSGSGTDFTLTVNSLEAEDAATYYCHQSSSLPWTFGQGTKVEIKAAATTTPAPRPPTPAPTIASQPLSLRPEACRPAAGGAVHTRGLDFACDIYIWAPLAGTCGVLLLSLVITLYCRRDQRLPPDAHKPPGGGSFRTPIQEEQADAHSTLAKIRVKFSRSADAPAYQQGQNQLYNELNLGRREEYDVLDKRRGRDPEMGGKPRRKNPQEGLYNELQKDKMAEAYSEIGMKGERRRGKGHDGLYQGLSTATKDTYDALHMQALPPR

SEQ ID NO: 2039 - protein, 492 aa, synthetic construct
  REGION 1..492: note = Synthetic
MALPVTALLLPLALLLHAARPQVQLVESGGGVVQPGRSLRLSCAASGFTFSSHDMHWVRQAPGKGLDWVAVIWSDGNNKYYADSAKGRFTISRDNSKNTVYLQMNSLRAEDTAIYYCARGDNWNDEHSYYYYMDVWGKGTTVTVSSGSTSGSGKPGSGEGSTKGEIVLTQSPDFQSVTPKEKVTITCRASQTIGSSLHWYQQKPDQSPKLLIKHASQSFSGVPSRFSGSGSGTDFTLTVNSLEAEDAATYYCHQSSSLPWTFGQGTKVEIKAAATTTPAPRPPTPAPTIASQPLSLRPEACRPAAGGAVHTRGLDFACDIYIWAPLAGTCGVLLLSLVITLYCRRDQRLPPDAHKPPGGGSFRTPIQEEQADAHSTLAKIRVKFSRSADAPAYQQGQNQLYNELNLGRREEYDVLDKRRGRDPEMGGKPRRKNPQEGLYNELQKDKMAEAYSEIGMKGERRRGKGHDGLYQGLSTATKDTYDALHMQALPPR

SEQ ID NO: 2040 - protein, 491 aa, synthetic construct
  REGION 1..491: note = Synthetic
MALPVTALLLPLALLLHAARPQLQLVQSGAEVKKPGASVKVSCKASGYTFTNYGISWLRQAPGQGLEWMGWISGYNDNTHYAQKFQGRVTMTTDTSTTTAYMELRNLRSDDTAVYYCARDGIAARPVYYYYMDVWGKGTTVTVSSGSTSGSGKPGSGEGSTKGDIQMTQSPSSLSASVGDRVTITCRASQSISNYLNWYHQKPGKAPKLLIYAASSLESGVPSRFSGSGSGTDFTLTISSLQPEDFATYYCQQSYSNPLTFGGGTKVESKAAATTTPAPRPPTPAPTIASQPLSLRPEACRPAAGGAVHTRGLDFACDIYIWAPLAGTCGVLLLSLVITLYCRRDQRLPPDAHKPPGGGSFRTPIQEEQADAHSTLAKIRVKFSRSADAPAYQQGQNQLYNELNLGRREEYDVLDKRRGRDPEMGGKPRRKNPQEGLYNELQKDKMAEAYSEIGMKGERRRGKGHDGLYQGLSTATKDTYDALHMQALPPR

SEQ ID NO: 2041 - protein, 492 aa, synthetic construct
  REGION 1..492: note = Synthetic
MALPVTALLLPLALLLHAARPQVQLVESGGGVVQPGRSLRLSCVASGFTFSSNDIYWVRQAPGKGLEWVAVIWYDGSNKYYADSVKGRFTISRDNSKNTLYLQMNSLRAEDTAVYYCARGDNWNDEHHYHYYMDVWGKGTTVTVSSGSTSGSGKPGSGEGSTKGEIVLTQSPDFQSVTPKEKVTITCRASQSIGSSLHWYQQKPDQSPKLLIKFASQSFSGVPSRFSGSGSGTDFTLTIHSLEAEDAATYYCHQSGSLPWTFGQGTKVEIKAAATTTPAPRPPTPAPTIASQPLSLRPEACRPAAGGAVHTRGLDFACDIYIWAPLAGTCGVLLLSLVITLYCRRDQRLPPDAHKPPGGGSFRTPIQEEQADAHSTLAKIRVKFSRSADAPAYQQGQNQLYNELNLGRREEYDVLDKRRGRDPEMGGKPRRKNPQEGLYNELQKDKMAEAYSEIGMKGERRRGKGHDGLYQGLSTATKDTYDALHMQALPPR

SEQ ID NO: 2042 - protein, 485 aa, synthetic construct
  REGION 1..485: note = Synthetic
MALPVTALLLPLALLLHAARPQVQLVESGGGVVQPGRSLRLSCAASGFTFSSYGMHWVRQAPGKGLEWVAVISYDGSNKYYADSVKGRFTISRDNSKTTLYLQMNSLRAEDTAVYYCARDHYYYYMDVWGKGTTVTVSSGSTSGSGKPGSGEGSTKGVTQEPSFSVSPGGTVTLTCGLSSGSVSTSYYPSWYQQTPGQAPRTLIYSTNIRSSGVPDRFSGSILGNKAALTITGAQADDESDYYCVLYMGSDIVVFGGGTKLTVLAAATTTPAPRPPTPAPTIASQPLSLRPEACRPAAGGAVHTRGLDFACDIYIWAPLAGTCGVLLLSLVITLYCRRDQRLPPDAHKPPGGGSFRTPIQEEQADAHSTLAKIRVKFSRSADAPAYQQGQNQLYNELNLGRREEYDVLDKRRGRDPEMGGKPRRKNPQEGLYNELQKDKMAEAYSEIGMKGERRRGKGHDGLYQGLSTATKDTYDALHMQALPPR

SEQ ID NO: 2043 - protein, 490 aa, synthetic construct
  REGION 1..490: note = Synthetic
MALPVTALLLPLALLLHAARPQLQLQESGPGLVKPSETLSLTCTVSGGSISSSSYYWGWIRQPPGKGLEWIGSLYYSGSTYYNPSLKSRVTISVDTSKNQFSLKLSSVTAADTAVYYCAAVQLERRGYFYMDVWGKGTTVTVSSGSTSGSGKPGSGEGSTKGEIVLTQSPATLSLSPGERATLSCRASQSVSSYFAWYQQKPGQAPRLLIYDASNRATGIPARFSGSGSGTDFTLTISSLEPEDFAVYYCQQRSNWPLTFGGGTKVEIKAAATTTPAPRPPTPAPTIASQPLSLRPEACRPAAGGAVHTRGLDFACDIYIWAPLAGTCGVLLLSLVITLYCRRDQRLPPDAHKPPGGGSFRTPIQEEQADAHSTLAKIRVKFSRSADAPAYQQGQNQLYNELNLGRREEYDVLDKRRGRDPEMGGKPRRKNPQEGLYNELQKDKMAEAYSEIGMKGERRRGKGHDGLYQGLSTATKDTYDALHMQALPPR

SEQ ID NO: 2044 - protein, 492 aa, synthetic construct
  REGION 1..492: note = Synthetic
MALPVTALLLPLALLLHAARPQVQLVESGGGVVQPGRSLRLSCAASGFTFSNYGMHWVRQAPGKGLEWMAVIWSDGHNKYYADSVKGRFTISRDNSKNTLYLQMNSLRAEDTAVYYCARAQLERRYFYYMDVWGKGTTVTVSSGSTSGSGKPGSGEGSTKGQTVVTQEPSFSVSPGGTVTLTCGLTSGSVSTSYYPNWYQQTPGQAPRTLIYSTNIRSSGVPDRFSGSILGNKAALTITGAQADDESDYYCVLYMGSGMFIFGSGTKVTVLAAATTTPAPRPPTPAPTIASQPLSLRPEACRPAAGGAVHTRGLDFACDIYIWAPLAGTCGVLLLSLVITLYCRRDQRLPPDAHKPPGGGSFRTPIQEEQADAHSTLAKIRVKFSRSADAPAYQQGQNQLYNELNLGRREEYDVLDKRRGRDPEMGGKPRRKNPQEGLYNELQKDKMAEAYSEIGMKGERRRGKGHDGLYQGLSTATKDTYDALHMQALPPR

SEQ ID NO: 2045 - protein, 492 aa, synthetic construct
  REGION 1..492: note = Synthetic
MALPVTALLLPLALLLHAARPQVQLVQSGAEVKKPGASVKVSCKASGYTFTSYDINWVRQATGQGLEWMGWMIPNSGDTGSAQKFQGRVTMTRNTSIGTAYMELSSLRSEDTAVYYCARGGYCNSTSCYYYYMDVWGKGTTVTVSSGSTSGSGKPGSGEGSTKGDIQMTQSPSSLSASVGDRVTITCRASQGISSWLAWYQQKPEKAPKSLIYAASSLQGGVPSRFSGSGSGTDFTLTISSLQPEDFATYYCQQYDSYPYTFGQGTKLEIKAAATTTPAPRPPTPAPTIASQPLSLRPEACRPAAGGAVHTRGLDFACDIYIWAPLAGTCGVLLLSLVITLYCRRDQRLPPDAHKPPGGGSFRTPIQEEQADAHSTLAKIRVKFSRSADAPAYQQGQNQLYNELNLGRREEYDVLDKRRGRDPEMGGKPRRKNPQEGLYNELQKDKMAEAYSEIGMKGERRRGKGHDGLYQGLSTATKDTYDALHMQALPPR

SEQ ID NO: 2046 - protein, 493 aa, synthetic construct
  REGION 1..493: note = Synthetic
MALPVTALLLPLALLLHAARPQVQLVQSGAEVKKPGASVKVSCKASGYTFTSYDINWVRQATGQGLEWMGWMNPNSGNTVYAQKFQGRVTMTRNTSISTAYMELSSLRSEDTAVYYCARGGDFWSGYHDYYYYMDVWGKGTTVTVSSGSTSGSGKPGSGEGSTKGDIQVTQSPTFLSASVGDRVTITCRASQGISSYLAWYQQKPGKAPKLLIYGASTLQSGVPSRFSGSGSGTEFTLTISSLQPEDFATYYCQQLNSYPWTFGQGTKVEIKAAATTTPAPRPPTPAPTIASQPLSLRPEACRPAAGGAVHTRGLDFACDIYIWAPLAGTCGVLLLSLVITLYCRRDQRLPPDAHKPPGGGSFRTPIQEEQADAHSTLAKIRVKFSRSADAPAYQQGQNQLYNELNLGRREEYDVLDKRRGRDPEMGGKPRRKNPQEGLYNELQKDKMAEAYSEIGMKGERRRGKGHDGLYQGLSTATKDTYDALHMQALPPR

SEQ ID NO: 2047 - protein, 491 aa, synthetic construct
  REGION 1..491: note = Synthetic
MALPVTALLLPLALLLHAARPQVQLQESGPGLVKPSETLSLTCTVSGGSISSYYWSWIRQPAGKGLEWIGRIYTSGSTNYNPSLKSRVTMSVDTSKNQFSLKLSSVTAADTAVYYCAREEYQLLPALYYYYYMDVWGKGTTVTVSSGSTSGSGKPGSGEGSTKGSYELTQPPSVSVSPGQTASITCSGDKLGDKYACWYQQKPGQSPVLVIYQDSKRPSGIPERFSGSNSGNTATLTISGTQAMDEADYYCQAWDSSTAVFGGGTQLTALAAATTTPAPRPPTPAPTIASQPLSLRPEACRPAAGGAVHTRGLDFACDIYIWAPLAGTCGVLLLSLVITLYCRRDQRLPPDAHKPPGGGSFRTPIQEEQADAHSTLAKIRVKFSRSADAPAYQQGQNQLYNELNLGRREEYDVLDKRRGRDPEMGGKPRRKNPQEGLYNELQKDKMAEAYSEIGMKGERRRGKGHDGLYQGLSTATKDTYDALHMQALPPR

SEQ ID NO: 2048 - protein, 492 aa, synthetic construct
  REGION 1..492: note = Synthetic
MALPVTALLLPLALLLHAARPQVQLVESGGGVVQPGRSLRLSCAATGFTFSSYGMHWVRQAPGKGLEWMVVIWSDGHNKYYADSVKGRFTISRDNSKNTLYLQMNSLRAEDTAVYYCARAQLERRYFYYMDVWGKGTTVTVSSGSTSGSGKPGSGEGSTKGQTVVTQEPSFSVSPGGTVTLTCGLTSGSVSTSYYPNWYQQTPGQAPRTLIYSTNIRSSGVPDRFSGSILGNKAALTITGAQADDESDYYCVLYMGSGMFIFGSGTKVTVLAAATTTPAPRPPTPAPTIASQPLSLRPEACRPAAGGAVHTRGLDFACDIYIWAPLAGTCGVLLLSLVITLYCRRDQRLPPDAHKPPGGGSFRTPIQEEQADAHSTLAKIRVKFSRSADAPAYQQGQNQLYNELNLGRREEYDVLDKRRGRDPEMGGKPRRKNPQEGLYNELQKDKMAEAYSEIGMKGERRRGKGHDGLYQGLSTATKDTYDALHMQALPPR

SEQ ID NO: 2049 - protein, 492 aa, synthetic construct
  REGION 1..492: note = Synthetic
MALPVTALLLPLALLLHAARPQVQLVESGGGVVQPGRSLRLSCAASGFTFTSYDMHWVRQAPGKGLEWVTIIWFDGSNKYYADSVKGRFTISRDNSKNTLYLQMNSLSAEDTAVYYCARGDNWNDRYYYYYYMDVWGKGTTVTVSSGSTSGSGKPGSGEGSTKGEIVLTQSPDFQSVTPKEKVTITCRASQSIGSSLHWYQQKPDQSPMLLIKFASQSISGVPSRFSGSGSGTDFTLTINSLEAEDAAAYYCHQSSSLPWTFGQGTKVEIKAAATTTPAPRPPTPAPTIASQPLSLRPEACRPAAGGAVHTRGLDFACDIYIWAPLAGTCGVLLLSLVITLYCRRDQRLPPDAHKPPGGGSFRTPIQEEQADAHSTLAKIRVKFSRSADAPAYQQGQNQLYNELNLGRREEYDVLDKRRGRDPEMGGKPRRKNPQEGLYNELQKDKMAEAYSEIGMKGERRRGKGHDGLYQGLSTATKDTYDALHMQALPPR

SEQ ID NO: 2050 - protein, 497 aa, synthetic construct
  REGION 1..497: note = Synthetic
MALPVTALLLPLALLLHAARPQVQLVQSGAEVKKPGASVKVSCKASGYTFTSYGISWVRQAPGQGLEWMGWISAYNGHTDYTQKLQGRVTMTTDTSTTTAYMELRSLSSADTAVYYCVREVVLPTTDYYYFYMDVWGKGTTVTVSSGSTSGSGKPGSGEGSTKGDIVMTQPPLSSPVTLGQPASISCRSSQSLVHSDGNTYLSWLQQRPGQPPRLLIYKVSNRFSGVPDRFSGSGAGTDFTLKISRVEAEDVGVYYCTQATQFPHTFGQGTKLEIKAAATTTPAPRPPTPAPTIASQPLSLRPEACRPAAGGAVHTRGLDFACDIYIWAPLAGTCGVLLLSLVITLYCRRDQRLPPDAHKPPGGGSFRTPIQEEQADAHSTLAKIRVKFSRSADAPAYQQGQNQLYNELNLGRREEYDVLDKRRGRDPEMGGKPRRKNPQEGLYNELQKDKMAEAYSEIGMKGERRRGKGHDGLYQGLSTATKDTYDALHMQALPPR

SEQ ID NO: 2051 - protein, 496 aa, synthetic construct
  REGION 1..496: note = Synthetic
MALPVTALLLPLALLLHAARPQVQLVQSGAEVKKPGASVKVSCKVSGYTLTELSMHWVRQAPGKGLEWMGGFDPEDGETIYAQKFQGRVTMTEDTSTDTAYMELSSLRSEDTAVYYCATGRITMVRGVIIPYYYYYMDVWGKGTTVTVSSGSTSGSGKPGSGEGSTKGDIQMTQSPSSLSASVGDRVTITCRASQGISSWLAWYQQKPEKAPKSLIYAASSLQSGVPSRFSGSGSGTDFTLTISSLQPEDFATYYCQQYNSYPYTFGQGTKLEIKAAATTTPAPRPPTPAPTIASQPLSLRPEACRPAAGGAVHTRGLDFACDIYIWAPLAGTCGVLLLSLVITLYCRRDQRLPPDAHKPPGGGSFRTPIQEEQADAHSTLAKIRVKFSRSADAPAYQQGQNQLYNELNLGRREEYDVLDKRRGRDPEMGGKPRRKNPQEGLYNELQKDKMAEAYSEIGMKGERRRGKGHDGLYQGLSTATKDTYDALHMQALPPR

SEQ ID NO: 2052 - protein, 494 aa, synthetic construct
  REGION 1..494: note = Synthetic
MALPVTALLLPLALLLHAARPQVQLVQSGTEVKKPGASVKVSCKASGYTFTNYGIGWVRQAPGQGLEWMGWIIAYNGYTKYAQILQGRVTMTTDTSTNTAYMELRSLRSDDTAVYYCARQQLGGDYHYYMDVWGKGTTVTVSSGSTSGSGKPGSGEGSTKGDIVMTQTPLSLSVTPGQPASISCKSSKSLLHSDGKTYLYWYLQKPGQPPQLLIYEVSNRFSGVPDRFSGSGSGTDFTLKISRVEAEDVGVYYCMQSIQFPWTFGQGTKVEIKAAATTTPAPRPPTPAPTIASQPLSLRPEACRPAAGGAVHTRGLDFACDIYIWAPLAGTCGVLLLSLVITLYCRRDQRLPPDAHKPPGGGSFRTPIQEEQADAHSTLAKIRVKFSRSADAPAYQQGQNQLYNELNLGRREEYDVLDKRRGRDPEMGGKPRRKNPQEGLYNELQKDKMAEAYSEIGMKGERRRGKGHDGLYQGLSTATKDTYDALHMQALPPR

SEQ ID NO: 2053 - protein, 494 aa, synthetic construct
  REGION 1..494: note = Synthetic
MALPVTALLLPLALLLHAARPQVQLVQSGTEVKKPGASVKVSCKASGYTFTNYGIGWVRQAPGQGLEWMGWIIAYNGYTKYAQILQGRVTMTTDTSTNTAYMELRSLRSDDTAVYYCARQQLGGDYHYYMDVWGKGTTVTVSSGSTSGSGKPGSGEGSTKGDIVMTQTPLSLSVTPGQPASISCKSSKSLLHSDGKTYLYWYLQKPGQPPQLLIYEVSTRFSGVPDRFSGSGSGTDFTLKISRVEAEDVGVYYCMQSIQFPWTFGQGTKVEIKAAATTTPAPRPPTPAPTIASQPLSLRPEACRPAAGGAVHTRGLDFACDIYIWAPLAGTCGVLLLSLVITLYCRRDQRLPPDAHKPPGGGSFRTPIQEEQADAHSTLAKIRVKFSRSADAPAYQQGQNQLYNELNLGRREEYDVLDKRRGRDPEMGGKPRRKNPQEGLYNELQKDKMAEAYSEIGMKGERRRGKGHDGLYQGLSTATKDTYDALHMQALPPR

SEQ ID NO: 2054 - protein, 492 aa, synthetic construct
  REGION 1..492: note = Synthetic
MALPVTALLLPLALLLHAARPQVQLVQSGTEVKKPGASVKVSCKTSGYTFTSYDINWVRQATGQGLEWMGWMNPISGDTGSAQKFQGRVTMTRNTSIGTAYMELSSLRSEDTAVYYCARGGYCSSTSCYYYYMDVWGKGTTVTVSSGSTSGSGKPGSGEGSTKGDIQMTQSPSSLSASVGDRVTITCRASQGISNWLAWYQQKPEKAPKSLIYAASSLQGGVPSRFSGSGSGTDFTLTISSLQPEDFATYYCQQYDSYPYTFGQGTKLEIKAAATTTPAPRPPTPAPTIASQPLSLRPEACRPAAGGAVHTRGLDFACDIYIWAPLAGTCGVLLLSLVITLYCRRDQRLPPDAHKPPGGGSFRTPIQEEQADAHSTLAKIRVKFSRSADAPAYQQGQNQLYNELNLGRREEYDVLDKRRGRDPEMGGKPRRKNPQEGLYNELQKDKMAEAYSEIGMKGERRRGKGHDGLYQGLSTATKDTYDALHMQALPPR

SEQ ID NO: 2055 - protein, 492 aa, synthetic construct
  REGION 1..492: note = Synthetic
MALPVTALLLPLALLLHAARPQVQLVQSGAEVKKPGASVKVSCKASGYTFTSYDINWVRQATGQGLEWMGWMIPNSGDTGSAQKFQGRVTMTRNTSISTAYMELSSLRSEDTAVYYCARGGYCNSTSCYYYYMDVWGKGTTVTVSSGSTSGSGKPGSGEGSTKGDIQMTQSPSSLSASVGDRVTITCRASQGISSWLAWYQQKPEKAPKSLIYAASSLQGGVPSRFSGSGSGTDFTLTISSLQPEDFATYYCQQYDSYPYTFGQGTKLEIKAAATTTPAPRPPTPAPTIASQPLSLRPEACRPAAGGAVHTRGLDFACDIYIWAPLAGTCGVLLLSLVITLYCRRDQRLPPDAHKPPGGGSFRTPIQEEQADAHSTLAKIRVKFSRSADAPAYQQGQNQLYNELNLGRREEYDVLDKRRGRDPEMGGKPRRKNPQEGLYNELQKDKMAEAYSEIGMKGERRRGKGHDGLYQGLSTATKDTYDALHMQALPPR

SEQ ID NO: 2056 - protein, 493 aa, synthetic construct
  REGION 1..493: note = Synthetic
MALPVTALLLPLALLLHAARPEVQLLESGGGLVQPGGSLRLSCAASGFTFSSYVMNWVRQAPGKGLEWVSSVSGSGNNSFYADSVKGRFTISRDNSKNTLYLQMNSLRAEDTAVYYCASRSSSYLYYYYYMDVWGKGTTVTVSSGSTSGSGKPGSGEGSTKGEIVLTQSPGTLSLSPGERATLSCRASQSVSSSYLAWYQQKPGQAPRLLIYGASSRATGIPDRFSDSGSGTDFTLTISRLEPEDFAVYYCQHYGSSPPRITFGPGTKVDIKAAATTTPAPRPPTPAPTIASQPLSLRPEACRPAAGGAVHTRGLDFACDIYIWAPLAGTCGVLLLSLVITLYCRRDQRLPPDAHKPPGGGSFRTPIQEEQADAHSTLAKIRVKFSRSADAPAYQQGQNQLYNELNLGRREEYDVLDKRRGRDPEMGGKPRRKNPQEGLYNELQKDKMAEAYSEIGMKGERRRGKGHDGLYQGLSTATKDTYDALHMQALPPR

SEQ ID NO: 2057 - DNA, 1476 bp, synthetic construct
  misc_feature 1..1476: note = Synthetic
  source 1..1476: mol_type = other DNA
atggccttaccagtgaccgccttgctcctgccgctggccttgctgctccacgccgccaggccgcaggtgcagctggtggagtctgggggaggcgtggtccagcctgggaggtccctgagactttcctgtgcagcgtctggattcaccttcagcagtcatgacatgcactgggtccgccaggctccaggcaaggggctggactgggtggcagttatatggagtgatggaaataaaaaatactatgtagactccgcgaagggccggttcaccatctccagagacaattccaagaacacggtgtatctgcaaatgaacagcctgagagccgaggacacggctatatattactgtgcgagaggtgacaactggaacgacgaacactcctactattactacatggacgtctggggcaaggggaccacggtcaccgtctcctcaggcagcaccagcggcagcggcaagcccggctccggagagggcagcaccaagggcgaaattgtgctgactcagtctccagactttcagtctgtgactccaaaggagaaagtcaccatcacctgccgggccagtcagaccattggcagtagcttacactggtaccagcagaaaccagatcagtctccaaagctcctcatcaagcatgcttcccagtccttctcaggggtcccctcgaggttcagtggcagtggatctgggacagatttcaccctcaccgtcaatagcctggaagctgaagatgctgcaacgtattactgtcatcagagtagtagtttaccgtggacgttcggccaagggaccaaggtggaaatcaaagcggccgcaaccacgacgccagcgccgcggccaccaacaccggcgcccaccatcgcgtcgcagcccctgtccctgcgcccagaggcgtgccggccagcggcggggggcgcagtgcacacgagggggctggacttcgcctgtgatatctacatctgggcgcccttggccgggacttgtggggtccttctcctgtcactggttatcaccctttactgccggagggaccagaggctgccccccgatgcccacaagccccctgggggaggcagtttccggacccccatccaagaggagcaggccgacgcccactccaccctggccaagatcagagtgaagttcagcaggagcgcagacgcccccgcgtaccagcagggccagaaccagctctataacgagctcaatctaggacgaagagaggagtacgatgttttggacaagagacgtggccgggaccctgagatggggggaaagccgagaaggaagaaccctcaggaaggcctgtacaatgaactgcagaaagataagatggcggaggcctacagtgagattgggatgaaaggcgagcgccggaggggcaaggggcacgatggcctttaccagggtctcagtacagccaccaaggacacctacgacgcccttcacatgcaggccctgccccctcgc

SEQ ID NO: 2058 - DNA, 1476 bp, synthetic construct
  misc_feature 1..1476: note = Synthetic
  source 1..1476: mol_type = other DNA
atggccttaccagtgaccgccttgctcctgccgctggccttgctgctccacgccgccaggccgcaggtgcagctggtggagtctgggggaggcgtggtccagcctgggaggtccctgagactttcctgtgcagcgtctggattcaccttcagtagtcatgacatgcactgggtccgccaggctccaggcaaggggctggactgggtggcagttatatggagtgatggaaataataaatactatgcagactccgcgaagggccggttcaccatctccagagacaattccaagaacacggtgtatctgcaaatgaacagcctgagagccgaggacacggctatatattactgtgcgagaggtgacaactggaacgacgaacactcctactattactacatggacgtctggggcaaggggaccacggtcaccgtctcctcaggcagcaccagcggcagcggcaagcccggctccggagagggcagcaccaagggcgaaattgtgctgactcagtctccagactttcagtctgtgactccaaaggagaaagtcaccatcacctgccgggccagtcagaccattggcagtagcttacactggtaccagcagaaaccagatcagtctccaaagctcctcatcaagcatgcttcccagtccttctcaggggtcccctcgaggttcagtggcagtggatctgggacagatttcaccctcaccgtcaatagcctggaagctgaagatgctgcaacgtattactgtcatcagagtagtagtttaccgtggacgttcggccaagggaccaaggtggaaatcaaagcggccgcaaccacgacgccagcgccgcggccaccaacaccggcgcccaccatcgcgtcgcagcccctgtccctgcgcccagaggcgtgccggccagcggcggggggcgcagtgcacacgagggggctggacttcgcctgtgatatctacatctgggcgcccttggccgggacttgtggggtccttctcctgtcactggttatcaccctttactgccggagggaccagaggctgccccccgatgcccacaagccccctgggggaggcagtttccggacccccatccaagaggagcaggccgacgcccactccaccctggccaagatcagagtgaagttcagcaggagcgcagacgcccccgcgtaccagcagggccagaaccagctctataacgagctcaatctaggacgaagagaggagtacgatgttttggacaagagacgtggccgggaccctgagatggggggaaagccgagaaggaagaaccctcaggaaggcctgtacaatgaactgcagaaagataagatggcggaggcctacagtgagattgggatgaaaggcgagcgccggaggggcaaggggcacgatggcctttaccagggtctcagtacagccaccaaggacacctacgacgcccttcacatgcaggccctgccccctcgc

SEQ ID NO: 2059 - DNA, 1473 bp, synthetic construct
  misc_feature 1..1473: note = Synthetic
  source 1..1473: mol_type = other DNA
atggccttaccagtgaccgccttgctcctgccgctggccttgctgctccacgccgccaggccgcagcttcagctggtgcagtctggagctgaggtgaagaagcctggggcctcagtgaaggtctcctgcaaggcttctggttacacctttaccaactatggtatcagctggttgcgacaggcccctggacaagggcttgagtggatgggatggatcagtggttacaatgataacacacactatgcacagaagttccagggcagagtcaccatgaccacagacacatccacgaccacagcctacatggaactgaggaacctgagatctgacgacacggccgtgtattactgtgcgagagatgggatagcagctcgtccagtctactactactacatggacgtctggggcaaagggaccacggtcaccgtctcctcaggcagcaccagcggcagcggcaagcccggctccggagagggcagcaccaagggcgacatacagatgacccagtctccatcctccctgtctgcatctgtaggagacagagtcaccatcacttgccgggcaagccagagcattagcaactatttaaattggtatcaccagaaaccagggaaagcccctaagctcctgatctatgctgcatccagtttggaaagtggggtcccatcaaggttcagtggcagtggatctgggacagatttcactctcaccatcagcagtctgcaacctgaagattttgcaacttactactgtcaacagagttacagtaacccgctcactttcggcggagggaccaaggtggagagcaaagcggccgcaaccacgacgccagcgccgcggccaccaacaccggcgcccaccatcgcgtcgcagcccctgtccctgcgcccagaggcgtgccggccagcggcggggggcgcagtgcacacgagggggctggacttcgcctgtgatatctacatctgggcgcccttggccgggacttgtggggtccttctcctgtcactggttatcaccctttactgccggagggaccagaggctgccccccgatgcccacaagccccctgggggaggcagtttccggacccccatccaagaggagcaggccgacgcccactccaccctggccaagatcagagtgaagttcagcaggagcgcagacgcccccgcgtaccagcagggccagaaccagctctataacgagctcaatctaggacgaagagaggagtacgatgttttggacaagagacgtggccgggaccctgagatggggggaaagccgagaaggaagaaccctcaggaaggcctgtacaatgaactgcagaaagataagatggcggaggcctacagtgagattgggatgaaaggcgagcgccggaggggcaaggggcacgatggcctttaccagggtctcagtacagccaccaaggacacctacgacgcccttcacatgcaggccctgccccctcgc

SEQ ID NO: 2060 - DNA, 1476 bp, synthetic construct
  misc_feature 1..1476: note = Synthetic
  source 1..1476: mol_type = other DNA
atggccttaccagtgaccgccttgctcctgccgctggccttgctgctccacgccgccaggccgcaggtgcagctggtggagtctgggggaggcgtggtccagcctgggaggtccctgagactctcctgtgtagcgtctggattcaccttcagtagcaatgacatatactgggtccgccaggccccaggcaaggggctggagtgggtggcagttatatggtatgatggaagtaataaatactatgcagactccgtgaagggccgattcaccatctccagagacaattccaagaacacgctgtatctgcaaatgaacagcctgagagccgaggacacggctgtgtattactgtgcgagaggtgacaactggaacgacgaacaccactaccactactacatggacgtctggggcaaagggaccacggtcaccgtctcctcaggcagcaccagcggcagcggcaagcccggctccggagagggcagcaccaagggcgaaattgtgctgactcagtctccagactttcagtctgtgactccaaaggagaaagtcaccatcacctgccgggccagtcagagcattggtagtagcttacactggtaccagcagaaaccagatcagtctccaaagctcctcatcaagtttgcttcccagtccttctcaggggtcccctcgaggttcagtggcagtggatctgggacagatttcaccctcaccatccatagcctggaagctgaagatgctgcaacgtattactgtcatcagagtggtagtttaccgtggacgttcggccaagggaccaaggtggaaatcaaagcggccgcaaccacgacgccagcgccgcggccaccaacaccggcgcccaccatcgcgtcgcagcccctgtccctgcgcccagaggcgtgccggccagcggcggggggcgcagtgcacacgagggggctggacttcgcctgtgatatctacatctgggcgcccttggccgggacttgtggggtccttctcctgtcactggttatcaccctttactgccggagggaccagaggctgccccccgatgcccacaagccccctgggggaggcagtttccggacccccatccaagaggagcaggccgacgcccactccaccctggccaagatcagagtgaagttcagcaggagcgcagacgcccccgcgtaccagcagggccagaaccagctctataacgagctcaatctaggacgaagagaggagtacgatgttttggacaagagacgtggccgggaccctgagatggggggaaagccgagaaggaagaaccctcaggaaggcctgtacaatgaactgcagaaagataagatggcggaggcctacagtgagattgggatgaaaggcgagcgccggaggggcaaggggcacgatggcctttaccagggtctcagtacagccaccaaggacacctacgacgcccttcacatgcaggccctgccccctcgc

SEQ ID NO: 2061 - DNA, 1456 bp, synthetic construct
  misc_feature 1..1456: note = Synthetic
  source 1..1456: mol_type = other DNA
atggccttaccagtgaccgccttgctcctgccgctggccttgctgctccacgccgccaggccgcaggtgcagttggtggagtctgggggaggcgtggtccagcctgggaggtccctgagactctcctgtgcagcctctggattcaccttcagtagctatggcatgcactgggtccgccaggctccaggcaaggggctggagtgggtggcagttatatcatatgatggaagtaataaatactatgcagactccgtgaagggccgattcaccatctccagggacaattccaagaccacgctgtatctgcaaatgaacagcctgagagctgaggacacggctgtgtattactgtgcgagagatcactactactactacatggacgtctggggcaaagggaccacggtcaccgtctcctcaggcagcaccagcggcagcggcaagcccggctccggagagggcagcaccaagggcggtgacccaggagccatcgttctcagtgtcccctggagggacagtcacactcacttgtggcttgagctctggctcagtctctactagttactaccccagctggtaccagcagaccccaggccaggctccacgcacgctcatctacagcacaaacattcgctcttctggggtccctgatcgcttctctggctccatccttgggaacaaagctgccctcaccatcacgggggcccaggcagatgatgaatctgattattactgtgtgctgtatatgggtagtgacattgtggtattcggcggagggaccaagctgaccgtcctagcggccgcaaccacgacgccagcgccgcggccaccaacaccggcgcccaccatcgcgtcgcagcccctgtccctgcgcccagaggcgtgccggccagcggcggggggcgcagtgcacacgagggggctggacttcgcctgtgatatctacatctgggcgcccttggccgggacttgtggggtccttctcctgtcactggttatcaccctttactgccggagggaccagaggctgccccccgatgcccacaagccccctgggggaggcagtttccggacccccatccaagaggagcaggccgacgcccactccaccctggccaagatcagagtgaagttcagcaggagcgcagacgcccccgcgtaccagcagggccagaaccagctctataacgagctcaatctaggacgaagagaggagtacgatgttttggacaagagacgtggccgggaccctgagatggggggaaagccgagaaggaagaaccctcaggaaggcctgtacaatgaactgcagaaagataagatggcggaggcctacagtgagattgggatgaaaggcgagcgccggaggggcaaggggcacgatggcctttaccagggtctcagtacagccaccaaggacacctacgacgcccttcacatgcaggccctgccccctcgc

SEQ ID NO: 2062 - DNA, 1470 bp, synthetic construct
  misc_feature 1..1470: note = Synthetic
  source 1..1470: mol_type = other DNA
atggccttaccagtgaccgccttgctcctgccgctggccttgctgctccacgccgccaggccgcaactgcagctgcaggagtcgggcccaggactggtgaagccttcggagaccctgtccctcacctgcactgtctctggtggctccatcagcagtagtagttactactggggctggatccgccagcccccagggaaggggctggagtggattgggagtctctattatagtgggagcacctactacaacccgtccctcaagagtcgagtcaccatatccgttgacacgtccaagaaccagttctccctgaagctgagctctgtgaccgccgcagacacggctgtgtattactgtgcggccgtacaactggaacgacgtgggtacttctacatggacgtctggggcaaagggaccacggtcaccgtctcctcaggcagcaccagcggcagcggcaagcccggctccggagagggcagcaccaagggcgaaattgtgttgacacagtctccagccaccctgtctttgtctccaggggaaagagccaccctctcctgcagggccagtcagagtgttagcagctactttgcctggtaccaacagaaacctggccaggctcccaggctcctcatctatgatgcatccaacagggccactggcatcccagccaggttcagtggcagtgggtctgggacagacttcactctcaccatcagcagcctggagcctgaagattttgcagtttattactgtcagcagcgtagcaactggcctctcactttcggcggagggaccaaggtggagatcaaagcggccgcaaccacgacgccagcgccgcggccaccaacaccggcgcccaccatcgcgtcgcagcccctgtccctgcgcccagaggcgtgccggccagcggcggggggcgcagtgcacacgagggggctggacttcgcctgtgatatctacatctgggcgcccttggccgggacttgtggggtccttctcctgtcactggttatcaccctttactgccggagggaccagaggctgccccccgatgcccacaagccccctgggggaggcagtttccggacccccatccaagaggagcaggccgacgcccactccaccctggccaagatcagagtgaagttcagcaggagcgcagacgcccccgcgtaccagcagggccagaaccagctctataacgagctcaatctaggacgaagagaggagtacgatgttttggacaagagacgtggccgggaccctgagatggggggaaagccgagaaggaagaaccctcaggaaggcctgtacaatgaactgcagaaagataagatggcggaggcctacagtgagattgggatgaaaggcgagcgccggaggggcaaggggcacgatggcctttaccagggtctcagtacagccaccaaggacacctacgacgcccttcacatgcaggccctgccccctcgc

SEQ ID NO: 2063 - DNA, 1476 bp, synthetic construct
  misc_feature 1..1476: note = Synthetic
  source 1..1476: mol_type = other DNA
atggccttaccagtgaccgccttgctcctgccgctggccttgctgctccacgccgccaggccgcaggtgcagctggtggagtctgggggaggcgtggtccagcctgggaggtccctgagactctcctgtgcagcatctggattcaccttcagtaactatggcatgcactgggtccgccaggctccaggcaaggggctggagtggatggcagttatatggtctgatggacataataaatactatgcagactccgtgaagggccgattcaccatctccagagacaattccaagaacacgctgtatctgcaaatgaacagcctgagagccgaggacacggctgtgtattactgtgcgagggcacaattggaacgacggtacttctactacatggacgtctggggcaaagggaccacggtcaccgtctcctcaggcagcaccagcggcagcggcaagcccggctccggagagggcagcaccaagggccagactgtagtgacccaggaaccatcgttctcagtgtcccctggagggacagtcacactcacttgtggcttgacctctggctcagtctctactagttactaccccaactggtaccagcagaccccaggccaggctccacgcacgctcatctatagtacaaatattcgctcttctggggtccctgatcgcttctctggctccatccttgggaacaaagctgccctcaccatcacgggggcccaggcagatgatgaatctgattattactgtgtgctgtatatgggtagtggcatgtttattttcggcagtggaaccaaggtcactgtcctagcggccgcaaccacgacgccagcgccgcggccaccaacaccggcgcccaccatcgcgtcgcagcccctgtccctgcgcccagaggcgtgccggccagcggcggggggcgcagtgcacacgagggggctggacttcgcctgtgatatctacatctgggcgcccttggccgggacttgtggggtccttctcctgtcactggttatcaccctttactgccggagggaccagaggctgccccccgatgcccacaagccccctgggggaggcagtttccggacccccatccaagaggagcaggccgacgcccactccaccctggccaagatcagagtgaagttcagcaggagcgcagacgcccccgcgtaccagcagggccagaaccagctctataacgagctcaatctaggacgaagagaggagtacgatgttttggacaagagacgtggccgggaccctgagatggggggaaagccgagaaggaagaaccctcaggaaggcctgtacaatgaactgcagaaagataagatggcggaggcctacagtgagattgggatgaaaggcgagcgccggaggggcaaggggcacgatggcctttaccagggtctcagtacagccaccaaggacacctacgacgcccttcacatgcaggccctgccccctcgc

SEQ ID NO: 2064 - DNA, 1476 bp, synthetic construct
  misc_feature 1..1476: note = Synthetic
  source 1..1476: mol_type = other DNA
atggccttaccagtgaccgccttgctcctgccgctggccttgctgctccacgccgccaggccgcaggtgcagctggtgcagtctggggctgaggtgaagaagcctggggcctcagtgaaggtctcctgcaaggcttctggatacaccttcaccagttatgatatcaactgggtgcgacaggccactggacaagggcttgagtggatgggatggatgatccctaacagtggtgacacaggctctgcacagaagttccagggcagagtcaccatgaccaggaacacctccataggcacagcctacatggagctgagcagcctgagatctgaggacacggccgtttattactgtgcgagaggcggatattgtaatagtaccagttgctactactactacatggacgtctggggcaaagggaccacggtcaccgtctcctcaggcagcaccagcggcagcggcaagcccggctccggagagggcagcaccaagggcgacatccagatgacccagtctccatcctcactgtctgcatctgtaggagacagagtcaccatcacttgtcgggcgagtcagggtattagcagctggttagcctggtatcagcagaaaccagagaaagcccctaagtccctgatctatgctgcatccagtttacagggtggggtcccatcaaggttcagcggcagtggatctgggacagatttcactctcaccatcagcagcctgcagcctgaagattttgcaacttattactgccaacagtatgatagttacccgtacacttttggccaggggaccaagctggagatcaaagcggccgcaaccacgacgccagcgccgcggccaccaacaccggcgcccaccatcgcgtcgcagcccctgtccctgcgcccagaggcgtgccggccagcggcggggggcgcagtgcacacgagggggctggacttcgcctgtgatatctacatctgggcgcccttggccgggacttgtggggtccttctcctgtcactggttatcaccctttactgccggagggaccagaggctgccccccgatgcccacaagccccctgggggaggcagtttccggacccccatccaagaggagcaggccgacgcccactccaccctggccaagatcagagtgaagttcagcaggagcgcagacgcccccgcgtaccagcagggccagaaccagctctataacgagctcaatctaggacgaagagaggagtacgatgttttggacaagagacgtggccgggaccctgagatggggggaaagccgagaaggaagaaccctcaggaaggcctgtacaatgaactgcagaaagataagatggcggaggcctacagtgagattgggatgaaaggcgagcgccggaggggcaaggggcacgatggcctttaccagggtctcagtacagccaccaaggacacctacgacgcccttcacatgcaggccctgccccctcgc

SEQ ID NO: 2065 - DNA, 1479 bp, synthetic construct
  misc_feature 1..1479: note = Synthetic
  source 1..1479: mol_type = other DNA
atggccttaccagtgaccgccttgctcctgccgctggccttgctgctccacgccgccaggccgcaggtgcagctggtgcagtctggggctgaggtgaagaagcctggggcctcagtgaaggtctcctgcaaggcttctggatacaccttcaccagttatgatatcaactgggtgcgacaggccactggacaagggcttgagtggatgggatggatgaaccctaatagtggtaacacagtctatgcacagaagttccagggcagagtcaccatgaccaggaacacctccataagcacagcctacatggagctgagcagcctgagatctgaggacacggccgtgtattactgtgcgagaggaggcgatttttggagtggttaccatgactactactactacatggacgtctggggcaaagggaccacggtcaccgtctcctcaggcagcaccagcggcagcggcaagcccggctccggagagggcagcaccaagggcgacatccaggtgacccagtctccaaccttcctgtctgcatctgtaggagacagagtcaccatcacttgccgggccagtcagggcattagcagttatttagcctggtatcagcaaaaaccagggaaagcccctaagctcctgatctatggtgcatccactttgcaaagtggggtcccatcaaggttcagcggcagtggatctgggacagaattcactctcacaatcagcagcctgcagcctgaagattttgcaacttattactgtcaacagcttaatagttacccgtggacgttcggccaagggaccaaggtggaaatcaaagcggccgcaaccacgacgccagcgccgcggccaccaacaccggcgcccaccatcgcgtcgcagcccctgtccctgcgcccagaggcgtgccggccagcggcggggggcgcagtgcacacgagggggctggacttcgcctgtgatatctacatctgggcgcccttggccgggacttgtggggtccttctcctgtcactggttatcaccctttactgccggagggaccagaggctgccccccgatgcccacaagccccctgggggaggcagtttccggacccccatccaagaggagcaggccgacgcccactccaccctggccaagatcagagtgaagttcagcaggagcgcagacgcccccgcgtaccagcagggccagaaccagctctataacgagctcaatctaggacgaagagaggagtacgatgttttggacaagagacgtggccgggaccctgagatggggggaaagccgagaaggaagaaccctcaggaaggcctgtacaatgaactgcagaaagataagatggcggaggcctacagtgagattgggatgaaaggcgagcgccggaggggcaaggggcacgatggcctttaccagggtctcagtacagccaccaaggacacctacgacgcccttcacatgcaggccctgccccctcgc

SEQ ID NO: 2066 - DNA, 1473 bp, synthetic construct
  misc_feature 1..1473: note = Synthetic
  source 1..1473: mol_type = other DNA
atggccttaccagtgaccgccttgctcctgccgctggccttgctgctccacgccgccaggccgcaggtgcagctgcaggagtcgggcccaggactggtgaagccttcggagaccctgtccctcacctgcactgtctctggtggctccatcagtagttactactggagctggatccggcagcccgccgggaagggactggagtggattgggcgtatctataccagtgggagcaccaactacaacccctccctcaagagtcgagtcaccatgtcagtagacacgtccaagaaccagttctccctgaagctgagctctgtgaccgccgcggacacggccgtgtattactgtgcgagagaggagtaccagctgctaccggccctctactactactactacatggacgtctggggcaaagggaccacggtcaccgtctcctcaggcagcaccagcggcagcggcaagcccggctccggagagggcagcaccaagggctcctatgagctgactcagccaccctcagtgtccgtgtccccaggacagacagccagcatcacctgctctggagataaattgggggataaatatgcttgctggtatcagcagaagccaggccagtcccctgtgctggtcatctatcaagatagcaagcggccctcagggatccctgagcgattctctggctccaactctgggaacacagccactctgaccatcagcgggacccaggctatggatgaggctgactattactgtcaggcgtgggacagcagcactgctgtgttcggaggaggcacccagctgaccgccctcgcggccgcaaccacgacgccagcgccgcggccaccaacaccggcgcccaccatcgcgtcgcagcccctgtccctgcgcccagaggcgtgccggccagcggcggggggcgcagtgcacacgagggggctggacttcgcctgtgatatctacatctgggcgcccttggccgggacttgtggggtccttctcctgtcactggttatcaccctttactgccggagggaccagaggctgccccccgatgcccacaagccccctgggggaggcagtttccggacccccatccaagaggagcaggccgacgcccactccaccctggccaagatcagagtgaagttcagcaggagcgcagacgcccccgcgtaccagcagggccagaaccagctctataacgagctcaatctaggacgaagagaggagtacgatgttttggacaagagacgtggccgggaccctgagatggggggaaagccgagaaggaagaaccctcaggaaggcctgtacaatgaactgcagaaagataagatggcggaggcctacagtgagattgggatgaaaggcgagcgccggaggggcaaggggcacgatggcctttaccagggtctcagtacagccaccaaggacacctacgacgcccttcacatgcaggccctgccccctcgc

SEQ ID NO: 2067 - DNA, 1476 bp, synthetic construct
  misc_feature 1..1476: note = Synthetic
  source 1..1476: mol_type = other DNA
atggccttaccagtgaccgccttgctcctgccgctggccttgctgctccacgccgccaggccgcaggtgcagctggtggagtctgggggaggcgtggtccagcctgggaggtccctgagactctcctgtgcagcaactggattcaccttcagtagctatggcatgcactgggtccgccaggctccaggcaaggggctggagtggatggtagttatatggtctgatggacataataaatactatgcagactccgtgaagggccgattcaccatctccagagacaattccaagaacacgctgtatctgcaaatgaacagcctgagagccgaggacacggctgtgtattactgtgcgagggcacaactggaacgacggtacttctactacatggacgtctggggcaaagggaccacggtcaccgtctcctcaggcagcaccagcggcagcggcaagcccggctccggagagggcagcaccaagggccagactgtagtgacccaggaaccatcgttctcagtgtcccctggagggacagtcacactcacttgtggcttgacctctggctcagtctctactagttactaccccaactggtaccagcagaccccaggccaggctccacgcacgctcatctacagcacaaatattcgctcttctggggtccctgatcgcttctctggctccatccttgggaacaaagctgccctcaccatcacgggggcccaggcagatgatgaatctgattattactgtgtgctgtatatgggtagtggcatgtttattttcggcagtggaaccaaggtcactgtcctagcggccgcaaccacgacgccagcgccgcggccaccaacaccggcgcccaccatcgcgtcgcagcccctgtccctgcgcccagaggcgtgccggccagcggcggggggcgcagtgcacacgagggggctggacttcgcctgtgatatctacatctgggcgcccttggccgggacttgtggggtccttctcctgtcactggttatcaccctttactgccggagggaccagaggctgccccccgatgcccacaagccccctgggggaggcagtttccggacccccatccaagaggagcaggccgacgcccactccaccctggccaagatcagagtgaagttcagcaggagcgcagacgcccccgcgtaccagcagggccagaaccagctctataacgagctcaatctaggacgaagagaggagtacgatgttttggacaagagacgtggccgggaccctgagatggggggaaagccgagaaggaagaaccctcaggaaggcctgtacaatgaactgcagaaagataagatggcggaggcctacagtgagattgggatgaaaggcgagcgccggaggggcaaggggcacgatggcctttaccagggtctcagtacagccaccaaggacacctacgacgcccttcacatgcaggccctgccccctcgc

SEQ ID NO: 2068 - DNA, 1476 bp, synthetic construct
  misc_feature 1..1476: note = Synthetic
  source 1..1476: mol_type = other DNA
atggccttaccagtgaccgccttgctcctgccgctggccttgctgctccacgccgccaggccgcaggtgcagctggtggagtctgggggaggcgtggtccagcctgggaggtccctgagactctcctgtgcagcgtctggattcaccttcactagttatgacatgcactgggtccgccaggctccaggcaaggggctggagtgggtgacaattatatggtttgatggaagtaataaatactatgcagactccgtgaagggccgattcaccatctccagagacaattccaagaacacgctgtatctgcaaatgaacagcctgagcgccgaggacacggctgtgtattactgtgcgagaggagacaactggaacgaccggtactactactactactacatggacgtctggggcaaagggaccacggtcaccgtctcctcaggcagcaccagcggcagcggcaagcccggctccggagagggcagcaccaagggcgaaattgtgctgactcagtctccagactttcagtctgtgactccaaaggagaaagtcaccatcacctgccgggccagtcagagcattggtagtagcttacactggtaccagcagaaaccagatcagtctccaatgctcctcatcaagtttgcttcccagtccatctcaggggtcccctcgaggttcagtggcagtggatctgggacagatttcaccctcaccatcaatagcctggaagctgaagatgctgcagcgtattactgtcatcagagtagtagtttaccgtggacgttcggccaagggaccaaggtggaaatcaaagcggccgcaaccacgacgccagcgccgcggccaccaacaccggcgcccaccatcgcgtcgcagcccctgtccctgcgcccagaggcgtgccggccagcggcggggggcgcagtgcacacgagggggctggacttcgcctgtgatatctacatctgggcgcccttggccgggacttgtggggtccttctcctgtcactggttatcaccctttactgccggagggaccagaggctgccccccgatgcccacaagccccctgggggaggcagtttccggacccccatccaagaggagcaggccgacgcccactccaccctggccaagatcagagtgaagttcagcaggagcgcagacgcccccgcgtaccagcagggccagaaccagctctataacgagctcaatctaggacgaagagaggagtacgatgttttggacaagagacgtggccgggaccctgagatggggggaaagccgagaaggaagaaccctcaggaaggcctgtacaatgaactgcagaaagataagatggcggaggcctacagtgagattgggatgaaaggcgagcgccggaggggcaaggggcacgatggcctttaccagggtctcagtacagccaccaaggacacctacgacgcccttcacatgcaggccctgccccctcgc

SEQ ID NO: 2069 - DNA, 1491 bp, synthetic construct
  misc_feature 1..1491: note = Synthetic
  source 1..1491: mol_type = other DNA
atggccttaccagtgaccgccttgctcctgccgctggccttgctgctccacgccgccaggccgcaggttcagctggtgcagtctggagctgaggtgaagaagcctggggcctcagtgaaggtctcctgcaaggcttctggttacacctttaccagctatggtatcagctgggtgcgacaggcccctggacaagggcttgagtggatggggtggatcagcgcttacaatggtcacacagactatacacagaaactccagggcagagtcaccatgaccacagacacatccacgaccacagcctacatggaactgaggagcctgagctctgccgacacggccgtgtattactgtgtgagagaagtggtacttcccaccacggactactactacttttacatggacgtctggggcaaagggaccacggtcaccgtctcctcaggcagcaccagcggcagcggcaagcccggctccggagagggcagcaccaagggcgatattgtgatgacccagcctccactctcctcgcctgtcacccttggacagccggcctccatctcctgcaggtctagtcaaagcctcgtacacagtgatggaaacacctacttgagttggcttcagcagaggccaggccagcctccaagactcctaatttataaggtttctaaccggttctctggggtcccagacagattcagtggcagtggggcagggacagatttcacactgaaaatcagcagggtggaagctgaggatgtcggggtttattactgcacgcaagctacacaatttcctcacacttttggccaggggaccaagctggagatcaaagcggccgcaaccacgacgccagcgccgcggccaccaacaccggcgcccaccatcgcgtcgcagcccctgtccctgcgcccagaggcgtgccggccagcggcggggggcgcagtgcacacgagggggctggacttcgcctgtgatatctacatctgggcgcccttggccgggacttgtggggtccttctcctgtcactggttatcaccctttactgccggagggaccagaggctgccccccgatgcccacaagccccctgggggaggcagtttccggacccccatccaagaggagcaggccgacgcccactccaccctggccaagatcagagtgaagttcagcaggagcgcagacgcccccgcgtaccagcagggccagaaccagctctataacgagctcaatctaggacgaagagaggagtacgatgttttggacaagagacgtggccgggaccctgagatggggggaaagccgagaaggaagaaccctcaggaaggcctgtacaatgaactgcagaaagataagatggcggaggcctacagtgagattgggatgaaaggcgagcgccggaggggcaaggggcacgatggcctttaccagggtctcagtacagccaccaaggacacctacgacgcccttcacatgcaggccctgccccctcgc

SEQ ID NO: 2070 - DNA, 1488 bp, synthetic construct
  misc_feature 1..1488: note = Synthetic
  source 1..1488: mol_type = other DNA
atggccttaccagtgaccgccttgctcctgccgctggccttgctgctccacgccgccaggccgcaggtccagctggtacagtctggggctgaggtgaagaagcctggggcctcagtgaaggtctcctgcaaggtttccggatacaccctcactgaattatccatgcactgggtgcgacaggctcctggaaaagggcttgagtggatgggaggttttgatcctgaagatggtgaaacaatctacgcacagaagttccagggcagagtcaccatgaccgaggacacatctacagacacagcctacatggagctgagcagcctgagatctgaggacacggccgtgtattactgtgcaacaggacgtattactatggttcggggagttattatcccctactactactactacatggacgtctggggcaaagggaccacggtcaccgtctcctcaggcagcaccagcggcagcggcaagcccggctccggagagggcagcaccaagggcgacatccagatgacccagtctccatcctcactgtctgcatctgtaggagacagagtcaccatcacttgtcgggcgagtcagggtattagcagctggttagcctggtatcagcagaaaccagagaaagcccctaagtccctgatctatgctgcatccagtttgcaaagtggggtcccatcaaggttcagcggcagtggatctgggacagatttcactctcaccatcagcagcctgcagcctgaagattttgcaacttattactgccaacagtataatagttacccgtacacttttggccaggggaccaagctggagatcaaagcggccgcaaccacgacgccagcgccgcggccaccaacaccggcgcccaccatcgcgtcgcagcccctgtccctgcgcccagaggcgtgccggccagcggcggggggcgcagtgcacacgagggggctggacttcgcctgtgatatctacatctgggcgcccttggccgggacttgtggggtccttctcctgtcactggttatcaccctttactgccggagggaccagaggctgccccccgatgcccacaagccccctgggggaggcagtttccggacccccatccaagaggagcaggccgacgcccactccaccctggccaagatcagagtgaagttcagcaggagcgcagacgcccccgcgtaccagcagggccagaaccagctctataacgagctcaatctaggacgaagagaggagtacgatgttttggacaagagacgtggccgggaccctgagatggggggaaagccgagaaggaagaaccctcaggaaggcctgtacaatgaactgcagaaagataagatggcggaggcctacagtgagattgggatgaaaggcgagcgccggaggggcaaggggcacgatggcctttaccagggtctcagtacagccaccaaggacacctacgacgcccttcacatgcaggccctgccccctcgc

SEQ ID NO: 2071 - DNA, 1482 bp, synthetic construct
  misc_feature 1..1482: note = Synthetic
  source 1..1482: mol_type = other DNA
atggccttaccagtgaccgccttgctcctgccgctggccttgctgctccacgccgccaggccgcaggttcagctggtgcagtctggaactgaggtgaagaagcctggggcctcagtgaaggtctcctgcaaggcttctggttacacctttaccaactatggtatcggctgggtgcgacaggcccctggacaagggcttgagtggatgggatggatcatcgcttacaatggttacacaaagtatgcacagattctccagggcagagtcaccatgaccacagacacatccacgaacacagcttatatggaactgaggagcctgagatctgacgacacggccgtgtattactgtgcgagacagcagctcgggggggactaccactactacatggacgtctggggcaaagggaccacggtcaccgtctcctcaggcagcaccagcggcagcggcaagcccggctccggagagggcagcaccaagggcgatattgtgatgacccagactccactctctctgtccgtcacccctggacagccggcctccatctcctgcaagtctagtaagagcctcctgcatagtgatggaaagacctatttgtattggtacctgcagaagccaggccagcctccacagctcctgatctatgaagtttccaaccggttctctggagtgccagataggttcagtggcagcgggtcagggacagatttcacactgaaaatcagccgggtggaggctgaggatgttggggtttattactgcatgcaaagtatacaatttccgtggacgttcggccaagggaccaaggtggaaatcaaggcggccgcaaccacgacgccagcgccgcggccaccaacaccggcgcccaccatcgcgtcgcagcccctgtccctgcgcccagaggcgtgccggccagcggcggggggcgcagtgcacacgagggggctggacttcgcctgtgatatctacatctgggcgcccttggccgggacttgtggggtccttctcctgtcactggttatcaccctttactgccggagggaccagaggctgccccccgatgcccacaagccccctgggggaggcagtttccggacccccatccaagaggagcaggccgacgcccactccaccctggccaagatcagagtgaagttcagcaggagcgcagacgcccccgcgtaccagcagggccagaaccagctctataacgagctcaatctaggacgaagagaggagtacgatgttttggacaagagacgtggccgggaccctgagatggggggaaagccgagaaggaagaaccctcaggaaggcctgtacaatgaactgcagaaagataagatggcggaggcctacagtgagattgggatgaaaggcgagcgccggaggggcaaggggcacgatggcctttaccagggtctcagtacagccaccaaggacacctacgacgcccttcacatgcaggccctgccccctcgc

SEQ ID NO: 2072 - DNA, 1482 bp, synthetic construct
  misc_feature 1..1482: note = Synthetic
  source 1..1482: mol_type = other DNA
atggccttaccagtgaccgccttgctcctgccgctggccttgctgctccacgccgccaggccgcaggttcagctggtgcagtctggaactgaggtgaagaagcctggggcctcagtgaaggtctcctgcaaggcttctggttacacctttaccaactatggtatcggctgggtgcgacaggcccctggacaagggcttgagtggatgggatggatcatcgcttacaatggttacacaaagtatgcacagattctccagggcagagtcaccatgaccacggacacatccacgaacacagcctatatggaactgaggagcctgagatctgacgacacggccgtgtattactgtgcgcgacagcagctcgggggggactaccactactacatggacgtctggggcaaagggaccacggtcaccgtctcttcaggcagcaccagcggcagcggcaagcccggctccggagagggcagcaccaagggcgatattgtgatgacccagactccactctctctgtccgtcacccctggacagccggcctccatctcctgcaagtctagtaagagcctcctgcatagtgatggaaagacctatttgtattggtacctgcagaagccaggccagcctccacagctcctgatctatgaagtttccacccggttctctggagtgccagataggttcagtggcagcgggtcagggacagatttcacactgaaaatcagccgggtggaggctgaggatgttggggtttattactgcatgcaaagtatacagtttccgtggacgttcggccaagggaccaaggtggaaatcaaagcggccgcaaccacgacgccagcgccgcggccaccaacaccggcgcccaccatcgcgtcgcagcccctgtccctgcgcccagaggcgtgccggccagcggcggggggcgcagtgcacacgagggggctggacttcgcctgtgatatctacatctgggcgcccttggccgggacttgtggggtccttctcctgtcactggttatcaccctttactgccggagggaccagaggctgccccccgatgcccacaagccccctgggggaggcagtttccggacccccatccaagaggagcaggccgacgcccactccaccctggccaagatcagagtgaagttcagcaggagcgcagacgcccccgcgtaccagcagggccagaaccagctctataacgagctcaatctaggacgaagagaggagtacgatgttttggacaagagacgtggccgggaccctgagatggggggaaagccgagaaggaagaaccctcaggaaggcctgtacaatgaactgcagaaagataagatggcggaggcctacagtgagattgggatgaaaggcgagcgccggaggggcaaggggcacgatggcctttaccagggtctcagtacagccaccaaggacacctacgacgcccttcacatgcaggccctgccccctcgc

SEQ ID NO: 2073 - DNA, 1476 bp, synthetic construct
  misc_feature 1..1476: note = Synthetic
  source 1..1476: mol_type = other DNA
atggccttaccagtgaccgccttgctcctgccgctggccttgctgctccacgccgccaggccgcaggtgcagctggtgcagtctgggactgaggtgaagaagcctggggcctcagtgaaggtctcctgtaagacttctggatacaccttcaccagttatgatatcaactgggtgcgacaggccactggacaagggcttgagtggatgggatggatgaaccctatcagtggtgacacaggctctgcacagaagttccagggcagagtcaccatgaccaggaacacctccataggcacagcctacatggagctgagcagcctgagatctgaggacacggccgtttattactgtgcgagaggcggatattgtagtagtaccagctgctactactactacatggacgtctggggcaaagggaccacggtcaccgtctcctcaggcagcaccagcggcagcggcaagcccggctccggagagggcagcaccaagggcgacatccagatgacccagtctccatcctcactgtctgcctctgtaggagacagagtcaccatcacttgtcgggcgagtcagggtattagcaactggttagcctggtatcagcagaaaccagagaaagcccctaagtccctgatctatgctgcatccagtttgcaaggtggggtcccatcaagattcagcggcagtggatctgggacagatttcactctcaccatcagcagcctgcagcctgaagattttgcaacttattactgccaacagtatgatagttacccgtacacttttggccaggggaccaagctggagatcaaagcggccgcaaccacgacgccagcgccgcggccaccaacaccggcgcccaccatcgcgtcgcagcccctgtccctgcgcccagaggcgtgccggccagcggcggggggcgcagtgcacacgagggggctggacttcgcctgtgatatctacatctgggcgcccttggccgggacttgtggggtccttctcctgtcactggttatcaccctttactgccggagggaccagaggctgccccccgatgcccacaagccccctgggggaggcagtttccggacccccatccaagaggagcaggccgacgcccactccaccctggccaagatcagagtgaagttcagcaggagcgcagacgcccccgcgtaccagcagggccagaaccagctctataacgagctcaatctaggacgaagagaggagtacgatgttttggacaagagacgtggccgggaccctgagatggggggaaagccgagaaggaagaaccctcaggaaggcctgtacaatgaactgcagaaagataagatggcggaggcctacagtgagattgggatgaaaggcgagcgccggaggggcaaggggcacgatggcctttaccagggtctcagtacagccaccaaggacacctacgacgcccttcacatgcaggccctgccccctcgc

SEQ ID NO: 2074 - DNA, 1476 bp, synthetic construct
  misc_feature 1..1476: note = Synthetic
  source 1..1476: mol_type = other DNA
atggccttaccagtgaccgccttgctcctgccgctggccttgctgctccacgccgccaggccgcaggtgcagctggtgcagtctggggctgaggtgaagaagcctggggcctcagtgaaggtctcctgcaaggcttctggatacaccttcaccagttatgatatcaactgggtgcgacaggccactggacaagggcttgagtggatgggatggatgatccctaacagtggtgacacaggctctgcacagaagttccagggcagagtcaccatgaccaggaacacctccataagcacagcctacatggagctgagcagcctgagatctgaggacacggccgtttattactgtgcgagaggcggatattgtaatagtaccagttgctactactactacatggacgtctggggcaaagggaccacggtcaccgtctcctcaggcagcaccagcggcagcggcaagcccggctccggagagggcagcaccaagggcgacatccagatgacccagtctccatcctcactgtctgcatctgtaggagacagagtcaccatcacttgtcgggcgagtcagggtattagcagctggttagcctggtatcagcagaaaccagagaaagcccctaagtccctgatctatgctgcatccagtttacaaggtggggtcccatcaaggttcagcggcagtggatctgggacagatttcactctcaccatcagcagcctgcagcctgaagattttgcaacttattactgccaacagtatgatagttacccgtacacttttggccaggggaccaagctggagatcaaagcggccgcaaccacgacgccagcgccgcggccaccaacaccggcgcccaccatcgcgtcgcagcccctgtccctgcgcccagaggcgtgccggccagcggcggggggcgcagtgcacacgagggggctggacttcgcctgtgatatctacatctgggcgcccttggccgggacttgtggggtccttctcctgtcactggttatcaccctttactgccggagggaccagaggctgccccccgatgcccacaagccccctgggggaggcagtttccggacccccatccaagaggagcaggccgacgcccactccaccctggccaagatcagagtgaagttcagcaggagcgcagacgcccccgcgtaccagcagggccagaaccagctctataacgagctcaatctaggacgaagagaggagtacgatgttttggacaagagacgtggccgggaccctgagatggggggaaagccgagaaggaagaaccctcaggaaggcctgtacaatgaactgcagaaagataagatggcggaggcctacagtgagattgggatgaaaggcgagcgccggaggggcaaggggcacgatggcctttaccagggtctcagtacagccaccaaggacacctacgacgcccttcacatgcaggccctgccccctcgc

SEQ ID NO: 2075 - DNA, 1479 bp, synthetic construct
  misc_feature 1..1479: note = Synthetic
  source 1..1479: mol_type = other DNA
atggccttaccagtgaccgccttgctcctgccgctggccttgctgctccacgccgccaggccggaggtgcagttgttggagtctgggggaggcttggtacaacctggggggtccctgagactctcctgtgcagcctctggattcacctttagcagctatgtcatgaactgggtccgccaggctccagggaaggggctggaatgggtctcatctgttagtggtagtggtaataactcattctacgcagactccgtgaagggccggttcaccatctccagagacaattccaagaacacgctgtatctgcaaatgaacagcctgagagccgaggacacggccgtatattactgtgcgagtcgtagttccagttatctctactactactactacatggacgtctggggcaaagggaccaccgtcaccgtctcctcaggcagcaccagcggcagcggcaagcccggctccggagagggcagcaccaagggcgaaattgtgttgacgcagtctccaggcaccctgtctttgtctccaggggaaagagccaccctctcctgcagggccagtcagagtgttagcagcagctacttagcctggtaccagcagaaacctggccaggctcccaggctcctcatctatggtgcatccagcagggccactggcatcccagacaggttcagtgacagtgggtctgggacagacttcactctcaccatcagcagactggagcctgaagattttgcagtgtattactgtcagcactatggtagctcacctccgaggatcactttcggccctgggaccaaagtggatatcaaagcggccgcaaccacgacgccagcgccgcggccaccaacaccggcgcccaccatcgcgtcgcagcccctgtccctgcgcccagaggcgtgccggccagcggcggggggcgcagtgcacacgagggggctggacttcgcctgtgatatctacatctgggcgcccttggccgggacttgtggggtccttctcctgtcactggttatcaccctttactgccggagggaccagaggctgccccccgatgcccacaagccccctgggggaggcagtttccggacccccatccaagaggagcaggccgacgcccactccaccctggccaagatcagagtgaagttcagcaggagcgcagacgcccccgcgtaccagcagggccagaaccagctctataacgagctcaatctaggacgaagagaggagtacgatgttttggacaagagacgtggccgggaccctgagatggggggaaagccgagaaggaagaaccctcaggaaggcctgtacaatgaactgcagaaagataagatggcggaggcctacagtgagattgggatgaaaggcgagcgccggaggggcaaggggcacgatggcctttaccagggtctcagtacagccaccaaggacacctacgacgcccttcacatgcaggccctgccccctcgc

SEQ ID NO: 2076 - DNA, 1476 bp, synthetic construct
  misc_feature 1..1476: note = Synthetic
  source 1..1476: mol_type = other DNA
atggccttaccagtgaccgccttgctcctgccgctggccttgctgctccacgccgccaggccgcaagtgcagctggtggagagcggcggcggagtggtgcaacctggaagaagcctgcggctgagctgcgctgctagcggcttcaccttcagcagccacgacatgcactgggtgcggcaggcccctggcaagggcctggactgggtcgccgtgatctggagcgacggcaacaagaagtactacgtggacagcgccaagggcagattcaccatcagccgcgacaatagcaagaacaccgtgtacctgcagatgaacagcctgagagccgaggacaccgccatctactattgcgccagaggcgataattggaacgacgagcacagctactattactacatggacgtgtggggcaaaggcacaaccgtgaccgtgtcctccggcagcaccagcggcagcggcaagcccggctccggagagggcagcaccaagggcgagatcgtgctgacccagagccccgacttccagtctgtgacacctaaggaaaaggttacaattacctgtagagcttcccagaccatcggctcttctctgcactggtaccagcagaaacctgatcagtctccaaagctgctgatcaagcacgccagccagagcttctctggcgtccccagccggttttctggcagcggcagcggaacagattttacactgacagtgaactcactggaagccgaggatgccgccacctactactgccatcagagctccagcctcccttggaccttcggccagggcacgaaggtggaaatcaaagcggccgcaaccacgacgccagcgccgcggccaccaacaccggcgcccaccatcgcgtcgcagcccctgtccctgcgcccagaggcgtgccggccagcggcggggggcgcagtgcacacgagggggctggacttcgcctgtgatatctacatctgggcgcccttggccgggacttgtggggtccttctcctgtcactggttatcaccctttactgccggagggaccagaggctgccccccgatgcccacaagccccctgggggaggcagtttccggacccccatccaagaggagcaggccgacgcccactccaccctggccaagatcagagtgaagttcagcaggagcgcagacgcccccgcgtaccagcagggccagaaccagctctataacgagctcaatctaggacgaagagaggagtacgatgttttggacaagagacgtggccgggaccctgagatggggggaaagccgagaaggaagaaccctcaggaaggcctgtacaatgaactgcagaaagataagatggcggaggcctacagtgagattgggatgaaaggcgagcgccggaggggcaaggggcacgatggcctttaccagggtctcagtacagccaccaaggacacctacgacgcccttcacatgcaggccctgccccctcgc

SEQ ID NO: 2077 - DNA, 1476 bp, synthetic construct
  misc_feature 1..1476: note = Synthetic
  source 1..1476: mol_type = other DNA
atggccttaccagtgaccgccttgctcctgccgctggccttgctgctccacgccgccaggccgcaagtgcagctggtggaaagcggcggcggagtggtgcaacctggcagatctctgcggctgtcttgtgccgcctctggatttacattcagctctcatgatatgcactgggtgcggcaggcccctggcaaaggcctggactgggtcgccgtgatctggagcgacggcaacaacaagtactacgccgacagcgccaagggaagattcaccatcagccgggacaattctaaaaacaccgtgtacctgcagatgaacagcctgagagctgaggacaccgccatctactattgcgccagaggagataattggaacgacgagcacagctactactactatatggacgtgtggggcaagggcacaacagtgaccgtgtcctccggcagcaccagcggcagcggcaagcccggctccggagagggcagcaccaagggcgagatcgtgctgacacagtccccagattttcagagcgtgacccccaaggaaaaggtgacaatcacctgcagagccagccagaccatcggcagcagcctgcactggtaccagcagaaacccgatcagtctcctaagctgctgatcaagcacgccagccagagcttcagcggcgttcccagcaggttcagcggaagcggcagcggcaccgacttcaccctgaccgtgaactctctcgaggccgaggacgccgctacatactactgccaccagagcagctccctgccttggaccttcggccagggcaccaaggtcgaaattaaggcggccgcaaccacgacgccagcgccgcggccaccaacaccggcgcccaccatcgcgtcgcagcccctgtccctgcgcccagaggcgtgccggccagcggcggggggcgcagtgcacacgagggggctggacttcgcctgtgatatctacatctgggcgcccttggccgggacttgtggggtccttctcctgtcactggttatcaccctttactgccggagggaccagaggctgccccccgatgcccacaagccccctgggggaggcagtttccggacccccatccaagaggagcaggccgacgcccactccaccctggccaagatcagagtgaagttcagcaggagcgcagacgcccccgcgtaccagcagggccagaaccagctctataacgagctcaatctaggacgaagagaggagtacgatgttttggacaagagacgtggccgggaccctgagatggggggaaagccgagaaggaagaaccctcaggaaggcctgtacaatgaactgcagaaagataagatggcggaggcctacagtgagattgggatgaaaggcgagcgccggaggggcaaggggcacgatggcctttaccagggtctcagtacagccaccaaggacacctacgacgcccttcacatgcaggccctgccccctcgc

SEQ ID NO: 2078 - DNA, 1473 bp, synthetic construct
  misc_feature 1..1473: note = Synthetic
  source 1..1473: mol_type = other DNA
atggccttaccagtgaccgccttgctcctgccgctggccttgctgctccacgccgccaggccgcaactgcagctggtgcagagcggagccgaggtgaagaagcctggcgctagcgttaaggtgtcctgcaaggcctccggctacacctttaccaactacggcatctcctggctgcgccaggccccaggccagggcctggagtggatgggctggatctccggatacaacgacaacacccactacgcccagaaattccagggtagagtgactatgaccaccgataccagcacaacaacagcctacatggaactgagaaacctgcggagcgacgacaccgccgtgtactactgcgcccgggacggcattgccgctagacctgtgtactactattacatggacgtgtggggcaagggcaccaccgtgacagtgtcttctggcagcaccagcggcagcggcaagcccggctccggagagggcagcaccaagggcgatatccagatgacccagagccccagcagcctgagcgccagcgtgggcgaccgggtcacaatcacctgcagagccagccagagcatcagcaattacctgaactggtaccaccagaagcccggcaaagcccctaagctgctgatctacgctgcttctagcctcgagagcggcgtgcctagcagattcagcggcagcggcagcggaacagatttcaccctgacaatcagctctctgcaacctgaggacttcgccacatactattgtcagcagtcctacagcaatcctctgaccttcggcggcggcacaaaggtggaatctaaggcggccgcaaccacgacgccagcgccgcggccaccaacaccggcgcccaccatcgcgtcgcagcccctgtccctgcgcccagaggcgtgccggccagcggcggggggcgcagtgcacacgagggggctggacttcgcctgtgatatctacatctgggcgcccttggccgggacttgtggggtccttctcctgtcactggttatcaccctttactgccggagggaccagaggctgccccccgatgcccacaagccccctgggggaggcagtttccggacccccatccaagaggagcaggccgacgcccactccaccctggccaagatcagagtgaagttcagcaggagcgcagacgcccccgcgtaccagcagggccagaaccagctctataacgagctcaatctaggacgaagagaggagtacgatgttttggacaagagacgtggccgggaccctgagatggggggaaagccgagaaggaagaaccctcaggaaggcctgtacaatgaactgcagaaagataagatggcggaggcctacagtgagattgggatgaaaggcgagcgccggaggggcaaggggcacgatggcctttaccagggtctcagtacagccaccaaggacacctacgacgcccttcacatgcaggccctgccccctcgc

SEQ ID NO: 2079 - DNA, 1470 bp, synthetic construct
  misc_feature 1..1470: note = Synthetic
  source 1..1470: mol_type = other DNA
atggccttaccagtgaccgccttgctcctgccgctggccttgctgctccacgccgccaggccgcaagtgcagctggtggagagcgggggaggtgtcgtgcagcctggaagaagcctcagactgtcttgtgtggccagcggctttaccttcagctctaatgacatctactgggtgcggcaggcccctggcaagggcctggaatgggtcgctgtgatctggtacgacggcagcaacaaatactacgccgattctgtgaagggcagattcaccatcagcagagataattctaagaacaccctgtacctgcagatgaacagcctgagagccgaggataccgccgtgtactattgcgccaggggcgacaactggaacgacgagcaccattaccactactacatggacgtgtggggcaaaggcaccaccgtgaccgtgggcagcaccagcggcagcggcaagcccggctccggagagggcagcaccaagggcgagattgttctgacccagagccctgatttccagagcgtgacccccaaggaaaaggtgacaatcacctgccgggccagccaaagcatcggctccagcctgcactggtatcagcagaagcccgaccagtccccaaagctgctgatcaaattcgcctctcagtcattcagcggcgtgccttcccggttcagcggaagcggcagcggcacagactttaccctgacaatccacagcctggaagccgaggacgccgctacatactactgccaccagagcggcagcctgccctggacattcggccagggcacgaaggtggagatcaaggcggccgcaaccacgacgccagcgccgcggccaccaacaccggcgcccaccatcgcgtcgcagcccctgtccctgcgcccagaggcgtgccggccagcggcggggggcgcagtgcacacgagggggctggacttcgcctgtgatatctacatctgggcgcccttggccgggacttgtggggtccttctcctgtcactggttatcaccctttactgccggagggaccagaggctgccccccgatgcccacaagccccctgggggaggcagtttccggacccccatccaagaggagcaggccgacgcccactccaccctggccaagatcagagtgaagttcagcaggagcgcagacgcccccgcgtaccagcagggccagaaccagctctataacgagctcaatctaggacgaagagaggagtacgatgttttggacaagagacgtggccgggaccctgagatggggggaaagccgagaaggaagaaccctcaggaaggcctgtacaatgaactgcagaaagataagatggcggaggcctacagtgagattgggatgaaaggcgagcgccggaggggcaaggggcacgatggcctttaccagggtctcagtacagccaccaaggacacctacgacgcccttcacatgcaggccctgccccctcgc

SEQ ID NO: 2080 - DNA, 1464 bp, synthetic construct
  misc_feature 1..1464: note = Synthetic
  source 1..1464: mol_type = other DNA
atggccttaccagtgaccgccttgctcctgccgctggccttgctgctccacgccgccaggccgcaagtgcagctggtggaaagcggcggcggtgttgtgcaacctggcagaagcctgcggctgtcatgcgccgccagcggcttcaccttcagctcttacggcatgcactgggtgcggcaggcccctggaaagggactggaatgggtcgccgtgatcagctacgacggctccaacaagtactacgccgacagcgtgaaaggcagattcaccatctctagggacaacagcaagaccaccctctacctgcagatgaacagcctgagagccgaggacaccgccgtgtactattgtgccagagatcactactactactacatggacgtgtggggcaagggcaccaccgtgaccgtgtcttctggcagcaccagcggcagcggcaagcccggctccggagagggcagcaccaagggccagaccgtggtgactcaggagcccagcttcagcgtcagccccggcggaacagtgaccctgacatgcggcctgagcagcggcagcgtgtccaccagctactatcctagctggtaccagcagacaccaggccaggctcctagaaccctgatctacagcaccaacatccggagcagcggcgtgcctgatagatttagcggctctatcctgggaaataaagccgctctgaccattacaggcgcccaggctgatgacgagagcgactactactgcgtgctgtacatgggctctgatatcgtggttttcggcggcggcacaaagctgacagtgctggcggccgcaaccacgacgccagcgccgcggccaccaacaccggcgcccaccatcgcgtcgcagcccctgtccctgcgcccagaggcgtgccggccagcggcggggggcgcagtgcacacgagggggctggacttcgcctgtgatatctacatctgggcgcccttggccgggacttgtggggtccttctcctgtcactggttatcaccctttactgccggagggaccagaggctgccccccgatgcccacaagccccctgggggaggcagtttccggacccccatccaagaggagcaggccgacgcccactccaccctggccaagatcagagtgaagttcagcaggagcgcagacgcccccgcgtaccagcagggccagaaccagctctataacgagctcaatctaggacgaagagaggagtacgatgttttggacaagagacgtggccgggaccctgagatggggggaaagccgagaaggaagaaccctcaggaaggcctgtacaatgaactgcagaaagataagatggcggaggcctacagtgagattgggatgaaaggcgagcgccggaggggcaaggggcacgatggcctttaccagggtctcagtacagccaccaaggacacctacgacgcccttcacatgcaggccctgccccctcgc

SEQ ID NO: 2081 - DNA, 1470 bp, synthetic construct
  misc_feature 1..1470: note = Synthetic
  source 1..1470: mol_type = other DNA
atggccttaccagtgaccgccttgctcctgccgctggccttgctgctccacgccgccaggccgcaactgcagctgcaggagagcggccctggactggtgaagcccagcgagacactgagcctgacatgcaccgtgtccggaggctctatcagcagcagcagctactactggggatggattagacagccccccggcaagggcctggaatggatcggcagcctgtactacagcggcagcacctactacaaccccagcctgaagtctagagtgaccatcagcgtggacaccagcaagaaccagttcagcctgaaactgagctctgtcacagccgccgataccgccgtgtactactgcgccgctgtgcagctggaaaggcggggctacttctacatggacgtgtggggcaaaggcaccaccgtgacagtgtctagcggcagcaccagcggcagcggcaagcccggctccggagagggcagcaccaagggcgagatcgtgctgacacagtcccctgctaccctgagcctgagccctggcgagcgggccaccctgagctgcagagccagccagagcgtgtccagctactttgcctggtatcagcagaagcctggccaggccccacggctgctgatctacgacgcctctaatagagccacaggcatcccagctagattcagcggctccggctccggaaccgatttcaccctgaccatctctagcctcgagcctgaggacttcgccgtttactattgtcagcaaagaagcaactggcctctgacatttggcggaggcacaaaggtggaaatcaaggcggccgcaaccacgacgccagcgccgcggccaccaacaccggcgcccaccatcgcgtcgcagcccctgtccctgcgcccagaggcgtgccggccagcggcggggggcgcagtgcacacgagggggctggacttcgcctgtgatatctacatctgggcgcccttggccgggacttgtggggtccttctcctgtcactggttatcaccctttactgccggagggaccagaggctgccccccgatgcccacaagccccctgggggaggcagtttccggacccccatccaagaggagcaggccgacgcccactccaccctggccaagatcagagtgaagttcagcaggagcgcagacgcccccgcgtaccagcagggccagaaccagctctataacgagctcaatctaggacgaagagaggagtacgatgttttggacaagagacgtggccgggaccctgagatggggggaaagccgagaaggaagaaccctcaggaaggcctgtacaatgaactgcagaaagataagatggcggaggcctacagtgagattgggatgaaaggcgagcgccggaggggcaaggggcacgatggcctttaccagggtctcagtacagccaccaaggacacctacgacgcccttcacatgcaggccctgccccctcgc

SEQ ID NO: 2082 - DNA, 1476 bp, synthetic construct
  misc_feature 1..1476: note = Synthetic
  source 1..1476: mol_type = other DNA
atggccttaccagtgaccgccttgctcctgccgctggccttgctgctccacgccgccaggccgcaagtgcaactggtggaaagcggcggcggcgttgtgcagcctggcagaagcctgcggctgtcatgcgccgccagcggttttaccttctctaattacggcatgcactgggtgcggcaggctcccggcaaaggcctggaatggatggccgtgatctggtccgatggccacaacaagtactacgccgatagcgtgaaaggcagattcaccattagcagagataattctaagaacaccctgtacctgcagatgaacagcctgcgcgccgaggacaccgccgtgtactattgtgccagagcccagctggagcggagatacttctactatatggacgtgtggggcaagggcaccaccgtgacagtgtctagcggcagcaccagcggcagcggcaagcccggctccggagagggcagcaccaagggccagaccgtcgtgacccaggagcctagcttcagcgtgtccccaggcggaaccgtcacactgacatgcggcctcacaagcggcagcgtgtccaccagctactaccccaactggtaccagcagacacctggacaggcccctagaaccctgatctacagcaccaacatccggagcagcggagtgcccgacagattttctggcagcatcctgggcaacaaggccgctctgaccatcaccggcgctcaggccgacgacgagagcgactactactgcgtgctgtacatgggcagcggcatgttcatcttcggcagcggcacaaaggtgacagtgctggcggccgcaaccacgacgccagcgccgcggccaccaacaccggcgcccaccatcgcgtcgcagcccctgtccctgcgcccagaggcgtgccggccagcggcggggggcgcagtgcacacgagggggctggacttcgcctgtgatatctacatctgggcgcccttggccgggacttgtggggtccttctcctgtcactggttatcaccctttactgccggagggaccagaggctgccccccgatgcccacaagccccctgggggaggcagtttccggacccccatccaagaggagcaggccgacgcccactccaccctggccaagatcagagtgaagttcagcaggagcgcagacgcccccgcgtaccagcagggccagaaccagctctataacgagctcaatctaggacgaagagaggagtacgatgttttggacaagagacgtggccgggaccctgagatggggggaaagccgagaaggaagaaccctcaggaaggcctgtacaatgaactgcagaaagataagatggcggaggcctacagtgagattgggatgaaaggcgagcgccggaggggcaaggggcacgatggcctttaccagggtctcagtacagccaccaaggacacctacgacgcccttcacatgcaggccctgccccctcgc

SEQ ID NO: 2083 - DNA, 1476 bp, synthetic construct
  misc_feature 1..1476: note = Synthetic
  source 1..1476: mol_type = other DNA
atggccttaccagtgaccgccttgctcctgccgctggccttgctgctccacgccgccaggccgcaggttcagctggtgcagagcggagccgaggtgaaaaagcccggcgcaagcgtgaaggtgtcttgcaaggcctccggatataccttcaccagctacgatatcaactgggtgcggcaggccacaggccagggtctcgaatggatgggctggatgatccccaattctggcgacacaggcagcgcccaaaagttccagggcagagtgacaatgaccagaaacaccagcatcggaacagcctacatggaactgagctccctgagaagcgaggataccgccgtgtactattgtgccagaggcggctactgcaacagcacctcctgctactactactacatggacgtgtggggcaaaggcacaaccgtcaccgtgagctctggcagcaccagcggcagcggcaagcccggctccggagagggcagcaccaagggcgacatccagatgacacagagccctagcagcctgtctgcttccgtgggcgatagagtgacaatcacctgccgggcctcccagggcatcagctcctggctggcctggtaccagcagaagcctgagaaggcccctaagagcctgatctacgccgcttctagcctgcagggaggcgtgccaagtcggttcagcggcagcggcagcggcacagacttcaccctgaccatttcttctctgcaacctgaggacttcgccacctactactgtcagcaatacgacagctacccctacacctttggccagggcaccaagctggaaatcaaggcggccgcaaccacgacgccagcgccgcggccaccaacaccggcgcccaccatcgcgtcgcagcccctgtccctgcgcccagaggcgtgccggccagcggcggggggcgcagtgcacacgagggggctggacttcgcctgtgatatctacatctgggcgcccttggccgggacttgtggggtccttctcctgtcactggttatcaccctttactgccggagggaccagaggctgccccccgatgcccacaagccccctgggggaggcagtttccggacccccatccaagaggagcaggccgacgcccactccaccctggccaagatcagagtgaagttcagcaggagcgcagacgcccccgcgtaccagcagggccagaaccagctctataacgagctcaatctaggacgaagagaggagtacgatgttttggacaagagacgtggccgggaccctgagatggggggaaagccgagaaggaagaaccctcaggaaggcctgtacaatgaactgcagaaagataagatggcggaggcctacagtgagattgggatgaaaggcgagcgccggaggggcaaggggcacgatggcctttaccagggtctcagtacagccaccaaggacacctacgacgcccttcacatgcaggccctgccccctcgc

SEQ ID NO: 2084 - DNA, 1479 bp, synthetic construct
  misc_feature 1..1479: note = Synthetic
  source 1..1479: mol_type = other DNA
atggccttaccagtgaccgccttgctcctgccgctggccttgctgctccacgccgccaggccgcaggttcaactggtgcagagcggcgccgaggtgaagaagcctggcgccagcgtgaaagtgtcctgcaaggccagcggatacacgtttaccagctacgacatcaactgggtcagacaggccaccggccagggcctggaatggatgggatggatgaaccccaacagcggcaacaccgtgtacgcccagaaattccagggcagagtgaccatgacacggaacaccagcatcagcaccgcctacatggaactgagctctctgagatccgaggatacagccgtgtactactgcgccagaggcggagatttctggagcggctaccacgactactactactacatggacgtgtggggcaagggcaccaccgtgaccgtgtcttctggcagcaccagcggcagcggcaagcccggctccggagagggcagcaccaagggcgatatccaggtcacacagagccctacctttctgagcgcttctgtgggcgaccgggtgaccatcacatgccgggccagccagggtattagcagctacctggcttggtaccagcagaagcccggcaaagcccctaagctgctgatctacggcgcttctaccctgcagtccggcgtgcccagcagattcagcggcagcggaagcggaacagagttcaccctgacaatctccagcctccaacctgaggacttcgccacatactattgtcagcaactgaatagctatccttggacattcggccagggcaccaaggtggaaatcaaggcggccgcaaccacgacgccagcgccgcggccaccaacaccggcgcccaccatcgcgtcgcagcccctgtccctgcgcccagaggcgtgccggccagcggcggggggcgcagtgcacacgagggggctggacttcgcctgtgatatctacatctgggcgcccttggccgggacttgtggggtccttctcctgtcactggttatcaccctttactgccggagggaccagaggctgccccccgatgcccacaagccccctgggggaggcagtttccggacccccatccaagaggagcaggccgacgcccactccaccctggccaagatcagagtgaagttcagcaggagcgcagacgcccccgcgtaccagcagggccagaaccagctctataacgagctcaatctaggacgaagagaggagtacgatgttttggacaagagacgtggccgggaccctgagatggggggaaagccgagaaggaagaaccctcaggaaggcctgtacaatgaactgcagaaagataagatggcggaggcctacagtgagattgggatgaaaggcgagcgccggaggggcaaggggcacgatggcctttaccagggtctcagtacagccaccaaggacacctacgacgcccttcacatgcaggccctgccccctcgc

SEQ ID NO: 2085 - DNA, 1473 bp, synthetic construct
  misc_feature 1..1473: note = Synthetic
  source 1..1473: mol_type = other DNA
atggccttaccagtgaccgccttgctcctgccgctggccttgctgctccacgccgccaggccgcaagtgcagctgcaggagagcggtcctggcctggttaagcctagcgagacactgtctctgacttgcaccgtgtccggcggatctatcagcagctactactggtcctggatcagacagcccgccggcaaaggcctggaatggattggaagaatctacaccagcggcagcaccaactacaaccccagcctgaagtccagagtgacaatgagcgtggacacatctaagaaccagtttagcctgaaactgagcagcgtgaccgccgccgatacagctgtgtactattgtgcccgggaagaataccagctgctgcctgccctgtactactattactacatggacgtgtggggcaagggcaccaccgtgaccgtgtccagcggcagcaccagcggcagcggcaagcccggctccggagagggcagcaccaagggcagctacgagctgacccagcctccatctgtctccgtgtctccaggccaaacagccagcatcacctgcagcggagataagctgggcgacaagtacgcctgctggtaccagcagaagcccggccagagccctgtgctggtgatctaccaggacagcaagcggcctagcggcatccccgagagattcagcggctccaacagcggcaataccgctacactgacaatcagcggcacacaggccatggatgaggccgactactactgccaggcctgggacagctctaccgccgtgttcggcggcggaacccagctcaccgccctggcggccgcaaccacgacgccagcgccgcggccaccaacaccggcgcccaccatcgcgtcgcagcccctgtccctgcgcccagaggcgtgccggccagcggcggggggcgcagtgcacacgagggggctggacttcgcctgtgatatctacatctgggcgcccttggccgggacttgtggggtccttctcctgtcactggttatcaccctttactgccggagggaccagaggctgccccccgatgcccacaagccccctgggggaggcagtttccggacccccatccaagaggagcaggccgacgcccactccaccctggccaagatcagagtgaagttcagcaggagcgcagacgcccccgcgtaccagcagggccagaaccagctctataacgagctcaatctaggacgaagagaggagtacgatgttttggacaagagacgtggccgggaccctgagatggggggaaagccgagaaggaagaaccctcaggaaggcctgtacaatgaactgcagaaagataagatggcggaggcctacagtgagattgggatgaaaggcgagcgccggaggggcaaggggcacgatggcctttaccagggtctcagtacagccaccaaggacacctacgacgcccttcacatgcaggccctgccccctcgc

SEQ ID NO: 2086 - DNA, 1476 bp, synthetic construct
  misc_feature 1..1476: note = Synthetic
  source 1..1476: mol_type = other DNA
atggccttaccagtgaccgccttgctcctgccgctggccttgctgctccacgccgccaggccgcaagtgcagctggtggaatctggcggcggcgtggtgcagcctggtaggagcctgcggctgtcatgcgccgccacaggcttcaccttcagcagctacggcatgcactgggtcagacaggcccctggcaagggactggagtggatggtggtgatctggtccgatggccacaataaatactacgccgacagcgtgaagggcagatttaccattagccgggacaacagcaagaacaccctgtacctgcagatgaacagcctgagagctgaagataccgccgtgtactactgcgccagagcccagctcgagcggagatacttctactatatggacgtgtggggcaaaggcacaacagtgaccgtttcttctggcagcaccagcggcagcggcaagcccggctccggagagggcagcaccaagggccagaccgtggtcacccaggagcctagctttagcgtgtccccaggaggtacagtgaccctgacatgcggcctgactagcggatctgtgtccaccagctactaccccaactggtaccagcagacacctggccaggcccctagaaccctgatctacagcaccaatatccggagctccggcgtgcccgacagattcagcggaagcatcctgggcaacaaggccgctctgaccatcaccggcgcccaagctgatgacgagagcgactactattgtgtgctgtacatgggcagcggcatgttcatcttcggctctggcaccaaggtgaccgtgctggcggccgcaaccacgacgccagcgccgcggccaccaacaccggcgcccaccatcgcgtcgcagcccctgtccctgcgcccagaggcgtgccggccagcggcggggggcgcagtgcacacgagggggctggacttcgcctgtgatatctacatctgggcgcccttggccgggacttgtggggtccttctcctgtcactggttatcaccctttactgccggagggaccagaggctgccccccgatgcccacaagccccctgggggaggcagtttccggacccccatccaagaggagcaggccgacgcccactccaccctggccaagatcagagtgaagttcagcaggagcgcagacgcccccgcgtaccagcagggccagaaccagctctataacgagctcaatctaggacgaagagaggagtacgatgttttggacaagagacgtggccgggaccctgagatggggggaaagccgagaaggaagaaccctcaggaaggcctgtacaatgaactgcagaaagataagatggcggaggcctacagtgagattgggatgaaaggcgagcgccggaggggcaaggggcacgatggcctttaccagggtctcagtacagccaccaaggacacctacgacgcccttcacatgcaggccctgccccctcgc

SEQ ID NO: 2087 - DNA, 1476 bp, synthetic construct
  misc_feature 1..1476: note = Synthetic
  source 1..1476: mol_type = other DNA
atggccttaccagtgaccgccttgctcctgccgctggccttgctgctccacgccgccaggccgcaagtgcagctggtcgagagcggaggcggcgttgtgcaacctggaaggagcctgcggctgagctgcgccgcttctggcttcacctttactagctacgacatgcactgggtgcggcaggcccctggcaagggcctggaatgggtcaccatcatctggttcgacggcagcaacaagtactacgccgatagcgtgaagggcagattcaccatcagcagagataatagcaagaataccctgtacctgcagatgaactctctctccgccgaggacaccgccgtgtactactgcgccagaggcgacaactggaacgacagatactattattactactacatggacgtgtggggcaaaggcaccaccgtgacagtgtccagcggcagcaccagcggcagcggcaagcccggctccggagagggcagcaccaagggcgagatcgtgctgacccagtctccagatttccagtccgtgacccctaaggaaaaggtgaccatcacatgcagagccagccagtccatcggctctagcctgcactggtaccagcagaagcccgaccagtctcctatgctgctgatcaaattcgcctctcagagcatcagcggcgtgcccagccggttcagcggcagcggctccggcaccgacttcacactgacaatcaacagtctggaggccgaggatgccgctgcttactactgtcaccagagcagcagcctgccttggacatttggccagggcaccaaggtggaaattaaggcggccgcaaccacgacgccagcgccgcggccaccaacaccggcgcccaccatcgcgtcgcagcccctgtccctgcgcccagaggcgtgccggccagcggcggggggcgcagtgcacacgagggggctggacttcgcctgtgatatctacatctgggcgcccttggccgggacttgtggggtccttctcctgtcactggttatcaccctttactgccggagggaccagaggctgccccccgatgcccacaagccccctgggggaggcagtttccggacccccatccaagaggagcaggccgacgcccactccaccctggccaagatcagagtgaagttcagcaggagcgcagacgcccccgcgtaccagcagggccagaaccagctctataacgagctcaatctaggacgaagagaggagtacgatgttttggacaagagacgtggccgggaccctgagatggggggaaagccgagaaggaagaaccctcaggaaggcctgtacaatgaactgcagaaagataagatggcggaggcctacagtgagattgggatgaaaggcgagcgccggaggggcaaggggcacgatggcctttaccagggtctcagtacagccaccaaggacacctacgacgcccttcacatgcaggccctgccccctcgc

SEQ ID NO: 2088 - DNA, 1491 bp, synthetic construct
  misc_feature 1..1491: note = Synthetic
  source 1..1491: mol_type = other DNA
atggccttaccagtgaccgccttgctcctgccgctggccttgctgctccacgccgccaggccgcaagtgcagctggtccagagcggcgctgaggtgaagaaacctggcgcctctgtgaaagtgtcctgcaaggccagcggctacacctttaccagctacggcattagctgggtgcggcaggcccctggccagggtcttgagtggatgggctggatcagcgcctacaacggccacacagattatacacaaaagctgcagggcagagtgaccatgacaaccgataccagcaccaccacagcctacatggaactgagaagcctgagctctgccgacaccgccgtgtactactgcgtgcgggaagtggtgctgcctaccacagactactactacttctacatggacgtgtggggcaagggcaccacagtgacagtcagctccggcagcaccagcggcagcggcaagcccggctccggagagggcagcaccaagggcgacatcgtgatgacccagcctcctctgagcagccctgtgacactgggccagccagctagcatcagctgtagatcttctcagtccctggtgcacagcgacggcaatacctacctgtcttggctgcagcagcggcctggccagccccccagactgctgatctacaaggtgtccaaccgcttcagcggcgtgccagacagattcagcggctctggcgccggcaccgacttcaccctgaagatcagcagagtcgaggccgaagatgtgggagtttactattgcacccaagctacacagttcccccacacctttggccagggcaccaagctcgagatcaaggcggccgcaaccacgacgccagcgccgcggccaccaacaccggcgcccaccatcgcgtcgcagcccctgtccctgcgcccagaggcgtgccggccagcggcggggggcgcagtgcacacgagggggctggacttcgcctgtgatatctacatctgggcgcccttggccgggacttgtggggtccttctcctgtcactggttatcaccctttactgccggagggaccagaggctgccccccgatgcccacaagccccctgggggaggcagtttccggacccccatccaagaggagcaggccgacgcccactccaccctggccaagatcagagtgaagttcagcaggagcgcagacgcccccgcgtaccagcagggccagaaccagctctataacgagctcaatctaggacgaagagaggagtacgatgttttggacaagagacgtggccgggaccctgagatggggggaaagccgagaaggaagaaccctcaggaaggcctgtacaatgaactgcagaaagataagatggcggaggcctacagtgagattgggatgaaaggcgagcgccggaggggcaaggggcacgatggcctttaccagggtctcagtacagccaccaaggacacctacgacgcccttcacatgcaggccctgccccctcgc

SEQ ID NO: 2089 - DNA, 1488 bp, synthetic construct
  misc_feature 1..1488: note = Synthetic
  source 1..1488: mol_type = other DNA
atggccttaccagtgaccgccttgctcctgccgctggccttgctgctccacgccgccaggccgcaagttcagctggtgcagagcggagccgaggtgaaaaagcccggcgcttctgtgaaggtgtcctgcaaggtgtctggctacaccctgacagagctgagcatgcactgggtccggcaggcccctggcaaaggcctggaatggatgggaggcttcgaccccgaagacggggagacaatctacgcccagaaattccagggcagagtgacaatgaccgaggacaccagcaccgatacagcctacatggaactgtcttccctgcggagcgaggacaccgccgtgtactactgcgccaccggcagaatcaccatggtgcggggcgtcatcatcccctactactattactacatggacgtgtggggcaagggcaccaccgtgaccgtgtcctctggcagcaccagcggcagcggcaagcccggctccggagagggcagcaccaagggcgatatccagatgacacagagcccaagcagcctgagcgccagcgtgggcgacagagtgaccatcacatgcagagccagccagggcatcagcagctggctggcttggtaccagcaaaagcctgagaaggcccctaagagcctcatctacgccgctagcagcctgcagtccggcgtgccaagcagattcagcggctctggctctggcacagacttcaccctgaccatttccagcctgcaacctgaggattttgccacatactattgtcagcagtacaacagctacccttacaccttcggccagggcaccaagctggaaatcaaggcggccgcaaccacgacgccagcgccgcggccaccaacaccggcgcccaccatcgcgtcgcagcccctgtccctgcgcccagaggcgtgccggccagcggcggggggcgcagtgcacacgagggggctggacttcgcctgtgatatctacatctgggcgcccttggccgggacttgtggggtccttctcctgtcactggttatcaccctttactgccggagggaccagaggctgccccccgatgcccacaagccccctgggggaggcagtttccggacccccatccaagaggagcaggccgacgcccactccaccctggccaagatcagagtgaagttcagcaggagcgcagacgcccccgcgtaccagcagggccagaaccagctctataacgagctcaatctaggacgaagagaggagtacgatgttttggacaagagacgtggccgggaccctgagatggggggaaagccgagaaggaagaaccctcaggaaggcctgtacaatgaactgcagaaagataagatggcggaggcctacagtgagattgggatgaaaggcgagcgccggaggggcaaggggcacgatggcctttaccagggtctcagtacagccaccaaggacacctacgacgcccttcacatgcaggccctgccccctcgc

SEQ ID NO: 2090 - DNA, 1482 bp, synthetic construct
  misc_feature 1..1482: note = Synthetic
  source 1..1482: mol_type = other DNA
atggccttaccagtgaccgccttgctcctgccgctggccttgctgctccacgccgccaggccgcaagtgcagctggtgcagagcggcaccgaggtgaagaagccaggcgcctctgtgaaagtgtcttgtaaagccagcggctacacctttaccaattacggcatcggctgggtgcggcaggcccctggacagggactggaatggatgggctggatcatcgcctacaacggctacacaaagtacgcccagatcctgcagggcagagtgacaatgaccaccgacaccagcaccaacaccgcttatatggaactgagaagcctgcggagcgacgacaccgccgtgtactattgcgccagacagcagctgggcggagattaccactactacatggacgtgtggggcaagggcaccaccgtcacagtgtccagcggcagcaccagcggcagcggcaagcccggctccggagagggcagcaccaagggcgatatcgtgatgacccagacccccctgagcctgtccgtgaccccaggacaacctgccagcattagctgcaagagcagcaagtccctgctgcacagcgacggcaagacatacctgtactggtacctgcaaaagcccggccagcctcctcagctgctcatctacgaggtgtccaaccggttctctggcgtgcctgatagattcagcggaagcggcagcggaacagacttcacactgaagatcagcagagtcgaggccgaggacgtgggcgtttactactgcatgcagagcatccagttcccctggacattcggccagggcacaaaagtggaaatcaaggcggccgcaaccacgacgccagcgccgcggccaccaacaccggcgcccaccatcgcgtcgcagcccctgtccctgcgcccagaggcgtgccggccagcggcggggggcgcagtgcacacgagggggctggacttcgcctgtgatatctacatctgggcgcccttggccgggacttgtggggtccttctcctgtcactggttatcaccctttactgccggagggaccagaggctgccccccgatgcccacaagccccctgggggaggcagtttccggacccccatccaagaggagcaggccgacgcccactccaccctggccaagatcagagtgaagttcagcaggagcgcagacgcccccgcgtaccagcagggccagaaccagctctataacgagctcaatctaggacgaagagaggagtacgatgttttggacaagagacgtggccgggaccctgagatggggggaaagccgagaaggaagaaccctcaggaaggcctgtacaatgaactgcagaaagataagatggcggaggcctacagtgagattgggatgaaaggcgagcgccggaggggcaaggggcacgatggcctttaccagggtctcagtacagccaccaaggacacctacgacgcccttcacatgcaggccctgccccctcgc

SEQ ID NO: 2091 - DNA, 1482 bp, synthetic construct
  misc_feature 1..1482: note = Synthetic
  source 1..1482: mol_type = other DNA
atggccttaccagtgaccgccttgctcctgccgctggccttgctgctccacgccgccaggccgcaagtgcagctggtgcaaagcggcaccgaggtgaaaaagcccggcgcctctgtgaaggtctcctgcaaggccagcggatacacatttacaaattacggcatcggctgggtgcggcaggcccctggccagggcctggaatggatgggctggatcatcgcctacaacggctacaccaagtacgcccagatcctgcaaggcagagtcaccatgaccacagacaccagcaccaacaccgcttatatggaactgagaagcctgcggagcgacgatacagccgtgtactactgcgccagacagcagctcggcggcgactaccactactacatggacgtgtggggcaagggcaccaccgtgaccgtgtccagcggcagcaccagcggcagcggcaagcccggctccggagagggcagcaccaagggcgacatcgtgatgacccagacccctctgagcctgagcgtgacacctggacagcccgcttctattagctgtaaaagcagcaagtccctgctgcacagcgacggcaagacctacctgtactggtacctgcagaaacctggccagcctccacagctgctgatctacgaggtgtctacaagattcagcggagtgcctgatagattcagcggcagcggatctggaacagatttcaccctgaagatcagccgggttgaggccgaggacgtgggcgtgtactattgcatgcagtccatccagttcccctggaccttcggccagggcacaaaggtggaaatcaaggcggccgcaaccacgacgccagcgccgcggccaccaacaccggcgcccaccatcgcgtcgcagcccctgtccctgcgcccagaggcgtgccggccagcggcggggggcgcagtgcacacgagggggctggacttcgcctgtgatatctacatctgggcgcccttggccgggacttgtggggtccttctcctgtcactggttatcaccctttactgccggagggaccagaggctgccccccgatgcccacaagccccctgggggaggcagtttccggacccccatccaagaggagcaggccgacgcccactccaccctggccaagatcagagtgaagttcagcaggagcgcagacgcccccgcgtaccagcagggccagaaccagctctataacgagctcaatctaggacgaagagaggagtacgatgttttggacaagagacgtggccgggaccctgagatggggggaaagccgagaaggaagaaccctcaggaaggcctgtacaatgaactgcagaaagataagatggcggaggcctacagtgagattgggatgaaaggcgagcgccggaggggcaaggggcacgatggcctttaccagggtctcagtacagccaccaaggacacctacgacgcccttcacatgcaggccctgccccctcgc

SEQ ID NO: 2092 - DNA, 1476 bp, synthetic construct
  misc_feature 1..1476: note = Synthetic
  source 1..1476: mol_type = other DNA
atggccttaccagtgaccgccttgctcctgccgctggccttgctgctccacgccgccaggccgcaagtgcagctggtgcagagcggaacagaggtgaaaaagcctggcgccagcgtgaaggtgtcttgtaaaaccagcggttatacattcacctcctacgacattaactgggtgcggcaggccaccggccagggcctggaatggatgggctggatgaaccccatctccggcgacacaggcagcgcccagaagttccagggaagagtgaccatgaccagaaataccagcatcggcaccgcctacatggaactgagcagcctgcggagcgaggacaccgccgtgtactactgcgccagaggcggatactgtagcagtacatcttgctactactattacatggacgtgtggggcaagggcacaacagtgacagtcagcagcggcagcaccagcggcagcggcaagcccggctccggagagggcagcaccaagggcgatatccagatgacacagtcccctagctctctgtctgcttctgttggagatagagtgaccatcacctgccgggccagccagggcatcagcaactggctggcctggtaccagcagaagcccgagaaggcccctaagagcctgatctacgccgctagctccctccagggcggcgtgccatctagattcagcggctcaggcagcggaaccgacttcaccctgaccatcagctccctgcaacctgaggattttgccacatactactgccagcaatacgacagctacccctacaccttcggccagggcaccaagctggaaatcaaggcggccgcaaccacgacgccagcgccgcggccaccaacaccggcgcccaccatcgcgtcgcagcccctgtccctgcgcccagaggcgtgccggccagcggcggggggcgcagtgcacacgagggggctggacttcgcctgtgatatctacatctgggcgcccttggccgggacttgtggggtccttctcctgtcactggttatcaccctttactgccggagggaccagaggctgccccccgatgcccacaagccccctgggggaggcagtttccggacccccatccaagaggagcaggccgacgcccactccaccctggccaagatcagagtgaagttcagcaggagcgcagacgcccccgcgtaccagcagggccagaaccagctctataacgagctcaatctaggacgaagagaggagtacgatgttttggacaagagacgtggccgggaccctgagatggggggaaagccgagaaggaagaaccctcaggaaggcctgtacaatgaactgcagaaagataagatggcggaggcctacagtgagattgggatgaaaggcgagcgccggaggggcaaggggcacgatggcctttaccagggtctcagtacagccaccaaggacacctacgacgcccttcacatgcaggccctgccccctcgc

SEQ ID NO: 2093 - DNA, 1476 bp, synthetic construct
  misc_feature 1..1476: note = Synthetic
  source 1..1476: mol_type = other DNA
atggccttaccagtgaccgccttgctcctgccgctggccttgctgctccacgccgccaggccgcaagtgcagctggtgcagagcggcgccgaggtgaagaagcctggcgcttccgtgaaggtgtcctgtaaagcttctggatacaccttcacctcttatgatattaactgggtgcggcaggccaccggccagggcctggaatggatgggctggatgatccccaacagcggcgataccggctccgcccagaaattccagggaagagttaccatgacaagaaacaccagcatcagcaccgcctacatggaactgagcagcctgcggagcgaggacaccgctgtgtactactgcgccagaggcggctactgtaatagcacaagctgctactattactacatggacgtgtggggcaagggcaccacagtgacagtcagctccggcagcaccagcggcagcggcaagcccggctccggagagggcagcaccaagggcgacatccagatgacacagagccctagcagcctgagcgcctctgtgggcgaccgggtgaccatcacctgcagagccagccagggcatcagcagctggctggcctggtaccagcagaagcccgagaaggcccctaagtccctgatctacgccgccagctccctccagggcggagtgccatctagattcagcggctctggatctggcacagacttcaccctgaccatcagctctctgcagcctgaggattttgccacatactactgccagcaatacgacagctacccctacacattcggccaaggcacaaagctggaaatcaaggcggccgcaaccacgacgccagcgccgcggccaccaacaccggcgcccaccatcgcgtcgcagcccctgtccctgcgcccagaggcgtgccggccagcggcggggggcgcagtgcacacgagggggctggacttcgcctgtgatatctacatctgggcgcccttggccgggacttgtggggtccttctcctgtcactggttatcaccctttactgccggagggaccagaggctgccccccgatgcccacaagccccctgggggaggcagtttccggacccccatccaagaggagcaggccgacgcccactccaccctggccaagatcagagtgaagttcagcaggagcgcagacgcccccgcgtaccagcagggccagaaccagctctataacgagctcaatctaggacgaagagaggagtacgatgttttggacaagagacgtggccgggaccctgagatggggggaaagccgagaaggaagaaccctcaggaaggcctgtacaatgaactgcagaaagataagatggcggaggcctacagtgagattgggatgaaaggcgagcgccggaggggcaaggggcacgatggcctttaccagggtctcagtacagccaccaaggacacctacgacgcccttcacatgcaggccctgccccctcgc

SEQ ID NO: 2094 - DNA, 1479 bp, synthetic construct
  misc_feature 1..1479: note = Synthetic
  source 1..1479: mol_type = other DNA
atggccttaccagtgaccgccttgctcctgccgctggccttgctgctccacgccgccaggccggaggtgcagctgctggaaagcggaggcggcctggtgcaacctggaggttctctgcggctgagctgcgccgctagcggcttcacatttagcagctacgtgatgaactgggtgcggcaggctcctggaaagggcctggaatgggtctccagcgtgtccggcagcggcaacaacagcttttacgccgatagcgtgaagggcagattcaccatcagccgggacaacagcaagaacaccctctacctgcagatgaattctctgagagccgaggacaccgccgtgtactactgcgccagcaggtcctcttcttacctgtactactactattacatggacgtgtggggcaaaggcacaacagtgaccgtctccagcggcagcaccagcggcagcggcaagcccggctccggagagggcagcaccaagggcgagatcgtgctgacccaaagccccggcaccctgagcctgagccctggcgagagagccaccctgtcttgtagagcctctcagagcgtttctagctcctacctggcctggtaccagcagaagcccggacaggcccctagactgctgatctacggcgccagcagcagagctacaggcatccccgatagattcagcgacagcggctcaggcacagacttcaccctgacaattagccggctggaacccgaggatttcgccgtgtactattgccagcactacggcagctctcctccaagaatcaccttcggccctggcaccaaggtggacatcaaagcggccgcaaccacgacgccagcgccgcggccaccaacaccggcgcccaccatcgcgtcgcagcccctgtccctgcgcccagaggcgtgccggccagcggcggggggcgcagtgcacacgagggggctggacttcgcctgtgatatctacatctgggcgcccttggccgggacttgtggggtccttctcctgtcactggttatcaccctttactgccggagggaccagaggctgccccccgatgcccacaagccccctgggggaggcagtttccggacccccatccaagaggagcaggccgacgcccactccaccctggccaagatcagagtgaagttcagcaggagcgcagacgcccccgcgtaccagcagggccagaaccagctctataacgagctcaatctaggacgaagagaggagtacgatgttttggacaagagacgtggccgggaccctgagatggggggaaagccgagaaggaagaaccctcaggaaggcctgtacaatgaactgcagaaagataagatggcggaggcctacagtgagattgggatgaaaggcgagcgccggaggggcaaggggcacgatggcctttaccagggtctcagtacagccaccaaggacacctacgacgcccttcacatgcaggccctgccccctcgc

SEQ ID NO: 2095 - protein, 717 aa, synthetic construct
  REGION 1..717: note = Synthetic
MALPVTALLLPLALLLHAARPQVQLVESGGGVVQPGRSLRLSCAASGFTFSSHDMHWVRQAPGKGLDWVAVIWSDGNKKYYVDSAKGRFTISRDNSKNTVYLQMNSLRAEDTAIYYCARGDNWNDEHSYYYYMDVWGKGTTVTVSSGSTSGSGKPGSGEGSTKGEIVLTQSPDFQSVTPKEKVTITCRASQTIGSSLHWYQQKPDQSPKLLIKHASQSFSGVPSRFSGSGSGTDFTLTVNSLEAEDAATYYCHQSSSLPWTFGQGTKVEIKAAATTTPAPRPPTPAPTIASQPLSLRPEACRPAAGGAVHTRGLDFACDIYIWAPLAGTCGVLLLSLVITLYCRRDQRLPPDAHKPPGGGSFRTPIQEEQADAHSTLAKIRVKFSRSADAPAYQQGQNQLYNELNLGRREEYDVLDKRRGRDPEMGGKPRRKNPQEGLYNELQKDKMAEAYSEIGMKGERRRGKGHDGLYQGLSTATKDTYDALHMQALPPRGSGEGRGSLLTCGDVEENPGPMALPVTALLLPLALLLHAARPNWVNVISDLKKIEDLIQSMHIDATLYTESDVHPSCKVTAMKCFLLELQVISLESGDASIHDTVENLIILANNSLSSNGNVTESGCKECEELEEKNIKEFLQSFVHIVQMFINTSTTTPAPRPPTPAPTIASQPLSLRPEACRPAAGGAVHTRGLDFACDIYIWAPLAGTCGVLLLSLVITLYC

SEQ ID NO: 2096 - protein, 717 aa, synthetic construct
  REGION 1..717: note = Synthetic
MALPVTALLLPLALLLHAARPQVQLVESGGGVVQPGRSLRLSCAASGFTFSSHDMHWVRQAPGKGLDWVAVIWSDGNNKYYADSAKGRFTISRDNSKNTVYLQMNSLRAEDTAIYYCARGDNWNDEHSYYYYMDVWGKGTTVTVSSGSTSGSGKPGSGEGSTKGEIVLTQSPDFQSVTPKEKVTITCRASQTIGSSLHWYQQKPDQSPKLLIKHASQSFSGVPSRFSGSGSGTDFTLTVNSLEAEDAATYYCHQSSSLPWTFGQGTKVEIKAAATTTPAPRPPTPAPTIASQPLSLRPEACRPAAGGAVHTRGLDFACDIYIWAPLAGTCGVLLLSLVITLYCRRDQRLPPDAHKPPGGGSFRTPIQEEQADAHSTLAKIRVKFSRSADAPAYQQGQNQLYNELNLGRREEYDVLDKRRGRDPEMGGKPRRKNPQEGLYNELQKDKMAEAYSEIGMKGERRRGKGHDGLYQGLSTATKDTYDALHMQALPPRGSGEGRGSLLTCGDVEENPGPMALPVTALLLPLALLLHAARPNWVNVISDLKKIEDLIQSMHIDATLYTESDVHPSCKVTAMKCFLLELQVISLESGDASIHDTVENLIILANNSLSSNGNVTESGCKECEELEEKNIKEFLQSFVHIVQMFINTSTTTPAPRPPTPAPTIASQPLSLRPEACRPAAGGAVHTRGLDFACDIYIWAPLAGTCGVLLLSLVITLYC

SEQ ID NO: 2097 - protein, 716 aa, synthetic construct
  REGION 1..716: note = Synthetic
MALPVTALLLPLALLLHAARPQLQLVQSGAEVKKPGASVKVSCKASGYTFTNYGISWLRQAPGQGLEWMGWISGYNDNTHYAQKFQGRVTMTTDTSTTTAYMELRNLRSDDTAVYYCARDGIAARPVYYYYMDVWGKGTTVTVSSGSTSGSGKPGSGEGSTKGDIQMTQSPSSLSASVGDRVTITCRASQSISNYLNWYHQKPGKAPKLLIYAASSLESGVPSRFSGSGSGTDFTLTISSLQPEDFATYYCQQSYSNPLTFGGGTKVESKAAATTTPAPRPPTPAPTIASQPLSLRPEACRPAAGGAVHTRGLDFACDIYIWAPLAGTCGVLLLSLVITLYCRRDQRLPPDAHKPPGGGSFRTPIQEEQADAHSTLAKIRVKFSRSADAPAYQQGQNQLYNELNLGRREEYDVLDKRRGRDPEMGGKPRRKNPQEGLYNELQKDKMAEAYSEIGMKGERRRGKGHDGLYQGLSTATKDTYDALHMQALPPRGSGEGRGSLLTCGDVEENPGPMALPVTALLLPLALLLHAARPNWVNVISDLKKIEDLIQSMHIDATLYTESDVHPSCKVTAMKCFLLELQVISLESGDASIHDTVENLIILANNSLSSNGNVTESGCKECEELEEKNIKEFLQSFVHIVQMFINTSTTTPAPRPPTPAPTIASQPLSLRPEACRPAAGGAVHTRGLDFACDIYIWAPLAGTCGVLLLSLVITLYC

SEQ ID NO: 2098 - protein, 717 aa, synthetic construct
  REGION 1..717: note = Synthetic
MALPVTALLLPLALLLHAARPQVQLVESGGGVVQPGRSLRLSCVASGFTFSSNDIYWVRQAPGKGLEWVAVIWYDGSNKYYADSVKGRFTISRDNSKNTLYLQMNSLRAEDTAVYYCARGDNWNDEHHYHYYMDVWGKGTTVTVSSGSTSGSGKPGSGEGSTKGEIVLTQSPDFQSVTPKEKVTITCRASQSIGSSLHWYQQKPDQSPKLLIKFASQSFSGVPSRFSGSGSGTDFTLTIHSLEAEDAATYYCHQSGSLPWTFGQGTKVEIKAAATTTPAPRPPTPAPTIASQPLSLRPEACRPAAGGAVHTRGLDFACDIYIWAPLAGTCGVLLLSLVITLYCRRDQRLPPDAHKPPGGGSFRTPIQEEQADAHSTLAKIRVKFSRSADAPAYQQGQNQLYNELNLGRREEYDVLDKRRGRDPEMGGKPRRKNPQEGLYNELQKDKMAEAYSEIGMKGERRRGKGHDGLYQGLSTATKDTYDALHMQALPPRGSGEGRGSLLTCGDVEENPGPMALPVTALLLPLALLLHAARPNWVNVISDLKKIEDLIQSMHIDATLYTESDVHPSCKVTAMKCFLLELQVISLESGDASIHDTVENLIILANNSLSSNGNVTESGCKECEELEEKNIKEFLQSFVHIVQMFINTSTTTPAPRPPTPAPTIASQPLSLRPEACRPAAGGAVHTRGLDFACDIYIWAPLAGTCGVLLLSLVITLYC

SEQ ID NO: 2099 - protein, 710 aa, synthetic construct
  REGION 1..710: note = Synthetic
MALPVTALLLPLALLLHAARPQVQLVESGGGVVQPGRSLRLSCAASGFTFSSYGMHWVRQAPGKGLEWVAVISYDGSNKYYADSVKGRFTISRDNSKTTLYLQMNSLRAEDTAVYYCARDHYYYYMDVWGKGTTVTVSSGSTSGSGKPGSGEGSTKGVTQEPSFSVSPGGTVTLTCGLSSGSVSTSYYPSWYQQTPGQAPRTLIYSTNIRSSGVPDRFSGSILGNKAALTITGAQADDESDYYCVLYMGSDIVVFGGGTKLTVLAAATTTPAPRPPTPAPTIASQPLSLRPEACRPAAGGAVHTRGLDFACDIYIWAPLAGTCGVLLLSLVITLYCRRDQRLPPDAHKPPGGGSFRTPIQEEQADAHSTLAKIRVKFSRSADAPAYQQGQNQLYNELNLGRREEYDVLDKRRGRDPEMGGKPRRKNPQEGLYNELQKDKMAEAYSEIGMKGERRRGKGHDGLYQGLSTATKDTYDALHMQALPPRGSGEGRGSLLTCGDVEENPGPMALPVTALLLPLALLLHAARPNWVNVISDLKKIEDLIQSMHIDATLYTESDVHPSCKVTAMKCFLLELQVISLESGDASIHDTVENLIILANNSLSSNGNVTESGCKECEELEEKNIKEFLQSFVHIVQMFINTSTTTPAPRPPTPAPTIASQPLSLRPEACRPAAGGAVHTRGLDFACDIYIWAPLAGTCGVLLLSLVITLYC

SEQ ID NO: 2100 - protein, 715 aa, synthetic construct
  REGION 1..715: note = Synthetic
MALPVTALLLPLALLLHAARPQLQLQESGPGLVKPSETLSLTCTVSGGSISSSSYYWGWIRQPPGKGLEWIGSLYYSGSTYYNPSLKSRVTISVDTSKNQFSLKLSSVTAADTAVYYCAAVQLERRGYFYMDVWGKGTTVTVSSGSTSGSGKPGSGEGSTKGEIVLTQSPATLSLSPGERATLSCRASQSVSSYFAWYQQKPGQAPRLLIYDASNRATGIPARFSGSGSGTDFTLTISSLEPEDFAVYYCQQRSNWPLTFGGGTKVEIKAAATTTPAPRPPTPAPTIASQPLSLRPEACRPAAGGAVHTRGLDFACDIYIWAPLAGTCGVLLLSLVITLYCRRDQRLPPDAHKPPGGGSFRTPIQEEQADAHSTLAKIRVKFSRSADAPAYQQGQNQLYNELNLGRREEYDVLDKRRGRDPEMGGKPRRKNPQEGLYNELQKDKMAEAYSEIGMKGERRRGKGHDGLYQGLSTATKDTYDALHMQALPPRGSGEGRGSLLTCGDVEENPGPMALPVTALLLPLALLLHAARPNWVNVISDLKKIEDLIQSMHIDATLYTESDVHPSCKVTAMKCFLLELQVISLESGDASIHDTVENLIILANNSLSSNGNVTESGCKECEELEEKNIKEFLQSFVHIVQMFINTSTTTPAPRPPTPAPTIASQPLSLRPEACRPAAGGAVHTRGLDFACDIYIWAPLAGTCGVLLLSLVITLYC

SEQ ID NO: 2101 - protein, 717 aa, synthetic construct
  REGION 1..717: note = Synthetic
MALPVTALLLPLALLLHAARPQVQLVESGGGVVQPGRSLRLSCAASGFTFSNYGMHWVRQAPGKGLEWMAVIWSDGHNKYYADSVKGRFTISRDNSKNTLYLQMNSLRAEDTAVYYCARAQLERRYFYYMDVWGKGTTVTVSSGSTSGSGKPGSGEGSTKGQTVVTQEPSFSVSPGGTVTLTCGLTSGSVSTSYYPNWYQQTPGQAPRTLIYSTNIRSSGVPDRFSGSILGNKAALTITGAQADDESDYYCVLYMGSGMFIFGSGTKVTVLAAATTTPAPRPPTPAPTIASQPLSLRPEACRPAAGGAVHTRGLDFACDIYIWAPLAGTCGVLLLSLVITLYCRRDQRLPPDAHKPPGGGSFRTPIQEEQADAHSTLAKIRVKFSRSADAPAYQQGQNQLYNELNLGRREEYDVLDKRRGRDPEMGGKPRRKNPQEGLYNELQKDKMAEAYSEIGMKGERRRGKGHDGLYQGLSTATKDTYDALHMQALPPRGSGEGRGSLLTCGDVEENPGPMALPVTALLLPLALLLHAARPNWVNVISDLKKIEDLIQSMHIDATLYTESDVHPSCKVTAMKCFLLELQVISLESGDASIHDTVENLIILANNSLSSNGNVTESGCKECEELEEKNIKEFLQSFVHIVQMFINTSTTTPAPRPPTPAPTIASQPLSLRPEACRPAAGGAVHTRGLDFACDIYIWAPLAGTCGVLLLSLVITLYC

SEQ ID NO: 2102 - protein, 717 aa, synthetic construct
  REGION 1..717: note = Synthetic
MALPVTALLLPLALLLHAARPQVQLVQSGAEVKKPGASVKVSCKASGYTFTSYDINWVRQATGQGLEWMGWMIPNSGDTGSAQKFQGRVTMTRNTSIGTAYMELSSLRSEDTAVYYCARGGYCNSTSCYYYYMDVWGKGTTVTVSSGSTSGSGKPGSGEGSTKGDIQMTQSPSSLSASVGDRVTITCRASQGISSWLAWYQQKPEKAPKSLIYAASSLQGGVPSRFSGSGSGTDFTLTISSLQPEDFATYYCQQYDSYPYTFGQGTKLEIKAAATTTPAPRPPTPAPTIASQPLSLRPEACRPAAGGAVHTRGLDFACDIYIWAPLAGTCGVLLLSLVITLYCRRDQRLPPDAHKPPGGGSFRTPIQEEQADAHSTLAKIRVKFSRSADAPAYQQGQNQLYNELNLGRREEYDVLDKRRGRDPEMGGKPRRKNPQEGLYNELQKDKMAEAYSEIGMKGERRRGKGHDGLYQGLSTATKDTYDALHMQALPPRGSGEGRGSLLTCGDVEENPGPMALPVTALLLPLALLLHAARPNWVNVISDLKKIEDLIQSMHIDATLYTESDVHPSCKVTAMKCFLLELQVISLESGDASIHDTVENLIILANNSLSSNGNVTESGCKECEELEEKNIKEFLQSFVHIVQMFINTSTTTPAPRPPTPAPTIASQPLSLRPEACRPAAGGAVHTRGLDFACDIYIWAPLAGTCGVLLLSLVITLYC

SEQ ID NO: 2103 - protein, 718 aa, synthetic construct
  REGION 1..718: note = Synthetic
MALPVTALLLPLALLLHAARPQVQLVQSGAEVKKPGASVKVSCKASGYTFTSYDINWVRQATGQGLEWMGWMNPNSGNTVYAQKFQGRVTMTRNTSISTAYMELSSLRSEDTAVYYCARGGDFWSGYHDYYYYMDVWGKGTTVTVSSGSTSGSGKPGSGEGSTKGDIQVTQSPTFLSASVGDRVTITCRASQGISSYLAWYQQKPGKAPKLLIYGASTLQSGVPSRFSGSGSGTEFTLTISSLQPEDFATYYCQQLNSYPWTFGQGTKVEIKAAATTTPAPRPPTPAPTIASQPLSLRPEACRPAAGGAVHTRGLDFACDIYIWAPLAGTCGVLLLSLVITLYCRRDQRLPPDAHKPPGGGSFRTPIQEEQADAHSTLAKIRVKFSRSADAPAYQQGQNQLYNELNLGRREEYDVLDKRRGRDPEMGGKPRRKNPQEGLYNELQKDKMAEAYSEIGMKGERRRGKGHDGLYQGLSTATKDTYDALHMQALPPRGSGEGRGSLLTCGDVEENPGPMALPVTALLLPLALLLHAARPNWVNVISDLKKIEDLIQSMHIDATLYTESDVHPSCKVTAMKCFLLELQVISLESGDASIHDTVENLIILANNSLSSNGNVTESGCKECEELEEKNIKEFLQSFVHIVQMFINTSTTTPAPRPPTPAPTIASQPLSLRPEACRPAAGGAVHTRGLDFACDIYIWAPLAGTCGVLLLSLVITLYC

SEQ ID NO: 2104 - protein, 716 aa, synthetic construct
  REGION 1..716: note = Synthetic
MALPVTALLLPLALLLHAARPQVQLQESGPGLVKPSETLSLTCTVSGGSISSYYWSWIRQPAGKGLEWIGRIYTSGSTNYNPSLKSRVTMSVDTSKNQFSLKLSSVTAADTAVYYCAREEYQLLPALYYYYYMDVWGKGTTVTVSSGSTSGSGKPGSGEGSTKGSYELTQPPSVSVSPGQTASITCSGDKLGDKYACWYQQKPGQSPVLVIYQDSKRPSGIPERFSGSNSGNTATLTISGTQAMDEADYYCQAWDSSTAVFGGGTQLTALAAATTTPAPRPPTPAPTIASQPLSLRPEACRPAAGGAVHTRGLDFACDIYIWAPLAGTCGVLLLSLVITLYCRRDQRLPPDAHKPPGGGSFRTPIQEEQADAHSTLAKIRVKFSRSADAPAYQQGQNQLYNELNLGRREEYDVLDKRRGRDPEMGGKPRRKNPQEGLYNELQKDKMAEAYSEIGMKGERRRGKGHDGLYQGLSTATKDTYDALHMQALPPRGSGEGRGSLLTCGDVEENPGPMALPVTALLLPLALLLHAARPNWVNVISDLKKIEDLIQSMHIDATLYTESDVHPSCKVTAMKCFLLELQVISLESGDASIHDTVENLIILANNSLSSNGNVTESGCKECEELEEKNIKEFLQSFVHIVQMFINTSTTTPAPRPPTPAPTIASQPLSLRPEACRPAAGGAVHTRGLDFACDIYIWAPLAGTCGVLLLSLVITLYC

SEQ ID NO: 2105 - protein, 717 aa, synthetic construct
  REGION 1..717: note = Synthetic
MALPVTALLLPLALLLHAARPQVQLVESGGGVVQPGRSLRLSCAATGFTFSSYGMHWVRQAPGKGLEWMVVIWSDGHNKYYADSVKGRFTISRDNSKNTLYLQMNSLRAEDTAVYYCARAQLERRYFYYMDVWGKGTTVTVSSGSTSGSGKPGSGEGSTKGQTVVTQEPSFSVSPGGTVTLTCGLTSGSVSTSYYPNWYQQTPGQAPRTLIYSTNIRSSGVPDRFSGSILGNKAALTITGAQADDESDYYCVLYMGSGMFIFGSGTKVTVLAAATTTPAPRPPTPAPTIASQPLSLRPEACRPAAGGAVHTRGLDFACDIYIWAPLAGTCGVLLLSLVITLYCRRDQRLPPDAHKPPGGGSFRTPIQEEQADAHSTLAKIRVKFSRSADAPAYQQGQNQLYNELNLGRREEYDVLDKRRGRDPEMGGKPRRKNPQEGLYNELQKDKMAEAYSEIGMKGERRRGKGHDGLYQGLSTATKDTYDALHMQALPPRGSGEGRGSLLTCGDVEENPGPMALPVTALLLPLALLLHAARPNWVNVISDLKKIEDLIQSMHIDATLYTESDVHPSCKVTAMKCFLLELQVISLESGDASIHDTVENLIILANNSLSSNGNVTESGCKECEELEEKNIKEFLQSFVHIVQMFINTSTTTPAPRPPTPAPTIASQPLSLRPEACRPAAGGAVHTRGLDFACDIYIWAPLAGTCGVLLLSLVITLYC

SEQ ID NO: 2106 - protein, 717 aa, synthetic construct
  REGION 1..717: note = Synthetic
MALPVTALLLPLALLLHAARPQVQLVESGGGVVQPGRSLRLSCAASGFTFTSYDMHWVRQAPGKGLEWVTIIWFDGSNKYYADSVKGRFTISRDNSKNTLYLQMNSLSAEDTAVYYCARGDNWNDRYYYYYYMDVWGKGTTVTVSSGSTSGSGKPGSGEGSTKGEIVLTQSPDFQSVTPKEKVTITCRASQSIGSSLHWYQQKPDQSPMLLIKFASQSISGVPSRFSGSGSGTDFTLTINSLEAEDAAAYYCHQSSSLPWTFGQGTKVEIKAAATTTPAPRPPTPAPTIASQPLSLRPEACRPAAGGAVHTRGLDFACDIYIWAPLAGTCGVLLLSLVITLYCRRDQRLPPDAHKPPGGGSFRTPIQEEQADAHSTLAKIRVKFSRSADAPAYQQGQNQLYNELNLGRREEYDVLDKRRGRDPEMGGKPRRKNPQEGLYNELQKDKMAEAYSEIGMKGERRRGKGHDGLYQGLSTATKDTYDALHMQALPPRGSGEGRGSLLTCGDVEENPGPMALPVTALLLPLALLLHAARPNWVNVISDLKKIEDLIQSMHIDATLYTESDVHPSCKVTAMKCFLLELQVISLESGDASIHDTVENLIILANNSLSSNGNVTESGCKECEELEEKNIKEFLQSFVHIVQMFINTSTTTPAPRPPTPAPTIASQPLSLRPEACRPAAGGAVHTRGLDFACDIYIWAPLAGTCGVLLLSLVITLYC

SEQ ID NO: 2107 - protein, 722 aa, synthetic construct
  REGION 1..722: note = Synthetic
MALPVTALLLPLALLLHAARPQVQLVQSGAEVKKPGASVKVSCKASGYTFTSYGISWVRQAPGQGLEWMGWISAYNGHTDYTQKLQGRVTMTTDTSTTTAYMELRSLSSADTAVYYCVREVVLPTTDYYYFYMDVWGKGTTVTVSSGSTSGSGKPGSGEGSTKGDIVMTQPPLSSPVTLGQPASISCRSSQSLVHSDGNTYLSWLQQRPGQPPRLLIYKVSNRFSGVPDRFSGSGAGTDFTLKISRVEAEDVGVYYCTQATQFPHTFGQGTKLEIKAAATTTPAPRPPTPAPTIASQPLSLRPEACRPAAGGAVHTRGLDFACDIYIWAPLAGTCGVLLLSLVITLYCRRDQRLPPDAHKPPGGGSFRTPIQEEQADAHSTLAKIRVKFSRSADAPAYQQGQNQLYNELNLGRREEYDVLDKRRGRDPEMGGKPRRKNPQEGLYNELQKDKMAEAYSEIGMKGERRRGKGHDGLYQGLSTATKDTYDALHMQALPPRGSGEGRGSLLTCGDVEENPGPMALPVTALLLPLALLLHAARPNWVNVISDLKKIEDLIQSMHIDATLYTESDVHPSCKVTAMKCFLLELQVISLESGDASIHDTVENLIILANNSLSSNGNVTESGCKECEELEEKNIKEFLQSFVHIVQMFINTSTTTPAPRPPTPAPTIASQPLSLRPEACRPAAGGAVHTRGLDFACDIYIWAPLAGTCGVLLLSLVITLYC

SEQ ID NO: 2108 - protein, 721 aa, synthetic construct
  REGION 1..721: note = Synthetic
MALPVTALLLPLALLLHAARPQVQLVQSGAEVKKPGASVKVSCKVSGYTLTELSMHWVRQAPGKGLEWMGGFDPEDGETIYAQKFQGRVTMTEDTSTDTAYMELSSLRSEDTAVYYCATGRITMVRGVIIPYYYYYMDVWGKGTTVTVSSGSTSGSGKPGSGEGSTKGDIQMTQSPSSLSASVGDRVTITCRASQGISSWLAWYQQKPEKAPKSLIYAASSLQSGVPSRFSGSGSGTDFTLTISSLQPEDFATYYCQQYNSYPYTFGQGTKLEIKAAATTTPAPRPPTPAPTIASQPLSLRPEACRPAAGGAVHTRGLDFACDIYIWAPLAGTCGVLLLSLVITLYCRRDQRLPPDAHKPPGGGSFRTPIQEEQADAHSTLAKIRVKFSRSADAPAYQQGQNQLYNELNLGRREEYDVLDKRRGRDPEMGGKPRRKNPQEGLYNELQKDKMAEAYSEIGMKGERRRGKGHDGLYQGLSTATKDTYDALHMQALPPRGSGEGRGSLLTCGDVEENPGPMALPVTALLLPLALLLHAARPNWVNVISDLKKIEDLIQSMHIDATLYTESDVHPSCKVTAMKCFLLELQVISLESGDASIHDTVENLIILANNSLSSNGNVTESGCKECEELEEKNIKEFLQSFVHIVQMFINTSTTTPAPRPPTPAPTIASQPLSLRPEACRPAAGGAVHTRGLDFACDIYIWAPLAGTCGVLLLSLVITLYC

SEQ ID NO: 2109 - protein, 719 aa, synthetic construct
  REGION 1..719: note = Synthetic
MALPVTALLLPLALLLHAARPQVQLVQSGTEVKKPGASVKVSCKASGYTFTNYGIGWVRQAPGQGLEWMGWIIAYNGYTKYAQILQGRVTMTTDTSTNTAYMELRSLRSDDTAVYYCARQQLGGDYHYYMDVWGKGTTVTVSSGSTSGSGKPGSGEGSTKGDIVMTQTPLSLSVTPGQPASISCKSSKSLLHSDGKTYLYWYLQKPGQPPQLLIYEVSNRFSGVPDRFSGSGSGTDFTLKISRVEAEDVGVYYCMQSIQFPWTFGQGTKVEIKAAATTTPAPRPPTPAPTIASQPLSLRPEACRPAAGGAVHTRGLDFACDIYIWAPLAGTCGVLLLSLVITLYCRRDQRLPPDAHKPPGGGSFRTPIQEEQADAHSTLAKIRVKFSRSADAPAYQQGQNQLYNELNLGRREEYDVLDKRRGRDPEMGGKPRRKNPQEGLYNELQKDKMAEAYSEIGMKGERRRGKGHDGLYQGLSTATKDTYDALHMQALPPRGSGEGRGSLLTCGDVEENPGPMALPVTALLLPLALLLHAARPNWVNVISDLKKIEDLIQSMHIDATLYTESDVHPSCKVTAMKCFLLELQVISLESGDASIHDTVENLIILANNSLSSNGNVTESGCKECEELEEKNIKEFLQSFVHIVQMFINTSTTTPAPRPPTPAPTIASQPLSLRPEACRPAAGGAVHTRGLDFACDIYIWAPLAGTCGVLLLSLVITLYC

SEQ ID NO: 2110 - protein, 719 aa, synthetic construct
  REGION 1..719: note = Synthetic
MALPVTALLLPLALLLHAARPQVQLVQSGTEVKKPGASVKVSCKASGYTFTNYGIGWVRQAPGQGLEWMGWIIAYNGYTKYAQILQGRVTMTTDTSTNTAYMELRSLRSDDTAVYYCARQQLGGDYHYYMDVWGKGTTVTVSSGSTSGSGKPGSGEGSTKGDIVMTQTPLSLSVTPGQPASISCKSSKSLLHSDGKTYLYWYLQKPGQPPQLLIYEVSTRFSGVPDRFSGSGSGTDFTLKISRVEAEDVGVYYCMQSIQFPWTFGQGTKVEIKAAATTTPAPRPPTPAPTIASQPLSLRPEACRPAAGGAVHTRGLDFACDIYIWAPLAGTCGVLLLSLVITLYCRRDQRLPPDAHKPPGGGSFRTPIQEEQADAHSTLAKIRVKFSRSADAPAYQQGQNQLYNELNLGRREEYDVLDKRRGRDPEMGGKPRRKNPQEGLYNELQKDKMAEAYSEIGMKGERRRGKGHDGLYQGLSTATKDTYDALHMQALPPRGSGEGRGSLLTCGDVEENPGPMALPVTALLLPLALLLHAARPNWVNVISDLKKIEDLIQSMHIDATLYTESDVHPSCKVTAMKCFLLELQVISLESGDASIHDTVENLIILANNSLSSNGNVTESGCKECEELEEKNIKEFLQSFVHIVQMFINTSTTTPAPRPPTPAPTIASQPLSLRPEACRPAAGGAVHTRGLDFACDIYIWAPLAGTCGVLLLSLVITLYC

SEQ ID NO: 2111 - protein, 717 aa, synthetic construct
  REGION 1..717: note = Synthetic
MALPVTALLLPLALLLHAARPQVQLVQSGTEVKKPGASVKVSCKTSGYTFTSYDINWVRQATGQGLEWMGWMNPISGDTGSAQKFQGRVTMTRNTSIGTAYMELSSLRSEDTAVYYCARGGYCSSTSCYYYYMDVWGKGTTVTVSSGSTSGSGKPGSGEGSTKGDIQMTQSPSSLSASVGDRVTITCRASQGISNWLAWYQQKPEKAPKSLIYAASSLQGGVPSRFSGSGSGTDFTLTISSLQPEDFATYYCQQYDSYPYTFGQGTKLEIKAAATTTPAPRPPTPAPTIASQPLSLRPEACRPAAGGAVHTRGLDFACDIYIWAPLAGTCGVLLLSLVITLYCRRDQRLPPDAHKPPGGGSFRTPIQEEQADAHSTLAKIRVKFSRSADAPAYQQGQNQLYNELNLGRREEYDVLDKRRGRDPEMGGKPRRKNPQEGLYNELQKDKMAEAYSEIGMKGERRRGKGHDGLYQGLSTATKDTYDALHMQALPPRGSGEGRGSLLTCGDVEENPGPMALPVTALLLPLALLLHAARPNWVNVISDLKKIEDLIQSMHIDATLYTESDVHPSCKVTAMKCFLLELQVISLESGDASIHDTVENLIILANNSLSSNGNVTESGCKECEELEEKNIKEFLQSFVHIVQMFINTSTTTPAPRPPTPAPTIASQPLSLRPEACRPAAGGAVHTRGLDFACDIYIWAPLAGTCGVLLLSLVITLYC

SEQ ID NO: 2112 - protein, 717 aa, synthetic construct
  REGION 1..717: note = Synthetic
MALPVTALLLPLALLLHAARPQVQLVQSGAEVKKPGASVKVSCKASGYTFTSYDINWVRQATGQGLEWMGWMIPNSGDTGSAQKFQGRVTMTRNTSISTAYMELSSLRSEDTAVYYCARGGYCNSTSCYYYYMDVWGKGTTVTVSSGSTSGSGKPGSGEGSTKGDIQMTQSPSSLSASVGDRVTITCRASQGISSWLAWYQQKPEKAPKSLIYAASSLQGGVPSRFSGSGSGTDFTLTISSLQPEDFATYYCQQYDSYPYTFGQGTKLEIKAAATTTPAPRPPTPAPTIASQPLSLRPEACRPAAGGAVHTRGLDFACDIYIWAPLAGTCGVLLLSLVITLYCRRDQRLPPDAHKPPGGGSFRTPIQEEQADAHSTLAKIRVKFSRSADAPAYQQGQNQLYNELNLGRREEYDVLDKRRGRDPEMGGKPRRKNPQEGLYNELQKDKMAEAYSEIGMKGERRRGKGHDGLYQGLSTATKDTYDALHMQALPPRGSGEGRGSLLTCGDVEENPGPMALPVTALLLPLALLLHAARPNWVNVISDLKKIEDLIQSMHIDATLYTESDVHPSCKVTAMKCFLLELQVISLESGDASIHDTVENLIILANNSLSSNGNVTESGCKECEELEEKNIKEFLQSFVHIVQMFINTSTTTPAPRPPTPAPTIASQPLSLRPEACRPAAGGAVHTRGLDFACDIYIWAPLAGTCGVLLLSLVITLYC

SEQ ID NO: 2113 - protein, 718 aa, synthetic construct
  REGION 1..718: note = Synthetic
MALPVTALLLPLALLLHAARPEVQLLESGGGLVQPGGSLRLSCAASGFTFSSYVMNWVRQAPGKGLEWVSSVSGSGNNSFYADSVKGRFTISRDNSKNTLYLQMNSLRAEDTAVYYCASRSSSYLYYYYYMDVWGKGTTVTVSSGSTSGSGKPGSGEGSTKGEIVLTQSPGTLSLSPGERATLSCRASQSVSSSYLAWYQQKPGQAPRLLIYGASSRATGIPDRFSDSGSGTDFTLTISRLEPEDFAVYYCQHYGSSPPRITFGPGTKVDIKAAATTTPAPRPPTPAPTIASQPLSLRPEACRPAAGGAVHTRGLDFACDIYIWAPLAGTCGVLLLSLVITLYCRRDQRLPPDAHKPPGGGSFRTPIQEEQADAHSTLAKIRVKFSRSADAPAYQQGQNQLYNELNLGRREEYDVLDKRRGRDPEMGGKPRRKNPQEGLYNELQKDKMAEAYSEIGMKGERRRGKGHDGLYQGLSTATKDTYDALHMQALPPRGSGEGRGSLLTCGDVEENPGPMALPVTALLLPLALLLHAARPNWVNVISDLKKIEDLIQSMHIDATLYTESDVHPSCKVTAMKCFLLELQVISLESGDASIHDTVENLIILANNSLSSNGNVTESGCKECEELEEKNIKEFLQSFVHIVQMFINTSTTTPAPRPPTPAPTIASQPLSLRPEACRPAAGGAVHTRGLDFACDIYIWAPLAGTCGVLLLSLVITLYC

SEQ ID NO: 2114 - DNA, 2154 bp, synthetic construct
  misc_feature 1..2154: note = Synthetic
  source 1..2154: mol_type = other DNA
atggccttaccagtgaccgccttgctcctgccgctggccttgctgctccacgccgccaggccgcaggtgcagctggtggagtctgggggaggcgtggtccagcctgggaggtccctgagactttcctgtgcagcgtctggattcaccttcagcagtcatgacatgcactgggtccgccaggctccaggcaaggggctggactgggtggcagttatatggagtgatggaaataaaaaatactatgtagactccgcgaagggccggttcaccatctccagagacaattccaagaacacggtgtatctgcaaatgaacagcctgagagccgaggacacggctatatattactgtgcgagaggtgacaactggaacgacgaacactcctactattactacatggacgtctggggcaaggggaccacggtcaccgtctcctcaggcagcaccagcggcagcggcaagcccggctccggagagggcagcaccaagggcgaaattgtgctgactcagtctccagactttcagtctgtgactccaaaggagaaagtcaccatcacctgccgggccagtcagaccattggcagtagcttacactggtaccagcagaaaccagatcagtctccaaagctcctcatcaagcatgcttcccagtccttctcaggggtcccctcgaggttcagtggcagtggatctgggacagatttcaccctcaccgtcaatagcctggaagctgaagatgctgcaacgtattactgtcatcagagtagtagtttaccgtggacgttcggccaagggaccaaggtggaaatcaaagcggccgcaaccacgacgccagcgccgcggccaccaacaccggcgcccaccatcgcgtcgcagcccctgtccctgcgcccagaggcgtgccggccagcggcggggggcgcagtgcacacgagggggctggacttcgcctgtgatatctacatctgggcgcccttggccgggacttgtggggtccttctcctgtcactggttatcaccctttactgccggagggaccagaggctgccccccgatgcccacaagccccctgggggaggcagtttccggacccccatccaagaggagcaggccgacgcccactccaccctggccaagatcagagtgaagttcagcaggagcgcagacgcccccgcgtaccagcagggccagaaccagctctataacgagctcaatctaggacgaagagaggagtacgatgttttggacaagagacgtggccgggaccctgagatggggggaaagccgagaaggaagaaccctcaggaaggcctgtacaatgaactgcagaaagataagatggcggaggcctacagtgagattgggatgaaaggcgagcgccggaggggcaaggggcacgatggcctttaccagggtctcagtacagccaccaaggacacctacgacgcccttcacatgcaggccctgccccctcgcggctctggcgagggaaggggttccctgcttacttgcggcgacgtcgaagagaatcccggtccgatggccctcccagtaactgccctccttttgcccctcgcactccttcttcatgccgctcgccccaactgggtcaacgtgattagcgatttgaagaaaatcgaggaccttatacagtctatgcatattgacgctacactgtatactgagagtgatgtacacccgtcctgtaaggtaacggccatgaaatgctttcttctggagctccaggtcatcagcttggagtctggggacgcaagcatccacgatacggttgaaaacctcatcatccttgcgaacaactctctctcatctaatggaaacgttacagagagtgggtgtaaggagtgcgaagagttggaagaaaaaaacatcaaagaatttcttcaatccttcgttcacatagtgcaaatgttcattaacacgtccactaccacacccgccccgaggccacctacgccggcaccgactatcgccagtcaacccctctctctgcgccccgaggcttgccggcctgcggctggtggggcggtccacacccggggcctggattttgcgtgcgatatatacatctgggcacctcttgccggcacctgcggagtgctgcttctctcactcgttattacgctgtactgctaa

SEQ ID NO: 2115 - DNA, 2154 bp, synthetic construct
  misc_feature 1..2154: note = Synthetic
  source 1..2154: mol_type = other DNA
atggccttaccagtgaccgccttgctcctgccgctggccttgctgctccacgccgccaggccgcaggtgcagctggtggagtctgggggaggcgtggtccagcctgggaggtccctgagactttcctgtgcagcgtctggattcaccttcagtagtcatgacatgcactgggtccgccaggctccaggcaaggggctggactgggtggcagttatatggagtgatggaaataataaatactatgcagactccgcgaagggccggttcaccatctccagagacaattccaagaacacggtgtatctgcaaatgaacagcctgagagccgaggacacggctatatattactgtgcgagaggtgacaactggaacgacgaacactcctactattactacatggacgtctggggcaaggggaccacggtcaccgtctcctcaggcagcaccagcggcagcggcaagcccggctccggagagggcagcaccaagggcgaaattgtgctgactcagtctccagactttcagtctgtgactccaaaggagaaagtcaccatcacctgccgggccagtcagaccattggcagtagcttacactggtaccagcagaaaccagatcagtctccaaagctcctcatcaagcatgcttcccagtccttctcaggggtcccctcgaggttcagtggcagtggatctgggacagatttcaccctcaccgtcaatagcctggaagctgaagatgctgcaacgtattactgtcatcagagtagtagtttaccgtggacgttcggccaagggaccaaggtggaaatcaaagcggccgcaaccacgacgccagcgccgcggccaccaacaccggcgcccaccatcgcgtcgcagcccctgtccctgcgcccagaggcgtgccggccagcggcggggggcgcagtgcacacgagggggctggacttcgcctgtgatatctacatctgggcgcccttggccgggacttgtggggtccttctcctgtcactggttatcaccctttactgccggagggaccagaggctgccccccgatgcccacaagccccctgggggaggcagtttccggacccccatccaagaggagcaggccgacgcccactccaccctggccaagatcagagtgaagttcagcaggagcgcagacgcccccgcgtaccagcagggccagaaccagctctataacgagctcaatctaggacgaagagaggagtacgatgttttggacaagagacgtggccgggaccctgagatggggggaaagccgagaaggaagaaccctcaggaaggcctgtacaatgaactgcagaaagataagatggcggaggcctacagtgagattgggatgaaaggcgagcgccggaggggcaaggggcacgatggcctttaccagggtctcagtacagccaccaaggacacctacgacgcccttcacatgcaggccctgccccctcgcggctctggcgagggaaggggttccctgcttacttgcggcgacgtcgaagagaatcccggtccgatggccctcccagtaactgccctccttttgcccctcgcactccttcttcatgccgctcgccccaactgggtcaacgtgattagcgatttgaagaaaatcgaggaccttatacagtctatgcatattgacgctacactgtatactgagagtgatgtacacccgtcctgtaaggtaacggccatgaaatgctttcttctggagctccaggtcatcagcttggagtctggggacgcaagcatccacgatacggttgaaaacctcatcatccttgcgaacaactctctctcatctaatggaaacgttacagagagtgggtgtaaggagtgcgaagagttggaagaaaaaaacatcaaagaatttcttcaatccttcgttcacatagtgcaaatgttcattaacacgtccactaccacacccgccccgaggccacctacgccggcaccgactatcgccagtcaacccctctctctgcgccccgaggcttgccggcctgcggctggtggggcggtccacacccggggcctggattttgcgtgcgatatatacatctgggcacctcttgccggcacctgcggagtgctgcttctctcactcgttattacgctgtactgctaa

SEQ ID NO: 2116 - DNA, 2151 bp, synthetic construct
  misc_feature 1..2151: note = Synthetic
  source 1..2151: mol_type = other DNA
atggccttaccagtgaccgccttgctcctgccgctggccttgctgctccacgccgccaggccgcagcttcagctggtgcagtctggagctgaggtgaagaagcctggggcctcagtgaaggtctcctgcaaggcttctggttacacctttaccaactatggtatcagctggttgcgacaggcccctggacaagggcttgagtggatgggatggatcagtggttacaatgataacacacactatgcacagaagttccagggcagagtcaccatgaccacagacacatccacgaccacagcctacatggaactgaggaacctgagatctgacgacacggccgtgtattactgtgcgagagatgggatagcagctcgtccagtctactactactacatggacgtctggggcaaagggaccacggtcaccgtctcctcaggcagcaccagcggcagcggcaagcccggctccggagagggcagcaccaagggcgacatacagatgacccagtctccatcctccctgtctgcatctgtaggagacagagtcaccatcacttgccgggcaagccagagcattagcaactatttaaattggtatcaccagaaaccagggaaagcccctaagctcctgatctatgctgcatccagtttggaaagtggggtcccatcaaggttcagtggcagtggatctgggacagatttcactctcaccatcagcagtctgcaacctgaagattttgcaacttactactgtcaacagagttacagtaacccgctcactttcggcggagggaccaaggtggagagcaaagcggccgcaaccacgacgccagcgccgcggccaccaacaccggcgcccaccatcgcgtcgcagcccctgtccctgcgcccagaggcgtgccggccagcggcggggggcgcagtgcacacgagggggctggacttcgcctgtgatatctacatctgggcgcccttggccgggacttgtggggtccttctcctgtcactggttatcaccctttactgccggagggaccagaggctgccccccgatgcccacaagccccctgggggaggcagtttccggacccccatccaagaggagcaggccgacgcccactccaccctggccaagatcagagtgaagttcagcaggagcgcagacgcccccgcgtaccagcagggccagaaccagctctataacgagctcaatctaggacgaagagaggagtacgatgttttggacaagagacgtggccgggaccctgagatggggggaaagccgagaaggaagaaccctcaggaaggcctgtacaatgaactgcagaaagataagatggcggaggcctacagtgagattgggatgaaaggcgagcgccggaggggcaaggggcacgatggcctttaccagggtctcagtacagccaccaaggacacctacgacgcccttcacatgcaggccctgccccctcgcggctctggcgagggaaggggttccctgcttacttgcggcgacgtcgaagagaatcccggtccgatggccctcccagtaactgccctccttttgcccctcgcactccttcttcatgccgctcgccccaactgggtcaacgtgattagcgatttgaagaaaatcgaggaccttatacagtctatgcatattgacgctacactgtatactgagagtgatgtacacccgtcctgtaaggtaacggccatgaaatgctttcttctggagctccaggtcatcagcttggagtctggggacgcaagcatccacgatacggttgaaaacctcatcatccttgcgaacaactctctctcatctaatggaaacgttacagagagtgggtgtaaggagtgcgaagagttggaagaaaaaaacatcaaagaatttcttcaatccttcgttcacatagtgcaaatgttcattaacacgtccactaccacacccgccccgaggccacctacgccggcaccgactatcgccagtcaacccctctctctgcgccccgaggcttgccggcctgcggctggtggggcggtccacacccggggcctggattttgcgtgcgatatatacatctgggcacctcttgccggcacctgcggagtgctgcttctctcactcgttattacgctgtactgctaa

SEQ ID NO: 2117 - DNA, 2154 bp, synthetic construct
  misc_feature 1..2154: note = Synthetic
  source 1..2154: mol_type = other DNA
atggccttaccagtgaccgccttgctcctgccgctggccttgctgctccacgccgccaggccgcaggtgcagctggtggagtctgggggaggcgtggtccagcctgggaggtccctgagactctcctgtgtagcgtctggattcaccttcagtagcaatgacatatactgggtccgccaggccccaggcaaggggctggagtgggtggcagttatatggtatgatggaagtaataaatactatgcagactccgtgaagggccgattcaccatctccagagacaattccaagaacacgctgtatctgcaaatgaacagcctgagagccgaggacacggctgtgtattactgtgcgagaggtgacaactggaacgacgaacaccactaccactactacatggacgtctggggcaaagggaccacggtcaccgtctcctcaggcagcaccagcggcagcggcaagcccggctccggagagggcagcaccaagggcgaaattgtgctgactcagtctccagactttcagtctgtgactccaaaggagaaagtcaccatcacctgccgggccagtcagagcattggtagtagcttacactggtaccagcagaaaccagatcagtctccaaagctcctcatcaagtttgcttcccagtccttctcaggggtcccctcgaggttcagtggcagtggatctgggacagatttcaccctcaccatccatagcctggaagctgaagatgctgcaacgtattactgtcatcagagtggtagtttaccgtggacgttcggccaagggaccaaggtggaaatcaaagcggccgcaaccacgacgccagcgccgcggccaccaacaccggcgcccaccatcgcgtcgcagcccctgtccctgcgcccagaggcgtgccggccagcggcggggggcgcagtgcacacgagggggctggacttcgcctgtgatatctacatctgggcgcccttggccgggacttgtggggtccttctcctgtcactggttatcaccctttactgccggagggaccagaggctgccccccgatgcccacaagccccctgggggaggcagtttccggacccccatccaagaggagcaggccgacgcccactccaccctggccaagatcagagtgaagttcagcaggagcgcagacgcccccgcgtaccagcagggccagaaccagctctataacgagctcaatctaggacgaagagaggagtacgatgttttggacaagagacgtggccgggaccctgagatggggggaaagccgagaaggaagaaccctcaggaaggcctgtacaatgaactgcagaaagataagatggcggaggcctacagtgagattgggatgaaaggcgagcgccggaggggcaaggggcacgatggcctttaccagggtctcagtacagccaccaaggacacctacgacgcccttcacatgcaggccctgccccctcgcggctctggcgagggaaggggttccctgcttacttgcggcgacgtcgaagagaatcccggtccgatggccctcccagtaactgccctccttttgcccctcgcactccttcttcatgccgctcgccccaactgggtcaacgtgattagcgatttgaagaaaatcgaggaccttatacagtctatgcatattgacgctacactgtatactgagagtgatgtacacccgtcctgtaaggtaacggccatgaaatgctttcttctggagctccaggtcatcagcttggagtctggggacgcaagcatccacgatacggttgaaaacctcatcatccttgcgaacaactctctctcatctaatggaaacgttacagagagtgggtgtaaggagtgcgaagagttggaagaaaaaaacatcaaagaatttcttcaatccttcgttcacatagtgcaaatgttcattaacacgtccactaccacacccgccccgaggccacctacgccggcaccgactatcgccagtcaacccctctctctgcgccccgaggcttgccggcctgcggctggtggggcggtccacacccggggcctggattttgcgtgcgatatatacatctgggcacctcttgccggcacctgcggagtgctgcttctctcactcgttattacgctgtactgctaa

SEQ ID NO: 2118 - DNA, 2134 bp, synthetic construct
  misc_feature 1..2134: note = Synthetic
  source 1..2134: mol_type = other DNA
atggccttaccagtgaccgccttgctcctgccgctggccttgctgctccacgccgccaggccgcaggtgcagttggtggagtctgggggaggcgtggtccagcctgggaggtccctgagactctcctgtgcagcctctggattcaccttcagtagctatggcatgcactgggtccgccaggctccaggcaaggggctggagtgggtggcagttatatcatatgatggaagtaataaatactatgcagactccgtgaagggccgattcaccatctccagggacaattccaagaccacgctgtatctgcaaatgaacagcctgagagctgaggacacggctgtgtattactgtgcgagagatcactactactactacatggacgtctggggcaaagggaccacggtcaccgtctcctcaggcagcaccagcggcagcggcaagcccggctccggagagggcagcaccaagggcggtgacccaggagccatcgttctcagtgtcccctggagggacagtcacactcacttgtggcttgagctctggctcagtctctactagttactaccccagctggtaccagcagaccccaggccaggctccacgcacgctcatctacagcacaaacattcgctcttctggggtccctgatcgcttctctggctccatccttgggaacaaagctgccctcaccatcacgggggcccaggcagatgatgaatctgattattactgtgtgctgtatatgggtagtgacattgtggtattcggcggagggaccaagctgaccgtcctagcggccgcaaccacgacgccagcgccgcggccaccaacaccggcgcccaccatcgcgtcgcagcccctgtccctgcgcccagaggcgtgccggccagcggcggggggcgcagtgcacacgagggggctggacttcgcctgtgatatctacatctgggcgcccttggccgggacttgtggggtccttctcctgtcactggttatcaccctttactgccggagggaccagaggctgccccccgatgcccacaagccccctgggggaggcagtttccggacccccatccaagaggagcaggccgacgcccactccaccctggccaagatcagagtgaagttcagcaggagcgcagacgcccccgcgtaccagcagggccagaaccagctctataacgagctcaatctaggacgaagagaggagtacgatgttttggacaagagacgtggccgggaccctgagatggggggaaagccgagaaggaagaaccctcaggaaggcctgtacaatgaactgcagaaagataagatggcggaggcctacagtgagattgggatgaaaggcgagcgccggaggggcaaggggcacgatggcctttaccagggtctcagtacagccaccaaggacacctacgacgcccttcacatgcaggccctgccccctcgcggctctggcgagggaaggggttccctgcttacttgcggcgacgtcgaagagaatcccggtccgatggccctcccagtaactgccctccttttgcccctcgcactccttcttcatgccgctcgccccaactgggtcaacgtgattagcgatttgaagaaaatcgaggaccttatacagtctatgcatattgacgctacactgtatactgagagtgatgtacacccgtcctgtaaggtaacggccatgaaatgctttcttctggagctccaggtcatcagcttggagtctggggacgcaagcatccacgatacggttgaaaacctcatcatccttgcgaacaactctctctcatctaatggaaacgttacagagagtgggtgtaaggagtgcgaagagttggaagaaaaaaacatcaaagaatttcttcaatccttcgttcacatagtgcaaatgttcattaacacgtccactaccacacccgccccgaggccacctacgccggcaccgactatcgccagtcaacccctctctctgcgccccgaggcttgccggcctgcggctggtggggcggtccacacccggggcctggattttgcgtgcgatatatacatctgggcacctcttgccggcacctgcggagtgctgcttctctcactcgttattacgctgtactgctaa

SEQ ID NO: 2119 - DNA, 2148 bp, synthetic construct
  misc_feature 1..2148: note = Synthetic
  source 1..2148: mol_type = other DNA
atggccttaccagtgaccgccttgctcctgccgctggccttgctgctccacgccgccaggccgcaactgcagctgcaggagtcgggcccaggactggtgaagccttcggagaccctgtccctcacctgcactgtctctggtggctccatcagcagtagtagttactactggggctggatccgccagcccccagggaaggggctggagtggattgggagtctctattatagtgggagcacctactacaacccgtccctcaagagtcgagtcaccatatccgttgacacgtccaagaaccagttctccctgaagctgagctctgtgaccgccgcagacacggctgtgtattactgtgcggccgtacaactggaacgacgtgggtacttctacatggacgtctggggcaaagggaccacggtcaccgtctcctcaggcagcaccagcggcagcggcaagcccggctccggagagggcagcaccaagggcgaaattgtgttgacacagtctccagccaccctgtctttgtctccaggggaaagagccaccctctcctgcagggccagtcagagtgttagcagctactttgcctggtaccaacagaaacctggccaggctcccaggctcctcatctatgatgcatccaacagggccactggcatcccagccaggttcagtggcagtgggtctgggacagacttcactctcaccatcagcagcctggagcctgaagattttgcagtttattactgtcagcagcgtagcaactggcctctcactttcggcggagggaccaaggtggagatcaaagcggccgcaaccacgacgccagcgccgcggccaccaacaccggcgcccaccatcgcgtcgcagcccctgtccctgcgcccagaggcgtgccggccagcggcggggggcgcagtgcacacgagggggctggacttcgcctgtgatatctacatctgggcgcccttggccgggacttgtggggtccttctcctgtcactggttatcaccctttactgccggagggaccagaggctgccccccgatgcccacaagccccctgggggaggcagtttccggacccccatccaagaggagcaggccgacgcccactccaccctggccaagatcagagtgaagttcagcaggagcgcagacgcccccgcgtaccagcagggccagaaccagctctataacgagctcaatctaggacgaagagaggagtacgatgttttggacaagagacgtggccgggaccctgagatggggggaaagccgagaaggaagaaccctcaggaaggcctgtacaatgaactgcagaaagataagatggcggaggcctacagtgagattgggatgaaaggcgagcgccggaggggcaaggggcacgatggcctttaccagggtctcagtacagccaccaaggacacctacgacgcccttcacatgcaggccctgccccctcgcggctctggcgagggaaggggttccctgcttacttgcggcgacgtcgaagagaatcccggtccgatggccctcccagtaactgccctccttttgcccctcgcactccttcttcatgccgctcgccccaactgggtcaacgtgattagcgatttgaagaaaatcgaggaccttatacagtctatgcatattgacgctacactgtatactgagagtgatgtacacccgtcctgtaaggtaacggccatgaaatgctttcttctggagctccaggtcatcagcttggagtctggggacgcaagcatccacgatacggttgaaaacctcatcatccttgcgaacaactctctctcatctaatggaaacgttacagagagtgggtgtaaggagtgcgaagagttggaagaaaaaaacatcaaagaatttcttcaatccttcgttcacatagtgcaaatgttcattaacacgtccactaccacacccgccccgaggccacctacgccggcaccgactatcgccagtcaacccctctctctgcgccccgaggcttgccggcctgcggctggtggggcggtccacacccggggcctggattttgcgtgcgatatatacatctgggcacctcttgccggcacctgcggagtgctgcttctctcactcgttattacgctgtactgctaa

SEQ ID NO: 2120 - DNA, 2154 bp, synthetic construct
  misc_feature 1..2154: note = Synthetic
  source 1..2154: mol_type = other DNA
atggccttaccagtgaccgccttgctcctgccgctggccttgctgctccacgccgccaggccgcaggtgcagctggtggagtctgggggaggcgtggtccagcctgggaggtccctgagactctcctgtgcagcatctggattcaccttcagtaactatggcatgcactgggtccgccaggctccaggcaaggggctggagtggatggcagttatatggtctgatggacataataaatactatgcagactccgtgaagggccgattcaccatctccagagacaattccaagaacacgctgtatctgcaaatgaacagcctgagagccgaggacacggctgtgtattactgtgcgagggcacaattggaacgacggtacttctactacatggacgtctggggcaaagggaccacggtcaccgtctcctcaggcagcaccagcggcagcggcaagcccggctccggagagggcagcaccaagggccagactgtagtgacccaggaaccatcgttctcagtgtcccctggagggacagtcacactcacttgtggcttgacctctggctcagtctctactagttactaccccaactggtaccagcagaccccaggccaggctccacgcacgctcatctatagtacaaatattcgctcttctggggtccctgatcgcttctctggctccatccttgggaacaaagctgccctcaccatcacgggggcccaggcagatgatgaatctgattattactgtgtgctgtatatgggtagtggcatgtttattttcggcagtggaaccaaggtcactgtcctagcggccgcaaccacgacgccagcgccgcggccaccaacaccggcgcccaccatcgcgtcgcagcccctgtccctgcgcccagaggcgtgccggccagcggcggggggcgcagtgcacacgagggggctggacttcgcctgtgatatctacatctgggcgcccttggccgggacttgtggggtccttctcctgtcactggttatcaccctttactgccggagggaccagaggctgccccccgatgcccacaagccccctgggggaggcagtttccggacccccatccaagaggagcaggccgacgcccactccaccctggccaagatcagagtgaagttcagcaggagcgcagacgcccccgcgtaccagcagggccagaaccagctctataacgagctcaatctaggacgaagagaggagtacgatgttttggacaagagacgtggccgggaccctgagatggggggaaagccgagaaggaagaaccctcaggaaggcctgtacaatgaactgcagaaagataagatggcggaggcctacagtgagattgggatgaaaggcgagcgccggaggggcaaggggcacgatggcctttaccagggtctcagtacagccaccaaggacacctacgacgcccttcacatgcaggccctgccccctcgcggctctggcgagggaaggggttccctgcttacttgcggcgacgtcgaagagaatcccggtccgatggccctcccagtaactgccctccttttgcccctcgcactccttcttcatgccgctcgccccaactgggtcaacgtgattagcgatttgaagaaaatcgaggaccttatacagtctatgcatattgacgctacactgtatactgagagtgatgtacacccgtcctgtaaggtaacggccatgaaatgctttcttctggagctccaggtcatcagcttggagtctggggacgcaagcatccacgatacggttgaaaacctcatcatccttgcgaacaactctctctcatctaatggaaacgttacagagagtgggtgtaaggagtgcgaagagttggaagaaaaaaacatcaaagaatttcttcaatccttcgttcacatagtgcaaatgttcattaacacgtccactaccacacccgccccgaggccacctacgccggcaccgactatcgccagtcaacccctctctctgcgccccgaggcttgccggcctgcggctggtggggcggtccacacccggggcctggattttgcgtgcgatatatacatctgggcacctcttgccggcacctgcggagtgctgcttctctcactcgttattacgctgtactgctaa

SEQ ID NO: 2121 - DNA, 2154 bp, synthetic construct
  misc_feature 1..2154: note = Synthetic
  source 1..2154: mol_type = other DNA
atggccttaccagtgaccgccttgctcctgccgctggccttgctgctccacgccgccaggccgcaggtgcagctggtgcagtctggggctgaggtgaagaagcctggggcctcagtgaaggtctcctgcaaggcttctggatacaccttcaccagttatgatatcaactgggtgcgacaggccactggacaagggcttgagtggatgggatggatgatccctaacagtggtgacacaggctctgcacagaagttccagggcagagtcaccatgaccaggaacacctccataggcacagcctacatggagctgagcagcctgagatctgaggacacggccgtttattactgtgcgagaggcggatattgtaatagtaccagttgctactactactacatggacgtctggggcaaagggaccacggtcaccgtctcctcaggcagcaccagcggcagcggcaagcccggctccggagagggcagcaccaagggcgacatccagatgacccagtctccatcctcactgtctgcatctgtaggagacagagtcaccatcacttgtcgggcgagtcagggtattagcagctggttagcctggtatcagcagaaaccagagaaagcccctaagtccctgatctatgctgcatccagtttacagggtggggtcccatcaaggttcagcggcagtggatctgggacagatttcactctcaccatcagcagcctgcagcctgaagattttgcaacttattactgccaacagtatgatagttacccgtacacttttggccaggggaccaagctggagatcaaagcggccgcaaccacgacgccagcgccgcggccaccaacaccggcgcccaccatcgcgtcgcagcccctgtccctgcgcccagaggcgtgccggccagcggcggggggcgcagtgcacacgagggggctggacttcgcctgtgatatctacatctgggcgcccttggccgggacttgtggggtccttctcctgtcactggttatcaccctttactgccggagggaccagaggctgccccccgatgcccacaagccccctgggggaggcagtttccggacccccatccaagaggagcaggccgacgcccactccaccctggccaagatcagagtgaagttcagcaggagcgcagacgcccccgcgtaccagcagggccagaaccagctctataacgagctcaatctaggacgaagagaggagtacgatgttttggacaagagacgtggccgggaccctgagatggggggaaagccgagaaggaagaaccctcaggaaggcctgtacaatgaactgcagaaagataagatggcggaggcctacagtgagattgggatgaaaggcgagcgccggaggggcaaggggcacgatggcctttaccagggtctcagtacagccaccaaggacacctacgacgcccttcacatgcaggccctgccccctcgcggctctggcgagggaaggggttccctgcttacttgcggcgacgtcgaagagaatcccggtccgatggccctcccagtaactgccctccttttgcccctcgcactccttcttcatgccgctcgccccaactgggtcaacgtgattagcgatttgaagaaaatcgaggaccttatacagtctatgcatattgacgctacactgtatactgagagtgatgtacacccgtcctgtaaggtaacggccatgaaatgctttcttctggagctccaggtcatcagcttggagtctggggacgcaagcatccacgatacggttgaaaacctcatcatccttgcgaacaactctctctcatctaatggaaacgttacagagagtgggtgtaaggagtgcgaagagttggaagaaaaaaacatcaaagaatttcttcaatccttcgttcacatagtgcaaatgttcattaacacgtccactaccacacccgccccgaggccacctacgccggcaccgactatcgccagtcaacccctctctctgcgccccgaggcttgccggcctgcggctggtggggcggtccacacccggggcctggattttgcgtgcgatatatacatctgggcacctcttgccggcacctgcggagtgctgcttctctcactcgttattacgctgtactgctaa

SEQ ID NO: 2122 - DNA, 2157 bp, synthetic construct
  misc_feature 1..2157: note = Synthetic
  source 1..2157: mol_type = other DNA
atggccttaccagtgaccgccttgctcctgccgctggccttgctgctccacgccgccaggccgcaggtgcagctggtgcagtctggggctgaggtgaagaagcctggggcctcagtgaaggtctcctgcaaggcttctggatacaccttcaccagttatgatatcaactgggtgcgacaggccactggacaagggcttgagtggatgggatggatgaaccctaatagtggtaacacagtctatgcacagaagttccagggcagagtcaccatgaccaggaacacctccataagcacagcctacatggagctgagcagcctgagatctgaggacacggccgtgtattactgtgcgagaggaggcgatttttggagtggttaccatgactactactactacatggacgtctggggcaaagggaccacggtcaccgtctcctcaggcagcaccagcggcagcggcaagcccggctccggagagggcagcaccaagggcgacatccaggtgacccagtctccaaccttcctgtctgcatctgtaggagacagagtcaccatcacttgccgggccagtcagggcattagcagttatttagcctggtatcagcaaaaaccagggaaagcccctaagctcctgatctatggtgcatccactttgcaaagtggggtcccatcaaggttcagcggcagtggatctgggacagaattcactctcacaatcagcagcctgcagcctgaagattttgcaacttattactgtcaacagcttaatagttacccgtggacgttcggccaagggaccaaggtggaaatcaaagcggccgcaaccacgacgccagcgccgcggccaccaacaccggcgcccaccatcgcgtcgcagcccctgtccctgcgcccagaggcgtgccggccagcggcggggggcgcagtgcacacgagggggctggacttcgcctgtgatatctacatctgggcgcccttggccgggacttgtggggtccttctcctgtcactggttatcaccctttactgccggagggaccagaggctgccccccgatgcccacaagccccctgggggaggcagtttccggacccccatccaagaggagcaggccgacgcccactccaccctggccaagatcagagtgaagttcagcaggagcgcagacgcccccgcgtaccagcagggccagaaccagctctataacgagctcaatctaggacgaagagaggagtacgatgttttggacaagagacgtggccgggaccctgagatggggggaaagccgagaaggaagaaccctcaggaaggcctgtacaatgaactgcagaaagataagatggcggaggcctacagtgagattgggatgaaaggcgagcgccggaggggcaaggggcacgatggcctttaccagggtctcagtacagccaccaaggacacctacgacgcccttcacatgcaggccctgccccctcgcggctctggcgagggaaggggttccctgcttacttgcggcgacgtcgaagagaatcccggtccgatggccctcccagtaactgccctccttttgcccctcgcactccttcttcatgccgctcgccccaactgggtcaacgtgattagcgatttgaagaaaatcgaggaccttatacagtctatgcatattgacgctacactgtatactgagagtgatgtacacccgtcctgtaaggtaacggccatgaaatgctttcttctggagctccaggtcatcagcttggagtctggggacgcaagcatccacgatacggttgaaaacctcatcatccttgcgaacaactctctctcatctaatggaaacgttacagagagtgggtgtaaggagtgcgaagagttggaagaaaaaaacatcaaagaatttcttcaatccttcgttcacatagtgcaaatgttcattaacacgtccactaccacacccgccccgaggccacctacgccggcaccgactatcgccagtcaacccctctctctgcgccccgaggcttgccggcctgcggctggtggggcggtccacacccggggcctggattttgcgtgcgatatatacatctgggcacctcttgccggcacctgcggagtgctgcttctctcactcgttattacgctgtactgctaa

SEQ ID NO: 2123 - DNA, 2151 bp, synthetic construct
  misc_feature 1..2151: note = Synthetic
  source 1..2151: mol_type = other DNA
atggccttaccagtgaccgccttgctcctgccgctggccttgctgctccacgccgccaggccgcaggtgcagctgcaggagtcgggcccaggactggtgaagccttcggagaccctgtccctcacctgcactgtctctggtggctccatcagtagttactactggagctggatccggcagcccgccgggaagggactggagtggattgggcgtatctataccagtgggagcaccaactacaacccctccctcaagagtcgagtcaccatgtcagtagacacgtccaagaaccagttctccctgaagctgagctctgtgaccgccgcggacacggccgtgtattactgtgcgagagaggagtaccagctgctaccggccctctactactactactacatggacgtctggggcaaagggaccacggtcaccgtctcctcaggcagcaccagcggcagcggcaagcccggctccggagagggcagcaccaagggctcctatgagctgactcagccaccctcagtgtccgtgtccccaggacagacagccagcatcacctgctctggagataaattgggggataaatatgcttgctggtatcagcagaagccaggccagtcccctgtgctggtcatctatcaagatagcaagcggccctcagggatccctgagcgattctctggctccaactctgggaacacagccactctgaccatcagcgggacccaggctatggatgaggctgactattactgtcaggcgtgggacagcagcactgctgtgttcggaggaggcacccagctgaccgccctcgcggccgcaaccacgacgccagcgccgcggccaccaacaccggcgcccaccatcgcgtcgcagcccctgtccctgcgcccagaggcgtgccggccagcggcggggggcgcagtgcacacgagggggctggacttcgcctgtgatatctacatctgggcgcccttggccgggacttgtggggtccttctcctgtcactggttatcaccctttactgccggagggaccagaggctgccccccgatgcccacaagccccctgggggaggcagtttccggacccccatccaagaggagcaggccgacgcccactccaccctggccaagatcagagtgaagttcagcaggagcgcagacgcccccgcgtaccagcagggccagaaccagctctataacgagctcaatctaggacgaagagaggagtacgatgttttggacaagagacgtggccgggaccctgagatggggggaaagccgagaaggaagaaccctcaggaaggcctgtacaatgaactgcagaaagataagatggcggaggcctacagtgagattgggatgaaaggcgagcgccggaggggcaaggggcacgatggcctttaccagggtctcagtacagccaccaaggacacctacgacgcccttcacatgcaggccctgccccctcgcggctctggcgagggaaggggttccctgcttacttgcggcgacgtcgaagagaatcccggtccgatggccctcccagtaactgccctccttttgcccctcgcactccttcttcatgccgctcgccccaactgggtcaacgtgattagcgatttgaagaaaatcgaggaccttatacagtctatgcatattgacgctacactgtatactgagagtgatgtacacccgtcctgtaaggtaacggccatgaaatgctttcttctggagctccaggtcatcagcttggagtctggggacgcaagcatccacgatacggttgaaaacctcatcatccttgcgaacaactctctctcatctaatggaaacgttacagagagtgggtgtaaggagtgcgaagagttggaagaaaaaaacatcaaagaatttcttcaatccttcgttcacatagtgcaaatgttcattaacacgtccactaccacacccgccccgaggccacctacgccggcaccgactatcgccagtcaacccctctctctgcgccccgaggcttgccggcctgcggctggtggggcggtccacacccggggcctggattttgcgtgcgatatatacatctgggcacctcttgccggcacctgcggagtgctgcttctctcactcgttattacgctgtactgctaa

SEQ ID NO: 2124 - DNA, 2154 bp, synthetic construct
  misc_feature 1..2154: note = Synthetic
  source 1..2154: mol_type = other DNA
atggccttaccagtgaccgccttgctcctgccgctggccttgctgctccacgccgccaggccgcaggtgcagctggtggagtctgggggaggcgtggtccagcctgggaggtccctgagactctcctgtgcagcaactggattcaccttcagtagctatggcatgcactgggtccgccaggctccaggcaaggggctggagtggatggtagttatatggtctgatggacataataaatactatgcagactccgtgaagggccgattcaccatctccagagacaattccaagaacacgctgtatctgcaaatgaacagcctgagagccgaggacacggctgtgtattactgtgcgagggcacaactggaacgacggtacttctactacatggacgtctggggcaaagggaccacggtcaccgtctcctcaggcagcaccagcggcagcggcaagcccggctccggagagggcagcaccaagggccagactgtagtgacccaggaaccatcgttctcagtgtcccctggagggacagtcacactcacttgtggcttgacctctggctcagtctctactagttactaccccaactggtaccagcagaccccaggccaggctccacgcacgctcatctacagcacaaatattcgctcttctggggtccctgatcgcttctctggctccatccttgggaacaaagctgccctcaccatcacgggggcccaggcagatgatgaatctgattattactgtgtgctgtatatgggtagtggcatgtttattttcggcagtggaaccaaggtcactgtcctagcggccgcaaccacgacgccagcgccgcggccaccaacaccggcgcccaccatcgcgtcgcagcccctgtccctgcgcccagaggcgtgccggccagcggcggggggcgcagtgcacacgagggggctggacttcgcctgtgatatctacatctgggcgcccttggccgggacttgtggggtccttctcctgtcactggttatcaccctttactgccggagggaccagaggctgccccccgatgcccacaagccccctgggggaggcagtttccggacccccatccaagaggagcaggccgacgcccactccaccctggccaagatcagagtgaagttcagcaggagcgcagacgcccccgcgtaccagcagggccagaaccagctctataacgagctcaatctaggacgaagagaggagtacgatgttttggacaagagacgtggccgggaccctgagatggggggaaagccgagaaggaagaaccctcaggaaggcctgtacaatgaactgcagaaagataagatggcggaggcctacagtgagattgggatgaaaggcgagcgccggaggggcaaggggcacgatggcctttaccagggtctcagtacagccaccaaggacacctacgacgcccttcacatgcaggccctgccccctcgcggctctggcgagggaaggggttccctgcttacttgcggcgacgtcgaagagaatcccggtccgatggccctcccagtaactgccctccttttgcccctcgcactccttcttcatgccgctcgccccaactgggtcaacgtgattagcgatttgaagaaaatcgaggaccttatacagtctatgcatattgacgctacactgtatactgagagtgatgtacacccgtcctgtaaggtaacggccatgaaatgctttcttctggagctccaggtcatcagcttggagtctggggacgcaagcatccacgatacggttgaaaacctcatcatccttgcgaacaactctctctcatctaatggaaacgttacagagagtgggtgtaaggagtgcgaagagttggaagaaaaaaacatcaaagaatttcttcaatccttcgttcacatagtgcaaatgttcattaacacgtccactaccacacccgccccgaggccacctacgccggcaccgactatcgccagtcaacccctctctctgcgccccgaggcttgccggcctgcggctggtggggcggtccacacccggggcctggattttgcgtgcgatatatacatctgggcacctcttgccggcacctgcggagtgctgcttctctcactcgttattacgctgtactgctaa

SEQ ID NO: 2125 - DNA, 2154 bp, synthetic construct
  misc_feature 1..2154: note = Synthetic
  source 1..2154: mol_type = other DNA
atggccttaccagtgaccgccttgctcctgccgctggccttgctgctccacgccgccaggccgcaggtgcagctggtggagtctgggggaggcgtggtccagcctgggaggtccctgagactctcctgtgcagcgtctggattcaccttcactagttatgacatgcactgggtccgccaggctccaggcaaggggctggagtgggtgacaattatatggtttgatggaagtaataaatactatgcagactccgtgaagggccgattcaccatctccagagacaattccaagaacacgctgtatctgcaaatgaacagcctgagcgccgaggacacggctgtgtattactgtgcgagaggagacaactggaacgaccggtactactactactactacatggacgtctggggcaaagggaccacggtcaccgtctcctcaggcagcaccagcggcagcggcaagcccggctccggagagggcagcaccaagggcgaaattgtgctgactcagtctccagactttcagtctgtgactccaaaggagaaagtcaccatcacctgccgggccagtcagagcattggtagtagcttacactggtaccagcagaaaccagatcagtctccaatgctcctcatcaagtttgcttcccagtccatctcaggggtcccctcgaggttcagtggcagtggatctgggacagatttcaccctcaccatcaatagcctggaagctgaagatgctgcagcgtattactgtcatcagagtagtagtttaccgtggacgttcggccaagggaccaaggtggaaatcaaagcggccgcaaccacgacgccagcgccgcggccaccaacaccggcgcccaccatcgcgtcgcagcccctgtccctgcgcccagaggcgtgccggccagcggcggggggcgcagtgcacacgagggggctggacttcgcctgtgatatctacatctgggcgcccttggccgggacttgtggggtccttctcctgtcactggttatcaccctttactgccggagggaccagaggctgccccccgatgcccacaagccccctgggggaggcagtttccggacccccatccaagaggagcaggccgacgcccactccaccctggccaagatcagagtgaagttcagcaggagcgcagacgcccccgcgtaccagcagggccagaaccagctctataacgagctcaatctaggacgaagagaggagtacgatgttttggacaagagacgtggccgggaccctgagatggggggaaagccgagaaggaagaaccctcaggaaggcctgtacaatgaactgcagaaagataagatggcggaggcctacagtgagattgggatgaaaggcgagcgccggaggggcaaggggcacgatggcctttaccagggtctcagtacagccaccaaggacacctacgacgcccttcacatgcaggccctgccccctcgcggctctggcgagggaaggggttccctgcttacttgcggcgacgtcgaagagaatcccggtccgatggccctcccagtaactgccctccttttgcccctcgcactccttcttcatgccgctcgccccaactgggtcaacgtgattagcgatttgaagaaaatcgaggaccttatacagtctatgcatattgacgctacactgtatactgagagtgatgtacacccgtcctgtaaggtaacggccatgaaatgctttcttctggagctccaggtcatcagcttggagtctggggacgcaagcatccacgatacggttgaaaacctcatcatccttgcgaacaactctctctcatctaatggaaacgttacagagagtgggtgtaaggagtgcgaagagttggaagaaaaaaacatcaaagaatttcttcaatccttcgttcacatagtgcaaatgttcattaacacgtccactaccacacccgccccgaggccacctacgccggcaccgactatcgccagtcaacccctctctctgcgccccgaggcttgccggcctgcggctggtggggcggtccacacccggggcctggattttgcgtgcgatatatacatctgggcacctcttgccggcacctgcggagtgctgcttctctcactcgttattacgctgtactgctaa

SEQ ID NO: 2126 - DNA, 2169 bp, synthetic construct
  misc_feature 1..2169: note = Synthetic
  source 1..2169: mol_type = other DNA
atggccttaccagtgaccgccttgctcctgccgctggccttgctgctccacgccgccaggccgcaggttcagctggtgcagtctggagctgaggtgaagaagcctggggcctcagtgaaggtctcctgcaaggcttctggttacacctttaccagctatggtatcagctgggtgcgacaggcccctggacaagggcttgagtggatggggtggatcagcgcttacaatggtcacacagactatacacagaaactccagggcagagtcaccatgaccacagacacatccacgaccacagcctacatggaactgaggagcctgagctctgccgacacggccgtgtattactgtgtgagagaagtggtacttcccaccacggactactactacttttacatggacgtctggggcaaagggaccacggtcaccgtctcctcaggcagcaccagcggcagcggcaagcccggctccggagagggcagcaccaagggcgatattgtgatgacccagcctccactctcctcgcctgtcacccttggacagccggcctccatctcctgcaggtctagtcaaagcctcgtacacagtgatggaaacacctacttgagttggcttcagcagaggccaggccagcctccaagactcctaatttataaggtttctaaccggttctctggggtcccagacagattcagtggcagtggggcagggacagatttcacactgaaaatcagcagggtggaagctgaggatgtcggggtttattactgcacgcaagctacacaatttcctcacacttttggccaggggaccaagctggagatcaaagcggccgcaaccacgacgccagcgccgcggccaccaacaccggcgcccaccatcgcgtcgcagcccctgtccctgcgcccagaggcgtgccggccagcggcggggggcgcagtgcacacgagggggctggacttcgcctgtgatatctacatctgggcgcccttggccgggacttgtggggtccttctcctgtcactggttatcaccctttactgccggagggaccagaggctgccccccgatgcccacaagccccctgggggaggcagtttccggacccccatccaagaggagcaggccgacgcccactccaccctggccaagatcagagtgaagttcagcaggagcgcagacgcccccgcgtaccagcagggccagaaccagctctataacgagctcaatctaggacgaagagaggagtacgatgttttggacaagagacgtggccgggaccctgagatggggggaaagccgagaaggaagaaccctcaggaaggcctgtacaatgaactgcagaaagataagatggcggaggcctacagtgagattgggatgaaaggcgagcgccggaggggcaaggggcacgatggcctttaccagggtctcagtacagccaccaaggacacctacgacgcccttcacatgcaggccctgccccctcgcggctctggcgagggaaggggttccctgcttacttgcggcgacgtcgaagagaatcccggtccgatggccctcccagtaactgccctccttttgcccctcgcactccttcttcatgccgctcgccccaactgggtcaacgtgattagcgatttgaagaaaatcgaggaccttatacagtctatgcatattgacgctacactgtatactgagagtgatgtacacccgtcctgtaaggtaacggccatgaaatgctttcttctggagctccaggtcatcagcttggagtctggggacgcaagcatccacgatacggttgaaaacctcatcatccttgcgaacaactctctctcatctaatggaaacgttacagagagtgggtgtaaggagtgcgaagagttggaagaaaaaaacatcaaagaatttcttcaatccttcgttcacatagtgcaaatgttcattaacacgtccactaccacacccgccccgaggccacctacgccggcaccgactatcgccagtcaacccctctctctgcgccccgaggcttgccggcctgcggctggtggggcggtccacacccggggcctggattttgcgtgcgatatatacatctgggcacctcttgccggcacctgcggagtgctgcttctctcactcgttattacgctgtactgctaa

SEQ ID NO: 2127 - DNA, 2166 bp, synthetic construct
  misc_feature 1..2166: note = Synthetic
  source 1..2166: mol_type = other DNA
atggccttaccagtgaccgccttgctcctgccgctggccttgctgctccacgccgccaggccgcaggtccagctggtacagtctggggctgaggtgaagaagcctggggcctcagtgaaggtctcctgcaaggtttccggatacaccctcactgaattatccatgcactgggtgcgacaggctcctggaaaagggcttgagtggatgggaggttttgatcctgaagatggtgaaacaatctacgcacagaagttccagggcagagtcaccatgaccgaggacacatctacagacacagcctacatggagctgagcagcctgagatctgaggacacggccgtgtattactgtgcaacaggacgtattactatggttcggggagttattatcccctactactactactacatggacgtctggggcaaagggaccacggtcaccgtctcctcaggcagcaccagcggcagcggcaagcccggctccggagagggcagcaccaagggcgacatccagatgacccagtctccatcctcactgtctgcatctgtaggagacagagtcaccatcacttgtcgggcgagtcagggtattagcagctggttagcctggtatcagcagaaaccagagaaagcccctaagtccctgatctatgctgcatccagtttgcaaagtggggtcccatcaaggttcagcggcagtggatctgggacagatttcactctcaccatcagcagcctgcagcctgaagattttgcaacttattactgccaacagtataatagttacccgtacacttttggccaggggaccaagctggagatcaaagcggccgcaaccacgacgccagcgccgcggccaccaacaccggcgcccaccatcgcgtcgcagcccctgtccctgcgcccagaggcgtgccggccagcggcggggggcgcagtgcacacgagggggctggacttcgcctgtgatatctacatctgggcgcccttggccgggacttgtggggtccttctcctgtcactggttatcaccctttactgccggagggaccagaggctgccccccgatgcccacaagccccctgggggaggcagtttccggacccccatccaagaggagcaggccgacgcccactccaccctggccaagatcagagtgaagttcagcaggagcgcagacgcccccgcgtaccagcagggccagaaccagctctataacgagctcaatctaggacgaagagaggagtacgatgttttggacaagagacgtggccgggaccctgagatggggggaaagccgagaaggaagaaccctcaggaaggcctgtacaatgaactgcagaaagataagatggcggaggcctacagtgagattgggatgaaaggcgagcgccggaggggcaaggggcacgatggcctttaccagggtctcagtacagccaccaaggacacctacgacgcccttcacatgcaggccctgccccctcgcggctctggcgagggaaggggttccctgcttacttgcggcgacgtcgaagagaatcccggtccgatggccctcccagtaactgccctccttttgcccctcgcactccttcttcatgccgctcgccccaactgggtcaacgtgattagcgatttgaagaaaatcgaggaccttatacagtctatgcatattgacgctacactgtatactgagagtgatgtacacccgtcctgtaaggtaacggccatgaaatgctttcttctggagctccaggtcatcagcttggagtctggggacgcaagcatccacgatacggttgaaaacctcatcatccttgcgaacaactctctctcatctaatggaaacgttacagagagtgggtgtaaggagtgcgaagagttggaagaaaaaaacatcaaagaatttcttcaatccttcgttcacatagtgcaaatgttcattaacacgtccactaccacacccgccccgaggccacctacgccggcaccgactatcgccagtcaacccctctctctgcgccccgaggcttgccggcctgcggctggtggggcggtccacacccggggcctggattttgcgtgcgatatatacatctgggcacctcttgccggcacctgcggagtgctgcttctctcactcgttattacgctgtactgctaa

SEQ ID NO: 2128 - DNA, 2160 bp, synthetic construct
  misc_feature 1..2160: note = Synthetic
  source 1..2160: mol_type = other DNA
atggccttaccagtgaccgccttgctcctgccgctggccttgctgctccacgccgccaggccgcaggttcagctggtgcagtctggaactgaggtgaagaagcctggggcctcagtgaaggtctcctgcaaggcttctggttacacctttaccaactatggtatcggctgggtgcgacaggcccctggacaagggcttgagtggatgggatggatcatcgcttacaatggttacacaaagtatgcacagattctccagggcagagtcaccatgaccacagacacatccacgaacacagcttatatggaactgaggagcctgagatctgacgacacggccgtgtattactgtgcgagacagcagctcgggggggactaccactactacatggacgtctggggcaaagggaccacggtcaccgtctcctcaggcagcaccagcggcagcggcaagcccggctccggagagggcagcaccaagggcgatattgtgatgacccagactccactctctctgtccgtcacccctggacagccggcctccatctcctgcaagtctagtaagagcctcctgcatagtgatggaaagacctatttgtattggtacctgcagaagccaggccagcctccacagctcctgatctatgaagtttccaaccggttctctggagtgccagataggttcagtggcagcgggtcagggacagatttcacactgaaaatcagccgggtggaggctgaggatgttggggtttattactgcatgcaaagtatacaatttccgtggacgttcggccaagggaccaaggtggaaatcaaggcggccgcaaccacgacgccagcgccgcggccaccaacaccggcgcccaccatcgcgtcgcagcccctgtccctgcgcccagaggcgtgccggccagcggcggggggcgcagtgcacacgagggggctggacttcgcctgtgatatctacatctgggcgcccttggccgggacttgtggggtccttctcctgtcactggttatcaccctttactgccggagggaccagaggctgccccccgatgcccacaagccccctgggggaggcagtttccggacccccatccaagaggagcaggccgacgcccactccaccctggccaagatcagagtgaagttcagcaggagcgcagacgcccccgcgtaccagcagggccagaaccagctctataacgagctcaatctaggacgaagagaggagtacgatgttttggacaagagacgtggccgggaccctgagatggggggaaagccgagaaggaagaaccctcaggaaggcctgtacaatgaactgcagaaagataagatggcggaggcctacagtgagattgggatgaaaggcgagcgccggaggggcaaggggcacgatggcctttaccagggtctcagtacagccaccaaggacacctacgacgcccttcacatgcaggccctgccccctcgcggctctggcgagggaaggggttccctgcttacttgcggcgacgtcgaagagaatcccggtccgatggccctcccagtaactgccctccttttgcccctcgcactccttcttcatgccgctcgccccaactgggtcaacgtgattagcgatttgaagaaaatcgaggaccttatacagtctatgcatattgacgctacactgtatactgagagtgatgtacacccgtcctgtaaggtaacggccatgaaatgctttcttctggagctccaggtcatcagcttggagtctggggacgcaagcatccacgatacggttgaaaacctcatcatccttgcgaacaactctctctcatctaatggaaacgttacagagagtgggtgtaaggagtgcgaagagttggaagaaaaaaacatcaaagaatttcttcaatccttcgttcacatagtgcaaatgttcattaacacgtccactaccacacccgccccgaggccacctacgccggcaccgactatcgccagtcaacccctctctctgcgccccgaggcttgccggcctgcggctggtggggcggtccacacccggggcctggattttgcgtgcgatatatacatctgggcacctcttgccggcacctgcggagtgctgcttctctcactcgttattacgctgtactgctaa

SEQ ID NO: 2129 - DNA, 2160 bp, synthetic construct
  misc_feature 1..2160: note = Synthetic
  source 1..2160: mol_type = other DNA
atggccttaccagtgaccgccttgctcctgccgctggccttgctgctccacgccgccaggccgcaggttcagctggtgcagtctggaactgaggtgaagaagcctggggcctcagtgaaggtctcctgcaaggcttctggttacacctttaccaactatggtatcggctgggtgcgacaggcccctggacaagggcttgagtggatgggatggatcatcgcttacaatggttacacaaagtatgcacagattctccagggcagagtcaccatgaccacggacacatccacgaacacagcctatatggaactgaggagcctgagatctgacgacacggccgtgtattactgtgcgcgacagcagctcgggggggactaccactactacatggacgtctggggcaaagggaccacggtcaccgtctcttcaggcagcaccagcggcagcggcaagcccggctccggagagggcagcaccaagggcgatattgtgatgacccagactccactctctctgtccgtcacccctggacagccggcctccatctcctgcaagtctagtaagagcctcctgcatagtgatggaaagacctatttgtattggtacctgcagaagccaggccagcctccacagctcctgatctatgaagtttccacccggttctctggagtgccagataggttcagtggcagcgggtcagggacagatttcacactgaaaatcagccgggtggaggctgaggatgttggggtttattactgcatgcaaagtatacagtttccgtggacgttcggccaagggaccaaggtggaaatcaaagcggccgcaaccacgacgccagcgccgcggccaccaacaccggcgcccaccatcgcgtcgcagcccctgtccctgcgcccagaggcgtgccggccagcggcggggggcgcagtgcacacgagggggctggacttcgcctgtgatatctacatctgggcgcccttggccgggacttgtggggtccttctcctgtcactggttatcaccctttactgccggagggaccagaggctgccccccgatgcccacaagccccctgggggaggcagtttccggacccccatccaagaggagcaggccgacgcccactccaccctggccaagatcagagtgaagttcagcaggagcgcagacgcccccgcgtaccagcagggccagaaccagctctataacgagctcaatctaggacgaagagaggagtacgatgttttggacaagagacgtggccgggaccctgagatggggggaaagccgagaaggaagaaccctcaggaaggcctgtacaatgaactgcagaaagataagatggcggaggcctacagtgagattgggatgaaaggcgagcgccggaggggcaaggggcacgatggcctttaccagggtctcagtacagccaccaaggacacctacgacgcccttcacatgcaggccctgccccctcgcggctctggcgagggaaggggttccctgcttacttgcggcgacgtcgaagagaatcccggtccgatggccctcccagtaactgccctccttttgcccctcgcactccttcttcatgccgctcgccccaactgggtcaacgtgattagcgatttgaagaaaatcgaggaccttatacagtctatgcatattgacgctacactgtatactgagagtgatgtacacccgtcctgtaaggtaacggccatgaaatgctttcttctggagctccaggtcatcagcttggagtctggggacgcaagcatccacgatacggttgaaaacctcatcatccttgcgaacaactctctctcatctaatggaaacgttacagagagtgggtgtaaggagtgcgaagagttggaagaaaaaaacatcaaagaatttcttcaatccttcgttcacatagtgcaaatgttcattaacacgtccactaccacacccgccccgaggccacctacgccggcaccgactatcgccagtcaacccctctctctgcgccccgaggcttgccggcctgcggctggtggggcggtccacacccggggcctggattttgcgtgcgatatatacatctgggcacctcttgccggcacctgcggagtgctgcttctctcactcgttattacgctgtactgctaa

SEQ ID NO: 2130 - DNA, 2154 bp, synthetic construct
  misc_feature 1..2154: note = Synthetic
  source 1..2154: mol_type = other DNA
atggccttaccagtgaccgccttgctcctgccgctggccttgctgctccacgccgccaggccgcaggtgcagctggtgcagtctgggactgaggtgaagaagcctggggcctcagtgaaggtctcctgtaagacttctggatacaccttcaccagttatgatatcaactgggtgcgacaggccactggacaagggcttgagtggatgggatggatgaaccctatcagtggtgacacaggctctgcacagaagttccagggcagagtcaccatgaccaggaacacctccataggcacagcctacatggagctgagcagcctgagatctgaggacacggccgtttattactgtgcgagaggcggatattgtagtagtaccagctgctactactactacatggacgtctggggcaaagggaccacggtcaccgtctcctcaggcagcaccagcggcagcggcaagcccggctccggagagggcagcaccaagggcgacatccagatgacccagtctccatcctcactgtctgcctctgtaggagacagagtcaccatcacttgtcgggcgagtcagggtattagcaactggttagcctggtatcagcagaaaccagagaaagcccctaagtccctgatctatgctgcatccagtttgcaaggtggggtcccatcaagattcagcggcagtggatctgggacagatttcactctcaccatcagcagcctgcagcctgaagattttgcaacttattactgccaacagtatgatagttacccgtacacttttggccaggggaccaagctggagatcaaagcggccgcaaccacgacgccagcgccgcggccaccaacaccggcgcccaccatcgcgtcgcagcccctgtccctgcgcccagaggcgtgccggccagcggcggggggcgcagtgcacacgagggggctggacttcgcctgtgatatctacatctgggcgcccttggccgggacttgtggggtccttctcctgtcactggttatcaccctttactgccggagggaccagaggctgccccccgatgcccacaagccccctgggggaggcagtttccggacccccatccaagaggagcaggccgacgcccactccaccctggccaagatcagagtgaagttcagcaggagcgcagacgcccccgcgtaccagcagggccagaaccagctctataacgagctcaatctaggacgaagagaggagtacgatgttttggacaagagacgtggccgggaccctgagatggggggaaagccgagaaggaagaaccctcaggaaggcctgtacaatgaactgcagaaagataagatggcggaggcctacagtgagattgggatgaaaggcgagcgccggaggggcaaggggcacgatggcctttaccagggtctcagtacagccaccaaggacacctacgacgcccttcacatgcaggccctgccccctcgcggctctggcgagggaaggggttccctgcttacttgcggcgacgtcgaagagaatcccggtccgatggccctcccagtaactgccctccttttgcccctcgcactccttcttcatgccgctcgccccaactgggtcaacgtgattagcgatttgaagaaaatcgaggaccttatacagtctatgcatattgacgctacactgtatactgagagtgatgtacacccgtcctgtaaggtaacggccatgaaatgctttcttctggagctccaggtcatcagcttggagtctggggacgcaagcatccacgatacggttgaaaacctcatcatccttgcgaacaactctctctcatctaatggaaacgttacagagagtgggtgtaaggagtgcgaagagttggaagaaaaaaacatcaaagaatttcttcaatccttcgttcacatagtgcaaatgttcattaacacgtccactaccacacccgccccgaggccacctacgccggcaccgactatcgccagtcaacccctctctctgcgccccgaggcttgccggcctgcggctggtggggcggtccacacccggggcctggattttgcgtgcgatatatacatctgggcacctcttgccggcacctgcggagtgctgcttctctcactcgttattacgctgtactgctaa

SEQ ID NO: 2131 - DNA, 2154 bp, synthetic construct
  misc_feature 1..2154: note = Synthetic
  source 1..2154: mol_type = other DNA
atggccttaccagtgaccgccttgctcctgccgctggccttgctgctccacgccgccaggccgcaggtgcagctggtgcagtctggggctgaggtgaagaagcctggggcctcagtgaaggtctcctgcaaggcttctggatacaccttcaccagttatgatatcaactgggtgcgacaggccactggacaagggcttgagtggatgggatggatgatccctaacagtggtgacacaggctctgcacagaagttccagggcagagtcaccatgaccaggaacacctccataagcacagcctacatggagctgagcagcctgagatctgaggacacggccgtttattactgtgcgagaggcggatattgtaatagtaccagttgctactactactacatggacgtctggggcaaagggaccacggtcaccgtctcctcaggcagcaccagcggcagcggcaagcccggctccggagagggcagcaccaagggcgacatccagatgacccagtctccatcctcactgtctgcatctgtaggagacagagtcaccatcacttgtcgggcgagtcagggtattagcagctggttagcctggtatcagcagaaaccagagaaagcccctaagtccctgatctatgctgcatccagtttacaaggtggggtcccatcaaggttcagcggcagtggatctgggacagatttcactctcaccatcagcagcctgcagcctgaagattttgcaacttattactgccaacagtatgatagttacccgtacacttttggccaggggaccaagctggagatcaaagcggccgcaaccacgacgccagcgccgcggccaccaacaccggcgcccaccatcgcgtcgcagcccctgtccctgcgcccagaggcgtgccggccagcggcggggggcgcagtgcacacgagggggctggacttcgcctgtgatatctacatctgggcgcccttggccgggacttgtggggtccttctcctgtcactggttatcaccctttactgccggagggaccagaggctgccccccgatgcccacaagccccctgggggaggcagtttccggacccccatccaagaggagcaggccgacgcccactccaccctggccaagatcagagtgaagttcagcaggagcgcagacgcccccgcgtaccagcagggccagaaccagctctataacgagctcaatctaggacgaagagaggagtacgatgttttggacaagagacgtggccgggaccctgagatggggggaaagccgagaaggaagaaccctcaggaaggcctgtacaatgaactgcagaaagataagatggcggaggcctacagtgagattgggatgaaaggcgagcgccggaggggcaaggggcacgatggcctttaccagggtctcagtacagccaccaaggacacctacgacgcccttcacatgcaggccctgccccctcgcggctctggcgagggaaggggttccctgcttacttgcggcgacgtcgaagagaatcccggtccgatggccctcccagtaactgccctccttttgcccctcgcactccttcttcatgccgctcgccccaactgggtcaacgtgattagcgatttgaagaaaatcgaggaccttatacagtctatgcatattgacgctacactgtatactgagagtgatgtacacccgtcctgtaaggtaacggccatgaaatgctttcttctggagctccaggtcatcagcttggagtctggggacgcaagcatccacgatacggttgaaaacctcatcatccttgcgaacaactctctctcatctaatggaaacgttacagagagtgggtgtaaggagtgcgaagagttggaagaaaaaaacatcaaagaatttcttcaatccttcgttcacatagtgcaaatgttcattaacacgtccactaccacacccgccccgaggccacctacgccggcaccgactatcgccagtcaacccctctctctgcgccccgaggcttgccggcctgcggctggtggggcggtccacacccggggcctggattttgcgtgcgatatatacatctgggcacctcttgccggcacctgcggagtgctgcttctctcactcgttattacgctgtactgctaa

SEQ ID NO: 2132 - DNA, 2157 bp, synthetic construct
  misc_feature 1..2157: note = Synthetic
  source 1..2157: mol_type = other DNA
atggccttaccagtgaccgccttgctcctgccgctggccttgctgctccacgccgccaggccggaggtgcagttgttggagtctgggggaggcttggtacaacctggggggtccctgagactctcctgtgcagcctctggattcacctttagcagctatgtcatgaactgggtccgccaggctccagggaaggggctggaatgggtctcatctgttagtggtagtggtaataactcattctacgcagactccgtgaagggccggttcaccatctccagagacaattccaagaacacgctgtatctgcaaatgaacagcctgagagccgaggacacggccgtatattactgtgcgagtcgtagttccagttatctctactactactactacatggacgtctggggcaaagggaccaccgtcaccgtctcctcaggcagcaccagcggcagcggcaagcccggctccggagagggcagcaccaagggcgaaattgtgttgacgcagtctccaggcaccctgtctttgtctccaggggaaagagccaccctctcctgcagggccagtcagagtgttagcagcagctacttagcctggtaccagcagaaacctggccaggctcccaggctcctcatctatggtgcatccagcagggccactggcatcccagacaggttcagtgacagtgggtctgggacagacttcactctcaccatcagcagactggagcctgaagattttgcagtgtattactgtcagcactatggtagctcacctccgaggatcactttcggccctgggaccaaagtggatatcaaagcggccgcaaccacgacgccagcgccgcggccaccaacaccggcgcccaccatcgcgtcgcagcccctgtccctgcgcccagaggcgtgccggccagcggcggggggcgcagtgcacacgagggggctggacttcgcctgtgatatctacatctgggcgcccttggccgggacttgtggggtccttctcctgtcactggttatcaccctttactgccggagggaccagaggctgccccccgatgcccacaagccccctgggggaggcagtttccggacccccatccaagaggagcaggccgacgcccactccaccctggccaagatcagagtgaagttcagcaggagcgcagacgcccccgcgtaccagcagggccagaaccagctctataacgagctcaatctaggacgaagagaggagtacgatgttttggacaagagacgtggccgggaccctgagatggggggaaagccgagaaggaagaaccctcaggaaggcctgtacaatgaactgcagaaagataagatggcggaggcctacagtgagattgggatgaaaggcgagcgccggaggggcaaggggcacgatggcctttaccagggtctcagtacagccaccaaggacacctacgacgcccttcacatgcaggccctgccccctcgcggctctggcgagggaaggggttccctgcttacttgcggcgacgtcgaagagaatcccggtccgatggccctcccagtaactgccctccttttgcccctcgcactccttcttcatgccgctcgccccaactgggtcaacgtgattagcgatttgaagaaaatcgaggaccttatacagtctatgcatattgacgctacactgtatactgagagtgatgtacacccgtcctgtaaggtaacggccatgaaatgctttcttctggagctccaggtcatcagcttggagtctggggacgcaagcatccacgatacggttgaaaacctcatcatccttgcgaacaactctctctcatctaatggaaacgttacagagagtgggtgtaaggagtgcgaagagttggaagaaaaaaacatcaaagaatttcttcaatccttcgttcacatagtgcaaatgttcattaacacgtccactaccacacccgccccgaggccacctacgccggcaccgactatcgccagtcaacccctctctctgcgccccgaggcttgccggcctgcggctggtggggcggtccacacccggggcctggattttgcgtgcgatatatacatctgggcacctcttgccggcacctgcggagtgctgcttctctcactcgttattacgctgtactgctaa

SEQ ID NO: 2133 - DNA, 2154 bp, synthetic construct
  misc_feature 1..2154: note = Synthetic
  source 1..2154: mol_type = other DNA
atggccttaccagtgaccgccttgctcctgccgctggccttgctgctccacgccgccaggccgcaagtgcagctggtggagagcggcggcggagtggtgcaacctggaagaagcctgcggctgagctgcgctgctagcggcttcaccttcagcagccacgacatgcactgggtgcggcaggcccctggcaagggcctggactgggtcgccgtgatctggagcgacggcaacaagaagtactacgtggacagcgccaagggcagattcaccatcagccgcgacaatagcaagaacaccgtgtacctgcagatgaacagcctgagagccgaggacaccgccatctactattgcgccagaggcgataattggaacgacgagcacagctactattactacatggacgtgtggggcaaaggcacaaccgtgaccgtgtcctccggcagcaccagcggcagcggcaagcccggctccggagagggcagcaccaagggcgagatcgtgctgacccagagccccgacttccagtctgtgacacctaaggaaaaggttacaattacctgtagagcttcccagaccatcggctcttctctgcactggtaccagcagaaacctgatcagtctccaaagctgctgatcaagcacgccagccagagcttctctggcgtccccagccggttttctggcagcggcagcggaacagattttacactgacagtgaactcactggaagccgaggatgccgccacctactactgccatcagagctccagcctcccttggaccttcggccagggcacgaaggtggaaatcaaagcggccgcaaccacgacgccagcgccgcggccaccaacaccggcgcccaccatcgcgtcgcagcccctgtccctgcgcccagaggcgtgccggccagcggcggggggcgcagtgcacacgagggggctggacttcgcctgtgatatctacatctgggcgcccttggccgggacttgtggggtccttctcctgtcactggttatcaccctttactgccggagggaccagaggctgccccccgatgcccacaagccccctgggggaggcagtttccggacccccatccaagaggagcaggccgacgcccactccaccctggccaagatcagagtgaagttcagcaggagcgcagacgcccccgcgtaccagcagggccagaaccagctctataacgagctcaatctaggacgaagagaggagtacgatgttttggacaagagacgtggccgggaccctgagatggggggaaagccgagaaggaagaaccctcaggaaggcctgtacaatgaactgcagaaagataagatggcggaggcctacagtgagattgggatgaaaggcgagcgccggaggggcaaggggcacgatggcctttaccagggtctcagtacagccaccaaggacacctacgacgcccttcacatgcaggccctgccccctcgcggctctggcgagggaaggggttccctgcttacttgcggcgacgtcgaagagaatcccggtccgatggccctcccagtaactgccctccttttgcccctcgcactccttcttcatgccgctcgccccaactgggtcaacgtgattagcgatttgaagaaaatcgaggaccttatacagtctatgcatattgacgctacactgtatactgagagtgatgtacacccgtcctgtaaggtaacggccatgaaatgctttcttctggagctccaggtcatcagcttggagtctggggacgcaagcatccacgatacggttgaaaacctcatcatccttgcgaacaactctctctcatctaatggaaacgttacagagagtgggtgtaaggagtgcgaagagttggaagaaaaaaacatcaaagaatttcttcaatccttcgttcacatagtgcaaatgttcattaacacgtccactaccacacccgccccgaggccacctacgccggcaccgactatcgccagtcaacccctctctctgcgccccgaggcttgccggcctgcggctggtggggcggtccacacccggggcctggattttgcgtgcgatatatacatctgggcacctcttgccggcacctgcggagtgctgcttctctcactcgttattacgctgtactgctaa

SEQ ID NO: 2134 - DNA, 2154 bp, synthetic construct
  misc_feature 1..2154: note = Synthetic
  source 1..2154: mol_type = other DNA
atggccttaccagtgaccgccttgctcctgccgctggccttgctgctccacgccgccaggccgcaagtgcagctggtggaaagcggcggcggagtggtgcaacctggcagatctctgcggctgtcttgtgccgcctctggatttacattcagctctcatgatatgcactgggtgcggcaggcccctggcaaaggcctggactgggtcgccgtgatctggagcgacggcaacaacaagtactacgccgacagcgccaagggaagattcaccatcagccgggacaattctaaaaacaccgtgtacctgcagatgaacagcctgagagctgaggacaccgccatctactattgcgccagaggagataattggaacgacgagcacagctactactactatatggacgtgtggggcaagggcacaacagtgaccgtgtcctccggcagcaccagcggcagcggcaagcccggctccggagagggcagcaccaagggcgagatcgtgctgacacagtccccagattttcagagcgtgacccccaaggaaaaggtgacaatcacctgcagagccagccagaccatcggcagcagcctgcactggtaccagcagaaacccgatcagtctcctaagctgctgatcaagcacgccagccagagcttcagcggcgttcccagcaggttcagcggaagcggcagcggcaccgacttcaccctgaccgtgaactctctcgaggccgaggacgccgctacatactactgccaccagagcagctccctgccttggaccttcggccagggcaccaaggtcgaaattaaggcggccgcaaccacgacgccagcgccgcggccaccaacaccggcgcccaccatcgcgtcgcagcccctgtccctgcgcccagaggcgtgccggccagcggcggggggcgcagtgcacacgagggggctggacttcgcctgtgatatctacatctgggcgcccttggccgggacttgtggggtccttctcctgtcactggttatcaccctttactgccggagggaccagaggctgccccccgatgcccacaagccccctgggggaggcagtttccggacccccatccaagaggagcaggccgacgcccactccaccctggccaagatcagagtgaagttcagcaggagcgcagacgcccccgcgtaccagcagggccagaaccagctctataacgagctcaatctaggacgaagagaggagtacgatgttttggacaagagacgtggccgggaccctgagatggggggaaagccgagaaggaagaaccctcaggaaggcctgtacaatgaactgcagaaagataagatggcggaggcctacagtgagattgggatgaaaggcgagcgccggaggggcaaggggcacgatggcctttaccagggtctcagtacagccaccaaggacacctacgacgcccttcacatgcaggccctgccccctcgcggctctggcgagggaaggggttccctgcttacttgcggcgacgtcgaagagaatcccggtccgatggccctcccagtaactgccctccttttgcccctcgcactccttcttcatgccgctcgccccaactgggtcaacgtgattagcgatttgaagaaaatcgaggaccttatacagtctatgcatattgacgctacactgtatactgagagtgatgtacacccgtcctgtaaggtaacggccatgaaatgctttcttctggagctccaggtcatcagcttggagtctggggacgcaagcatccacgatacggttgaaaacctcatcatccttgcgaacaactctctctcatctaatggaaacgttacagagagtgggtgtaaggagtgcgaagagttggaagaaaaaaacatcaaagaatttcttcaatccttcgttcacatagtgcaaatgttcattaacacgtccactaccacacccgccccgaggccacctacgccggcaccgactatcgccagtcaacccctctctctgcgccccgaggcttgccggcctgcggctggtggggcggtccacacccggggcctggattttgcgtgcgatatatacatctgggcacctcttgccggcacctgcggagtgctgcttctctcactcgttattacgctgtactgctaa

SEQ ID NO: 2135 - DNA, 2151 bp, synthetic construct
  misc_feature 1..2151: note = Synthetic
  source 1..2151: mol_type = other DNA
atggccttaccagtgaccgccttgctcctgccgctggccttgctgctccacgccgccaggccgcaactgcagctggtgcagagcggagccgaggtgaagaagcctggcgctagcgttaaggtgtcctgcaaggcctccggctacacctttaccaactacggcatctcctggctgcgccaggccccaggccagggcctggagtggatgggctggatctccggatacaacgacaacacccactacgcccagaaattccagggtagagtgactatgaccaccgataccagcacaacaacagcctacatggaactgagaaacctgcggagcgacgacaccgccgtgtactactgcgcccgggacggcattgccgctagacctgtgtactactattacatggacgtgtggggcaagggcaccaccgtgacagtgtcttctggcagcaccagcggcagcggcaagcccggctccggagagggcagcaccaagggcgatatccagatgacccagagccccagcagcctgagcgccagcgtgggcgaccgggtcacaatcacctgcagagccagccagagcatcagcaattacctgaactggtaccaccagaagcccggcaaagcccctaagctgctgatctacgctgcttctagcctcgagagcggcgtgcctagcagattcagcggcagcggcagcggaacagatttcaccctgacaatcagctctctgcaacctgaggacttcgccacatactattgtcagcagtcctacagcaatcctctgaccttcggcggcggcacaaaggtggaatctaaggcggccgcaaccacgacgccagcgccgcggccaccaacaccggcgcccaccatcgcgtcgcagcccctgtccctgcgcccagaggcgtgccggccagcggcggggggcgcagtgcacacgagggggctggacttcgcctgtgatatctacatctgggcgcccttggccgggacttgtggggtccttctcctgtcactggttatcaccctttactgccggagggaccagaggctgccccccgatgcccacaagccccctgggggaggcagtttccggacccccatccaagaggagcaggccgacgcccactccaccctggccaagatcagagtgaagttcagcaggagcgcagacgcccccgcgtaccagcagggccagaaccagctctataacgagctcaatctaggacgaagagaggagtacgatgttttggacaagagacgtggccgggaccctgagatggggggaaagccgagaaggaagaaccctcaggaaggcctgtacaatgaactgcagaaagataagatggcggaggcctacagtgagattgggatgaaaggcgagcgccggaggggcaaggggcacgatggcctttaccagggtctcagtacagccaccaaggacacctacgacgcccttcacatgcaggccctgccccctcgcggctctggcgagggaaggggttccctgcttacttgcggcgacgtcgaagagaatcccggtccgatggccctcccagtaactgccctccttttgcccctcgcactccttcttcatgccgctcgccccaactgggtcaacgtgattagcgatttgaagaaaatcgaggaccttatacagtctatgcatattgacgctacactgtatactgagagtgatgtacacccgtcctgtaaggtaacggccatgaaatgctttcttctggagctccaggtcatcagcttggagtctggggacgcaagcatccacgatacggttgaaaacctcatcatccttgcgaacaactctctctcatctaatggaaacgttacagagagtgggtgtaaggagtgcgaagagttggaagaaaaaaacatcaaagaatttcttcaatccttcgttcacatagtgcaaatgttcattaacacgtccactaccacacccgccccgaggccacctacgccggcaccgactatcgccagtcaacccctctctctgcgccccgaggcttgccggcctgcggctggtggggcggtccacacccggggcctggattttgcgtgcgatatatacatctgggcacctcttgccggcacctgcggagtgctgcttctctcactcgttattacgctgtactgctaa

SEQ ID NO: 2136 - DNA, 2148 bp, synthetic construct
  misc_feature 1..2148: note = Synthetic
  source 1..2148: mol_type = other DNA
atggccttaccagtgaccgccttgctcctgccgctggccttgctgctccacgccgccaggccgcaagtgcagctggtggagagcgggggaggtgtcgtgcagcctggaagaagcctcagactgtcttgtgtggccagcggctttaccttcagctctaatgacatctactgggtgcggcaggcccctggcaagggcctggaatgggtcgctgtgatctggtacgacggcagcaacaaatactacgccgattctgtgaagggcagattcaccatcagcagagataattctaagaacaccctgtacctgcagatgaacagcctgagagccgaggataccgccgtgtactattgcgccaggggcgacaactggaacgacgagcaccattaccactactacatggacgtgtggggcaaaggcaccaccgtgaccgtgggcagcaccagcggcagcggcaagcccggctccggagagggcagcaccaagggcgagattgttctgacccagagccctgatttccagagcgtgacccccaaggaaaaggtgacaatcacctgccgggccagccaaagcatcggctccagcctgcactggtatcagcagaagcccgaccagtccccaaagctgctgatcaaattcgcctctcagtcattcagcggcgtgccttcccggttcagcggaagcggcagcggcacagactttaccctgacaatccacagcctggaagccgaggacgccgctacatactactgccaccagagcggcagcctgccctggacattcggccagggcacgaaggtggagatcaaggcggccgcaaccacgacgccagcgccgcggccaccaacaccggcgcccaccatcgcgtcgcagcccctgtccctgcgcccagaggcgtgccggccagcggcggggggcgcagtgcacacgagggggctggacttcgcctgtgatatctacatctgggcgcccttggccgggacttgtggggtccttctcctgtcactggttatcaccctttactgccggagggaccagaggctgccccccgatgcccacaagccccctgggggaggcagtttccggacccccatccaagaggagcaggccgacgcccactccaccctggccaagatcagagtgaagttcagcaggagcgcagacgcccccgcgtaccagcagggccagaaccagctctataacgagctcaatctaggacgaagagaggagtacgatgttttggacaagagacgtggccgggaccctgagatggggggaaagccgagaaggaagaaccctcaggaaggcctgtacaatgaactgcagaaagataagatggcggaggcctacagtgagattgggatgaaaggcgagcgccggaggggcaaggggcacgatggcctttaccagggtctcagtacagccaccaaggacacctacgacgcccttcacatgcaggccctgccccctcgcggctctggcgagggaaggggttccctgcttacttgcggcgacgtcgaagagaatcccggtccgatggccctcccagtaactgccctccttttgcccctcgcactccttcttcatgccgctcgccccaactgggtcaacgtgattagcgatttgaagaaaatcgaggaccttatacagtctatgcatattgacgctacactgtatactgagagtgatgtacacccgtcctgtaaggtaacggccatgaaatgctttcttctggagctccaggtcatcagcttggagtctggggacgcaagcatccacgatacggttgaaaacctcatcatccttgcgaacaactctctctcatctaatggaaacgttacagagagtgggtgtaaggagtgcgaagagttggaagaaaaaaacatcaaagaatttcttcaatccttcgttcacatagtgcaaatgttcattaacacgtccactaccacacccgccccgaggccacctacgccggcaccgactatcgccagtcaacccctctctctgcgccccgaggcttgccggcctgcggctggtggggcggtccacacccggggcctggattttgcgtgcgatatatacatctgggcacctcttgccggcacctgcggagtgctgcttctctcactcgttattacgctgtactgctaa

SEQ ID NO: 2137 - DNA, 2142 bp, synthetic construct
  misc_feature 1..2142: note = Synthetic
  source 1..2142: mol_type = other DNA
atggccttaccagtgaccgccttgctcctgccgctggccttgctgctccacgccgccaggccgcaagtgcagctggtggaaagcggcggcggtgttgtgcaacctggcagaagcctgcggctgtcatgcgccgccagcggcttcaccttcagctcttacggcatgcactgggtgcggcaggcccctggaaagggactggaatgggtcgccgtgatcagctacgacggctccaacaagtactacgccgacagcgtgaaaggcagattcaccatctctagggacaacagcaagaccaccctctacctgcagatgaacagcctgagagccgaggacaccgccgtgtactattgtgccagagatcactactactactacatggacgtgtggggcaagggcaccaccgtgaccgtgtcttctggcagcaccagcggcagcggcaagcccggctccggagagggcagcaccaagggccagaccgtggtgactcaggagcccagcttcagcgtcagccccggcggaacagtgaccctgacatgcggcctgagcagcggcagcgtgtccaccagctactatcctagctggtaccagcagacaccaggccaggctcctagaaccctgatctacagcaccaacatccggagcagcggcgtgcctgatagatttagcggctctatcctgggaaataaagccgctctgaccattacaggcgcccaggctgatgacgagagcgactactactgcgtgctgtacatgggctctgatatcgtggttttcggcggcggcacaaagctgacagtgctggcggccgcaaccacgacgccagcgccgcggccaccaacaccggcgcccaccatcgcgtcgcagcccctgtccctgcgcccagaggcgtgccggccagcggcggggggcgcagtgcacacgagggggctggacttcgcctgtgatatctacatctgggcgcccttggccgggacttgtggggtccttctcctgtcactggttatcaccctttactgccggagggaccagaggctgccccccgatgcccacaagccccctgggggaggcagtttccggacccccatccaagaggagcaggccgacgcccactccaccctggccaagatcagagtgaagttcagcaggagcgcagacgcccccgcgtaccagcagggccagaaccagctctataacgagctcaatctaggacgaagagaggagtacgatgttttggacaagagacgtggccgggaccctgagatggggggaaagccgagaaggaagaaccctcaggaaggcctgtacaatgaactgcagaaagataagatggcggaggcctacagtgagattgggatgaaaggcgagcgccggaggggcaaggggcacgatggcctttaccagggtctcagtacagccaccaaggacacctacgacgcccttcacatgcaggccctgccccctcgcggctctggcgagggaaggggttccctgcttacttgcggcgacgtcgaagagaatcccggtccgatggccctcccagtaactgccctccttttgcccctcgcactccttcttcatgccgctcgccccaactgggtcaacgtgattagcgatttgaagaaaatcgaggaccttatacagtctatgcatattgacgctacactgtatactgagagtgatgtacacccgtcctgtaaggtaacggccatgaaatgctttcttctggagctccaggtcatcagcttggagtctggggacgcaagcatccacgatacggttgaaaacctcatcatccttgcgaacaactctctctcatctaatggaaacgttacagagagtgggtgtaaggagtgcgaagagttggaagaaaaaaacatcaaagaatttcttcaatccttcgttcacatagtgcaaatgttcattaacacgtccactaccacacccgccccgaggccacctacgccggcaccgactatcgccagtcaacccctctctctgcgccccgaggcttgccggcctgcggctggtggggcggtccacacccggggcctggattttgcgtgcgatatatacatctgggcacctcttgccggcacctgcggagtgctgcttctctcactcgttattacgctgtactgctaa

SEQ ID NO: 2138 - DNA, 2148 bp, synthetic construct
  misc_feature 1..2148: note = Synthetic
  source 1..2148: mol_type = other DNA
atggccttaccagtgaccgccttgctcctgccgctggccttgctgctccacgccgccaggccgcaactgcagctgcaggagagcggccctggactggtgaagcccagcgagacactgagcctgacatgcaccgtgtccggaggctctatcagcagcagcagctactactggggatggattagacagccccccggcaagggcctggaatggatcggcagcctgtactacagcggcagcacctactacaaccccagcctgaagtctagagtgaccatcagcgtggacaccagcaagaaccagttcagcctgaaactgagctctgtcacagccgccgataccgccgtgtactactgcgccgctgtgcagctggaaaggcggggctacttctacatggacgtgtggggcaaaggcaccaccgtgacagtgtctagcggcagcaccagcggcagcggcaagcccggctccggagagggcagcaccaagggcgagatcgtgctgacacagtcccctgctaccctgagcctgagccctggcgagcgggccaccctgagctgcagagccagccagagcgtgtccagctactttgcctggtatcagcagaagcctggccaggccccacggctgctgatctacgacgcctctaatagagccacaggcatcccagctagattcagcggctccggctccggaaccgatttcaccctgaccatctctagcctcgagcctgaggacttcgccgtttactattgtcagcaaagaagcaactggcctctgacatttggcggaggcacaaaggtggaaatcaaggcggccgcaaccacgacgccagcgccgcggccaccaacaccggcgcccaccatcgcgtcgcagcccctgtccctgcgcccagaggcgtgccggccagcggcggggggcgcagtgcacacgagggggctggacttcgcctgtgatatctacatctgggcgcccttggccgggacttgtggggtccttctcctgtcactggttatcaccctttactgccggagggaccagaggctgccccccgatgcccacaagccccctgggggaggcagtttccggacccccatccaagaggagcaggccgacgcccactccaccctggccaagatcagagtgaagttcagcaggagcgcagacgcccccgcgtaccagcagggccagaaccagctctataacgagctcaatctaggacgaagagaggagtacgatgttttggacaagagacgtggccgggaccctgagatggggggaaagccgagaaggaagaaccctcaggaaggcctgtacaatgaactgcagaaagataagatggcggaggcctacagtgagattgggatgaaaggcgagcgccggaggggcaaggggcacgatggcctttaccagggtctcagtacagccaccaaggacacctacgacgcccttcacatgcaggccctgccccctcgcggctctggcgagggaaggggttccctgcttacttgcggcgacgtcgaagagaatcccggtccgatggccctcccagtaactgccctccttttgcccctcgcactccttcttcatgccgctcgccccaactgggtcaacgtgattagcgatttgaagaaaatcgaggaccttatacagtctatgcatattgacgctacactgtatactgagagtgatgtacacccgtcctgtaaggtaacggccatgaaatgctttcttctggagctccaggtcatcagcttggagtctggggacgcaagcatccacgatacggttgaaaacctcatcatccttgcgaacaactctctctcatctaatggaaacgttacagagagtgggtgtaaggagtgcgaagagttggaagaaaaaaacatcaaagaatttcttcaatccttcgttcacatagtgcaaatgttcattaacacgtccactaccacacccgccccgaggccacctacgccggcaccgactatcgccagtcaacccctctctctgcgccccgaggcttgccggcctgcggctggtggggcggtccacacccggggcctggattttgcgtgcgatatatacatctgggcacctcttgccggcacctgcggagtgctgcttctctcactcgttattacgctgtactgctaa

SEQ ID NO: 2139 - DNA, 2154 bp, synthetic construct
  misc_feature 1..2154: note = Synthetic
  source 1..2154: mol_type = other DNA
atggccttaccagtgaccgccttgctcctgccgctggccttgctgctccacgccgccaggccgcaagtgcaactggtggaaagcggcggcggcgttgtgcagcctggcagaagcctgcggctgtcatgcgccgccagcggttttaccttctctaattacggcatgcactgggtgcggcaggctcccggcaaaggcctggaatggatggccgtgatctggtccgatggccacaacaagtactacgccgatagcgtgaaaggcagattcaccattagcagagataattctaagaacaccctgtacctgcagatgaacagcctgcgcgccgaggacaccgccgtgtactattgtgccagagcccagctggagcggagatacttctactatatggacgtgtggggcaagggcaccaccgtgacagtgtctagcggcagcaccagcggcagcggcaagcccggctccggagagggcagcaccaagggccagaccgtcgtgacccaggagcctagcttcagcgtgtccccaggcggaaccgtcacactgacatgcggcctcacaagcggcagcgtgtccaccagctactaccccaactggtaccagcagacacctggacaggcccctagaaccctgatctacagcaccaacatccggagcagcggagtgcccgacagattttctggcagcatcctgggcaacaaggccgctctgaccatcaccggcgctcaggccgacgacgagagcgactactactgcgtgctgtacatgggcagcggcatgttcatcttcggcagcggcacaaaggtgacagtgctggcggccgcaaccacgacgccagcgccgcggccaccaacaccggcgcccaccatcgcgtcgcagcccctgtccctgcgcccagaggcgtgccggccagcggcggggggcgcagtgcacacgagggggctggacttcgcctgtgatatctacatctgggcgcccttggccgggacttgtggggtccttctcctgtcactggttatcaccctttactgccggagggaccagaggctgccccccgatgcccacaagccccctgggggaggcagtttccggacccccatccaagaggagcaggccgacgcccactccaccctggccaagatcagagtgaagttcagcaggagcgcagacgcccccgcgtaccagcagggccagaaccagctctataacgagctcaatctaggacgaagagaggagtacgatgttttggacaagagacgtggccgggaccctgagatggggggaaagccgagaaggaagaaccctcaggaaggcctgtacaatgaactgcagaaagataagatggcggaggcctacagtgagattgggatgaaaggcgagcgccggaggggcaaggggcacgatggcctttaccagggtctcagtacagccaccaaggacacctacgacgcccttcacatgcaggccctgccccctcgcggctctggcgagggaaggggttccctgcttacttgcggcgacgtcgaagagaatcccggtccgatggccctcccagtaactgccctccttttgcccctcgcactccttcttcatgccgctcgccccaactgggtcaacgtgattagcgatttgaagaaaatcgaggaccttatacagtctatgcatattgacgctacactgtatactgagagtgatgtacacccgtcctgtaaggtaacggccatgaaatgctttcttctggagctccaggtcatcagcttggagtctggggacgcaagcatccacgatacggttgaaaacctcatcatccttgcgaacaactctctctcatctaatggaaacgttacagagagtgggtgtaaggagtgcgaagagttggaagaaaaaaacatcaaagaatttcttcaatccttcgttcacatagtgcaaatgttcattaacacgtccactaccacacccgccccgaggccacctacgccggcaccgactatcgccagtcaacccctctctctgcgccccgaggcttgccggcctgcggctggtggggcggtccacacccggggcctggattttgcgtgcgatatatacatctgggcacctcttgccggcacctgcggagtgctgcttctctcactcgttattacgctgtactgctaa

SEQ ID NO: 2140 - DNA, 2154 bp, synthetic construct
  misc_feature 1..2154: note = Synthetic
  source 1..2154: mol_type = other DNA
atggccttaccagtgaccgccttgctcctgccgctggccttgctgctccacgccgccaggccgcaggttcagctggtgcagagcggagccgaggtgaaaaagcccggcgcaagcgtgaaggtgtcttgcaaggcctccggatataccttcaccagctacgatatcaactgggtgcggcaggccacaggccagggtctcgaatggatgggctggatgatccccaattctggcgacacaggcagcgcccaaaagttccagggcagagtgacaatgaccagaaacaccagcatcggaacagcctacatggaactgagctccctgagaagcgaggataccgccgtgtactattgtgccagaggcggctactgcaacagcacctcctgctactactactacatggacgtgtggggcaaaggcacaaccgtcaccgtgagctctggcagcaccagcggcagcggcaagcccggctccggagagggcagcaccaagggcgacatccagatgacacagagccctagcagcctgtctgcttccgtgggcgatagagtgacaatcacctgccgggcctcccagggcatcagctcctggctggcctggtaccagcagaagcctgagaaggcccctaagagcctgatctacgccgcttctagcctgcagggaggcgtgccaagtcggttcagcggcagcggcagcggcacagacttcaccctgaccatttcttctctgcaacctgaggacttcgccacctactactgtcagcaatacgacagctacccctacacctttggccagggcaccaagctggaaatcaaggcggccgcaaccacgacgccagcgccgcggccaccaacaccggcgcccaccatcgcgtcgcagcccctgtccctgcgcccagaggcgtgccggccagcggcggggggcgcagtgcacacgagggggctggacttcgcctgtgatatctacatctgggcgcccttggccgggacttgtggggtccttctcctgtcactggttatcaccctttactgccggagggaccagaggctgccccccgatgcccacaagccccctgggggaggcagtttccggacccccatccaagaggagcaggccgacgcccactccaccctggccaagatcagagtgaagttcagcaggagcgcagacgcccccgcgtaccagcagggccagaaccagctctataacgagctcaatctaggacgaagagaggagtacgatgttttggacaagagacgtggccgggaccctgagatggggggaaagccgagaaggaagaaccctcaggaaggcctgtacaatgaactgcagaaagataagatggcggaggcctacagtgagattgggatgaaaggcgagcgccggaggggcaaggggcacgatggcctttaccagggtctcagtacagccaccaaggacacctacgacgcccttcacatgcaggccctgccccctcgcggctctggcgagggaaggggttccctgcttacttgcggcgacgtcgaagagaatcccggtccgatggccctcccagtaactgccctccttttgcccctcgcactccttcttcatgccgctcgccccaactgggtcaacgtgattagcgatttgaagaaaatcgaggaccttatacagtctatgcatattgacgctacactgtatactgagagtgatgtacacccgtcctgtaaggtaacggccatgaaatgctttcttctggagctccaggtcatcagcttggagtctggggacgcaagcatccacgatacggttgaaaacctcatcatccttgcgaacaactctctctcatctaatggaaacgttacagagagtgggtgtaaggagtgcgaagagttggaagaaaaaaacatcaaagaatttcttcaatccttcgttcacatagtgcaaatgttcattaacacgtccactaccacacccgccccgaggccacctacgccggcaccgactatcgccagtcaacccctctctctgcgccccgaggcttgccggcctgcggctggtggggcggtccacacccggggcctggattttgcgtgcgatatatacatctgggcacctcttgccggcacctgcggagtgctgcttctctcactcgttattacgctgtactgctaa

SEQ ID NO: 2141 - DNA, 2157 bp, synthetic construct
  misc_feature 1..2157: note = Synthetic
  source 1..2157: mol_type = other DNA
atggccttaccagtgaccgccttgctcctgccgctggccttgctgctccacgccgccaggccgcaggttcaactggtgcagagcggcgccgaggtgaagaagcctggcgccagcgtgaaagtgtcctgcaaggccagcggatacacgtttaccagctacgacatcaactgggtcagacaggccaccggccagggcctggaatggatgggatggatgaaccccaacagcggcaacaccgtgtacgcccagaaattccagggcagagtgaccatgacacggaacaccagcatcagcaccgcctacatggaactgagctctctgagatccgaggatacagccgtgtactactgcgccagaggcggagatttctggagcggctaccacgactactactactacatggacgtgtggggcaagggcaccaccgtgaccgtgtcttctggcagcaccagcggcagcggcaagcccggctccggagagggcagcaccaagggcgatatccaggtcacacagagccctacctttctgagcgcttctgtgggcgaccgggtgaccatcacatgccgggccagccagggtattagcagctacctggcttggtaccagcagaagcccggcaaagcccctaagctgctgatctacggcgcttctaccctgcagtccggcgtgcccagcagattcagcggcagcggaagcggaacagagttcaccctgacaatctccagcctccaacctgaggacttcgccacatactattgtcagcaactgaatagctatccttggacattcggccagggcaccaaggtggaaatcaaggcggccgcaaccacgacgccagcgccgcggccaccaacaccggcgcccaccatcgcgtcgcagcccctgtccctgcgcccagaggcgtgccggccagcggcggggggcgcagtgcacacgagggggctggacttcgcctgtgatatctacatctgggcgcccttggccgggacttgtggggtccttctcctgtcactggttatcaccctttactgccggagggaccagaggctgccccccgatgcccacaagccccctgggggaggcagtttccggacccccatccaagaggagcaggccgacgcccactccaccctggccaagatcagagtgaagttcagcaggagcgcagacgcccccgcgtaccagcagggccagaaccagctctataacgagctcaatctaggacgaagagaggagtacgatgttttggacaagagacgtggccgggaccctgagatggggggaaagccgagaaggaagaaccctcaggaaggcctgtacaatgaactgcagaaagataagatggcggaggcctacagtgagattgggatgaaaggcgagcgccggaggggcaaggggcacgatggcctttaccagggtctcagtacagccaccaaggacacctacgacgcccttcacatgcaggccctgccccctcgcggctctggcgagggaaggggttccctgcttacttgcggcgacgtcgaagagaatcccggtccgatggccctcccagtaactgccctccttttgcccctcgcactccttcttcatgccgctcgccccaactgggtcaacgtgattagcgatttgaagaaaatcgaggaccttatacagtctatgcatattgacgctacactgtatactgagagtgatgtacacccgtcctgtaaggtaacggccatgaaatgctttcttctggagctccaggtcatcagcttggagtctggggacgcaagcatccacgatacggttgaaaacctcatcatccttgcgaacaactctctctcatctaatggaaacgttacagagagtgggtgtaaggagtgcgaagagttggaagaaaaaaacatcaaagaatttcttcaatccttcgttcacatagtgcaaatgttcattaacacgtccactaccacacccgccccgaggccacctacgccggcaccgactatcgccagtcaacccctctctctgcgccccgaggcttgccggcctgcggctggtggggcggtccacacccggggcctggattttgcgtgcgatatatacatctgggcacctcttgccggcacctgcggagtgctgcttctctcactcgttattacgctgtactgctaa

SEQ ID NO: 2142 - DNA, 2151 bp, synthetic construct
  misc_feature 1..2151: note = Synthetic
  source 1..2151: mol_type = other DNA
atggccttaccagtgaccgccttgctcctgccgctggccttgctgctccacgccgccaggccgcaagtgcagctgcaggagagcggtcctggcctggttaagcctagcgagacactgtctctgacttgcaccgtgtccggcggatctatcagcagctactactggtcctggatcagacagcccgccggcaaaggcctggaatggattggaagaatctacaccagcggcagcaccaactacaaccccagcctgaagtccagagtgacaatgagcgtggacacatctaagaaccagtttagcctgaaactgagcagcgtgaccgccgccgatacagctgtgtactattgtgcccgggaagaataccagctgctgcctgccctgtactactattactacatggacgtgtggggcaagggcaccaccgtgaccgtgtccagcggcagcaccagcggcagcggcaagcccggctccggagagggcagcaccaagggcagctacgagctgacccagcctccatctgtctccgtgtctccaggccaaacagccagcatcacctgcagcggagataagctgggcgacaagtacgcctgctggtaccagcagaagcccggccagagccctgtgctggtgatctaccaggacagcaagcggcctagcggcatccccgagagattcagcggctccaacagcggcaataccgctacactgacaatcagcggcacacaggccatggatgaggccgactactactgccaggcctgggacagctctaccgccgtgttcggcggcggaacccagctcaccgccctggcggccgcaaccacgacgccagcgccgcggccaccaacaccggcgcccaccatcgcgtcgcagcccctgtccctgcgcccagaggcgtgccggccagcggcggggggcgcagtgcacacgagggggctggacttcgcctgtgatatctacatctgggcgcccttggccgggacttgtggggtccttctcctgtcactggttatcaccctttactgccggagggaccagaggctgccccccgatgcccacaagccccctgggggaggcagtttccggacccccatccaagaggagcaggccgacgcccactccaccctggccaagatcagagtgaagttcagcaggagcgcagacgcccccgcgtaccagcagggccagaaccagctctataacgagctcaatctaggacgaagagaggagtacgatgttttggacaagagacgtggccgggaccctgagatggggggaaagccgagaaggaagaaccctcaggaaggcctgtacaatgaactgcagaaagataagatggcggaggcctacagtgagattgggatgaaaggcgagcgccggaggggcaaggggcacgatggcctttaccagggtctcagtacagccaccaaggacacctacgacgcccttcacatgcaggccctgccccctcgcggctctggcgagggaaggggttccctgcttacttgcggcgacgtcgaagagaatcccggtccgatggccctcccagtaactgccctccttttgcccctcgcactccttcttcatgccgctcgccccaactgggtcaacgtgattagcgatttgaagaaaatcgaggaccttatacagtctatgcatattgacgctacactgtatactgagagtgatgtacacccgtcctgtaaggtaacggccatgaaatgctttcttctggagctccaggtcatcagcttggagtctggggacgcaagcatccacgatacggttgaaaacctcatcatccttgcgaacaactctctctcatctaatggaaacgttacagagagtgggtgtaaggagtgcgaagagttggaagaaaaaaacatcaaagaatttcttcaatccttcgttcacatagtgcaaatgttcattaacacgtccactaccacacccgccccgaggccacctacgccggcaccgactatcgccagtcaacccctctctctgcgccccgaggcttgccggcctgcggctggtggggcggtccacacccggggcctggattttgcgtgcgatatatacatctgggcacctcttgccggcacctgcggagtgctgcttctctcactcgttattacgctgtactgctaa

SEQ ID NO: 2143 - DNA, 2154 bp, synthetic construct
  misc_feature 1..2154: note = Synthetic
  source 1..2154: mol_type = other DNA
atggccttaccagtgaccgccttgctcctgccgctggccttgctgctccacgccgccaggccgcaagtgcagctggtggaatctggcggcggcgtggtgcagcctggtaggagcctgcggctgtcatgcgccgccacaggcttcaccttcagcagctacggcatgcactgggtcagacaggcccctggcaagggactggagtggatggtggtgatctggtccgatggccacaataaatactacgccgacagcgtgaagggcagatttaccattagccgggacaacagcaagaacaccctgtacctgcagatgaacagcctgagagctgaagataccgccgtgtactactgcgccagagcccagctcgagcggagatacttctactatatggacgtgtggggcaaaggcacaacagtgaccgtttcttctggcagcaccagcggcagcggcaagcccggctccggagagggcagcaccaagggccagaccgtggtcacccaggagcctagctttagcgtgtccccaggaggtacagtgaccctgacatgcggcctgactagcggatctgtgtccaccagctactaccccaactggtaccagcagacacctggccaggcccctagaaccctgatctacagcaccaatatccggagctccggcgtgcccgacagattcagcggaagcatcctgggcaacaaggccgctctgaccatcaccggcgcccaagctgatgacgagagcgactactattgtgtgctgtacatgggcagcggcatgttcatcttcggctctggcaccaaggtgaccgtgctggcggccgcaaccacgacgccagcgccgcggccaccaacaccggcgcccaccatcgcgtcgcagcccctgtccctgcgcccagaggcgtgccggccagcggcggggggcgcagtgcacacgagggggctggacttcgcctgtgatatctacatctgggcgcccttggccgggacttgtggggtccttctcctgtcactggttatcaccctttactgccggagggaccagaggctgccccccgatgcccacaagccccctgggggaggcagtttccggacccccatccaagaggagcaggccgacgcccactccaccctggccaagatcagagtgaagttcagcaggagcgcagacgcccccgcgtaccagcagggccagaaccagctctataacgagctcaatctaggacgaagagaggagtacgatgttttggacaagagacgtggccgggaccctgagatggggggaaagccgagaaggaagaaccctcaggaaggcctgtacaatgaactgcagaaagataagatggcggaggcctacagtgagattgggatgaaaggcgagcgccggaggggcaaggggcacgatggcctttaccagggtctcagtacagccaccaaggacacctacgacgcccttcacatgcaggccctgccccctcgcggctctggcgagggaaggggttccctgcttacttgcggcgacgtcgaagagaatcccggtccgatggccctcccagtaactgccctccttttgcccctcgcactccttcttcatgccgctcgccccaactgggtcaacgtgattagcgatttgaagaaaatcgaggaccttatacagtctatgcatattgacgctacactgtatactgagagtgatgtacacccgtcctgtaaggtaacggccatgaaatgctttcttctggagctccaggtcatcagcttggagtctggggacgcaagcatccacgatacggttgaaaacctcatcatccttgcgaacaactctctctcatctaatggaaacgttacagagagtgggtgtaaggagtgcgaagagttggaagaaaaaaacatcaaagaatttcttcaatccttcgttcacatagtgcaaatgttcattaacacgtccactaccacacccgccccgaggccacctacgccggcaccgactatcgccagtcaacccctctctctgcgccccgaggcttgccggcctgcggctggtggggcggtccacacccggggcctggattttgcgtgcgatatatacatctgggcacctcttgccggcacctgcggagtgctgcttctctcactcgttattacgctgtactgctaa

SEQ ID NO: 2144 - DNA, 2154 bp, synthetic construct
  misc_feature 1..2154: note = Synthetic
  source 1..2154: mol_type = other DNA
atggccttaccagtgaccgccttgctcctgccgctggccttgctgctccacgccgccaggccgcaagtgcagctggtcgagagcggaggcggcgttgtgcaacctggaaggagcctgcggctgagctgcgccgcttctggcttcacctttactagctacgacatgcactgggtgcggcaggcccctggcaagggcctggaatgggtcaccatcatctggttcgacggcagcaacaagtactacgccgatagcgtgaagggcagattcaccatcagcagagataatagcaagaataccctgtacctgcagatgaactctctctccgccgaggacaccgccgtgtactactgcgccagaggcgacaactggaacgacagatactattattactactacatggacgtgtggggcaaaggcaccaccgtgacagtgtccagcggcagcaccagcggcagcggcaagcccggctccggagagggcagcaccaagggcgagatcgtgctgacccagtctccagatttccagtccgtgacccctaaggaaaaggtgaccatcacatgcagagccagccagtccatcggctctagcctgcactggtaccagcagaagcccgaccagtctcctatgctgctgatcaaattcgcctctcagagcatcagcggcgtgcccagccggttcagcggcagcggctccggcaccgacttcacactgacaatcaacagtctggaggccgaggatgccgctgcttactactgtcaccagagcagcagcctgccttggacatttggccagggcaccaaggtggaaattaaggcggccgcaaccacgacgccagcgccgcggccaccaacaccggcgcccaccatcgcgtcgcagcccctgtccctgcgcccagaggcgtgccggccagcggcggggggcgcagtgcacacgagggggctggacttcgcctgtgatatctacatctgggcgcccttggccgggacttgtggggtccttctcctgtcactggttatcaccctttactgccggagggaccagaggctgccccccgatgcccacaagccccctgggggaggcagtttccggacccccatccaagaggagcaggccgacgcccactccaccctggccaagatcagagtgaagttcagcaggagcgcagacgcccccgcgtaccagcagggccagaaccagctctataacgagctcaatctaggacgaagagaggagtacgatgttttggacaagagacgtggccgggaccctgagatggggggaaagccgagaaggaagaaccctcaggaaggcctgtacaatgaactgcagaaagataagatggcggaggcctacagtgagattgggatgaaaggcgagcgccggaggggcaaggggcacgatggcctttaccagggtctcagtacagccaccaaggacacctacgacgcccttcacatgcaggccctgccccctcgcggctctggcgagggaaggggttccctgcttacttgcggcgacgtcgaagagaatcccggtccgatggccctcccagtaactgccctccttttgcccctcgcactccttcttcatgccgctcgccccaactgggtcaacgtgattagcgatttgaagaaaatcgaggaccttatacagtctatgcatattgacgctacactgtatactgagagtgatgtacacccgtcctgtaaggtaacggccatgaaatgctttcttctggagctccaggtcatcagcttggagtctggggacgcaagcatccacgatacggttgaaaacctcatcatccttgcgaacaactctctctcatctaatggaaacgttacagagagtgggtgtaaggagtgcgaagagttggaagaaaaaaacatcaaagaatttcttcaatccttcgttcacatagtgcaaatgttcattaacacgtccactaccacacccgccccgaggccacctacgccggcaccgactatcgccagtcaacccctctctctgcgccccgaggcttgccggcctgcggctggtggggcggtccacacccggggcctggattttgcgtgcgatatatacatctgggcacctcttgccggcacctgcggagtgctgcttctctcactcgttattacgctgtactgctaa

SEQ ID NO: 2145 - DNA, 2169 bp, synthetic construct
  misc_feature 1..2169: note = Synthetic
  source 1..2169: mol_type = other DNA
atggccttaccagtgaccgccttgctcctgccgctggccttgctgctccacgccgccaggccgcaagtgcagctggtccagagcggcgctgaggtgaagaaacctggcgcctctgtgaaagtgtcctgcaaggccagcggctacacctttaccagctacggcattagctgggtgcggcaggcccctggccagggtcttgagtggatgggctggatcagcgcctacaacggccacacagattatacacaaaagctgcagggcagagtgaccatgacaaccgataccagcaccaccacagcctacatggaactgagaagcctgagctctgccgacaccgccgtgtactactgcgtgcgggaagtggtgctgcctaccacagactactactacttctacatggacgtgtggggcaagggcaccacagtgacagtcagctccggcagcaccagcggcagcggcaagcccggctccggagagggcagcaccaagggcgacatcgtgatgacccagcctcctctgagcagccctgtgacactgggccagccagctagcatcagctgtagatcttctcagtccctggtgcacagcgacggcaatacctacctgtcttggctgcagcagcggcctggccagccccccagactgctgatctacaaggtgtccaaccgcttcagcggcgtgccagacagattcagcggctctggcgccggcaccgacttcaccctgaagatcagcagagtcgaggccgaagatgtgggagtttactattgcacccaagctacacagttcccccacacctttggccagggcaccaagctcgagatcaaggcggccgcaaccacgacgccagcgccgcggccaccaacaccggcgcccaccatcgcgtcgcagcccctgtccctgcgcccagaggcgtgccggccagcggcggggggcgcagtgcacacgagggggctggacttcgcctgtgatatctacatctgggcgcccttggccgggacttgtggggtccttctcctgtcactggttatcaccctttactgccggagggaccagaggctgccccccgatgcccacaagccccctgggggaggcagtttccggacccccatccaagaggagcaggccgacgcccactccaccctggccaagatcagagtgaagttcagcaggagcgcagacgcccccgcgtaccagcagggccagaaccagctctataacgagctcaatctaggacgaagagaggagtacgatgttttggacaagagacgtggccgggaccctgagatggggggaaagccgagaaggaagaaccctcaggaaggcctgtacaatgaactgcagaaagataagatggcggaggcctacagtgagattgggatgaaaggcgagcgccggaggggcaaggggcacgatggcctttaccagggtctcagtacagccaccaaggacacctacgacgcccttcacatgcaggccctgccccctcgcggctctggcgagggaaggggttccctgcttacttgcggcgacgtcgaagagaatcccggtccgatggccctcccagtaactgccctccttttgcccctcgcactccttcttcatgccgctcgccccaactgggtcaacgtgattagcgatttgaagaaaatcgaggaccttatacagtctatgcatattgacgctacactgtatactgagagtgatgtacacccgtcctgtaaggtaacggccatgaaatgctttcttctggagctccaggtcatcagcttggagtctggggacgcaagcatccacgatacggttgaaaacctcatcatccttgcgaacaactctctctcatctaatggaaacgttacagagagtgggtgtaaggagtgcgaagagttggaagaaaaaaacatcaaagaatttcttcaatccttcgttcacatagtgcaaatgttcattaacacgtccactaccacacccgccccgaggccacctacgccggcaccgactatcgccagtcaacccctctctctgcgccccgaggcttgccggcctgcggctggtggggcggtccacacccggggcctggattttgcgtgcgatatatacatctgggcacctcttgccggcacctgcggagtgctgcttctctcactcgttattacgctgtactgctaa

SEQ ID NO: 2146 - DNA, 2166 bp, synthetic construct
  misc_feature 1..2166: note = Synthetic
  source 1..2166: mol_type = other DNA
atggccttaccagtgaccgccttgctcctgccgctggccttgctgctccacgccgccaggccgcaagttcagctggtgcagagcggagccgaggtgaaaaagcccggcgcttctgtgaaggtgtcctgcaaggtgtctggctacaccctgacagagctgagcatgcactgggtccggcaggcccctggcaaaggcctggaatggatgggaggcttcgaccccgaagacggggagacaatctacgcccagaaattccagggcagagtgacaatgaccgaggacaccagcaccgatacagcctacatggaactgtcttccctgcggagcgaggacaccgccgtgtactactgcgccaccggcagaatcaccatggtgcggggcgtcatcatcccctactactattactacatggacgtgtggggcaagggcaccaccgtgaccgtgtcctctggcagcaccagcggcagcggcaagcccggctccggagagggcagcaccaagggcgatatccagatgacacagagcccaagcagcctgagcgccagcgtgggcgacagagtgaccatcacatgcagagccagccagggcatcagcagctggctggcttggtaccagcaaaagcctgagaaggcccctaagagcctcatctacgccgctagcagcctgcagtccggcgtgccaagcagattcagcggctctggctctggcacagacttcaccctgaccatttccagcctgcaacctgaggattttgccacatactattgtcagcagtacaacagctacccttacaccttcggccagggcaccaagctggaaatcaaggcggccgcaaccacgacgccagcgccgcggccaccaacaccggcgcccaccatcgcgtcgcagcccctgtccctgcgcccagaggcgtgccggccagcggcggggggcgcagtgcacacgagggggctggacttcgcctgtgatatctacatctgggcgcccttggccgggacttgtggggtccttctcctgtcactggttatcaccctttactgccggagggaccagaggctgccccccgatgcccacaagccccctgggggaggcagtttccggacccccatccaagaggagcaggccgacgcccactccaccctggccaagatcagagtgaagttcagcaggagcgcagacgcccccgcgtaccagcagggccagaaccagctctataacgagctcaatctaggacgaagagaggagtacgatgttttggacaagagacgtggccgggaccctgagatggggggaaagccgagaaggaagaaccctcaggaaggcctgtacaatgaactgcagaaagataagatggcggaggcctacagtgagattgggatgaaaggcgagcgccggaggggcaaggggcacgatggcctttaccagggtctcagtacagccaccaaggacacctacgacgcccttcacatgcaggccctgccccctcgcggctctggcgagggaaggggttccctgcttacttgcggcgacgtcgaagagaatcccggtccgatggccctcccagtaactgccctccttttgcccctcgcactccttcttcatgccgctcgccccaactgggtcaacgtgattagcgatttgaagaaaatcgaggaccttatacagtctatgcatattgacgctacactgtatactgagagtgatgtacacccgtcctgtaaggtaacggccatgaaatgctttcttctggagctccaggtcatcagcttggagtctggggacgcaagcatccacgatacggttgaaaacctcatcatccttgcgaacaactctctctcatctaatggaaacgttacagagagtgggtgtaaggagtgcgaagagttggaagaaaaaaacatcaaagaatttcttcaatccttcgttcacatagtgcaaatgttcattaacacgtccactaccacacccgccccgaggccacctacgccggcaccgactatcgccagtcaacccctctctctgcgccccgaggcttgccggcctgcggctggtggggcggtccacacccggggcctggattttgcgtgcgatatatacatctgggcacctcttgccggcacctgcggagtgctgcttctctcactcgttattacgctgtactgctaa

SEQ ID NO: 2147 - DNA, 2160 bp, synthetic construct
  misc_feature 1..2160: note = Synthetic
  source 1..2160: mol_type = other DNA
atggccttaccagtgaccgccttgctcctgccgctggccttgctgctccacgccgccaggccgcaagtgcagctggtgcagagcggcaccgaggtgaagaagccaggcgcctctgtgaaagtgtcttgtaaagccagcggctacacctttaccaattacggcatcggctgggtgcggcaggcccctggacagggactggaatggatgggctggatcatcgcctacaacggctacacaaagtacgcccagatcctgcagggcagagtgacaatgaccaccgacaccagcaccaacaccgcttatatggaactgagaagcctgcggagcgacgacaccgccgtgtactattgcgccagacagcagctgggcggagattaccactactacatggacgtgtggggcaagggcaccaccgtcacagtgtccagcggcagcaccagcggcagcggcaagcccggctccggagagggcagcaccaagggcgatatcgtgatgacccagacccccctgagcctgtccgtgaccccaggacaacctgccagcattagctgcaagagcagcaagtccctgctgcacagcgacggcaagacatacctgtactggtacctgcaaaagcccggccagcctcctcagctgctcatctacgaggtgtccaaccggttctctggcgtgcctgatagattcagcggaagcggcagcggaacagacttcacactgaagatcagcagagtcgaggccgaggacgtgggcgtttactactgcatgcagagcatccagttcccctggacattcggccagggcacaaaagtggaaatcaaggcggccgcaaccacgacgccagcgccgcggccaccaacaccggcgcccaccatcgcgtcgcagcccctgtccctgcgcccagaggcgtgccggccagcggcggggggcgcagtgcacacgagggggctggacttcgcctgtgatatctacatctgggcgcccttggccgggacttgtggggtccttctcctgtcactggttatcaccctttactgccggagggaccagaggctgccccccgatgcccacaagccccctgggggaggcagtttccggacccccatccaagaggagcaggccgacgcccactccaccctggccaagatcagagtgaagttcagcaggagcgcagacgcccccgcgtaccagcagggccagaaccagctctataacgagctcaatctaggacgaagagaggagtacgatgttttggacaagagacgtggccgggaccctgagatggggggaaagccgagaaggaagaaccctcaggaaggcctgtacaatgaactgcagaaagataagatggcggaggcctacagtgagattgggatgaaaggcgagcgccggaggggcaaggggcacgatggcctttaccagggtctcagtacagccaccaaggacacctacgacgcccttcacatgcaggccctgccccctcgcggctctggcgagggaaggggttccctgcttacttgcggcgacgtcgaagagaatcccggtccgatggccctcccagtaactgccctccttttgcccctcgcactccttcttcatgccgctcgccccaactgggtcaacgtgattagcgatttgaagaaaatcgaggaccttatacagtctatgcatattgacgctacactgtatactgagagtgatgtacacccgtcctgtaaggtaacggccatgaaatgctttcttctggagctccaggtcatcagcttggagtctggggacgcaagcatccacgatacggttgaaaacctcatcatccttgcgaacaactctctctcatctaatggaaacgttacagagagtgggtgtaaggagtgcgaagagttggaagaaaaaaacatcaaagaatttcttcaatccttcgttcacatagtgcaaatgttcattaacacgtccactaccacacccgccccgaggccacctacgccggcaccgactatcgccagtcaacccctctctctgcgccccgaggcttgccggcctgcggctggtggggcggtccacacccggggcctggattttgcgtgcgatatatacatctgggcacctcttgccggcacctgcggagtgctgcttctctcactcgttattacgctgtactgctaa

SEQ ID NO: 2148 - DNA, 2160 bp, synthetic construct
  misc_feature 1..2160: note = Synthetic
  source 1..2160: mol_type = other DNA
atggccttaccagtgaccgccttgctcctgccgctggccttgctgctccacgccgccaggccgcaagtgcagctggtgcaaagcggcaccgaggtgaaaaagcccggcgcctctgtgaaggtctcctgcaaggccagcggatacacatttacaaattacggcatcggctgggtgcggcaggcccctggccagggcctggaatggatgggctggatcatcgcctacaacggctacaccaagtacgcccagatcctgcaaggcagagtcaccatgaccacagacaccagcaccaacaccgcttatatggaactgagaagcctgcggagcgacgatacagccgtgtactactgcgccagacagcagctcggcggcgactaccactactacatggacgtgtggggcaagggcaccaccgtgaccgtgtccagcggcagcaccagcggcagcggcaagcccggctccggagagggcagcaccaagggcgacatcgtgatgacccagacccctctgagcctgagcgtgacacctggacagcccgcttctattagctgtaaaagcagcaagtccctgctgcacagcgacggcaagacctacctgtactggtacctgcagaaacctggccagcctccacagctgctgatctacgaggtgtctacaagattcagcggagtgcctgatagattcagcggcagcggatctggaacagatttcaccctgaagatcagccgggttgaggccgaggacgtgggcgtgtactattgcatgcagtccatccagttcccctggaccttcggccagggcacaaaggtggaaatcaaggcggccgcaaccacgacgccagcgccgcggccaccaacaccggcgcccaccatcgcgtcgcagcccctgtccctgcgcccagaggcgtgccggccagcggcggggggcgcagtgcacacgagggggctggacttcgcctgtgatatctacatctgggcgcccttggccgggacttgtggggtccttctcctgtcactggttatcaccctttactgccggagggaccagaggctgccccccgatgcccacaagccccctgggggaggcagtttccggacccccatccaagaggagcaggccgacgcccactccaccctggccaagatcagagtgaagttcagcaggagcgcagacgcccccgcgtaccagcagggccagaaccagctctataacgagctcaatctaggacgaagagaggagtacgatgttttggacaagagacgtggccgggaccctgagatggggggaaagccgagaaggaagaaccctcaggaaggcctgtacaatgaactgcagaaagataagatggcggaggcctacagtgagattgggatgaaaggcgagcgccggaggggcaaggggcacgatggcctttaccagggtctcagtacagccaccaaggacacctacgacgcccttcacatgcaggccctgccccctcgcggctctggcgagggaaggggttccctgcttacttgcggcgacgtcgaagagaatcccggtccgatggccctcccagtaactgccctccttttgcccctcgcactccttcttcatgccgctcgccccaactgggtcaacgtgattagcgatttgaagaaaatcgaggaccttatacagtctatgcatattgacgctacactgtatactgagagtgatgtacacccgtcctgtaaggtaacggccatgaaatgctttcttctggagctccaggtcatcagcttggagtctggggacgcaagcatccacgatacggttgaaaacctcatcatccttgcgaacaactctctctcatctaatggaaacgttacagagagtgggtgtaaggagtgcgaagagttggaagaaaaaaacatcaaagaatttcttcaatccttcgttcacatagtgcaaatgttcattaacacgtccactaccacacccgccccgaggccacctacgccggcaccgactatcgccagtcaacccctctctctgcgccccgaggcttgccggcctgcggctggtggggcggtccacacccggggcctggattttgcgtgcgatatatacatctgggcacctcttgccggcacctgcggagtgctgcttctctcactcgttattacgctgtactgctaa

SEQ ID NO: 2149 - DNA, 2154 bp, synthetic construct
  misc_feature 1..2154: note = Synthetic
  source 1..2154: mol_type = other DNA
atggccttaccagtgaccgccttgctcctgccgctggccttgctgctccacgccgccaggccgcaagtgcagctggtgcagagcggaacagaggtgaaaaagcctggcgccagcgtgaaggtgtcttgtaaaaccagcggttatacattcacctcctacgacattaactgggtgcggcaggccaccggccagggcctggaatggatgggctggatgaaccccatctccggcgacacaggcagcgcccagaagttccagggaagagtgaccatgaccagaaataccagcatcggcaccgcctacatggaactgagcagcctgcggagcgaggacaccgccgtgtactactgcgccagaggcggatactgtagcagtacatcttgctactactattacatggacgtgtggggcaagggcacaacagtgacagtcagcagcggcagcaccagcggcagcggcaagcccggctccggagagggcagcaccaagggcgatatccagatgacacagtcccctagctctctgtctgcttctgttggagatagagtgaccatcacctgccgggccagccagggcatcagcaactggctggcctggtaccagcagaagcccgagaaggcccctaagagcctgatctacgccgctagctccctccagggcggcgtgccatctagattcagcggctcaggcagcggaaccgacttcaccctgaccatcagctccctgcaacctgaggattttgccacatactactgccagcaatacgacagctacccctacaccttcggccagggcaccaagctggaaatcaaggcggccgcaaccacgacgccagcgccgcggccaccaacaccggcgcccaccatcgcgtcgcagcccctgtccctgcgcccagaggcgtgccggccagcggcggggggcgcagtgcacacgagggggctggacttcgcctgtgatatctacatctgggcgcccttggccgggacttgtggggtccttctcctgtcactggttatcaccctttactgccggagggaccagaggctgccccccgatgcccacaagccccctgggggaggcagtttccggacccccatccaagaggagcaggccgacgcccactccaccctggccaagatcagagtgaagttcagcaggagcgcagacgcccccgcgtaccagcagggccagaaccagctctataacgagctcaatctaggacgaagagaggagtacgatgttttggacaagagacgtggccgggaccctgagatggggggaaagccgagaaggaagaaccctcaggaaggcctgtacaatgaactgcagaaagataagatggcggaggcctacagtgagattgggatgaaaggcgagcgccggaggggcaaggggcacgatggcctttaccagggtctcagtacagccaccaaggacacctacgacgcccttcacatgcaggccctgccccctcgcggctctggcgagggaaggggttccctgcttacttgcggcgacgtcgaagagaatcccggtccgatggccctcccagtaactgccctccttttgcccctcgcactccttcttcatgccgctcgccccaactgggtcaacgtgattagcgatttgaagaaaatcgaggaccttatacagtctatgcatattgacgctacactgtatactgagagtgatgtacacccgtcctgtaaggtaacggccatgaaatgctttcttctggagctccaggtcatcagcttggagtctggggacgcaagcatccacgatacggttgaaaacctcatcatccttgcgaacaactctctctcatctaatggaaacgttacagagagtgggtgtaaggagtgcgaagagttggaagaaaaaaacatcaaagaatttcttcaatccttcgttcacatagtgcaaatgttcattaacacgtccactaccacacccgccccgaggccacctacgccggcaccgactatcgccagtcaacccctctctctgcgccccgaggcttgccggcctgcggctggtggggcggtccacacccggggcctggattttgcgtgcgatatatacatctgggcacctcttgccggcacctgcggagtgctgcttctctcactcgttattacgctgtactgctaa

SEQ ID NO: 2150 - DNA, 2154 bp, synthetic construct
  misc_feature 1..2154: note = Synthetic
  source 1..2154: mol_type = other DNA
atggccttaccagtgaccgccttgctcctgccgctggccttgctgctccacgccgccaggccgcaagtgcagctggtgcagagcggcgccgaggtgaagaagcctggcgcttccgtgaaggtgtcctgtaaagcttctggatacaccttcacctcttatgatattaactgggtgcggcaggccaccggccagggcctggaatggatgggctggatgatccccaacagcggcgataccggctccgcccagaaattccagggaagagttaccatgacaagaaacaccagcatcagcaccgcctacatggaactgagcagcctgcggagcgaggacaccgctgtgtactactgcgccagaggcggctactgtaatagcacaagctgctactattactacatggacgtgtggggcaagggcaccacagtgacagtcagctccggcagcaccagcggcagcggcaagcccggctccggagagggcagcaccaagggcgacatccagatgacacagagccctagcagcctgagcgcctctgtgggcgaccgggtgaccatcacctgcagagccagccagggcatcagcagctggctggcctggtaccagcagaagcccgagaaggcccctaagtccctgatctacgccgccagctccctccagggcggagtgccatctagattcagcggctctggatctggcacagacttcaccctgaccatcagctctctgcagcctgaggattttgccacatactactgccagcaatacgacagctacccctacacattcggccaaggcacaaagctggaaatcaaggcggccgcaaccacgacgccagcgccgcggccaccaacaccggcgcccaccatcgcgtcgcagcccctgtccctgcgcccagaggcgtgccggccagcggcggggggcgcagtgcacacgagggggctggacttcgcctgtgatatctacatctgggcgcccttggccgggacttgtggggtccttctcctgtcactggttatcaccctttactgccggagggaccagaggctgccccccgatgcccacaagccccctgggggaggcagtttccggacccccatccaagaggagcaggccgacgcccactccaccctggccaagatcagagtgaagttcagcaggagcgcagacgcccccgcgtaccagcagggccagaaccagctctataacgagctcaatctaggacgaagagaggagtacgatgttttggacaagagacgtggccgggaccctgagatggggggaaagccgagaaggaagaaccctcaggaaggcctgtacaatgaactgcagaaagataagatggcggaggcctacagtgagattgggatgaaaggcgagcgccggaggggcaaggggcacgatggcctttaccagggtctcagtacagccaccaaggacacctacgacgcccttcacatgcaggccctgccccctcgcggctctggcgagggaaggggttccctgcttacttgcggcgacgtcgaagagaatcccggtccgatggccctcccagtaactgccctccttttgcccctcgcactccttcttcatgccgctcgccccaactgggtcaacgtgattagcgatttgaagaaaatcgaggaccttatacagtctatgcatattgacgctacactgtatactgagagtgatgtacacccgtcctgtaaggtaacggccatgaaatgctttcttctggagctccaggtcatcagcttggagtctggggacgcaagcatccacgatacggttgaaaacctcatcatccttgcgaacaactctctctcatctaatggaaacgttacagagagtgggtgtaaggagtgcgaagagttggaagaaaaaaacatcaaagaatttcttcaatccttcgttcacatagtgcaaatgttcattaacacgtccactaccacacccgccccgaggccacctacgccggcaccgactatcgccagtcaacccctctctctgcgccccgaggcttgccggcctgcggctggtggggcggtccacacccggggcctggattttgcgtgcgatatatacatctgggcacctcttgccggcacctgcggagtgctgcttctctcactcgttattacgctgtactgctaa

SEQ ID NO: 2151 - DNA, 2157 bp, synthetic construct
  misc_feature 1..2157: note = Synthetic
  source 1..2157: mol_type = other DNA
atggccttaccagtgaccgccttgctcctgccgctggccttgctgctccacgccgccaggccggaggtgcagctgctggaaagcggaggcggcctggtgcaacctggaggttctctgcggctgagctgcgccgctagcggcttcacatttagcagctacgtgatgaactgggtgcggcaggctcctggaaagggcctggaatgggtctccagcgtgtccggcagcggcaacaacagcttttacgccgatagcgtgaagggcagattcaccatcagccgggacaacagcaagaacaccctctacctgcagatgaattctctgagagccgaggacaccgccgtgtactactgcgccagcaggtcctcttcttacctgtactactactattacatggacgtgtggggcaaaggcacaacagtgaccgtctccagcggcagcaccagcggcagcggcaagcccggctccggagagggcagcaccaagggcgagatcgtgctgacccaaagccccggcaccctgagcctgagccctggcgagagagccaccctgtcttgtagagcctctcagagcgtttctagctcctacctggcctggtaccagcagaagcccggacaggcccctagactgctgatctacggcgccagcagcagagctacaggcatccccgatagattcagcgacagcggctcaggcacagacttcaccctgacaattagccggctggaacccgaggatttcgccgtgtactattgccagcactacggcagctctcctccaagaatcaccttcggccctggcaccaaggtggacatcaaagcggccgcaaccacgacgccagcgccgcggccaccaacaccggcgcccaccatcgcgtcgcagcccctgtccctgcgcccagaggcgtgccggccagcggcggggggcgcagtgcacacgagggggctggacttcgcctgtgatatctacatctgggcgcccttggccgggacttgtggggtccttctcctgtcactggttatcaccctttactgccggagggaccagaggctgccccccgatgcccacaagccccctgggggaggcagtttccggacccccatccaagaggagcaggccgacgcccactccaccctggccaagatcagagtgaagttcagcaggagcgcagacgcccccgcgtaccagcagggccagaaccagctctataacgagctcaatctaggacgaagagaggagtacgatgttttggacaagagacgtggccgggaccctgagatggggggaaagccgagaaggaagaaccctcaggaaggcctgtacaatgaactgcagaaagataagatggcggaggcctacagtgagattgggatgaaaggcgagcgccggaggggcaaggggcacgatggcctttaccagggtctcagtacagccaccaaggacacctacgacgcccttcacatgcaggccctgccccctcgcggctctggcgagggaaggggttccctgcttacttgcggcgacgtcgaagagaatcccggtccgatggccctcccagtaactgccctccttttgcccctcgcactccttcttcatgccgctcgccccaactgggtcaacgtgattagcgatttgaagaaaatcgaggaccttatacagtctatgcatattgacgctacactgtatactgagagtgatgtacacccgtcctgtaaggtaacggccatgaaatgctttcttctggagctccaggtcatcagcttggagtctggggacgcaagcatccacgatacggttgaaaacctcatcatccttgcgaacaactctctctcatctaatggaaacgttacagagagtgggtgtaaggagtgcgaagagttggaagaaaaaaacatcaaagaatttcttcaatccttcgttcacatagtgcaaatgttcattaacacgtccactaccacacccgccccgaggccacctacgccggcaccgactatcgccagtcaacccctctctctgcgccccgaggcttgccggcctgcggctggtggggcggtccacacccggggcctggattttgcgtgcgatatatacatctgggcacctcttgccggcacctgcggagtgctgcttctctcactcgttattacgctgtactgctaa

SEQ ID NO: 2152 - protein, 492 aa, synthetic construct
  REGION 1..492: note = Synthetic
MALPVTALLLPLALLLHAARPEIVLTQSPDFQSVTPKEKVTITCRASQTIGSSLHWYQQKPDQSPKLLIKHASQSFSGVPSRFSGSGSGTDFTLTVNSLEAEDAATYYCHQSSSLPWTFGQGTKVEIKGSTSGSGKPGSGEGSTKGQVQLVESGGGVVQPGRSLRLSCAASGFTFSSHDMHWVRQAPGKGLDWVAVIWSDGNKKYYVDSAKGRFTISRDNSKNTVYLQMNSLRAEDTAIYYCARGDNWNDEHSYYYYMDVWGKGTTVTVSSAAATTTPAPRPPTPAPTIASQPLSLRPEACRPAAGGAVHTRGLDFACDIYIWAPLAGTCGVLLLSLVITLYCRRDQRLPPDAHKPPGGGSFRTPIQEEQADAHSTLAKIRVKFSRSADAPAYQQGQNQLYNELNLGRREEYDVLDKRRGRDPEMGGKPRRKNPQEGLYNELQKDKMAEAYSEIGMKGERRRGKGHDGLYQGLSTATKDTYDALHMQALPPR

SEQ ID NO: 2153 - protein, 492 aa, synthetic construct
  REGION 1..492: note = Synthetic
MALPVTALLLPLALLLHAARPEIVLTQSPDFQSVTPKEKVTITCRASQTIGSSLHWYQQKPDQSPKLLIKHASQSFSGVPSRFSGSGSGTDFTLTVNSLEAEDAATYYCHQSSSLPWTFGQGTKVEIKGSTSGSGKPGSGEGSTKGQVQLVESGGGVVQPGRSLRLSCAASGFTFSSHDMHWVRQAPGKGLDWVAVIWSDGNNKYYADSAKGRFTISRDNSKNTVYLQMNSLRAEDTAIYYCARGDNWNDEHSYYYYMDVWGKGTTVTVSSAAATTTPAPRPPTPAPTIASQPLSLRPEACRPAAGGAVHTRGLDFACDIYIWAPLAGTCGVLLLSLVITLYCRRDQRLPPDAHKPPGGGSFRTPIQEEQADAHSTLAKIRVKFSRSADAPAYQQGQNQLYNELNLGRREEYDVLDKRRGRDPEMGGKPRRKNPQEGLYNELQKDKMAEAYSEIGMKGERRRGKGHDGLYQGLSTATKDTYDALHMQALPPR

SEQ ID NO: 2154 - protein, 491 aa, synthetic construct
  REGION 1..491: note = Synthetic
MALPVTALLLPLALLLHAARPDIQMTQSPSSLSASVGDRVTITCRASQSISNYLNWYHQKPGKAPKLLIYAASSLESGVPSRFSGSGSGTDFTLTISSLQPEDFATYYCQQSYSNPLTFGGGTKVESKGSTSGSGKPGSGEGSTKGQLQLVQSGAEVKKPGASVKVSCKASGYTFTNYGISWLRQAPGQGLEWMGWISGYNDNTHYAQKFQGRVTMTTDTSTTTAYMELRNLRSDDTAVYYCARDGIAARPVYYYYMDVWGKGTTVTVSSAAATTTPAPRPPTPAPTIASQPLSLRPEACRPAAGGAVHTRGLDFACDIYIWAPLAGTCGVLLLSLVITLYCRRDQRLPPDAHKPPGGGSFRTPIQEEQADAHSTLAKIRVKFSRSADAPAYQQGQNQLYNELNLGRREEYDVLDKRRGRDPEMGGKPRRKNPQEGLYNELQKDKMAEAYSEIGMKGERRRGKGHDGLYQGLSTATKDTYDALHMQALPPR

SEQ ID NO: 2155 - protein, 492 aa, synthetic construct
  REGION 1..492: note = Synthetic
MALPVTALLLPLALLLHAARPEIVLTQSPDFQSVTPKEKVTITCRASQSIGSSLHWYQQKPDQSPKLLIKFASQSFSGVPSRFSGSGSGTDFTLTIHSLEAEDAATYYCHQSGSLPWTFGQGTKVEIKGSTSGSGKPGSGEGSTKGQVQLVESGGGVVQPGRSLRLSCVASGFTFSSNDIYWVRQAPGKGLEWVAVIWYDGSNKYYADSVKGRFTISRDNSKNTLYLQMNSLRAEDTAVYYCARGDNWNDEHHYHYYMDVWGKGTTVTVSSAAATTTPAPRPPTPAPTIASQPLSLRPEACRPAAGGAVHTRGLDFACDIYIWAPLAGTCGVLLLSLVITLYCRRDQRLPPDAHKPPGGGSFRTPIQEEQADAHSTLAKIRVKFSRSADAPAYQQGQNQLYNELNLGRREEYDVLDKRRGRDPEMGGKPRRKNPQEGLYNELQKDKMAEAYSEIGMKGERRRGKGHDGLYQGLSTATKDTYDALHMQALPPR

SEQ ID NO: 2156 - protein, 485 aa, synthetic construct
  REGION 1..485: note = Synthetic
MALPVTALLLPLALLLHAARPVTQEPSFSVSPGGTVTLTCGLSSGSVSTSYYPSWYQQTPGQAPRTLIYSTNIRSSGVPDRFSGSILGNKAALTITGAQADDESDYYCVLYMGSDIVVFGGGTKLTVLGSTSGSGKPGSGEGSTKGQVQLVESGGGVVQPGRSLRLSCAASGFTFSSYGMHWVRQAPGKGLEWVAVISYDGSNKYYADSVKGRFTISRDNSKTTLYLQMNSLRAEDTAVYYCARDHYYYYMDVWGKGTTVTVSSAAATTTPAPRPPTPAPTIASQPLSLRPEACRPAAGGAVHTRGLDFACDIYIWAPLAGTCGVLLLSLVITLYCRRDQRLPPDAHKPPGGGSFRTPIQEEQADAHSTLAKIRVKFSRSADAPAYQQGQNQLYNELNLGRREEYDVLDKRRGRDPEMGGKPRRKNPQEGLYNELQKDKMAEAYSEIGMKGERRRGKGHDGLYQGLSTATKDTYDALHMQALPPR

SEQ ID NO: 2157 - protein, 490 aa, synthetic construct
  REGION 1..490: note = Synthetic
MALPVTALLLPLALLLHAARPEIVLTQSPATLSLSPGERATLSCRASQSVSSYFAWYQQKPGQAPRLLIYDASNRATGIPARFSGSGSGTDFTLTISSLEPEDFAVYYCQQRSNWPLTFGGGTKVEIKGSTSGSGKPGSGEGSTKGQLQLQESGPGLVKPSETLSLTCTVSGGSISSSSYYWGWIRQPPGKGLEWIGSLYYSGSTYYNPSLKSRVTISVDTSKNQFSLKLSSVTAADTAVYYCAAVQLERRGYFYMDVWGKGTTVTVSSAAATTTPAPRPPTPAPTIASQPLSLRPEACRPAAGGAVHTRGLDFACDIYIWAPLAGTCGVLLLSLVITLYCRRDQRLPPDAHKPPGGGSFRTPIQEEQADAHSTLAKIRVKFSRSADAPAYQQGQNQLYNELNLGRREEYDVLDKRRGRDPEMGGKPRRKNPQEGLYNELQKDKMAEAYSEIGMKGERRRGKGHDGLYQGLSTATKDTYDALHMQALPPR

SEQ ID NO: 2158 - protein, 492 aa, synthetic construct
  REGION 1..492: note = Synthetic
MALPVTALLLPLALLLHAARPQTVVTQEPSFSVSPGGTVTLTCGLTSGSVSTSYYPNWYQQTPGQAPRTLIYSTNIRSSGVPDRFSGSILGNKAALTITGAQADDESDYYCVLYMGSGMFIFGSGTKVTVLGSTSGSGKPGSGEGSTKGQVQLVESGGGVVQPGRSLRLSCAASGFTFSNYGMHWVRQAPGKGLEWMAVIWSDGHNKYYADSVKGRFTISRDNSKNTLYLQMNSLRAEDTAVYYCARAQLERRYFYYMDVWGKGTTVTVSSAAATTTPAPRPPTPAPTIASQPLSLRPEACRPAAGGAVHTRGLDFACDIYIWAPLAGTCGVLLLSLVITLYCRRDQRLPPDAHKPPGGGSFRTPIQEEQADAHSTLAKIRVKFSRSADAPAYQQGQNQLYNELNLGRREEYDVLDKRRGRDPEMGGKPRRKNPQEGLYNELQKDKMAEAYSEIGMKGERRRGKGHDGLYQGLSTATKDTYDALHMQALPPR

SEQ ID NO: 2159 - protein, 492 aa, synthetic construct
  REGION 1..492: note = Synthetic
MALPVTALLLPLALLLHAARPDIQMTQSPSSLSASVGDRVTITCRASQGISSWLAWYQQKPEKAPKSLIYAASSLQGGVPSRFSGSGSGTDFTLTISSLQPEDFATYYCQQYDSYPYTFGQGTKLEIKGSTSGSGKPGSGEGSTKGQVQLVQSGAEVKKPGASVKVSCKASGYTFTSYDINWVRQATGQGLEWMGWMIPNSGDTGSAQKFQGRVTMTRNTSIGTAYMELSSLRSEDTAVYYCARGGYCNSTSCYYYYMDVWGKGTTVTVSSAAATTTPAPRPPTPAPTIASQPLSLRPEACRPAAGGAVHTRGLDFACDIYIWAPLAGTCGVLLLSLVITLYCRRDQRLPPDAHKPPGGGSFRTPIQEEQADAHSTLAKIRVKFSRSADAPAYQQGQNQLYNELNLGRREEYDVLDKRRGRDPEMGGKPRRKNPQEGLYNELQKDKMAEAYSEIGMKGERRRGKGHDGLYQGLSTATKDTYDALHMQALPPR

SEQ ID NO: 2160 - protein, 493 aa, synthetic construct
  REGION 1..493: note = Synthetic
MALPVTALLLPLALLLHAARPDIQVTQSPTFLSASVGDRVTITCRASQGISSYLAWYQQKPGKAPKLLIYGASTLQSGVPSRFSGSGSGTEFTLTISSLQPEDFATYYCQQLNSYPWTFGQGTKVEIKGSTSGSGKPGSGEGSTKGQVQLVQSGAEVKKPGASVKVSCKASGYTFTSYDINWVRQATGQGLEWMGWMNPNSGNTVYAQKFQGRVTMTRNTSISTAYMELSSLRSEDTAVYYCARGGDFWSGYHDYYYYMDVWGKGTTVTVSSAAATTTPAPRPPTPAPTIASQPLSLRPEACRPAAGGAVHTRGLDFACDIYIWAPLAGTCGVLLLSLVITLYCRRDQRLPPDAHKPPGGGSFRTPIQEEQADAHSTLAKIRVKFSRSADAPAYQQGQNQLYNELNLGRREEYDVLDKRRGRDPEMGGKPRRKNPQEGLYNELQKDKMAEAYSEIGMKGERRRGKGHDGLYQGLSTATKDTYDALHMQALPPR

SEQ ID NO: 2161 - protein, 491 aa, synthetic construct
  REGION 1..491: note = Synthetic
MALPVTALLLPLALLLHAARPSYELTQPPSVSVSPGQTASITCSGDKLGDKYACWYQQKPGQSPVLVIYQDSKRPSGIPERFSGSNSGNTATLTISGTQAMDEADYYCQAWDSSTAVFGGGTQLTALGSTSGSGKPGSGEGSTKGQVQLQESGPGLVKPSETLSLTCTVSGGSISSYYWSWIRQPAGKGLEWIGRIYTSGSTNYNPSLKSRVTMSVDTSKNQFSLKLSSVTAADTAVYYCAREEYQLLPALYYYYYMDVWGKGTTVTVSSAAATTTPAPRPPTPAPTIASQPLSLRPEACRPAAGGAVHTRGLDFACDIYIWAPLAGTCGVLLLSLVITLYCRRDQRLPPDAHKPPGGGSFRTPIQEEQADAHSTLAKIRVKFSRSADAPAYQQGQNQLYNELNLGRREEYDVLDKRRGRDPEMGGKPRRKNPQEGLYNELQKDKMAEAYSEIGMKGERRRGKGHDGLYQGLSTATKDTYDALHMQALPPR

SEQ ID NO: 2162 - protein, 492 aa, synthetic construct
  REGION 1..492: note = Synthetic
MALPVTALLLPLALLLHAARPQTVVTQEPSFSVSPGGTVTLTCGLTSGSVSTSYYPNWYQQTPGQAPRTLIYSTNIRSSGVPDRFSGSILGNKAALTITGAQADDESDYYCVLYMGSGMFIFGSGTKVTVLGSTSGSGKPGSGEGSTKGQVQLVESGGGVVQPGRSLRLSCAATGFTFSSYGMHWVRQAPGKGLEWMVVIWSDGHNKYYADSVKGRFTISRDNSKNTLYLQMNSLRAEDTAVYYCARAQLERRYFYYMDVWGKGTTVTVSSAAATTTPAPRPPTPAPTIASQPLSLRPEACRPAAGGAVHTRGLDFACDIYIWAPLAGTCGVLLLSLVITLYCRRDQRLPPDAHKPPGGGSFRTPIQEEQADAHSTLAKIRVKFSRSADAPAYQQGQNQLYNELNLGRREEYDVLDKRRGRDPEMGGKPRRKNPQEGLYNELQKDKMAEAYSEIGMKGERRRGKGHDGLYQGLSTATKDTYDALHMQALPPR

SEQ ID NO: 2163 - protein, 492 aa, synthetic construct
  REGION 1..492: note = Synthetic
MALPVTALLLPLALLLHAARPEIVLTQSPDFQSVTPKEKVTITCRASQSIGSSLHWYQQKPDQSPMLLIKFASQSISGVPSRFSGSGSGTDFTLTINSLEAEDAAAYYCHQSSSLPWTFGQGTKVEIKGSTSGSGKPGSGEGSTKGQVQLVESGGGVVQPGRSLRLSCAASGFTFTSYDMHWVRQAPGKGLEWVTIIWFDGSNKYYADSVKGRFTISRDNSKNTLYLQMNSLSAEDTAVYYCARGDNWNDRYYYYYYMDVWGKGTTVTVSSAAATTTPAPRPPTPAPTIASQPLSLRPEACRPAAGGAVHTRGLDFACDIYIWAPLAGTCGVLLLSLVITLYCRRDQRLPPDAHKPPGGGSFRTPIQEEQADAHSTLAKIRVKFSRSADAPAYQQGQNQLYNELNLGRREEYDVLDKRRGRDPEMGGKPRRKNPQEGLYNELQKDKMAEAYSEIGMKGERRRGKGHDGLYQGLSTATKDTYDALHMQALPPR

SEQ ID NO: 2164 - protein, 497 aa, synthetic construct
  REGION 1..497: note = Synthetic
MALPVTALLLPLALLLHAARPDIVMTQPPLSSPVTLGQPASISCRSSQSLVHSDGNTYLSWLQQRPGQPPRLLIYKVSNRFSGVPDRFSGSGAGTDFTLKISRVEAEDVGVYYCTQATQFPHTFGQGTKLEIKGSTSGSGKPGSGEGSTKGQVQLVQSGAEVKKPGASVKVSCKASGYTFTSYGISWVRQAPGQGLEWMGWISAYNGHTDYTQKLQGRVTMTTDTSTTTAYMELRSLSSADTAVYYCVREVVLPTTDYYYFYMDVWGKGTTVTVSSAAATTTPAPRPPTPAPTIASQPLSLRPEACRPAAGGAVHTRGLDFACDIYIWAPLAGTCGVLLLSLVITLYCRRDQRLPPDAHKPPGGGSFRTPIQEEQADAHSTLAKIRVKFSRSADAPAYQQGQNQLYNELNLGRREEYDVLDKRRGRDPEMGGKPRRKNPQEGLYNELQKDKMAEAYSEIGMKGERRRGKGHDGLYQGLSTATKDTYDALHMQALPPR

SEQ ID NO: 2165 - protein, 496 aa, synthetic construct
  REGION 1..496: note = Synthetic
MALPVTALLLPLALLLHAARPDIQMTQSPSSLSASVGDRVTITCRASQGISSWLAWYQQKPEKAPKSLIYAASSLQSGVPSRFSGSGSGTDFTLTISSLQPEDFATYYCQQYNSYPYTFGQGTKLEIKGSTSGSGKPGSGEGSTKGQVQLVQSGAEVKKPGASVKVSCKVSGYTLTELSMHWVRQAPGKGLEWMGGFDPEDGETIYAQKFQGRVTMTEDTSTDTAYMELSSLRSEDTAVYYCATGRITMVRGVIIPYYYYYMDVWGKGTTVTVSSAAATTTPAPRPPTPAPTIASQPLSLRPEACRPAAGGAVHTRGLDFACDIYIWAPLAGTCGVLLLSLVITLYCRRDQRLPPDAHKPPGGGSFRTPIQEEQADAHSTLAKIRVKFSRSADAPAYQQGQNQLYNELNLGRREEYDVLDKRRGRDPEMGGKPRRKNPQEGLYNELQKDKMAEAYSEIGMKGERRRGKGHDGLYQGLSTATKDTYDALHMQALPPR

SEQ ID NO: 2166 - protein, 494 aa, synthetic construct
  REGION 1..494: note = Synthetic
MALPVTALLLPLALLLHAARPDIVMTQTPLSLSVTPGQPASISCKSSKSLLHSDGKTYLYWYLQKPGQPPQLLIYEVSNRFSGVPDRFSGSGSGTDFTLKISRVEAEDVGVYYCMQSIQFPWTFGQGTKVEIKGSTSGSGKPGSGEGSTKGQVQLVQSGTEVKKPGASVKVSCKASGYTFTNYGIGWVRQAPGQGLEWMGWIIAYNGYTKYAQILQGRVTMTTDTSTNTAYMELRSLRSDDTAVYYCARQQLGGDYHYYMDVWGKGTTVTVSSAAATTTPAPRPPTPAPTIASQPLSLRPEACRPAAGGAVHTRGLDFACDIYIWAPLAGTCGVLLLSLVITLYCRRDQRLPPDAHKPPGGGSFRTPIQEEQADAHSTLAKIRVKFSRSADAPAYQQGQNQLYNELNLGRREEYDVLDKRRGRDPEMGGKPRRKNPQEGLYNELQKDKMAEAYSEIGMKGERRRGKGHDGLYQGLSTATKDTYDALHMQALPPR

SEQ ID NO: 2167 - protein, 494 aa, synthetic construct
  REGION 1..494: note = Synthetic
MALPVTALLLPLALLLHAARPDIVMTQTPLSLSVTPGQPASISCKSSKSLLHSDGKTYLYWYLQKPGQPPQLLIYEVSTRFSGVPDRFSGSGSGTDFTLKISRVEAEDVGVYYCMQSIQFPWTFGQGTKVEIKGSTSGSGKPGSGEGSTKGQVQLVQSGTEVKKPGASVKVSCKASGYTFTNYGIGWVRQAPGQGLEWMGWIIAYNGYTKYAQILQGRVTMTTDTSTNTAYMELRSLRSDDTAVYYCARQQLGGDYHYYMDVWGKGTTVTVSSAAATTTPAPRPPTPAPTIASQPLSLRPEACRPAAGGAVHTRGLDFACDIYIWAPLAGTCGVLLLSLVITLYCRRDQRLPPDAHKPPGGGSFRTPIQEEQADAHSTLAKIRVKFSRSADAPAYQQGQNQLYNELNLGRREEYDVLDKRRGRDPEMGGKPRRKNPQEGLYNELQKDKMAEAYSEIGMKGERRRGKGHDGLYQGLSTATKDTYDALHMQALPPR

SEQ ID NO: 2168 - protein, 492 aa, synthetic construct
  REGION 1..492: note = Synthetic
MALPVTALLLPLALLLHAARPDIQMTQSPSSLSASVGDRVTITCRASQGISNWLAWYQQKPEKAPKSLIYAASSLQGGVPSRFSGSGSGTDFTLTISSLQPEDFATYYCQQYDSYPYTFGQGTKLEIKGSTSGSGKPGSGEGSTKGQVQLVQSGTEVKKPGASVKVSCKTSGYTFTSYDINWVRQATGQGLEWMGWMNPISGDTGSAQKFQGRVTMTRNTSIGTAYMELSSLRSEDTAVYYCARGGYCSSTSCYYYYMDVWGKGTTVTVSSAAATTTPAPRPPTPAPTIASQPLSLRPEACRPAAGGAVHTRGLDFACDIYIWAPLAGTCGVLLLSLVITLYCRRDQRLPPDAHKPPGGGSFRTPIQEEQADAHSTLAKIRVKFSRSADAPAYQQGQNQLYNELNLGRREEYDVLDKRRGRDPEMGGKPRRKNPQEGLYNELQKDKMAEAYSEIGMKGERRRGKGHDGLYQGLSTATKDTYDALHMQALPPR

SEQ ID NO: 2169 - protein, 492 aa, synthetic construct
  REGION 1..492: note = Synthetic
MALPVTALLLPLALLLHAARPDIQMTQSPSSLSASVGDRVTITCRASQGISSWLAWYQQKPEKAPKSLIYAASSLQGGVPSRFSGSGSGTDFTLTISSLQPEDFATYYCQQYDSYPYTFGQGTKLEIKGSTSGSGKPGSGEGSTKGQVQLVQSGAEVKKPGASVKVSCKASGYTFTSYDINWVRQATGQGLEWMGWMIPNSGDTGSAQKFQGRVTMTRNTSISTAYMELSSLRSEDTAVYYCARGGYCNSTSCYYYYMDVWGKGTTVTVSSAAATTTPAPRPPTPAPTIASQPLSLRPEACRPAAGGAVHTRGLDFACDIYIWAPLAGTCGVLLLSLVITLYCRRDQRLPPDAHKPPGGGSFRTPIQEEQADAHSTLAKIRVKFSRSADAPAYQQGQNQLYNELNLGRREEYDVLDKRRGRDPEMGGKPRRKNPQEGLYNELQKDKMAEAYSEIGMKGERRRGKGHDGLYQGLSTATKDTYDALHMQALPPR

SEQ ID NO: 2170 - protein, 493 aa, synthetic construct
  REGION 1..493: note = Synthetic
MALPVTALLLPLALLLHAARPEIVLTQSPGTLSLSPGERATLSCRASQSVSSSYLAWYQQKPGQAPRLLIYGASSRATGIPDRFSDSGSGTDFTLTISRLEPEDFAVYYCQHYGSSPPRITFGPGTKVDIKGSTSGSGKPGSGEGSTKGEVQLLESGGGLVQPGGSLRLSCAASGFTFSSYVMNWVRQAPGKGLEWVSSVSGSGNNSFYADSVKGRFTISRDNSKNTLYLQMNSLRAEDTAVYYCASRSSSYLYYYYYMDVWGKGTTVTVSSAAATTTPAPRPPTPAPTIASQPLSLRPEACRPAAGGAVHTRGLDFACDIYIWAPLAGTCGVLLLSLVITLYCRRDQRLPPDAHKPPGGGSFRTPIQEEQADAHSTLAKIRVKFSRSADAPAYQQGQNQLYNELNLGRREEYDVLDKRRGRDPEMGGKPRRKNPQEGLYNELQKDKMAEAYSEIGMKGERRRGKGHDGLYQGLSTATKDTYDALHMQALPPR

SEQ ID NO: 2171 - DNA, 1476 bp, synthetic construct
  misc_feature 1..1476: note = Synthetic
  source 1..1476: mol_type = other DNA
atggccttaccagtgaccgccttgctcctgccgctggccttgctgctccacgccgccaggccggaaattgtgctgactcagtctccagactttcagtctgtgactccaaaggagaaagtcaccatcacctgccgggccagtcagaccattggcagtagcttacactggtaccagcagaaaccagatcagtctccaaagctcctcatcaagcatgcttcccagtccttctcaggggtcccctcgaggttcagtggcagtggatctgggacagatttcaccctcaccgtcaatagcctggaagctgaagatgctgcaacgtattactgtcatcagagtagtagtttaccgtggacgttcggccaagggaccaaggtggaaatcaaaggcagcaccagcggcagcggcaagcccggctccggagagggcagcaccaagggccaggtgcagctggtggagtctgggggaggcgtggtccagcctgggaggtccctgagactttcctgtgcagcgtctggattcaccttcagcagtcatgacatgcactgggtccgccaggctccaggcaaggggctggactgggtggcagttatatggagtgatggaaataaaaaatactatgtagactccgcgaagggccggttcaccatctccagagacaattccaagaacacggtgtatctgcaaatgaacagcctgagagccgaggacacggctatatattactgtgcgagaggtgacaactggaacgacgaacactcctactattactacatggacgtctggggcaaggggaccacggtcaccgtctcctcagcggccgcaaccacgacgccagcgccgcggccaccaacaccggcgcccaccatcgcgtcgcagcccctgtccctgcgcccagaggcgtgccggccagcggcggggggcgcagtgcacacgagggggctggacttcgcctgtgatatctacatctgggcgcccttggccgggacttgtggggtccttctcctgtcactggttatcaccctttactgccggagggaccagaggctgccccccgatgcccacaagccccctgggggaggcagtttccggacccccatccaagaggagcaggccgacgcccactccaccctggccaagatcagagtgaagttcagcaggagcgcagacgcccccgcgtaccagcagggccagaaccagctctataacgagctcaatctaggacgaagagaggagtacgatgttttggacaagagacgtggccgggaccctgagatggggggaaagccgagaaggaagaaccctcaggaaggcctgtacaatgaactgcagaaagataagatggcggaggcctacagtgagattgggatgaaaggcgagcgccggaggggcaaggggcacgatggcctttaccagggtctcagtacagccaccaaggacacctacgacgcccttcacatgcaggccctgccccctcgc

SEQ ID NO: 2172 - DNA, 1476 bp, synthetic construct
  misc_feature 1..1476: note = Synthetic
  source 1..1476: mol_type = other DNA
atggccttaccagtgaccgccttgctcctgccgctggccttgctgctccacgccgccaggccggaaattgtgctgactcagtctccagactttcagtctgtgactccaaaggagaaagtcaccatcacctgccgggccagtcagaccattggcagtagcttacactggtaccagcagaaaccagatcagtctccaaagctcctcatcaagcatgcttcccagtccttctcaggggtcccctcgaggttcagtggcagtggatctgggacagatttcaccctcaccgtcaatagcctggaagctgaagatgctgcaacgtattactgtcatcagagtagtagtttaccgtggacgttcggccaagggaccaaggtggaaatcaaaggcagcaccagcggcagcggcaagcccggctccggagagggcagcaccaagggccaggtgcagctggtggagtctgggggaggcgtggtccagcctgggaggtccctgagactttcctgtgcagcgtctggattcaccttcagtagtcatgacatgcactgggtccgccaggctccaggcaaggggctggactgggtggcagttatatggagtgatggaaataataaatactatgcagactccgcgaagggccggttcaccatctccagagacaattccaagaacacggtgtatctgcaaatgaacagcctgagagccgaggacacggctatatattactgtgcgagaggtgacaactggaacgacgaacactcctactattactacatggacgtctggggcaaggggaccacggtcaccgtctcctcagcggccgcaaccacgacgccagcgccgcggccaccaacaccggcgcccaccatcgcgtcgcagcccctgtccctgcgcccagaggcgtgccggccagcggcggggggcgcagtgcacacgagggggctggacttcgcctgtgatatctacatctgggcgcccttggccgggacttgtggggtccttctcctgtcactggttatcaccctttactgccggagggaccagaggctgccccccgatgcccacaagccccctgggggaggcagtttccggacccccatccaagaggagcaggccgacgcccactccaccctggccaagatcagagtgaagttcagcaggagcgcagacgcccccgcgtaccagcagggccagaaccagctctataacgagctcaatctaggacgaagagaggagtacgatgttttggacaagagacgtggccgggaccctgagatggggggaaagccgagaaggaagaaccctcaggaaggcctgtacaatgaactgcagaaagataagatggcggaggcctacagtgagattgggatgaaaggcgagcgccggaggggcaaggggcacgatggcctttaccagggtctcagtacagccaccaaggacacctacgacgcccttcacatgcaggccctgccccctcgc

SEQ ID NO: 2173 - DNA, 1473 bp, synthetic construct
  misc_feature 1..1473: note = Synthetic
  source 1..1473: mol_type = other DNA
atggccttaccagtgaccgccttgctcctgccgctggccttgctgctccacgccgccaggccggacatacagatgacccagtctccatcctccctgtctgcatctgtaggagacagagtcaccatcacttgccgggcaagccagagcattagcaactatttaaattggtatcaccagaaaccagggaaagcccctaagctcctgatctatgctgcatccagtttggaaagtggggtcccatcaaggttcagtggcagtggatctgggacagatttcactctcaccatcagcagtctgcaacctgaagattttgcaacttactactgtcaacagagttacagtaacccgctcactttcggcggagggaccaaggtggagagcaaaggcagcaccagcggcagcggcaagcccggctccggagagggcagcaccaagggccagcttcagctggtgcagtctggagctgaggtgaagaagcctggggcctcagtgaaggtctcctgcaaggcttctggttacacctttaccaactatggtatcagctggttgcgacaggcccctggacaagggcttgagtggatgggatggatcagtggttacaatgataacacacactatgcacagaagttccagggcagagtcaccatgaccacagacacatccacgaccacagcctacatggaactgaggaacctgagatctgacgacacggccgtgtattactgtgcgagagatgggatagcagctcgtccagtctactactactacatggacgtctggggcaaagggaccacggtcaccgtctcctcagcggccgcaaccacgacgccagcgccgcggccaccaacaccggcgcccaccatcgcgtcgcagcccctgtccctgcgcccagaggcgtgccggccagcggcggggggcgcagtgcacacgagggggctggacttcgcctgtgatatctacatctgggcgcccttggccgggacttgtggggtccttctcctgtcactggttatcaccctttactgccggagggaccagaggctgccccccgatgcccacaagccccctgggggaggcagtttccggacccccatccaagaggagcaggccgacgcccactccaccctggccaagatcagagtgaagttcagcaggagcgcagacgcccccgcgtaccagcagggccagaaccagctctataacgagctcaatctaggacgaagagaggagtacgatgttttggacaagagacgtggccgggaccctgagatggggggaaagccgagaaggaagaaccctcaggaaggcctgtacaatgaactgcagaaagataagatggcggaggcctacagtgagattgggatgaaaggcgagcgccggaggggcaaggggcacgatggcctttaccagggtctcagtacagccaccaaggacacctacgacgcccttcacatgcaggccctgccccctcgc

SEQ ID NO: 2174 - DNA, 1476 bp, synthetic construct
  misc_feature 1..1476: note = Synthetic
  source 1..1476: mol_type = other DNA
atggccttaccagtgaccgccttgctcctgccgctggccttgctgctccacgccgccaggccggaaattgtgctgactcagtctccagactttcagtctgtgactccaaaggagaaagtcaccatcacctgccgggccagtcagagcattggtagtagcttacactggtaccagcagaaaccagatcagtctccaaagctcctcatcaagtttgcttcccagtccttctcaggggtcccctcgaggttcagtggcagtggatctgggacagatttcaccctcaccatccatagcctggaagctgaagatgctgcaacgtattactgtcatcagagtggtagtttaccgtggacgttcggccaagggaccaaggtggaaatcaaaggcagcaccagcggcagcggcaagcccggctccggagagggcagcaccaagggccaggtgcagctggtggagtctgggggaggcgtggtccagcctgggaggtccctgagactctcctgtgtagcgtctggattcaccttcagtagcaatgacatatactgggtccgccaggccccaggcaaggggctggagtgggtggcagttatatggtatgatggaagtaataaatactatgcagactccgtgaagggccgattcaccatctccagagacaattccaagaacacgctgtatctgcaaatgaacagcctgagagccgaggacacggctgtgtattactgtgcgagaggtgacaactggaacgacgaacaccactaccactactacatggacgtctggggcaaagggaccacggtcaccgtctcctcagcggccgcaaccacgacgccagcgccgcggccaccaacaccggcgcccaccatcgcgtcgcagcccctgtccctgcgcccagaggcgtgccggccagcggcggggggcgcagtgcacacgagggggctggacttcgcctgtgatatctacatctgggcgcccttggccgggacttgtggggtccttctcctgtcactggttatcaccctttactgccggagggaccagaggctgccccccgatgcccacaagccccctgggggaggcagtttccggacccccatccaagaggagcaggccgacgcccactccaccctggccaagatcagagtgaagttcagcaggagcgcagacgcccccgcgtaccagcagggccagaaccagctctataacgagctcaatctaggacgaagagaggagtacgatgttttggacaagagacgtggccgggaccctgagatggggggaaagccgagaaggaagaaccctcaggaaggcctgtacaatgaactgcagaaagataagatggcggaggcctacagtgagattgggatgaaaggcgagcgccggaggggcaaggggcacgatggcctttaccagggtctcagtacagccaccaaggacacctacgacgcccttcacatgcaggccctgccccctcgc

SEQ ID NO: 2175 - DNA, 1456 bp, synthetic construct
  misc_feature 1..1456: note = Synthetic
  source 1..1456: mol_type = other DNA
atggccttaccagtgaccgccttgctcctgccgctggccttgctgctccacgccgccaggccgggtgacccaggagccatcgttctcagtgtcccctggagggacagtcacactcacttgtggcttgagctctggctcagtctctactagttactaccccagctggtaccagcagaccccaggccaggctccacgcacgctcatctacagcacaaacattcgctcttctggggtccctgatcgcttctctggctccatccttgggaacaaagctgccctcaccatcacgggggcccaggcagatgatgaatctgattattactgtgtgctgtatatgggtagtgacattgtggtattcggcggagggaccaagctgaccgtcctaggcagcaccagcggcagcggcaagcccggctccggagagggcagcaccaagggccaggtgcagttggtggagtctgggggaggcgtggtccagcctgggaggtccctgagactctcctgtgcagcctctggattcaccttcagtagctatggcatgcactgggtccgccaggctccaggcaaggggctggagtgggtggcagttatatcatatgatggaagtaataaatactatgcagactccgtgaagggccgattcaccatctccagggacaattccaagaccacgctgtatctgcaaatgaacagcctgagagctgaggacacggctgtgtattactgtgcgagagatcactactactactacatggacgtctggggcaaagggaccacggtcaccgtctcctcagcggccgcaaccacgacgccagcgccgcggccaccaacaccggcgcccaccatcgcgtcgcagcccctgtccctgcgcccagaggcgtgccggccagcggcggggggcgcagtgcacacgagggggctggacttcgcctgtgatatctacatctgggcgcccttggccgggacttgtggggtccttctcctgtcactggttatcaccctttactgccggagggaccagaggctgccccccgatgcccacaagccccctgggggaggcagtttccggacccccatccaagaggagcaggccgacgcccactccaccctggccaagatcagagtgaagttcagcaggagcgcagacgcccccgcgtaccagcagggccagaaccagctctataacgagctcaatctaggacgaagagaggagtacgatgttttggacaagagacgtggccgggaccctgagatggggggaaagccgagaaggaagaaccctcaggaaggcctgtacaatgaactgcagaaagataagatggcggaggcctacagtgagattgggatgaaaggcgagcgccggaggggcaaggggcacgatggcctttaccagggtctcagtacagccaccaaggacacctacgacgcccttcacatgcaggccctgccccctcgc

SEQ ID NO: 2176 - DNA, 1470 bp, synthetic construct
  misc_feature 1..1470: note = Synthetic
  source 1..1470: mol_type = other DNA
atggccttaccagtgaccgccttgctcctgccgctggccttgctgctccacgccgccaggccggaaattgtgttgacacagtctccagccaccctgtctttgtctccaggggaaagagccaccctctcctgcagggccagtcagagtgttagcagctactttgcctggtaccaacagaaacctggccaggctcccaggctcctcatctatgatgcatccaacagggccactggcatcccagccaggttcagtggcagtgggtctgggacagacttcactctcaccatcagcagcctggagcctgaagattttgcagtttattactgtcagcagcgtagcaactggcctctcactttcggcggagggaccaaggtggagatcaaaggcagcaccagcggcagcggcaagcccggctccggagagggcagcaccaagggccaactgcagctgcaggagtcgggcccaggactggtgaagccttcggagaccctgtccctcacctgcactgtctctggtggctccatcagcagtagtagttactactggggctggatccgccagcccccagggaaggggctggagtggattgggagtctctattatagtgggagcacctactacaacccgtccctcaagagtcgagtcaccatatccgttgacacgtccaagaaccagttctccctgaagctgagctctgtgaccgccgcagacacggctgtgtattactgtgcggccgtacaactggaacgacgtgggtacttctacatggacgtctggggcaaagggaccacggtcaccgtctcctcagcggccgcaaccacgacgccagcgccgcggccaccaacaccggcgcccaccatcgcgtcgcagcccctgtccctgcgcccagaggcgtgccggccagcggcggggggcgcagtgcacacgagggggctggacttcgcctgtgatatctacatctgggcgcccttggccgggacttgtggggtccttctcctgtcactggttatcaccctttactgccggagggaccagaggctgccccccgatgcccacaagccccctgggggaggcagtttccggacccccatccaagaggagcaggccgacgcccactccaccctggccaagatcagagtgaagttcagcaggagcgcagacgcccccgcgtaccagcagggccagaaccagctctataacgagctcaatctaggacgaagagaggagtacgatgttttggacaagagacgtggccgggaccctgagatggggggaaagccgagaaggaagaaccctcaggaaggcctgtacaatgaactgcagaaagataagatggcggaggcctacagtgagattgggatgaaaggcgagcgccggaggggcaaggggcacgatggcctttaccagggtctcagtacagccaccaaggacacctacgacgcccttcacatgcaggccctgccccctcgc

SEQ ID NO: 2177 - DNA, 1476 bp, synthetic construct
  misc_feature 1..1476: note = Synthetic
  source 1..1476: mol_type = other DNA
atggccttaccagtgaccgccttgctcctgccgctggccttgctgctccacgccgccaggccgcagactgtagtgacccaggaaccatcgttctcagtgtcccctggagggacagtcacactcacttgtggcttgacctctggctcagtctctactagttactaccccaactggtaccagcagaccccaggccaggctccacgcacgctcatctatagtacaaatattcgctcttctggggtccctgatcgcttctctggctccatccttgggaacaaagctgccctcaccatcacgggggcccaggcagatgatgaatctgattattactgtgtgctgtatatgggtagtggcatgtttattttcggcagtggaaccaaggtcactgtcctaggcagcaccagcggcagcggcaagcccggctccggagagggcagcaccaagggccaggtgcagctggtggagtctgggggaggcgtggtccagcctgggaggtccctgagactctcctgtgcagcatctggattcaccttcagtaactatggcatgcactgggtccgccaggctccaggcaaggggctggagtggatggcagttatatggtctgatggacataataaatactatgcagactccgtgaagggccgattcaccatctccagagacaattccaagaacacgctgtatctgcaaatgaacagcctgagagccgaggacacggctgtgtattactgtgcgagggcacaattggaacgacggtacttctactacatggacgtctggggcaaagggaccacggtcaccgtctcctcagcggccgcaaccacgacgccagcgccgcggccaccaacaccggcgcccaccatcgcgtcgcagcccctgtccctgcgcccagaggcgtgccggccagcggcggggggcgcagtgcacacgagggggctggacttcgcctgtgatatctacatctgggcgcccttggccgggacttgtggggtccttctcctgtcactggttatcaccctttactgccggagggaccagaggctgccccccgatgcccacaagccccctgggggaggcagtttccggacccccatccaagaggagcaggccgacgcccactccaccctggccaagatcagagtgaagttcagcaggagcgcagacgcccccgcgtaccagcagggccagaaccagctctataacgagctcaatctaggacgaagagaggagtacgatgttttggacaagagacgtggccgggaccctgagatggggggaaagccgagaaggaagaaccctcaggaaggcctgtacaatgaactgcagaaagataagatggcggaggcctacagtgagattgggatgaaaggcgagcgccggaggggcaaggggcacgatggcctttaccagggtctcagtacagccaccaaggacacctacgacgcccttcacatgcaggccctgccccctcgc

SEQ ID NO: 2178 - DNA, 1476 bp, synthetic construct
  misc_feature 1..1476: note = Synthetic
  source 1..1476: mol_type = other DNA
atggccttaccagtgaccgccttgctcctgccgctggccttgctgctccacgccgccaggccggacatccagatgacccagtctccatcctcactgtctgcatctgtaggagacagagtcaccatcacttgtcgggcgagtcagggtattagcagctggttagcctggtatcagcagaaaccagagaaagcccctaagtccctgatctatgctgcatccagtttacagggtggggtcccatcaaggttcagcggcagtggatctgggacagatttcactctcaccatcagcagcctgcagcctgaagattttgcaacttattactgccaacagtatgatagttacccgtacacttttggccaggggaccaagctggagatcaaaggcagcaccagcggcagcggcaagcccggctccggagagggcagcaccaagggccaggtgcagctggtgcagtctggggctgaggtgaagaagcctggggcctcagtgaaggtctcctgcaaggcttctggatacaccttcaccagttatgatatcaactgggtgcgacaggccactggacaagggcttgagtggatgggatggatgatccctaacagtggtgacacaggctctgcacagaagttccagggcagagtcaccatgaccaggaacacctccataggcacagcctacatggagctgagcagcctgagatctgaggacacggccgtttattactgtgcgagaggcggatattgtaatagtaccagttgctactactactacatggacgtctggggcaaagggaccacggtcaccgtctcctcagcggccgcaaccacgacgccagcgccgcggccaccaacaccggcgcccaccatcgcgtcgcagcccctgtccctgcgcccagaggcgtgccggccagcggcggggggcgcagtgcacacgagggggctggacttcgcctgtgatatctacatctgggcgcccttggccgggacttgtggggtccttctcctgtcactggttatcaccctttactgccggagggaccagaggctgccccccgatgcccacaagccccctgggggaggcagtttccggacccccatccaagaggagcaggccgacgcccactccaccctggccaagatcagagtgaagttcagcaggagcgcagacgcccccgcgtaccagcagggccagaaccagctctataacgagctcaatctaggacgaagagaggagtacgatgttttggacaagagacgtggccgggaccctgagatggggggaaagccgagaaggaagaaccctcaggaaggcctgtacaatgaactgcagaaagataagatggcggaggcctacagtgagattgggatgaaaggcgagcgccggaggggcaaggggcacgatggcctttaccagggtctcagtacagccaccaaggacacctacgacgcccttcacatgcaggccctgccccctcgc

SEQ ID NO: 2179 - DNA, 1479 bp, synthetic construct
  misc_feature 1..1479: note = Synthetic
  source 1..1479: mol_type = other DNA
atggccttaccagtgaccgccttgctcctgccgctggccttgctgctccacgccgccaggccggacatccaggtgacccagtctccaaccttcctgtctgcatctgtaggagacagagtcaccatcacttgccgggccagtcagggcattagcagttatttagcctggtatcagcaaaaaccagggaaagcccctaagctcctgatctatggtgcatccactttgcaaagtggggtcccatcaaggttcagcggcagtggatctgggacagaattcactctcacaatcagcagcctgcagcctgaagattttgcaacttattactgtcaacagcttaatagttacccgtggacgttcggccaagggaccaaggtggaaatcaaaggcagcaccagcggcagcggcaagcccggctccggagagggcagcaccaagggccaggtgcagctggtgcagtctggggctgaggtgaagaagcctggggcctcagtgaaggtctcctgcaaggcttctggatacaccttcaccagttatgatatcaactgggtgcgacaggccactggacaagggcttgagtggatgggatggatgaaccctaatagtggtaacacagtctatgcacagaagttccagggcagagtcaccatgaccaggaacacctccataagcacagcctacatggagctgagcagcctgagatctgaggacacggccgtgtattactgtgcgagaggaggcgatttttggagtggttaccatgactactactactacatggacgtctggggcaaagggaccacggtcaccgtctcctcagcggccgcaaccacgacgccagcgccgcggccaccaacaccggcgcccaccatcgcgtcgcagcccctgtccctgcgcccagaggcgtgccggccagcggcggggggcgcagtgcacacgagggggctggacttcgcctgtgatatctacatctgggcgcccttggccgggacttgtggggtccttctcctgtcactggttatcaccctttactgccggagggaccagaggctgccccccgatgcccacaagccccctgggggaggcagtttccggacccccatccaagaggagcaggccgacgcccactccaccctggccaagatcagagtgaagttcagcaggagcgcagacgcccccgcgtaccagcagggccagaaccagctctataacgagctcaatctaggacgaagagaggagtacgatgttttggacaagagacgtggccgggaccctgagatggggggaaagccgagaaggaagaaccctcaggaaggcctgtacaatgaactgcagaaagataagatggcggaggcctacagtgagattgggatgaaaggcgagcgccggaggggcaaggggcacgatggcctttaccagggtctcagtacagccaccaaggacacctacgacgcccttcacatgcaggccctgccccctcgc

SEQ ID NO: 2180 - DNA, 1473 bp, synthetic construct
  misc_feature 1..1473: note = Synthetic
  source 1..1473: mol_type = other DNA
atggccttaccagtgaccgccttgctcctgccgctggccttgctgctccacgccgccaggccgtcctatgagctgactcagccaccctcagtgtccgtgtccccaggacagacagccagcatcacctgctctggagataaattgggggataaatatgcttgctggtatcagcagaagccaggccagtcccctgtgctggtcatctatcaagatagcaagcggccctcagggatccctgagcgattctctggctccaactctgggaacacagccactctgaccatcagcgggacccaggctatggatgaggctgactattactgtcaggcgtgggacagcagcactgctgtgttcggaggaggcacccagctgaccgccctcggcagcaccagcggcagcggcaagcccggctccggagagggcagcaccaagggccaggtgcagctgcaggagtcgggcccaggactggtgaagccttcggagaccctgtccctcacctgcactgtctctggtggctccatcagtagttactactggagctggatccggcagcccgccgggaagggactggagtggattgggcgtatctataccagtgggagcaccaactacaacccctccctcaagagtcgagtcaccatgtcagtagacacgtccaagaaccagttctccctgaagctgagctctgtgaccgccgcggacacggccgtgtattactgtgcgagagaggagtaccagctgctaccggccctctactactactactacatggacgtctggggcaaagggaccacggtcaccgtctcctcagcggccgcaaccacgacgccagcgccgcggccaccaacaccggcgcccaccatcgcgtcgcagcccctgtccctgcgcccagaggcgtgccggccagcggcggggggcgcagtgcacacgagggggctggacttcgcctgtgatatctacatctgggcgcccttggccgggacttgtggggtccttctcctgtcactggttatcaccctttactgccggagggaccagaggctgccccccgatgcccacaagccccctgggggaggcagtttccggacccccatccaagaggagcaggccgacgcccactccaccctggccaagatcagagtgaagttcagcaggagcgcagacgcccccgcgtaccagcagggccagaaccagctctataacgagctcaatctaggacgaagagaggagtacgatgttttggacaagagacgtggccgggaccctgagatggggggaaagccgagaaggaagaaccctcaggaaggcctgtacaatgaactgcagaaagataagatggcggaggcctacagtgagattgggatgaaaggcgagcgccggaggggcaaggggcacgatggcctttaccagggtctcagtacagccaccaaggacacctacgacgcccttcacatgcaggccctgccccctcgc

SEQ ID NO: 2181 - DNA, 1476 bp, synthetic construct
  misc_feature 1..1476: note = Synthetic
  source 1..1476: mol_type = other DNA
atggccttaccagtgaccgccttgctcctgccgctggccttgctgctccacgccgccaggccgcagactgtagtgacccaggaaccatcgttctcagtgtcccctggagggacagtcacactcacttgtggcttgacctctggctcagtctctactagttactaccccaactggtaccagcagaccccaggccaggctccacgcacgctcatctacagcacaaatattcgctcttctggggtccctgatcgcttctctggctccatccttgggaacaaagctgccctcaccatcacgggggcccaggcagatgatgaatctgattattactgtgtgctgtatatgggtagtggcatgtttattttcggcagtggaaccaaggtcactgtcctaggcagcaccagcggcagcggcaagcccggctccggagagggcagcaccaagggccaggtgcagctggtggagtctgggggaggcgtggtccagcctgggaggtccctgagactctcctgtgcagcaactggattcaccttcagtagctatggcatgcactgggtccgccaggctccaggcaaggggctggagtggatggtagttatatggtctgatggacataataaatactatgcagactccgtgaagggccgattcaccatctccagagacaattccaagaacacgctgtatctgcaaatgaacagcctgagagccgaggacacggctgtgtattactgtgcgagggcacaactggaacgacggtacttctactacatggacgtctggggcaaagggaccacggtcaccgtctcctcagcggccgcaaccacgacgccagcgccgcggccaccaacaccggcgcccaccatcgcgtcgcagcccctgtccctgcgcccagaggcgtgccggccagcggcggggggcgcagtgcacacgagggggctggacttcgcctgtgatatctacatctgggcgcccttggccgggacttgtggggtccttctcctgtcactggttatcaccctttactgccggagggaccagaggctgccccccgatgcccacaagccccctgggggaggcagtttccggacccccatccaagaggagcaggccgacgcccactccaccctggccaagatcagagtgaagttcagcaggagcgcagacgcccccgcgtaccagcagggccagaaccagctctataacgagctcaatctaggacgaagagaggagtacgatgttttggacaagagacgtggccgggaccctgagatggggggaaagccgagaaggaagaaccctcaggaaggcctgtacaatgaactgcagaaagataagatggcggaggcctacagtgagattgggatgaaaggcgagcgccggaggggcaaggggcacgatggcctttaccagggtctcagtacagccaccaaggacacctacgacgcccttcacatgcaggccctgccccctcgc

SEQ ID NO: 2182 - DNA, 1476 bp, synthetic construct
  misc_feature 1..1476: note = Synthetic
  source 1..1476: mol_type = other DNA
atggccttaccagtgaccgccttgctcctgccgctggccttgctgctccacgccgccaggccggaaattgtgctgactcagtctccagactttcagtctgtgactccaaaggagaaagtcaccatcacctgccgggccagtcagagcattggtagtagcttacactggtaccagcagaaaccagatcagtctccaatgctcctcatcaagtttgcttcccagtccatctcaggggtcccctcgaggttcagtggcagtggatctgggacagatttcaccctcaccatcaatagcctggaagctgaagatgctgcagcgtattactgtcatcagagtagtagtttaccgtggacgttcggccaagggaccaaggtggaaatcaaaggcagcaccagcggcagcggcaagcccggctccggagagggcagcaccaagggccaggtgcagctggtggagtctgggggaggcgtggtccagcctgggaggtccctgagactctcctgtgcagcgtctggattcaccttcactagttatgacatgcactgggtccgccaggctccaggcaaggggctggagtgggtgacaattatatggtttgatggaagtaataaatactatgcagactccgtgaagggccgattcaccatctccagagacaattccaagaacacgctgtatctgcaaatgaacagcctgagcgccgaggacacggctgtgtattactgtgcgagaggagacaactggaacgaccggtactactactactactacatggacgtctggggcaaagggaccacggtcaccgtctcctcagcggccgcaaccacgacgccagcgccgcggccaccaacaccggcgcccaccatcgcgtcgcagcccctgtccctgcgcccagaggcgtgccggccagcggcggggggcgcagtgcacacgagggggctggacttcgcctgtgatatctacatctgggcgcccttggccgggacttgtggggtccttctcctgtcactggttatcaccctttactgccggagggaccagaggctgccccccgatgcccacaagccccctgggggaggcagtttccggacccccatccaagaggagcaggccgacgcccactccaccctggccaagatcagagtgaagttcagcaggagcgcagacgcccccgcgtaccagcagggccagaaccagctctataacgagctcaatctaggacgaagagaggagtacgatgttttggacaagagacgtggccgggaccctgagatggggggaaagccgagaaggaagaaccctcaggaaggcctgtacaatgaactgcagaaagataagatggcggaggcctacagtgagattgggatgaaaggcgagcgccggaggggcaaggggcacgatggcctttaccagggtctcagtacagccaccaaggacacctacgacgcccttcacatgcaggccctgccccctcgc

SEQ ID NO: 2183 - DNA, 1491 bp, synthetic construct
  misc_feature 1..1491: note = Synthetic
  source 1..1491: mol_type = other DNA
atggccttaccagtgaccgccttgctcctgccgctggccttgctgctccacgccgccaggccggatattgtgatgacccagcctccactctcctcgcctgtcacccttggacagccggcctccatctcctgcaggtctagtcaaagcctcgtacacagtgatggaaacacctacttgagttggcttcagcagaggccaggccagcctccaagactcctaatttataaggtttctaaccggttctctggggtcccagacagattcagtggcagtggggcagggacagatttcacactgaaaatcagcagggtggaagctgaggatgtcggggtttattactgcacgcaagctacacaatttcctcacacttttggccaggggaccaagctggagatcaaaggcagcaccagcggcagcggcaagcccggctccggagagggcagcaccaagggccaggttcagctggtgcagtctggagctgaggtgaagaagcctggggcctcagtgaaggtctcctgcaaggcttctggttacacctttaccagctatggtatcagctgggtgcgacaggcccctggacaagggcttgagtggatggggtggatcagcgcttacaatggtcacacagactatacacagaaactccagggcagagtcaccatgaccacagacacatccacgaccacagcctacatggaactgaggagcctgagctctgccgacacggccgtgtattactgtgtgagagaagtggtacttcccaccacggactactactacttttacatggacgtctggggcaaagggaccacggtcaccgtctcctcagcggccgcaaccacgacgccagcgccgcggccaccaacaccggcgcccaccatcgcgtcgcagcccctgtccctgcgcccagaggcgtgccggccagcggcggggggcgcagtgcacacgagggggctggacttcgcctgtgatatctacatctgggcgcccttggccgggacttgtggggtccttctcctgtcactggttatcaccctttactgccggagggaccagaggctgccccccgatgcccacaagccccctgggggaggcagtttccggacccccatccaagaggagcaggccgacgcccactccaccctggccaagatcagagtgaagttcagcaggagcgcagacgcccccgcgtaccagcagggccagaaccagctctataacgagctcaatctaggacgaagagaggagtacgatgttttggacaagagacgtggccgggaccctgagatggggggaaagccgagaaggaagaaccctcaggaaggcctgtacaatgaactgcagaaagataagatggcggaggcctacagtgagattgggatgaaaggcgagcgccggaggggcaaggggcacgatggcctttaccagggtctcagtacagccaccaaggacacctacgacgcccttcacatgcaggccctgccccctcgc

SEQ ID NO: 2184 - DNA, 1488 bp, synthetic construct
  misc_feature 1..1488: note = Synthetic
  source 1..1488: mol_type = other DNA
atggccttaccagtgaccgccttgctcctgccgctggccttgctgctccacgccgccaggccggacatccagatgacccagtctccatcctcactgtctgcatctgtaggagacagagtcaccatcacttgtcgggcgagtcagggtattagcagctggttagcctggtatcagcagaaaccagagaaagcccctaagtccctgatctatgctgcatccagtttgcaaagtggggtcccatcaaggttcagcggcagtggatctgggacagatttcactctcaccatcagcagcctgcagcctgaagattttgcaacttattactgccaacagtataatagttacccgtacacttttggccaggggaccaagctggagatcaaaggcagcaccagcggcagcggcaagcccggctccggagagggcagcaccaagggccaggtccagctggtacagtctggggctgaggtgaagaagcctggggcctcagtgaaggtctcctgcaaggtttccggatacaccctcactgaattatccatgcactgggtgcgacaggctcctggaaaagggcttgagtggatgggaggttttgatcctgaagatggtgaaacaatctacgcacagaagttccagggcagagtcaccatgaccgaggacacatctacagacacagcctacatggagctgagcagcctgagatctgaggacacggccgtgtattactgtgcaacaggacgtattactatggttcggggagttattatcccctactactactactacatggacgtctggggcaaagggaccacggtcaccgtctcctcagcggccgcaaccacgacgccagcgccgcggccaccaacaccggcgcccaccatcgcgtcgcagcccctgtccctgcgcccagaggcgtgccggccagcggcggggggcgcagtgcacacgagggggctggacttcgcctgtgatatctacatctgggcgcccttggccgggacttgtggggtccttctcctgtcactggttatcaccctttactgccggagggaccagaggctgccccccgatgcccacaagccccctgggggaggcagtttccggacccccatccaagaggagcaggccgacgcccactccaccctggccaagatcagagtgaagttcagcaggagcgcagacgcccccgcgtaccagcagggccagaaccagctctataacgagctcaatctaggacgaagagaggagtacgatgttttggacaagagacgtggccgggaccctgagatggggggaaagccgagaaggaagaaccctcaggaaggcctgtacaatgaactgcagaaagataagatggcggaggcctacagtgagattgggatgaaaggcgagcgccggaggggcaaggggcacgatggcctttaccagggtctcagtacagccaccaaggacacctacgacgcccttcacatgcaggccctgccccctcgc

SEQ ID NO: 2185 - DNA, 1482 bp, synthetic construct
  misc_feature 1..1482: note = Synthetic
  source 1..1482: mol_type = other DNA
atggccttaccagtgaccgccttgctcctgccgctggccttgctgctccacgccgccaggccggatattgtgatgacccagactccactctctctgtccgtcacccctggacagccggcctccatctcctgcaagtctagtaagagcctcctgcatagtgatggaaagacctatttgtattggtacctgcagaagccaggccagcctccacagctcctgatctatgaagtttccaaccggttctctggagtgccagataggttcagtggcagcgggtcagggacagatttcacactgaaaatcagccgggtggaggctgaggatgttggggtttattactgcatgcaaagtatacaatttccgtggacgttcggccaagggaccaaggtggaaatcaagggcagcaccagcggcagcggcaagcccggctccggagagggcagcaccaagggccaggttcagctggtgcagtctggaactgaggtgaagaagcctggggcctcagtgaaggtctcctgcaaggcttctggttacacctttaccaactatggtatcggctgggtgcgacaggcccctggacaagggcttgagtggatgggatggatcatcgcttacaatggttacacaaagtatgcacagattctccagggcagagtcaccatgaccacagacacatccacgaacacagcttatatggaactgaggagcctgagatctgacgacacggccgtgtattactgtgcgagacagcagctcgggggggactaccactactacatggacgtctggggcaaagggaccacggtcaccgtctcctcagcggccgcaaccacgacgccagcgccgcggccaccaacaccggcgcccaccatcgcgtcgcagcccctgtccctgcgcccagaggcgtgccggccagcggcggggggcgcagtgcacacgagggggctggacttcgcctgtgatatctacatctgggcgcccttggccgggacttgtggggtccttctcctgtcactggttatcaccctttactgccggagggaccagaggctgccccccgatgcccacaagccccctgggggaggcagtttccggacccccatccaagaggagcaggccgacgcccactccaccctggccaagatcagagtgaagttcagcaggagcgcagacgcccccgcgtaccagcagggccagaaccagctctataacgagctcaatctaggacgaagagaggagtacgatgttttggacaagagacgtggccgggaccctgagatggggggaaagccgagaaggaagaaccctcaggaaggcctgtacaatgaactgcagaaagataagatggcggaggcctacagtgagattgggatgaaaggcgagcgccggaggggcaaggggcacgatggcctttaccagggtctcagtacagccaccaaggacacctacgacgcccttcacatgcaggccctgccccctcgc

SEQ ID NO: 2186 - DNA, 1482 bp, synthetic construct
  misc_feature 1..1482: note = Synthetic
  source 1..1482: mol_type = other DNA
atggccttaccagtgaccgccttgctcctgccgctggccttgctgctccacgccgccaggccggatattgtgatgacccagactccactctctctgtccgtcacccctggacagccggcctccatctcctgcaagtctagtaagagcctcctgcatagtgatggaaagacctatttgtattggtacctgcagaagccaggccagcctccacagctcctgatctatgaagtttccacccggttctctggagtgccagataggttcagtggcagcgggtcagggacagatttcacactgaaaatcagccgggtggaggctgaggatgttggggtttattactgcatgcaaagtatacagtttccgtggacgttcggccaagggaccaaggtggaaatcaaaggcagcaccagcggcagcggcaagcccggctccggagagggcagcaccaagggccaggttcagctggtgcagtctggaactgaggtgaagaagcctggggcctcagtgaaggtctcctgcaaggcttctggttacacctttaccaactatggtatcggctgggtgcgacaggcccctggacaagggcttgagtggatgggatggatcatcgcttacaatggttacacaaagtatgcacagattctccagggcagagtcaccatgaccacggacacatccacgaacacagcctatatggaactgaggagcctgagatctgacgacacggccgtgtattactgtgcgcgacagcagctcgggggggactaccactactacatggacgtctggggcaaagggaccacggtcaccgtctcttcagcggccgcaaccacgacgccagcgccgcggccaccaacaccggcgcccaccatcgcgtcgcagcccctgtccctgcgcccagaggcgtgccggccagcggcggggggcgcagtgcacacgagggggctggacttcgcctgtgatatctacatctgggcgcccttggccgggacttgtggggtccttctcctgtcactggttatcaccctttactgccggagggaccagaggctgccccccgatgcccacaagccccctgggggaggcagtttccggacccccatccaagaggagcaggccgacgcccactccaccctggccaagatcagagtgaagttcagcaggagcgcagacgcccccgcgtaccagcagggccagaaccagctctataacgagctcaatctaggacgaagagaggagtacgatgttttggacaagagacgtggccgggaccctgagatggggggaaagccgagaaggaagaaccctcaggaaggcctgtacaatgaactgcagaaagataagatggcggaggcctacagtgagattgggatgaaaggcgagcgccggaggggcaaggggcacgatggcctttaccagggtctcagtacagccaccaaggacacctacgacgcccttcacatgcaggccctgccccctcgc

SEQ ID NO: 2187 - DNA, 1476 bp, synthetic construct
  misc_feature 1..1476: note = Synthetic
  source 1..1476: mol_type = other DNA
atggccttaccagtgaccgccttgctcctgccgctggccttgctgctccacgccgccaggccggacatccagatgacccagtctccatcctcactgtctgcctctgtaggagacagagtcaccatcacttgtcgggcgagtcagggtattagcaactggttagcctggtatcagcagaaaccagagaaagcccctaagtccctgatctatgctgcatccagtttgcaaggtggggtcccatcaagattcagcggcagtggatctgggacagatttcactctcaccatcagcagcctgcagcctgaagattttgcaacttattactgccaacagtatgatagttacccgtacacttttggccaggggaccaagctggagatcaaaggcagcaccagcggcagcggcaagcccggctccggagagggcagcaccaagggccaggtgcagctggtgcagtctgggactgaggtgaagaagcctggggcctcagtgaaggtctcctgtaagacttctggatacaccttcaccagttatgatatcaactgggtgcgacaggccactggacaagggcttgagtggatgggatggatgaaccctatcagtggtgacacaggctctgcacagaagttccagggcagagtcaccatgaccaggaacacctccataggcacagcctacatggagctgagcagcctgagatctgaggacacggccgtttattactgtgcgagaggcggatattgtagtagtaccagctgctactactactacatggacgtctggggcaaagggaccacggtcaccgtctcctcagcggccgcaaccacgacgccagcgccgcggccaccaacaccggcgcccaccatcgcgtcgcagcccctgtccctgcgcccagaggcgtgccggccagcggcggggggcgcagtgcacacgagggggctggacttcgcctgtgatatctacatctgggcgcccttggccgggacttgtggggtccttctcctgtcactggttatcaccctttactgccggagggaccagaggctgccccccgatgcccacaagccccctgggggaggcagtttccggacccccatccaagaggagcaggccgacgcccactccaccctggccaagatcagagtgaagttcagcaggagcgcagacgcccccgcgtaccagcagggccagaaccagctctataacgagctcaatctaggacgaagagaggagtacgatgttttggacaagagacgtggccgggaccctgagatggggggaaagccgagaaggaagaaccctcaggaaggcctgtacaatgaactgcagaaagataagatggcggaggcctacagtgagattgggatgaaaggcgagcgccggaggggcaaggggcacgatggcctttaccagggtctcagtacagccaccaaggacacctacgacgcccttcacatgcaggccctgccccctcgc

SEQ ID NO: 2188 - DNA, 1476 bp, synthetic construct
  misc_feature 1..1476: note = Synthetic
  source 1..1476: mol_type = other DNA
atggccttaccagtgaccgccttgctcctgccgctggccttgctgctccacgccgccaggccggacatccagatgacccagtctccatcctcactgtctgcatctgtaggagacagagtcaccatcacttgtcgggcgagtcagggtattagcagctggttagcctggtatcagcagaaaccagagaaagcccctaagtccctgatctatgctgcatccagtttacaaggtggggtcccatcaaggttcagcggcagtggatctgggacagatttcactctcaccatcagcagcctgcagcctgaagattttgcaacttattactgccaacagtatgatagttacccgtacacttttggccaggggaccaagctggagatcaaaggcagcaccagcggcagcggcaagcccggctccggagagggcagcaccaagggccaggtgcagctggtgcagtctggggctgaggtgaagaagcctggggcctcagtgaaggtctcctgcaaggcttctggatacaccttcaccagttatgatatcaactgggtgcgacaggccactggacaagggcttgagtggatgggatggatgatccctaacagtggtgacacaggctctgcacagaagttccagggcagagtcaccatgaccaggaacacctccataagcacagcctacatggagctgagcagcctgagatctgaggacacggccgtttattactgtgcgagaggcggatattgtaatagtaccagttgctactactactacatggacgtctggggcaaagggaccacggtcaccgtctcctcagcggccgcaaccacgacgccagcgccgcggccaccaacaccggcgcccaccatcgcgtcgcagcccctgtccctgcgcccagaggcgtgccggccagcggcggggggcgcagtgcacacgagggggctggacttcgcctgtgatatctacatctgggcgcccttggccgggacttgtggggtccttctcctgtcactggttatcaccctttactgccggagggaccagaggctgccccccgatgcccacaagccccctgggggaggcagtttccggacccccatccaagaggagcaggccgacgcccactccaccctggccaagatcagagtgaagttcagcaggagcgcagacgcccccgcgtaccagcagggccagaaccagctctataacgagctcaatctaggacgaagagaggagtacgatgttttggacaagagacgtggccgggaccctgagatggggggaaagccgagaaggaagaaccctcaggaaggcctgtacaatgaactgcagaaagataagatggcggaggcctacagtgagattgggatgaaaggcgagcgccggaggggcaaggggcacgatggcctttaccagggtctcagtacagccaccaaggacacctacgacgcccttcacatgcaggccctgccccctcgc

SEQ ID NO: 2189 - DNA, 1479 bp, synthetic construct
  misc_feature 1..1479: note = Synthetic
  source 1..1479: mol_type = other DNA
atggccttaccagtgaccgccttgctcctgccgctggccttgctgctccacgccgccaggccggaaattgtgttgacgcagtctccaggcaccctgtctttgtctccaggggaaagagccaccctctcctgcagggccagtcagagtgttagcagcagctacttagcctggtaccagcagaaacctggccaggctcccaggctcctcatctatggtgcatccagcagggccactggcatcccagacaggttcagtgacagtgggtctgggacagacttcactctcaccatcagcagactggagcctgaagattttgcagtgtattactgtcagcactatggtagctcacctccgaggatcactttcggccctgggaccaaagtggatatcaaaggcagcaccagcggcagcggcaagcccggctccggagagggcagcaccaagggcgaggtgcagttgttggagtctgggggaggcttggtacaacctggggggtccctgagactctcctgtgcagcctctggattcacctttagcagctatgtcatgaactgggtccgccaggctccagggaaggggctggaatgggtctcatctgttagtggtagtggtaataactcattctacgcagactccgtgaagggccggttcaccatctccagagacaattccaagaacacgctgtatctgcaaatgaacagcctgagagccgaggacacggccgtatattactgtgcgagtcgtagttccagttatctctactactactactacatggacgtctggggcaaagggaccaccgtcaccgtctcctcagcggccgcaaccacgacgccagcgccgcggccaccaacaccggcgcccaccatcgcgtcgcagcccctgtccctgcgcccagaggcgtgccggccagcggcggggggcgcagtgcacacgagggggctggacttcgcctgtgatatctacatctgggcgcccttggccgggacttgtggggtccttctcctgtcactggttatcaccctttactgccggagggaccagaggctgccccccgatgcccacaagccccctgggggaggcagtttccggacccccatccaagaggagcaggccgacgcccactccaccctggccaagatcagagtgaagttcagcaggagcgcagacgcccccgcgtaccagcagggccagaaccagctctataacgagctcaatctaggacgaagagaggagtacgatgttttggacaagagacgtggccgggaccctgagatggggggaaagccgagaaggaagaaccctcaggaaggcctgtacaatgaactgcagaaagataagatggcggaggcctacagtgagattgggatgaaaggcgagcgccggaggggcaaggggcacgatggcctttaccagggtctcagtacagccaccaaggacacctacgacgcccttcacatgcaggccctgccccctcgc

SEQ ID NO: 2190 - DNA, 1476 bp, synthetic construct
  misc_feature 1..1476: note = Synthetic
  source 1..1476: mol_type = other DNA
atggccttaccagtgaccgccttgctcctgccgctggccttgctgctccacgccgccaggccggagatcgtgctgacccagagccccgacttccagtctgtgacacctaaggaaaaggttacaattacctgtagagcttcccagaccatcggctcttctctgcactggtaccagcagaaacctgatcagtctccaaagctgctgatcaagcacgccagccagagcttctctggcgtccccagccggttttctggcagcggcagcggaacagattttacactgacagtgaactcactggaagccgaggatgccgccacctactactgccatcagagctccagcctcccttggaccttcggccagggcacgaaggtggaaatcaaaggcagcaccagcggcagcggcaagcccggctccggagagggcagcaccaagggccaagtgcagctggtggagagcggcggcggagtggtgcaacctggaagaagcctgcggctgagctgcgctgctagcggcttcaccttcagcagccacgacatgcactgggtgcggcaggcccctggcaagggcctggactgggtcgccgtgatctggagcgacggcaacaagaagtactacgtggacagcgccaagggcagattcaccatcagccgcgacaatagcaagaacaccgtgtacctgcagatgaacagcctgagagccgaggacaccgccatctactattgcgccagaggcgataattggaacgacgagcacagctactattactacatggacgtgtggggcaaaggcacaaccgtgaccgtgtcctccgcggccgcaaccacgacgccagcgccgcggccaccaacaccggcgcccaccatcgcgtcgcagcccctgtccctgcgcccagaggcgtgccggccagcggcggggggcgcagtgcacacgagggggctggacttcgcctgtgatatctacatctgggcgcccttggccgggacttgtggggtccttctcctgtcactggttatcaccctttactgccggagggaccagaggctgccccccgatgcccacaagccccctgggggaggcagtttccggacccccatccaagaggagcaggccgacgcccactccaccctggccaagatcagagtgaagttcagcaggagcgcagacgcccccgcgtaccagcagggccagaaccagctctataacgagctcaatctaggacgaagagaggagtacgatgttttggacaagagacgtggccgggaccctgagatggggggaaagccgagaaggaagaaccctcaggaaggcctgtacaatgaactgcagaaagataagatggcggaggcctacagtgagattgggatgaaaggcgagcgccggaggggcaaggggcacgatggcctttaccagggtctcagtacagccaccaaggacacctacgacgcccttcacatgcaggccctgccccctcgc

SEQ ID NO: 2191 - DNA, 1476 bp, synthetic construct
  misc_feature 1..1476: note = Synthetic
  source 1..1476: mol_type = other DNA
atggccttaccagtgaccgccttgctcctgccgctggccttgctgctccacgccgccaggccggagatcgtgctgacacagtccccagattttcagagcgtgacccccaaggaaaaggtgacaatcacctgcagagccagccagaccatcggcagcagcctgcactggtaccagcagaaacccgatcagtctcctaagctgctgatcaagcacgccagccagagcttcagcggcgttcccagcaggttcagcggaagcggcagcggcaccgacttcaccctgaccgtgaactctctcgaggccgaggacgccgctacatactactgccaccagagcagctccctgccttggaccttcggccagggcaccaaggtcgaaattaagggcagcaccagcggcagcggcaagcccggctccggagagggcagcaccaagggccaagtgcagctggtggaaagcggcggcggagtggtgcaacctggcagatctctgcggctgtcttgtgccgcctctggatttacattcagctctcatgatatgcactgggtgcggcaggcccctggcaaaggcctggactgggtcgccgtgatctggagcgacggcaacaacaagtactacgccgacagcgccaagggaagattcaccatcagccgggacaattctaaaaacaccgtgtacctgcagatgaacagcctgagagctgaggacaccgccatctactattgcgccagaggagataattggaacgacgagcacagctactactactatatggacgtgtggggcaagggcacaacagtgaccgtgtcctccgcggccgcaaccacgacgccagcgccgcggccaccaacaccggcgcccaccatcgcgtcgcagcccctgtccctgcgcccagaggcgtgccggccagcggcggggggcgcagtgcacacgagggggctggacttcgcctgtgatatctacatctgggcgcccttggccgggacttgtggggtccttctcctgtcactggttatcaccctttactgccggagggaccagaggctgccccccgatgcccacaagccccctgggggaggcagtttccggacccccatccaagaggagcaggccgacgcccactccaccctggccaagatcagagtgaagttcagcaggagcgcagacgcccccgcgtaccagcagggccagaaccagctctataacgagctcaatctaggacgaagagaggagtacgatgttttggacaagagacgtggccgggaccctgagatggggggaaagccgagaaggaagaaccctcaggaaggcctgtacaatgaactgcagaaagataagatggcggaggcctacagtgagattgggatgaaaggcgagcgccggaggggcaaggggcacgatggcctttaccagggtctcagtacagccaccaaggacacctacgacgcccttcacatgcaggccctgccccctcgc

SEQ ID NO: 2192 - DNA, 1473 bp, synthetic construct
  misc_feature 1..1473: note = Synthetic
  source 1..1473: mol_type = other DNA
atggccttaccagtgaccgccttgctcctgccgctggccttgctgctccacgccgccaggccggatatccagatgacccagagccccagcagcctgagcgccagcgtgggcgaccgggtcacaatcacctgcagagccagccagagcatcagcaattacctgaactggtaccaccagaagcccggcaaagcccctaagctgctgatctacgctgcttctagcctcgagagcggcgtgcctagcagattcagcggcagcggcagcggaacagatttcaccctgacaatcagctctctgcaacctgaggacttcgccacatactattgtcagcagtcctacagcaatcctctgaccttcggcggcggcacaaaggtggaatctaagggcagcaccagcggcagcggcaagcccggctccggagagggcagcaccaagggccaactgcagctggtgcagagcggagccgaggtgaagaagcctggcgctagcgttaaggtgtcctgcaaggcctccggctacacctttaccaactacggcatctcctggctgcgccaggccccaggccagggcctggagtggatgggctggatctccggatacaacgacaacacccactacgcccagaaattccagggtagagtgactatgaccaccgataccagcacaacaacagcctacatggaactgagaaacctgcggagcgacgacaccgccgtgtactactgcgcccgggacggcattgccgctagacctgtgtactactattacatggacgtgtggggcaagggcaccaccgtgacagtgtcttctgcggccgcaaccacgacgccagcgccgcggccaccaacaccggcgcccaccatcgcgtcgcagcccctgtccctgcgcccagaggcgtgccggccagcggcggggggcgcagtgcacacgagggggctggacttcgcctgtgatatctacatctgggcgcccttggccgggacttgtggggtccttctcctgtcactggttatcaccctttactgccggagggaccagaggctgccccccgatgcccacaagccccctgggggaggcagtttccggacccccatccaagaggagcaggccgacgcccactccaccctggccaagatcagagtgaagttcagcaggagcgcagacgcccccgcgtaccagcagggccagaaccagctctataacgagctcaatctaggacgaagagaggagtacgatgttttggacaagagacgtggccgggaccctgagatggggggaaagccgagaaggaagaaccctcaggaaggcctgtacaatgaactgcagaaagataagatggcggaggcctacagtgagattgggatgaaaggcgagcgccggaggggcaaggggcacgatggcctttaccagggtctcagtacagccaccaaggacacctacgacgcccttcacatgcaggccctgccccctcgc

SEQ ID NO: 2193 - DNA, 1470 bp, synthetic construct
  misc_feature 1..1470: note = Synthetic
  source 1..1470: mol_type = other DNA
atggccttaccagtgaccgccttgctcctgccgctggccttgctgctccacgccgccaggccggagattgttctgacccagagccctgatttccagagcgtgacccccaaggaaaaggtgacaatcacctgccgggccagccaaagcatcggctccagcctgcactggtatcagcagaagcccgaccagtccccaaagctgctgatcaaattcgcctctcagtcattcagcggcgtgccttcccggttcagcggaagcggcagcggcacagactttaccctgacaatccacagcctggaagccgaggacgccgctacatactactgccaccagagcggcagcctgccctggacattcggccagggcacgaaggtggagatcaagggcagcaccagcggcagcggcaagcccggctccggagagggcagcaccaagggccaagtgcagctggtggagagcgggggaggtgtcgtgcagcctggaagaagcctcagactgtcttgtgtggccagcggctttaccttcagctctaatgacatctactgggtgcggcaggcccctggcaagggcctggaatgggtcgctgtgatctggtacgacggcagcaacaaatactacgccgattctgtgaagggcagattcaccatcagcagagataattctaagaacaccctgtacctgcagatgaacagcctgagagccgaggataccgccgtgtactattgcgccaggggcgacaactggaacgacgagcaccattaccactactacatggacgtgtggggcaaaggcaccaccgtgaccgtggcggccgcaaccacgacgccagcgccgcggccaccaacaccggcgcccaccatcgcgtcgcagcccctgtccctgcgcccagaggcgtgccggccagcggcggggggcgcagtgcacacgagggggctggacttcgcctgtgatatctacatctgggcgcccttggccgggacttgtggggtccttctcctgtcactggttatcaccctttactgccggagggaccagaggctgccccccgatgcccacaagccccctgggggaggcagtttccggacccccatccaagaggagcaggccgacgcccactccaccctggccaagatcagagtgaagttcagcaggagcgcagacgcccccgcgtaccagcagggccagaaccagctctataacgagctcaatctaggacgaagagaggagtacgatgttttggacaagagacgtggccgggaccctgagatggggggaaagccgagaaggaagaaccctcaggaaggcctgtacaatgaactgcagaaagataagatggcggaggcctacagtgagattgggatgaaaggcgagcgccggaggggcaaggggcacgatggcctttaccagggtctcagtacagccaccaaggacacctacgacgcccttcacatgcaggccctgccccctcgc

SEQ ID NO: 2194 - DNA, 1464 bp, synthetic construct; identical to SEQ ID NO: 2080
  misc_feature 1..1464: note = Synthetic
  source 1..1464: mol_type = other DNA

SEQ ID NO: 2195 - DNA, 1470 bp, synthetic construct
  misc_feature 1..1470: note = Synthetic
  source 1..1470: mol_type = other DNA
atggccttaccagtgaccgccttgctcctgccgctggccttgctgctccacgccgccaggccggagatcgtgctgacacagtcccctgctaccctgagcctgagccctggcgagcgggccaccctgagctgcagagccagccagagcgtgtccagctactttgcctggtatcagcagaagcctggccaggccccacggctgctgatctacgacgcctctaatagagccacaggcatcccagctagattcagcggctccggctccggaaccgatttcaccctgaccatctctagcctcgagcctgaggacttcgccgtttactattgtcagcaaagaagcaactggcctctgacatttggcggaggcacaaaggtggaaatcaagggcagcaccagcggcagcggcaagcccggctccggagagggcagcaccaagggccaactgcagctgcaggagagcggccctggactggtgaagcccagcgagacactgagcctgacatgcaccgtgtccggaggctctatcagcagcagcagctactactggggatggattagacagccccccggcaagggcctggaatggatcggcagcctgtactacagcggcagcacctactacaaccccagcctgaagtctagagtgaccatcagcgtggacaccagcaagaaccagttcagcctgaaactgagctctgtcacagccgccgataccgccgtgtactactgcgccgctgtgcagctggaaaggcggggctacttctacatggacgtgtggggcaaaggcaccaccgtgacagtgtctagcgcggccgcaaccacgacgccagcgccgcggccaccaacaccggcgcccaccatcgcgtcgcagcccctgtccctgcgcccagaggcgtgccggccagcggcggggggcgcagtgcacacgagggggctggacttcgcctgtgatatctacatctgggcgcccttggccgggacttgtggggtccttctcctgtcactggttatcaccctttactgccggagggaccagaggctgccccccgatgcccacaagccccctgggggaggcagtttccggacccccatccaagaggagcaggccgacgcccactccaccctggccaagatcagagtgaagttcagcaggagcgcagacgcccccgcgtaccagcagggccagaaccagctctataacgagctcaatctaggacgaagagaggagtacgatgttttggacaagagacgtggccgggaccctgagatggggggaaagccgagaaggaagaaccctcaggaaggcctgtacaatgaactgcagaaagataagatggcggaggcctacagtgagattgggatgaaaggcgagcgccggaggggcaaggggcacgatggcctttaccagggtctcagtacagccaccaaggacacctacgacgcccttcacatgcaggccctgccccctcgc

SEQ ID NO: 2196 - DNA, 1476 bp, synthetic construct
  misc_feature 1..1476: note = Synthetic
  source 1..1476: mol_type = other DNA
atggccttaccagtgaccgccttgctcctgccgctggccttgctgctccacgccgccaggccgcagaccgtcgtgacccaggagcctagcttcagcgtgtccccaggcggaaccgtcacactgacatgcggcctcacaagcggcagcgtgtccaccagctactaccccaactggtaccagcagacacctggacaggcccctagaaccctgatctacagcaccaacatccggagcagcggagtgcccgacagattttctggcagcatcctgggcaacaaggccgctctgaccatcaccggcgctcaggccgacgacgagagcgactactactgcgtgctgtacatgggcagcggcatgttcatcttcggcagcggcacaaaggtgacagtgctgggcagcaccagcggcagcggcaagcccggctccggagagggcagcaccaagggccaagtgcaactggtggaaagcggcggcggcgttgtgcagcctggcagaagcctgcggctgtcatgcgccgccagcggttttaccttctctaattacggcatgcactgggtgcggcaggctcccggcaaaggcctggaatggatggccgtgatctggtccgatggccacaacaagtactacgccgatagcgtgaaaggcagattcaccattagcagagataattctaagaacaccctgtacctgcagatgaacagcctgcgcgccgaggacaccgccgtgtactattgtgccagagcccagctggagcggagatacttctactatatggacgtgtggggcaagggcaccaccgtgacagtgtctagcgcggccgcaaccacgacgccagcgccgcggccaccaacaccggcgcccaccatcgcgtcgcagcccctgtccctgcgcccagaggcgtgccggccagcggcggggggcgcagtgcacacgagggggctggacttcgcctgtgatatctacatctgggcgcccttggccgggacttgtggggtccttctcctgtcactggttatcaccctttactgccggagggaccagaggctgccccccgatgcccacaagccccctgggggaggcagtttccggacccccatccaagaggagcaggccgacgcccactccaccctggccaagatcagagtgaagttcagcaggagcgcagacgcccccgcgtaccagcagggccagaaccagctctataacgagctcaatctaggacgaagagaggagtacgatgttttggacaagagacgtggccgggaccctgagatggggggaaagccgagaaggaagaaccctcaggaaggcctgtacaatgaactgcagaaagataagatggcggaggcctacagtgagattgggatgaaaggcgagcgccggaggggcaaggggcacgatggcctttaccagggtctcagtacagccaccaaggacacctacgacgcccttcacatgcaggccctgccccctcgc

SEQ ID NO: 2197 - DNA, 1476 bp, synthetic construct
  misc_feature 1..1476: note = Synthetic
  source 1..1476: mol_type = other DNA
atggccttaccagtgaccgccttgctcctgccgctggccttgctgctccacgccgccaggccggacatccagatgacacagagccctagcagcctgtctgcttccgtgggcgatagagtgacaatcacctgccgggcctcccagggcatcagctcctggctggcctggtaccagcagaagcctgagaaggcccctaagagcctgatctacgccgcttctagcctgcagggaggcgtgccaagtcggttcagcggcagcggcagcggcacagacttcaccctgaccatttcttctctgcaacctgaggacttcgccacctactactgtcagcaatacgacagctacccctacacctttggccagggcaccaagctggaaatcaagtggcagcaccagcggcagcggcaagcccggctccggagagggcagcaccaagggccaggttcagctggtgcagagcggagccgaggtgaaaaagcccggcgcaagcgtgaaggtgtcttgcaaggcctccggatataccttcaccagctacgatatcaactgggtgcggcaggccacaggccagggtctcgaatggatgggctggatgatccccaattctggcgacacaggcagcgcccaaaagttccagggcagagtgacaatgaccagaaacaccagcatcggaacagcctacatggaactgagctccctgagaagcgaggataccgccgtgtactattgtgccagaggcggctactgcaacagcacctcctgctactactactacatggacgtgtggggcaaaggcacaaccgtcaccgtgagctcgcggccgcaaccacgacgccagcgccgcggccaccaacaccggcgcccaccatcgcgtcgcagcccctgtccctgcgcccagaggcgtgccggccagcggcggggggcgcagtgcacacgagggggctggacttcgcctgtgatatctacatctgggcgcccttggccgggacttgtggggtccttctcctgtcactggttatcaccctttactgccggagggaccagaggctgccccccgatgcccacaagccccctgggggaggcagtttccggacccccatccaagaggagcaggccgacgcccactccaccctggccaagatcagagtgaagttcagcaggagcgcagacgcccccgcgtaccagcagggccagaaccagctctataacgagctcaatctaggacgaagagaggagtacgatgttttggacaagagacgtggccgggaccctgagatggggggaaagccgagaaggaagaaccctcaggaaggcctgtacaatgaactgcagaaagataagatggcggaggcctacagtgagattgggatgaaaggcgagcgccggaggggcaaggggcacgatggcctttaccagggtctcagtacagccaccaaggacacctacgacgcccttcacatgcaggccctgccccctcgc

SEQ ID NO: 2198 - DNA, 1479 bp, synthetic construct
  misc_feature 1..1479: note = Synthetic
  source 1..1479: mol_type = other DNA
atggccttaccagtgaccgccttgctcctgccgctggccttgctgctccacgccgccaggccggatatccaggtcacacagagccctacctttctgagcgcttctgtgggcgaccgggtgaccatcacatgccgggccagccagggtattagcagctacctggcttggtaccagcagaagcccggcaaagcccctaagctgctgatctacggcgcttctaccctgcagtccggcgtgcccagcagattcagcggcagcggaagcggaacagagttcaccctgacaatctccagcctccaacctgaggacttcgccacatactattgtcagcaactgaatagctatccttggacattcggccagggcaccaaggtggaaatcaagggcagcaccagcggcagcggcaagcccggctccggagagggcagcaccaagggccaggttcaactggtgcagagcggcgccgaggtgaagaagcctggcgccagcgtgaaagtgtcctgcaaggccagcggatacacgtttaccagctacgacatcaactgggtcagacaggccaccggccagggcctggaatggatgggatggatgaaccccaacagcggcaacaccgtgtacgcccagaaattccagggcagagtgaccatgacacggaacaccagcatcagcaccgcctacatggaactgagctctctgagatccgaggatacagccgtgtactactgcgccagaggcggagatttctggagcggctaccacgactactactactacatggacgtgtggggcaagggcaccaccgtgaccgtgtcttctgcggccgcaaccacgacgccagcgccgcggccaccaacaccggcgcccaccatcgcgtcgcagcccctgtccctgcgcccagaggcgtgccggccagcggcggggggcgcagtgcacacgagggggctggacttcgcctgtgatatctacatctgggcgcccttggccgggacttgtggggtccttctcctgtcactggttatcaccctttactgccggagggaccagaggctgccccccgatgcccacaagccccctgggggaggcagtttccggacccccatccaagaggagcaggccgacgcccactccaccctggccaagatcagagtgaagttcagcaggagcgcagacgcccccgcgtaccagcagggccagaaccagctctataacgagctcaatctaggacgaagagaggagtacgatgttttggacaagagacgtggccgggaccctgagatggggggaaagccgagaaggaagaaccctcaggaaggcctgtacaatgaactgcagaaagataagatggcggaggcctacagtgagattgggatgaaaggcgagcgccggaggggcaaggggcacgatggcctttaccagggtctcagtacagccaccaaggacacctacgacgcccttcacatgcaggccctgccccctcgc

SEQ ID NO: 2199 - DNA, 1473 bp, synthetic construct
  misc_feature 1..1473: note = Synthetic
  source 1..1473: mol_type = other DNA
atggccttaccagtgaccgccttgctcctgccgctggccttgctgctccacgccgccaggccgagctacgagctgacccagcctccatctgtctccgtgtctccaggccaaacagccagcatcacctgcagcggagataagctgggcgacaagtacgcctgctggtaccagcagaagcccggccagagccctgtgctggtgatctaccaggacagcaagcggcctagcggcatccccgagagattcagcggctccaacagcggcaataccgctacactgacaatcagcggcacacaggccatggatgaggccgactactactgccaggcctgggacagctctaccgccgtgttcggcggcggaacccagctcaccgccctgggcagcaccagcggcagcggcaagcccggctccggagagggcagcaccaagggccaagtgcagctgcaggagagcggtcctggcctggttaagcctagcgagacactgtctctgacttgcaccgtgtccggcggatctatcagcagctactactggtcctggatcagacagcccgccggcaaaggcctggaatggattggaagaatctacaccagcggcagcaccaactacaaccccagcctgaagtccagagtgacaatgagcgtggacacatctaagaaccagtttagcctgaaactgagcagcgtgaccgccgccgatacagctgtgtactattgtgcccgggaagaataccagctgctgcctgccctgtactactattactacatggacgtgtggggcaagggcaccaccgtgaccgtgtccagcgcggccgcaaccacgacgccagcgccgcggccaccaacaccggcgcccaccatcgcgtcgcagcccctgtccctgcgcccagaggcgtgccggccagcggcggggggcgcagtgcacacgagggggctggacttcgcctgtgatatctacatctgggcgcccttggccgggacttgtggggtccttctcctgtcactggttatcaccctttactgccggagggaccagaggctgccccccgatgcccacaagccccctgggggaggcagtttccggacccccatccaagaggagcaggccgacgcccactccaccctggccaagatcagagtgaagttcagcaggagcgcagacgcccccgcgtaccagcagggccagaaccagctctataacgagctcaatctaggacgaagagaggagtacgatgttttggacaagagacgtggccgggaccctgagatggggggaaagccgagaaggaagaaccctcaggaaggcctgtacaatgaactgcagaaagataagatggcggaggcctacagtgagattgggatgaaaggcgagcgccggaggggcaaggggcacgatggcctttaccagggtctcagtacagccaccaaggacacctacgacgcccttcacatgcaggccctgccccctcgc

SEQ ID NO: 2200 - DNA, 1476 bp, synthetic construct
  misc_feature 1..1476: note = Synthetic
  source 1..1476: mol_type = other DNA
atggccttaccagtgaccgccttgctcctgccgctggccttgctgctccacgccgccaggccgcagaccgtggtcacccaggagcctagctttagcgtgtccccaggaggtacagtgaccctgacatgcggcctgactagcggatctgtgtccaccagctactaccccaactggtaccagcagacacctggccaggcccctagaaccctgatctacagcaccaatatccggagctccggcgtgcccgacagattcagcggaagcatcctgggcaacaaggccgctctgaccatcaccggcgcccaagctgatgacgagagcgactactattgtgtgctgtacatgggcagcggcatgttcatcttcggctctggcaccaaggtgaccgtgctgggcagcaccagcggcagcggcaagcccggctccggagagggcagcaccaagggccaagtgcagctggtggaatctggcggcggcgtggtgcagcctggtaggagcctgcggctgtcatgcgccgccacaggcttcaccttcagcagctacggcatgcactgggtcagacaggcccctggcaagggactggagtggatggtggtgatctggtccgatggccacaataaatactacgccgacagcgtgaagggcagatttaccattagccgggacaacagcaagaacaccctgtacctgcagatgaacagcctgagagctgaagataccgccgtgtactactgcgccagagcccagctcgagcggagatacttctactatatggacgtgtggggcaaaggcacaacagtgaccgtttcttctgcggccgcaaccacgacgccagcgccgcggccaccaacaccggcgcccaccatcgcgtcgcagcccctgtccctgcgcccagaggcgtgccggccagcggcggggggcgcagtgcacacgagggggctggacttcgcctgtgatatctacatctgggcgcccttggccgggacttgtggggtccttctcctgtcactggttatcaccctttactgccggagggaccagaggctgccccccgatgcccacaagccccctgggggaggcagtttccggacccccatccaagaggagcaggccgacgcccactccaccctggccaagatcagagtgaagttcagcaggagcgcagacgcccccgcgtaccagcagggccagaaccagctctataacgagctcaatctaggacgaagagaggagtacgatgttttggacaagagacgtggccgggaccctgagatggggggaaagccgagaaggaagaaccctcaggaaggcctgtacaatgaactgcagaaagataagatggcggaggcctacagtgagattgggatgaaaggcgagcgccggaggggcaaggggcacgatggcctttaccagggtctcagtacagccaccaaggacacctacgacgcccttcacatgcaggccctgccccctcgc

SEQ ID NO: 2201 - DNA, 1476 bp, synthetic construct
  misc_feature 1..1476: note = Synthetic
  source 1..1476: mol_type = other DNA
atggccttaccagtgaccgccttgctcctgccgctggccttgctgctccacgccgccaggccggagatcgtgctgacccagtctccagatttccagtccgtgacccctaaggaaaaggtgaccatcacatgcagagccagccagtccatcggctctagcctgcactggtaccagcagaagcccgaccagtctcctatgctgctgatcaaattcgcctctcagagcatcagcggcgtgcccagccggttcagcggcagcggctccggcaccgacttcacactgacaatcaacagtctggaggccgaggatgccgctgcttactactgtcaccagagcagcagcctgccttggacatttggccagggcaccaaggtggaaattaagggcagcaccagcggcagcggcaagcccggctccggagagggcagcaccaagggccaagtgcagctggtcgagagcggaggcggcgttgtgcaacctggaaggagcctgcggctgagctgcgccgcttctggcttcacctttactagctacgacatgcactgggtgcggcaggcccctggcaagggcctggaatgggtcaccatcatctggttcgacggcagcaacaagtactacgccgatagcgtgaagggcagattcaccatcagcagagataatagcaagaataccctgtacctgcagatgaactctctctccgccgaggacaccgccgtgtactactgcgccagaggcgacaactggaacgacagatactattattactactacatggacgtgtggggcaaaggcaccaccgtgacagtgtccagcgcggccgcaaccacgacgccagcgccgcggccaccaacaccggcgcccaccatcgcgtcgcagcccctgtccctgcgcccagaggcgtgccggccagcggcggggggcgcagtgcacacgagggggctggacttcgcctgtgatatctacatctgggcgcccttggccgggacttgtggggtccttctcctgtcactggttatcaccctttactgccggagggaccagaggctgccccccgatgcccacaagccccctgggggaggcagtttccggacccccatccaagaggagcaggccgacgcccactccaccctggccaagatcagagtgaagttcagcaggagcgcagacgcccccgcgtaccagcagggccagaaccagctctataacgagctcaatctaggacgaagagaggagtacgatgttttggacaagagacgtggccgggaccctgagatggggggaaagccgagaaggaagaaccctcaggaaggcctgtacaatgaactgcagaaagataagatggcggaggcctacagtgagattgggatgaaaggcgagcgccggaggggcaaggggcacgatggcctttaccagggtctcagtacagccaccaaggacacctacgacgcccttcacatgcaggccctgccccctcgc

SEQ ID NO: 2202 - DNA, 1491 bp, synthetic construct
  misc_feature 1..1491: note = Synthetic
  source 1..1491: mol_type = other DNA
atggccttaccagtgaccgccttgctcctgccgctggccttgctgctccacgccgccaggccggacatcgtgatgacccagcctcctctgagcagccctgtgacactgggccagccagctagcatcagctgtagatcttctcagtccctggtgcacagcgacggcaatacctacctgtcttggctgcagcagcggcctggccagccccccagactgctgatctacaaggtgtccaaccgcttcagcggcgtgccagacagattcagcggctctggcgccggcaccgacttcaccctgaagatcagcagagtcgaggccgaagatgtgggagtttactattgcacccaagctacacagttcccccacacctttggccagggcaccaagctcgagatcaagggcagcaccagcggcagcggcaagcccggctccggagagggcagcaccaagggccaagtgcagctggtccagagcggcgctgaggtgaagaaacctggcgcctctgtgaaagtgtcctgcaaggccagcggctacacctttaccagctacggcattagctgggtgcggcaggcccctggccagggtcttgagtggatgggctggatcagcgcctacaacggccacacagattatacacaaaagctgcagggcagagtgaccatgacaaccgataccagcaccaccacagcctacatggaactgagaagcctgagctctgccgacaccgccgtgtactactgcgtgcgggaagtggtgctgcctaccacagactactactacttctacatggacgtgtggggcaagggcaccacagtgacagtcagctccgcggccgcaaccacgacgccagcgccgcggccaccaacaccggcgcccaccatcgcgtcgcagcccctgtccctgcgcccagaggcgtgccggccagcggcggggggcgcagtgcacacgagggggctggacttcgcctgtgatatctacatctgggcgcccttggccgggacttgtggggtccttctcctgtcactggttatcaccctttactgccggagggaccagaggctgccccccgatgcccacaagccccctgggggaggcagtttccggacccccatccaagaggagcaggccgacgcccactccaccctggccaagatcagagtgaagttcagcaggagcgcagacgcccccgcgtaccagcagggccagaaccagctctataacgagctcaatctaggacgaagagaggagtacgatgttttggacaagagacgtggccgggaccctgagatggggggaaagccgagaaggaagaaccctcaggaaggcctgtacaatgaactgcagaaagataagatggcggaggcctacagtgagattgggatgaaaggcgagcgccggaggggcaaggggcacgatggcctttaccagggtctcagtacagccaccaaggacacctacgacgcccttcacatgcaggccctgccccctcgc

SEQ ID NO: 2203 - DNA, 1488 bp, synthetic construct
  misc_feature 1..1488: note = Synthetic
  source 1..1488: mol_type = other DNA
atggccttaccagtgaccgccttgctcctgccgctggccttgctgctccacgccgccaggccggatatccagatgacacagagcccaagcagcctgagcgccagcgtgggcgacagagtgaccatcacatgcagagccagccagggcatcagcagctggctggcttggtaccagcaaaagcctgagaaggcccctaagagcctcatctacgccgctagcagcctgcagtccggcgtgccaagcagattcagcggctctggctctggcacagacttcaccctgaccatttccagcctgcaacctgaggattttgccacatactattgtcagcagtacaacagctacccttacaccttcggccagggcaccaagctggaaatcaagggcagcaccagcggcagcggcaagcccggctccggagagggcagcaccaagggccaagttcagctggtgcagagcggagccgaggtgaaaaagcccggcgcttctgtgaaggtgtcctgcaaggtgtctggctacaccctgacagagctgagcatgcactgggtccggcaggcccctggcaaaggcctggaatggatgggaggcttcgaccccgaagacggggagacaatctacgcccagaaattccagggcagagtgacaatgaccgaggacaccagcaccgatacagcctacatggaactgtcttccctgcggagcgaggacaccgccgtgtactactgcgccaccggcagaatcaccatggtgcggggcgtcatcatcccctactactattactacatggacgtgtggggcaagggcaccaccgtgaccgtgtcctctgcggccgcaaccacgacgccagcgccgcggccaccaacaccggcgcccaccatcgcgtcgcagcccctgtccctgcgcccagaggcgtgccggccagcggcggggggcgcagtgcacacgagggggctggacttcgcctgtgatatctacatctgggcgcccttggccgggacttgtggggtccttctcctgtcactggttatcaccctttactgccggagggaccagaggctgccccccgatgcccacaagccccctgggggaggcagtttccggacccccatccaagaggagcaggccgacgcccactccaccctggccaagatcagagtgaagttcagcaggagcgcagacgcccccgcgtaccagcagggccagaaccagctctataacgagctcaatctaggacgaagagaggagtacgatgttttggacaagagacgtggccgggaccctgagatggggggaaagccgagaaggaagaaccctcaggaaggcctgtacaatgaactgcagaaagataagatggcggaggcctacagtgagattgggatgaaaggcgagcgccggaggggcaaggggcacgatggcctttaccagggtctcagtacagccaccaaggacacctacgacgcccttcacatgcaggccctgccccctcgc

SEQ ID NO: 2204 - DNA, 1482 bp, synthetic construct
  misc_feature 1..1482: note = Synthetic
  source 1..1482: mol_type = other DNA
atggccttaccagtgaccgccttgctcctgccgctggccttgctgctccacgccgccaggccggatatcgtgatgacccagacccccctgagcctgtccgtgaccccaggacaacctgccagcattagctgcaagagcagcaagtccctgctgcacagcgacggcaagacatacctgtactggtacctgcaaaagcccggccagcctcctcagctgctcatctacgaggtgtccaaccggttctctggcgtgcctgatagattcagcggaagcggcagcggaacagacttcacactgaagatcagcagagtcgaggccgaggacgtgggcgtttactactgcatgcagagcatccagttcccctggacattcggccagggcacaaaagtggaaatcaagggcagcaccagcggcagcggcaagcccggctccggagagggcagcaccaagggccaagtgcagctggtgcagagcggcaccgaggtgaagaagccaggcgcctctgtgaaagtgtcttgtaaagccagcggctacacctttaccaattacggcatcggctgggtgcggcaggcccctggacagggactggaatggatgggctggatcatcgcctacaacggctacacaaagtacgcccagatcctgcagggcagagtgacaatgaccaccgacaccagcaccaacaccgcttatatggaactgagaagcctgcggagcgacgacaccgccgtgtactattgcgccagacagcagctgggcggagattaccactactacatggacgtgtggggcaagggcaccaccgtcacagtgtccagcgcggccgcaaccacgacgccagcgccgcggccaccaacaccggcgcccaccatcgcgtcgcagcccctgtccctgcgcccagaggcgtgccggccagcggcggggggcgcagtgcacacgagggggctggacttcgcctgtgatatctacatctgggcgcccttggccgggacttgtggggtccttctcctgtcactggttatcaccctttactgccggagggaccagaggctgccccccgatgcccacaagccccctgggggaggcagtttccggacccccatccaagaggagcaggccgacgcccactccaccctggccaagatcagagtgaagttcagcaggagcgcagacgcccccgcgtaccagcagggccagaaccagctctataacgagctcaatctaggacgaagagaggagtacgatgttttggacaagagacgtggccgggaccctgagatggggggaaagccgagaaggaagaaccctcaggaaggcctgtacaatgaactgcagaaagataagatggcggaggcctacagtgagattgggatgaaaggcgagcgccggaggggcaaggggcacgatggcctttaccagggtctcagtacagccaccaaggacacctacgacgcccttcacatgcaggccctgccccctcgc

SEQ ID NO: 2205 - DNA, 1482 bp, synthetic construct
  misc_feature 1..1482: note = Synthetic
  source 1..1482: mol_type = other DNA
atggccttaccagtgaccgccttgctcctgccgctggccttgctgctccacgccgccaggccggacatcgtgatgacccagacccctctgagcctgagcgtgacacctggacagcccgcttctattagctgtaaaagcagcaagtccctgctgcacagcgacggcaagacctacctgtactggtacctgcagaaacctggccagcctccacagctgctgatctacgaggtgtctacaagattcagcggagtgcctgatagattcagcggcagcggatctggaacagatttcaccctgaagatcagccgggttgaggccgaggacgtgggcgtgtactattgcatgcagtccatccagttcccctggaccttcggccagggcacaaaggtggaaatcaagggcagcaccagcggcagcggcaagcccggctccggagagggcagcaccaagggccaagtgcagctggtgcaaagcggcaccgaggtgaaaaagcccggcgcctctgtgaaggtctcctgcaaggccagcggatacacatttacaaattacggcatcggctgggtgcggcaggcccctggccagggcctggaatggatgggctggatcatcgcctacaacggctacaccaagtacgcccagatcctgcaaggcagagtcaccatgaccacagacaccagcaccaacaccgcttatatggaactgagaagcctgcggagcgacgatacagccgtgtactactgcgccagacagcagctcggcggcgactaccactactacatggacgtgtggggcaagggcaccaccgtgaccgtgtccagcgcggccgcaaccacgacgccagcgccgcggccaccaacaccggcgcccaccatcgcgtcgcagcccctgtccctgcgcccagaggcgtgccggccagcggcggggggcgcagtgcacacgagggggctggacttcgcctgtgatatctacatctgggcgcccttggccgggacttgtggggtccttctcctgtcactggttatcaccctttactgccggagggaccagaggctgccccccgatgcccacaagccccctgggggaggcagtttccggacccccatccaagaggagcaggccgacgcccactccaccctggccaagatcagagtgaagttcagcaggagcgcagacgcccccgcgtaccagcagggccagaaccagctctataacgagctcaatctaggacgaagagaggagtacgatgttttggacaagagacgtggccgggaccctgagatggggggaaagccgagaaggaagaaccctcaggaaggcctgtacaatgaactgcagaaagataagatggcggaggcctacagtgagattgggatgaaaggcgagcgccggaggggcaaggggcacgatggcctttaccagggtctcagtacagccaccaaggacacctacgacgcccttcacatgcaggccctgccccctcgc

SEQ ID NO: 2206 - DNA, 1476 bp, synthetic construct
  misc_feature 1..1476: note = Synthetic
  source 1..1476: mol_type = other DNA
atggccttaccagtgaccgccttgctcctgccgctggccttgctgctccacgccgccaggccggatatccagatgacacagtcccctagctctctgtctgcttctgttggagatagagtgaccatcacctgccgggccagccagggcatcagcaactggctggcctggtaccagcagaagcccgagaaggcccctaagagcctgatctacgccgctagctccctccagggcggcgtgccatctagattcagcggctcaggcagcggaaccgacttcaccctgaccatcagctccctgcaacctgaggattttgccacatactactgccagcaatacgacagctacccctacaccttcggccagggcaccaagctggaaatcaagggcagcaccagcggcagcggcaagcccggctccggagagggcagcaccaagggccaagtgcagctggtgcagagcggaacagaggtgaaaaagcctggcgccagcgtgaaggtgtcttgtaaaaccagcggttatacattcacctcctacgacattaactgggtgcggcaggccaccggccagggcctggaatggatgggctggatgaaccccatctccggcgacacaggcagcgcccagaagttccagggaagagtgaccatgaccagaaataccagcatcggcaccgcctacatggaactgagcagcctgcggagcgaggacaccgccgtgtactactgcgccagaggcggatactgtagcagtacatcttgctactactattacatggacgtgtggggcaagggcacaacagtgacagtcagcagcgcggccgcaaccacgacgccagcgccgcggccaccaacaccggcgcccaccatcgcgtcgcagcccctgtccctgcgcccagaggcgtgccggccagcggcggggggcgcagtgcacacgagggggctggacttcgcctgtgatatctacatctgggcgcccttggccgggacttgtggggtccttctcctgtcactggttatcaccctttactgccggagggaccagaggctgccccccgatgcccacaagccccctgggggaggcagtttccggacccccatccaagaggagcaggccgacgcccactccaccctggccaagatcagagtgaagttcagcaggagcgcagacgcccccgcgtaccagcagggccagaaccagctctataacgagctcaatctaggacgaagagaggagtacgatgttttggacaagagacgtggccgggaccctgagatggggggaaagccgagaaggaagaaccctcaggaaggcctgtacaatgaactgcagaaagataagatggcggaggcctacagtgagattgggatgaaaggcgagcgccggaggggcaaggggcacgatggcctttaccagggtctcagtacagccaccaaggacacctacgacgcccttcacatgcaggccctgccccctcgc

SEQ ID NO: 2207 - DNA, 1476 bp, synthetic construct
  misc_feature 1..1476: note = Synthetic
  source 1..1476: mol_type = other DNA
atggccttaccagtgaccgccttgctcctgccgctggccttgctgctccacgccgccaggccggacatccagatgacacagagccctagcagcctgagcgcctctgtgggcgaccgggtgaccatcacctgcagagccagccagggcatcagcagctggctggcctggtaccagcagaagcccgagaaggcccctaagtccctgatctacgccgccagctccctccagggcggagtgccatctagattcagcggctctggatctggcacagacttcaccctgaccatcagctctctgcagcctgaggattttgccacatactactgccagcaatacgacagctacccctacacattcggccaaggcacaaagctggaaatcaagggcagcaccagcggcagcggcaagcccggctccggagagggcagcaccaagggccaagtgcagctggtgcagagcggcgccgaggtgaagaagcctggcgcttccgtgaaggtgtcctgtaaagcttctggatacaccttcacctcttatgatattaactgggtgcggcaggccaccggccagggcctggaatggatgggctggatgatccccaacagcggcgataccggctccgcccagaaattccagggaagagttaccatgacaagaaacaccagcatcagcaccgcctacatggaactgagcagcctgcggagcgaggacaccgctgtgtactactgcgccagaggcggctactgtaatagcacaagctgctactattactacatggacgtgtggggcaagggcaccacagtgacagtcagctccgcggccgcaaccacgacgccagcgccgcggccaccaacaccggcgcccaccatcgcgtcgcagcccctgtccctgcgcccagaggcgtgccggccagcggcggggggcgcagtgcacacgagggggctggacttcgcctgtgatatctacatctgggcgcccttggccgggacttgtggggtccttctcctgtcactggttatcaccctttactgccggagggaccagaggctgccccccgatgcccacaagccccctgggggaggcagtttccggacccccatccaagaggagcaggccgacgcccactccaccctggccaagatcagagtgaagttcagcaggagcgcagacgcccccgcgtaccagcagggccagaaccagctctataacgagctcaatctaggacgaagagaggagtacgatgttttggacaagagacgtggccgggaccctgagatggggggaaagccgagaaggaagaaccctcaggaaggcctgtacaatgaactgcagaaagataagatggcggaggcctacagtgagattgggatgaaaggcgagcgccggaggggcaaggggcacgatggcctttaccagggtctcagtacagccaccaaggacacctacgacgcccttcacatgcaggccctgccccctcgc

SEQ ID NO: 2208 - DNA, 1479 bp, synthetic construct
  misc_feature 1..1479: note = Synthetic
  source 1..1479: mol_type = other DNA
atggccttaccagtgaccgccttgctcctgccgctggccttgctgctccacgccgccaggccggagatcgtgctgacccaaagccccggcaccctgagcctgagccctggcgagagagccaccctgtcttgtagagcctctcagagcgtttctagctcctacctggcctggtaccagcagaagcccggacaggcccctagactgctgatctacggcgccagcagcagagctacaggcatccccgatagattcagcgacagcggctcaggcacagacttcaccctgacaattagccggctggaacccgaggatttcgccgtgtactattgccagcactacggcagctctcctccaagaatcaccttcggccctggcaccaaggtggacatcaaaggcagcaccagcggcagcggcaagcccggctccggagagggcagcaccaagggcgaggtgcagctgctggaaagcggaggcggcctggtgcaacctggaggttctctgcggctgagctgcgccgctagcggcttcacatttagcagctacgtgatgaactgggtgcggcaggctcctggaaagggcctggaatgggtctccagcgtgtccggcagcggcaacaacagcttttacgccgatagcgtgaagggcagattcaccatcagccgggacaacagcaagaacaccctctacctgcagatgaattctctgagagccgaggacaccgccgtgtactactgcgccagcaggtcctcttcttacctgtactactactattacatggacgtgtggggcaaaggcacaacagtgaccgtctccagcgcggccgcaaccacgacgccagcgccgcggccaccaacaccggcgcccaccatcgcgtcgcagcccctgtccctgcgcccagaggcgtgccggccagcggcggggggcgcagtgcacacgagggggctggacttcgcctgtgatatctacatctgggcgcccttggccgggacttgtggggtccttctcctgtcactggttatcaccctttactgccggagggaccagaggctgccccccgatgcccacaagccccctgggggaggcagtttccggacccccatccaagaggagcaggccgacgcccactccaccctggccaagatcagagtgaagttcagcaggagcgcagacgcccccgcgtaccagcagggccagaaccagctctataacgagctcaatctaggacgaagagaggagtacgatgttttggacaagagacgtggccgggaccctgagatggggggaaagccgagaaggaagaaccctcaggaaggcctgtacaatgaactgcagaaagataagatggcggaggcctacagtgagattgggatgaaaggcgagcgccggaggggcaaggggcacgatggcctttaccagggtctcagtacagccaccaaggacacctacgacgcccttcacatgcaggccctgccccctcgc

SEQ ID NO: 2209 - protein, 717 aa, synthetic construct
  REGION 1..717: note = Synthetic
MALPVTALLLPLALLLHAARPEIVLTQSPDFQSVTPKEKVTITCRASQTIGSSLHWYQQKPDQSPKLLIKHASQSFSGVPSRFSGSGSGTDFTLTVNSLEAEDAATYYCHQSSSLPWTFGQGTKVEIKGSTSGSGKPGSGEGSTKGQVQLVESGGGVVQPGRSLRLSCAASGFTFSSHDMHWVRQAPGKGLDWVAVIWSDGNKKYYVDSAKGRFTISRDNSKNTVYLQMNSLRAEDTAIYYCARGDNWNDEHSYYYYMDVWGKGTTVTVSSAAATTTPAPRPPTPAPTIASQPLSLRPEACRPAAGGAVHTRGLDFACDIYIWAPLAGTCGVLLLSLVITLYCRRDQRLPPDAHKPPGGGSFRTPIQEEQADAHSTLAKIRVKFSRSADAPAYQQGQNQLYNELNLGRREEYDVLDKRRGRDPEMGGKPRRKNPQEGLYNELQKDKMAEAYSEIGMKGERRRGKGHDGLYQGLSTATKDTYDALHMQALPPRGSGEGRGSLLTCGDVEENPGPMALPVTALLLPLALLLHAARPNWVNVISDLKKIEDLIQSMHIDATLYTESDVHPSCKVTAMKCFLLELQVISLESGDASIHDTVENLIILANNSLSSNGNVTESGCKECEELEEKNIKEFLQSFVHIVQMFINTSTTTPAPRPPTPAPTIASQPLSLRPEACRPAAGGAVHTRGLDFACDIYIWAPLAGTCGVLLLSLVITLYC

SEQ ID NO: 2210 - protein, 717 aa, synthetic construct
  REGION 1..717: note = Synthetic
MALPVTALLLPLALLLHAARPEIVLTQSPDFQSVTPKEKVTITCRASQTIGSSLHWYQQKPDQSPKLLIKHASQSFSGVPSRFSGSGSGTDFTLTVNSLEAEDAATYYCHQSSSLPWTFGQGTKVEIKGSTSGSGKPGSGEGSTKGQVQLVESGGGVVQPGRSLRLSCAASGFTFSSHDMHWVRQAPGKGLDWVAVIWSDGNNKYYADSAKGRFTISRDNSKNTVYLQMNSLRAEDTAIYYCARGDNWNDEHSYYYYMDVWGKGTTVTVSSAAATTTPAPRPPTPAPTIASQPLSLRPEACRPAAGGAVHTRGLDFACDIYIWAPLAGTCGVLLLSLVITLYCRRDQRLPPDAHKPPGGGSFRTPIQEEQADAHSTLAKIRVKFSRSADAPAYQQGQNQLYNELNLGRREEYDVLDKRRGRDPEMGGKPRRKNPQEGLYNELQKDKMAEAYSEIGMKGERRRGKGHDGLYQGLSTATKDTYDALHMQALPPRGSGEGRGSLLTCGDVEENPGPMALPVTALLLPLALLLHAARPNWVNVISDLKKIEDLIQSMHIDATLYTESDVHPSCKVTAMKCFLLELQVISLESGDASIHDTVENLIILANNSLSSNGNVTESGCKECEELEEKNIKEFLQSFVHIVQMFINTSTTTPAPRPPTPAPTIASQPLSLRPEACRPAAGGAVHTRGLDFACDIYIWAPLAGTCGVLLLSLVITLYC

SEQ ID NO: 2211 - protein, 716 aa, synthetic construct
  REGION 1..716: note = Synthetic
MALPVTALLLPLALLLHAARPDIQMTQSPSSLSASVGDRVTITCRASQSISNYLNWYHQKPGKAPKLLIYAASSLESGVPSRFSGSGSGTDFTLTISSLQPEDFATYYCQQSYSNPLTFGGGTKVESKGSTSGSGKPGSGEGSTKGQLQLVQSGAEVKKPGASVKVSCKASGYTFTNYGISWLRQAPGQGLEWMGWISGYNDNTHYAQKFQGRVTMTTDTSTTTAYMELRNLRSDDTAVYYCARDGIAARPVYYYYMDVWGKGTTVTVSSAAATTTPAPRPPTPAPTIASQPLSLRPEACRPAAGGAVHTRGLDFACDIYIWAPLAGTCGVLLLSLVITLYCRRDQRLPPDAHKPPGGGSFRTPIQEEQADAHSTLAKIRVKFSRSADAPAYQQGQNQLYNELNLGRREEYDVLDKRRGRDPEMGGKPRRKNPQEGLYNELQKDKMAEAYSEIGMKGERRRGKGHDGLYQGLSTATKDTYDALHMQALPPRGSGEGRGSLLTCGDVEENPGPMALPVTALLLPLALLLHAARPNWVNVISDLKKIEDLIQSMHIDATLYTESDVHPSCKVTAMKCFLLELQVISLESGDASIHDTVENLIILANNSLSSNGNVTESGCKECEELEEKNIKEFLQSFVHIVQMFINTSTTTPAPRPPTPAPTIASQPLSLRPEACRPAAGGAVHTRGLDFACDIYIWAPLAGTCGVLLLSLVITLYC

SEQ ID NO: 2212 - protein, 717 aa, synthetic construct
  REGION 1..717: note = Synthetic
MALPVTALLLPLALLLHAARPEIVLTQSPDFQSVTPKEKVTITCRASQSIGSSLHWYQQKPDQSPKLLIKFASQSFSGVPSRFSGSGSGTDFTLTIHSLEAEDAATYYCHQSGSLPWTFGQGTKVEIKGSTSGSGKPGSGEGSTKGQVQLVESGGGVVQPGRSLRLSCVASGFTFSSNDIYWVRQAPGKGLEWVAVIWYDGSNKYYADSVKGRFTISRDNSKNTLYLQMNSLRAEDTAVYYCARGDNWNDEHHYHYYMDVWGKGTTVTVSSAAATTTPAPRPPTPAPTIASQPLSLRPEACRPAAGGAVHTRGLDFACDIYIWAPLAGTCGVLLLSLVITLYCRRDQRLPPDAHKPPGGGSFRTPIQEEQADAHSTLAKIRVKFSRSADAPAYQQGQNQLYNELNLGRREEYDVLDKRRGRDPEMGGKPRRKNPQEGLYNELQKDKMAEAYSEIGMKGERRRGKGHDGLYQGLSTATKDTYDALHMQALPPRGSGEGRGSLLTCGDVEENPGPMALPVTALLLPLALLLHAARPNWVNVISDLKKIEDLIQSMHIDATLYTESDVHPSCKVTAMKCFLLELQVISLESGDASIHDTVENLIILANNSLSSNGNVTESGCKECEELEEKNIKEFLQSFVHIVQMFINTSTTTPAPRPPTPAPTIASQPLSLRPEACRPAAGGAVHTRGLDFACDIYIWAPLAGTCGVLLLSLVITLYC

SEQ ID NO: 2213 - protein, 710 aa, synthetic construct
  REGION 1..710: note = Synthetic
MALPVTALLLPLALLLHAARPVTQEPSFSVSPGGTVTLTCGLSSGSVSTSYYPSWYQQTPGQAPRTLIYSTNIRSSGVPDRFSGSILGNKAALTITGAQADDESDYYCVLYMGSDIVVFGGGTKLTVLGSTSGSGKPGSGEGSTKGQVQLVESGGGVVQPGRSLRLSCAASGFTFSSYGMHWVRQAPGKGLEWVAVISYDGSNKYYADSVKGRFTISRDNSKTTLYLQMNSLRAEDTAVYYCARDHYYYYMDVWGKGTTVTVSSAAATTTPAPRPPTPAPTIASQPLSLRPEACRPAAGGAVHTRGLDFACDIYIWAPLAGTCGVLLLSLVITLYCRRDQRLPPDAHKPPGGGSFRTPIQEEQADAHSTLAKIRVKFSRSADAPAYQQGQNQLYNELNLGRREEYDVLDKRRGRDPEMGGKPRRKNPQEGLYNELQKDKMAEAYSEIGMKGERRRGKGHDGLYQGLSTATKDTYDALHMQALPPRGSGEGRGSLLTCGDVEENPGPMALPVTALLLPLALLLHAARPNWVNVISDLKKIEDLIQSMHIDATLYTESDVHPSCKVTAMKCFLLELQVISLESGDASIHDTVENLIILANNSLSSNGNVTESGCKECEELEEKNIKEFLQSFVHIVQMFINTSTTTPAPRPPTPAPTIASQPLSLRPEACRPAAGGAVHTRGLDFACDIYIWAPLAGTCGVLLLSLVITLYC

SEQ ID NO: 2214 - protein, 715 aa, synthetic construct
  REGION 1..715: note = Synthetic
MALPVTALLLPLALLLHAARPEIVLTQSPATLSLSPGERATLSCRASQSVSSYFAWYQQKPGQAPRLLIYDASNRATGIPARFSGSGSGTDFTLTISSLEPEDFAVYYCQQRSNWPLTFGGGTKVEIKGSTSGSGKPGSGEGSTKGQLQLQESGPGLVKPSETLSLTCTVSGGSISSSSYYWGWIRQPPGKGLEWIGSLYYSGSTYYNPSLKSRVTISVDTSKNQFSLKLSSVTAADTAVYYCAAVQLERRGYFYMDVWGKGTTVTVSSAAATTTPAPRPPTPAPTIASQPLSLRPEACRPAAGGAVHTRGLDFACDIYIWAPLAGTCGVLLLSLVITLYCRRDQRLPPDAHKPPGGGSFRTPIQEEQADAHSTLAKIRVKFSRSADAPAYQQGQNQLYNELNLGRREEYDVLDKRRGRDPEMGGKPRRKNPQEGLYNELQKDKMAEAYSEIGMKGERRRGKGHDGLYQGLSTATKDTYDALHMQALPPRGSGEGRGSLLTCGDVEENPGPMALPVTALLLPLALLLHAARPNWVNVISDLKKIEDLIQSMHIDATLYTESDVHPSCKVTAMKCFLLELQVISLESGDASIHDTVENLIILANNSLSSNGNVTESGCKECEELEEKNIKEFLQSFVHIVQMFINTSTTTPAPRPPTPAPTIASQPLSLRPEACRPAAGGAVHTRGLDFACDIYIWAPLAGTCGVLLLSLVITLYC

SEQ ID NO: 2215 - protein, 717 aa, synthetic construct
  REGION 1..717: note = Synthetic
MALPVTALLLPLALLLHAARPQTVVTQEPSFSVSPGGTVTLTCGLTSGSVSTSYYPNWYQQTPGQAPRTLIYSTNIRSSGVPDRFSGSILGNKAALTITGAQADDESDYYCVLYMGSGMFIFGSGTKVTVLGSTSGSGKPGSGEGSTKGQVQLVESGGGVVQPGRSLRLSCAASGFTFSNYGMHWVRQAPGKGLEWMAVIWSDGHNKYYADSVKGRFTISRDNSKNTLYLQMNSLRAEDTAVYYCARAQLERRYFYYMDVWGKGTTVTVSSAAATTTPAPRPPTPAPTIASQPLSLRPEACRPAAGGAVHTRGLDFACDIYIWAPLAGTCGVLLLSLVITLYCRRDQRLPPDAHKPPGGGSFRTPIQEEQADAHSTLAKIRVKFSRSADAPAYQQGQNQLYNELNLGRREEYDVLDKRRGRDPEMGGKPRRKNPQEGLYNELQKDKMAEAYSEIGMKGERRRGKGHDGLYQGLSTATKDTYDALHMQALPPRGSGEGRGSLLTCGDVEENPGPMALPVTALLLPLALLLHAARPNWVNVISDLKKIEDLIQSMHIDATLYTESDVHPSCKVTAMKCFLLELQVISLESGDASIHDTVENLIILANNSLSSNGNVTESGCKECEELEEKNIKEFLQSFVHIVQMFINTSTTTPAPRPPTPAPTIASQPLSLRPEACRPAAGGAVHTRGLDFACDIYIWAPLAGTCGVLLLSLVITLYC

SEQ ID NO: 2216 - protein, 717 aa, synthetic construct
  REGION 1..717: note = Synthetic
MALPVTALLLPLALLLHAARPDIQMTQSPSSLSASVGDRVTITCRASQGISSWLAWYQQKPEKAPKSLIYAASSLQGGVPSRFSGSGSGTDFTLTISSLQPEDFATYYCQQYDSYPYTFGQGTKLEIKGSTSGSGKPGSGEGSTKGQVQLVQSGAEVKKPGASVKVSCKASGYTFTSYDINWVRQATGQGLEWMGWMIPNSGDTGSAQKFQGRVTMTRNTSIGTAYMELSSLRSEDTAVYYCARGGYCNSTSCYYYYMDVWGKGTTVTVSSAAATTTPAPRPPTPAPTIASQPLSLRPEACRPAAGGAVHTRGLDFACDIYIWAPLAGTCGVLLLSLVITLYCRRDQRLPPDAHKPPGGGSFRTPIQEEQADAHSTLAKIRVKFSRSADAPAYQQGQNQLYNELNLGRREEYDVLDKRRGRDPEMGGKPRRKNPQEGLYNELQKDKMAEAYSEIGMKGERRRGKGHDGLYQGLSTATKDTYDALHMQALPPRGSGEGRGSLLTCGDVEENPGPMALPVTALLLPLALLLHAARPNWVNVISDLKKIEDLIQSMHIDATLYTESDVHPSCKVTAMKCFLLELQVISLESGDASIHDTVENLIILANNSLSSNGNVTESGCKECEELEEKNIKEFLQSFVHIVQMFINTSTTTPAPRPPTPAPTIASQPLSLRPEACRPAAGGAVHTRGLDFACDIYIWAPLAGTCGVLLLSLVITLYC

SEQ ID NO: 2217 - protein, 718 aa, synthetic construct
  REGION 1..718: note = Synthetic
MALPVTALLLPLALLLHAARPDIQVTQSPTFLSASVGDRVTITCRASQGISSYLAWYQQKPGKAPKLLIYGASTLQSGVPSRFSGSGSGTEFTLTISSLQPEDFATYYCQQLNSYPWTFGQGTKVEIKGSTSGSGKPGSGEGSTKGQVQLVQSGAEVKKPGASVKVSCKASGYTFTSYDINWVRQATGQGLEWMGWMNPNSGNTVYAQKFQGRVTMTRNTSISTAYMELSSLRSEDTAVYYCARGGDFWSGYHDYYYYMDVWGKGTTVTVSSAAATTTPAPRPPTPAPTIASQPLSLRPEACRPAAGGAVHTRGLDFACDIYIWAPLAGTCGVLLLSLVITLYCRRDQRLPPDAHKPPGGGSFRTPIQEEQADAHSTLAKIRVKFSRSADAPAYQQGQNQLYNELNLGRREEYDVLDKRRGRDPEMGGKPRRKNPQEGLYNELQKDKMAEAYSEIGMKGERRRGKGHDGLYQGLSTATKDTYDALHMQALPPRGSGEGRGSLLTCGDVEENPGPMALPVTALLLPLALLLHAARPNWVNVISDLKKIEDLIQSMHIDATLYTESDVHPSCKVTAMKCFLLELQVISLESGDASIHDTVENLIILANNSLSSNGNVTESGCKECEELEEKNIKEFLQSFVHIVQMFINTSTTTPAPRPPTPAPTIASQPLSLRPEACRPAAGGAVHTRGLDFACDIYIWAPLAGTCGVLLLSLVITLYC

SEQ ID NO: 2218 - protein, 716 aa, synthetic construct
  REGION 1..716: note = Synthetic
MALPVTALLLPLALLLHAARPSYELTQPPSVSVSPGQTASITCSGDKLGDKYACWYQQKPGQSPVLVIYQDSKRPSGIPERFSGSNSGNTATLTISGTQAMDEADYYCQAWDSSTAVFGGGTQLTALGSTSGSGKPGSGEGSTKGQVQLQESGPGLVKPSETLSLTCTVSGGSISSYYWSWIRQPAGKGLEWIGRIYTSGSTNYNPSLKSRVTMSVDTSKNQFSLKLSSVTAADTAVYYCAREEYQLLPALYYYYYMDVWGKGTTVTVSSAAATTTPAPRPPTPAPTIASQPLSLRPEACRPAAGGAVHTRGLDFACDIYIWAPLAGTCGVLLLSLVITLYCRRDQRLPPDAHKPPGGGSFRTPIQEEQADAHSTLAKIRVKFSRSADAPAYQQGQNQLYNELNLGRREEYDVLDKRRGRDPEMGGKPRRKNPQEGLYNELQKDKMAEAYSEIGMKGERRRGKGHDGLYQGLSTATKDTYDALHMQALPPRGSGEGRGSLLTCGDVEENPGPMALPVTALLLPLALLLHAARPNWVNVISDLKKIEDLIQSMHIDATLYTESDVHPSCKVTAMKCFLLELQVISLESGDASIHDTVENLIILANNSLSSNGNVTESGCKECEELEEKNIKEFLQSFVHIVQMFINTSTTTPAPRPPTPAPTIASQPLSLRPEACRPAAGGAVHTRGLDFACDIYIWAPLAGTCGVLLLSLVITLYC

SEQ ID NO: 2219 - protein, 717 aa, synthetic construct
  REGION 1..717: note = Synthetic
MALPVTALLLPLALLLHAARPQTVVTQEPSFSVSPGGTVTLTCGLTSGSVSTSYYPNWYQQTPGQAPRTLIYSTNIRSSGVPDRFSGSILGNKAALTITGAQADDESDYYCVLYMGSGMFIFGSGTKVTVLGSTSGSGKPGSGEGSTKGQVQLVESGGGVVQPGRSLRLSCAATGFTFSSYGMHWVRQAPGKGLEWMVVIWSDGHNKYYADSVKGRFTISRDNSKNTLYLQMNSLRAEDTAVYYCARAQLERRYFYYMDVWGKGTTVTVSSAAATTTPAPRPPTPAPTIASQPLSLRPEACRPAAGGAVHTRGLDFACDIYIWAPLAGTCGVLLLSLVITLYCRRDQRLPPDAHKPPGGGSFRTPIQEEQADAHSTLAKIRVKFSRSADAPAYQQGQNQLYNELNLGRREEYDVLDKRRGRDPEMGGKPRRKNPQEGLYNELQKDKMAEAYSEIGMKGERRRGKGHDGLYQGLSTATKDTYDALHMQALPPRGSGEGRGSLLTCGDVEENPGPMALPVTALLLPLALLLHAARPNWVNVISDLKKIEDLIQSMHIDATLYTESDVHPSCKVTAMKCFLLELQVISLESGDASIHDTVENLIILANNSLSSNGNVTESGCKECEELEEKNIKEFLQSFVHIVQMFINTSTTTPAPRPPTPAPTIASQPLSLRPEACRPAAGGAVHTRGLDFACDIYIWAPLAGTCGVLLLSLVITLYC

SEQ ID NO: 2220 - protein, 717 aa, synthetic construct
  REGION 1..717: note = Synthetic
MALPVTALLLPLALLLHAARPEIVLTQSPDFQSVTPKEKVTITCRASQSIGSSLHWYQQKPDQSPMLLIKFASQSISGVPSRFSGSGSGTDFTLTINSLEAEDAAAYYCHQSSSLPWTFGQGTKVEIKGSTSGSGKPGSGEGSTKGQVQLVESGGGVVQPGRSLRLSCAASGFTFTSYDMHWVRQAPGKGLEWVTIIWFDGSNKYYADSVKGRFTISRDNSKNTLYLQMNSLSAEDTAVYYCARGDNWNDRYYYYYYMDVWGKGTTVTVSSAAATTTPAPRPPTPAPTIASQPLSLRPEACRPAAGGAVHTRGLDFACDIYIWAPLAGTCGVLLLSLVITLYCRRDQRLPPDAHKPPGGGSFRTPIQEEQADAHSTLAKIRVKFSRSADAPAYQQGQNQLYNELNLGRREEYDVLDKRRGRDPEMGGKPRRKNPQEGLYNELQKDKMAEAYSEIGMKGERRRGKGHDGLYQGLSTATKDTYDALHMQALPPRGSGEGRGSLLTCGDVEENPGPMALPVTALLLPLALLLHAARPNWVNVISDLKKIEDLIQSMHIDATLYTESDVHPSCKVTAMKCFLLELQVISLESGDASIHDTVENLIILANNSLSSNGNVTESGCKECEELEEKNIKEFLQSFVHIVQMFINTSTTTPAPRPPTPAPTIASQPLSLRPEACRPAAGGAVHTRGLDFACDIYIWAPLAGTCGVLLLSLVITLYC

SEQ ID NO: 2221 - protein, 722 aa, synthetic construct
  REGION 1..722: note = Synthetic
MALPVTALLLPLALLLHAARPDIVMTQPPLSSPVTLGQPASISCRSSQSLVHSDGNTYLSWLQQRPGQPPRLLIYKVSNRFSGVPDRFSGSGAGTDFTLKISRVEAEDVGVYYCTQATQFPHTFGQGTKLEIKGSTSGSGKPGSGEGSTKGQVQLVQSGAEVKKPGASVKVSCKASGYTFTSYGISWVRQAPGQGLEWMGWISAYNGHTDYTQKLQGRVTMTTDTSTTTAYMELRSLSSADTAVYYCVREVVLPTTDYYYFYMDVWGKGTTVTVSSAAATTTPAPRPPTPAPTIASQPLSLRPEACRPAAGGAVHTRGLDFACDIYIWAPLAGTCGVLLLSLVITLYCRRDQRLPPDAHKPPGGGSFRTPIQEEQADAHSTLAKIRVKFSRSADAPAYQQGQNQLYNELNLGRREEYDVLDKRRGRDPEMGGKPRRKNPQEGLYNELQKDKMAEAYSEIGMKGERRRGKGHDGLYQGLSTATKDTYDALHMQALPPRGSGEGRGSLLTCGDVEENPGPMALPVTALLLPLALLLHAARPNWVNVISDLKKIEDLIQSMHIDATLYTESDVHPSCKVTAMKCFLLELQVISLESGDASIHDTVENLIILANNSLSSNGNVTESGCKECEELEEKNIKEFLQSFVHIVQMFINTSTTTPAPRPPTPAPTIASQPLSLRPEACRPAAGGAVHTRGLDFACDIYIWAPLAGTCGVLLLSLVITLYC

SEQ ID NO: 2222 - protein, 721 aa, synthetic construct
  REGION 1..721: note = Synthetic
MALPVTALLLPLALLLHAARPDIQMTQSPSSLSASVGDRVTITCRASQGISSWLAWYQQKPEKAPKSLIYAASSLQSGVPSRFSGSGSGTDFTLTISSLQPEDFATYYCQQYNSYPYTFGQGTKLEIKGSTSGSGKPGSGEGSTKGQVQLVQSGAEVKKPGASVKVSCKVSGYTLTELSMHWVRQAPGKGLEWMGGFDPEDGETIYAQKFQGRVTMTEDTSTDTAYMELSSLRSEDTAVYYCATGRITMVRGVIIPYYYYYMDVWGKGTTVTVSSAAATTTPAPRPPTPAPTIASQPLSLRPEACRPAAGGAVHTRGLDFACDIYIWAPLAGTCGVLLLSLVITLYCRRDQRLPPDAHKPPGGGSFRTPIQEEQADAHSTLAKIRVKFSRSADAPAYQQGQNQLYNELNLGRREEYDVLDKRRGRDPEMGGKPRRKNPQEGLYNELQKDKMAEAYSEIGMKGERRRGKGHDGLYQGLSTATKDTYDALHMQALPPRGSGEGRGSLLTCGDVEENPGPMALPVTALLLPLALLLHAARPNWVNVISDLKKIEDLIQSMHIDATLYTESDVHPSCKVTAMKCFLLELQVISLESGDASIHDTVENLIILANNSLSSNGNVTESGCKECEELEEKNIKEFLQSFVHIVQMFINTSTTTPAPRPPTPAPTIASQPLSLRPEACRPAAGGAVHTRGLDFACDIYIWAPLAGTCGVLLLSLVITLYC

SEQ ID NO: 2223 - protein, 719 aa, synthetic construct
  REGION 1..719: note = Synthetic
MALPVTALLLPLALLLHAARPDIVMTQTPLSLSVTPGQPASISCKSSKSLLHSDGKTYLYWYLQKPGQPPQLLIYEVSNRFSGVPDRFSGSGSGTDFTLKISRVEAEDVGVYYCMQSIQFPWTFGQGTKVEIKGSTSGSGKPGSGEGSTKGQVQLVQSGTEVKKPGASVKVSCKASGYTFTNYGIGWVRQAPGQGLEWMGWIIAYNGYTKYAQILQGRVTMTTDTSTNTAYMELRSLRSDDTAVYYCARQQLGGDYHYYMDVWGKGTTVTVSSAAATTTPAPRPPTPAPTIASQPLSLRPEACRPAAGGAVHTRGLDFACDIYIWAPLAGTCGVLLLSLVITLYCRRDQRLPPDAHKPPGGGSFRTPIQEEQADAHSTLAKIRVKFSRSADAPAYQQGQNQLYNELNLGRREEYDVLDKRRGRDPEMGGKPRRKNPQEGLYNELQKDKMAEAYSEIGMKGERRRGKGHDGLYQGLSTATKDTYDALHMQALPPRGSGEGRGSLLTCGDVEENPGPMALPVTALLLPLALLLHAARPNWVNVISDLKKIEDLIQSMHIDATLYTESDVHPSCKVTAMKCFLLELQVISLESGDASIHDTVENLIILANNSLSSNGNVTESGCKECEELEEKNIKEFLQSFVHIVQMFINTSTTTPAPRPPTPAPTIASQPLSLRPEACRPAAGGAVHTRGLDFACDIYIWAPLAGTCGVLLLSLVITLYC

SEQ ID NO: 2224 - protein, 719 aa, synthetic construct
  REGION 1..719: note = Synthetic
MALPVTALLLPLALLLHAARPDIVMTQTPLSLSVTPGQPASISCKSSKSLLHSDGKTYLYWYLQKPGQPPQLLIYEVSTRFSGVPDRFSGSGSGTDFTLKISRVEAEDVGVYYCMQSIQFPWTFGQGTKVEIKGSTSGSGKPGSGEGSTKGQVQLVQSGTEVKKPGASVKVSCKASGYTFTNYGIGWVRQAPGQGLEWMGWIIAYNGYTKYAQILQGRVTMTTDTSTNTAYMELRSLRSDDTAVYYCARQQLGGDYHYYMDVWGKGTTVTVSSAAATTTPAPRPPTPAPTIASQPLSLRPEACRPAAGGAVHTRGLDFACDIYIWAPLAGTCGVLLLSLVITLYCRRDQRLPPDAHKPPGGGSFRTPIQEEQADAHSTLAKIRVKFSRSADAPAYQQGQNQLYNELNLGRREEYDVLDKRRGRDPEMGGKPRRKNPQEGLYNELQKDKMAEAYSEIGMKGERRRGKGHDGLYQGLSTATKDTYDALHMQALPPRGSGEGRGSLLTCGDVEENPGPMALPVTALLLPLALLLHAARPNWVNVISDLKKIEDLIQSMHIDATLYTESDVHPSCKVTAMKCFLLELQVISLESGDASIHDTVENLIILANNSLSSNGNVTESGCKECEELEEKNIKEFLQSFVHIVQMFINTSTTTPAPRPPTPAPTIASQPLSLRPEACRPAAGGAVHTRGLDFACDIYIWAPLAGTCGVLLLSLVITLYC

SEQ ID NO: 2225 - protein, 717 aa, synthetic construct
  REGION 1..717: note = Synthetic
MALPVTALLLPLALLLHAARPDIQMTQSPSSLSASVGDRVTITCRASQGISNWLAWYQQKPEKAPKSLIYAASSLQGGVPSRFSGSGSGTDFTLTISSLQPEDFATYYCQQYDSYPYTFGQGTKLEIKGSTSGSGKPGSGEGSTKGQVQLVQSGTEVKKPGASVKVSCKTSGYTFTSYDINWVRQATGQGLEWMGWMNPISGDTGSAQKFQGRVTMTRNTSIGTAYMELSSLRSEDTAVYYCARGGYCSSTSCYYYYMDVWGKGTTVTVSSAAATTTPAPRPPTPAPTIASQPLSLRPEACRPAAGGAVHTRGLDFACDIYIWAPLAGTCGVLLLSLVITLYCRRDQRLPPDAHKPPGGGSFRTPIQEEQADAHSTLAKIRVKFSRSADAPAYQQGQNQLYNELNLGRREEYDVLDKRRGRDPEMGGKPRRKNPQEGLYNELQKDKMAEAYSEIGMKGERRRGKGHDGLYQGLSTATKDTYDALHMQALPPRGSGEGRGSLLTCGDVEENPGPMALPVTALLLPLALLLHAARPNWVNVISDLKKIEDLIQSMHIDATLYTESDVHPSCKVTAMKCFLLELQVISLESGDASIHDTVENLIILANNSLSSNGNVTESGCKECEELEEKNIKEFLQSFVHIVQMFINTSTTTPAPRPPTPAPTIASQPLSLRPEACRPAAGGAVHTRGLDFACDIYIWAPLAGTCGVLLLSLVITLYC

SEQ ID NO: 2226 - protein, 717 aa, synthetic construct
  REGION 1..717: note = Synthetic
MALPVTALLLPLALLLHAARPDIQMTQSPSSLSASVGDRVTITCRASQGISSWLAWYQQKPEKAPKSLIYAASSLQGGVPSRFSGSGSGTDFTLTISSLQPEDFATYYCQQYDSYPYTFGQGTKLEIKGSTSGSGKPGSGEGSTKGQVQLVQSGAEVKKPGASVKVSCKASGYTFTSYDINWVRQATGQGLEWMGWMIPNSGDTGSAQKFQGRVTMTRNTSISTAYMELSSLRSEDTAVYYCARGGYCNSTSCYYYYMDVWGKGTTVTVSSAAATTTPAPRPPTPAPTIASQPLSLRPEACRPAAGGAVHTRGLDFACDIYIWAPLAGTCGVLLLSLVITLYCRRDQRLPPDAHKPPGGGSFRTPIQEEQADAHSTLAKIRVKFSRSADAPAYQQGQNQLYNELNLGRREEYDVLDKRRGRDPEMGGKPRRKNPQEGLYNELQKDKMAEAYSEIGMKGERRRGKGHDGLYQGLSTATKDTYDALHMQALPPRGSGEGRGSLLTCGDVEENPGPMALPVTALLLPLALLLHAARPNWVNVISDLKKIEDLIQSMHIDATLYTESDVHPSCKVTAMKCFLLELQVISLESGDASIHDTVENLIILANNSLSSNGNVTESGCKECEELEEKNIKEFLQSFVHIVQMFINTSTTTPAPRPPTPAPTIASQPLSLRPEACRPAAGGAVHTRGLDFACDIYIWAPLAGTCGVLLLSLVITLYC

SEQ ID NO: 2227 - protein, 718 aa, synthetic construct
  REGION 1..718: note = Synthetic
MALPVTALLLPLALLLHAARPEIVLTQSPGTLSLSPGERATLSCRASQSVSSSYLAWYQQKPGQAPRLLIYGASSRATGIPDRFSDSGSGTDFTLTISRLEPEDFAVYYCQHYGSSPPRITFGPGTKVDIKGSTSGSGKPGSGEGSTKGEVQLLESGGGLVQPGGSLRLSCAASGFTFSSYVMNWVRQAPGKGLEWVSSVSGSGNNSFYADSVKGRFTISRDNSKNTLYLQMNSLRAEDTAVYYCASRSSSYLYYYYYMDVWGKGTTVTVSSAAATTTPAPRPPTPAPTIASQPLSLRPEACRPAAGGAVHTRGLDFACDIYIWAPLAGTCGVLLLSLVITLYCRRDQRLPPDAHKPPGGGSFRTPIQEEQADAHSTLAKIRVKFSRSADAPAYQQGQNQLYNELNLGRREEYDVLDKRRGRDPEMGGKPRRKNPQEGLYNELQKDKMAEAYSEIGMKGERRRGKGHDGLYQGLSTATKDTYDALHMQALPPRGSGEGRGSLLTCGDVEENPGPMALPVTALLLPLALLLHAARPNWVNVISDLKKIEDLIQSMHIDATLYTESDVHPSCKVTAMKCFLLELQVISLESGDASIHDTVENLIILANNSLSSNGNVTESGCKECEELEEKNIKEFLQSFVHIVQMFINTSTTTPAPRPPTPAPTIASQPLSLRPEACRPAAGGAVHTRGLDFACDIYIWAPLAGTCGVLLLSLVITLYC

SEQ ID NO: 2228 - DNA, 2154 bp, synthetic construct
  misc_feature 1..2154: note = Synthetic
  source 1..2154: mol_type = other DNA
atggccttaccagtgaccgccttgctcctgccgctggccttgctgctccacgccgccaggccggaaattgtgctgactcagtctccagactttcagtctgtgactccaaaggagaaagtcaccatcacctgccgggccagtcagaccattggcagtagcttacactggtaccagcagaaaccagatcagtctccaaagctcctcatcaagcatgcttcccagtccttctcaggggtcccctcgaggttcagtggcagtggatctgggacagatttcaccctcaccgtcaatagcctggaagctgaagatgctgcaacgtattactgtcatcagagtagtagtttaccgtggacgttcggccaagggaccaaggtggaaatcaaaggcagcaccagcggcagcggcaagcccggctccggagagggcagcaccaagggccaggtgcagctggtggagtctgggggaggcgtggtccagcctgggaggtccctgagactttcctgtgcagcgtctggattcaccttcagcagtcatgacatgcactgggtccgccaggctccaggcaaggggctggactgggtggcagttatatggagtgatggaaataaaaaatactatgtagactccgcgaagggccggttcaccatctccagagacaattccaagaacacggtgtatctgcaaatgaacagcctgagagccgaggacacggctatatattactgtgcgagaggtgacaactggaacgacgaacactcctactattactacatggacgtctggggcaaggggaccacggtcaccgtctcctcagcggccgcaaccacgacgccagcgccgcggccaccaacaccggcgcccaccatcgcgtcgcagcccctgtccctgcgcccagaggcgtgccggccagcggcggggggcgcagtgcacacgagggggctggacttcgcctgtgatatctacatctgggcgcccttggccgggacttgtggggtccttctcctgtcactggttatcaccctttactgccggagggaccagaggctgccccccgatgcccacaagccccctgggggaggcagtttccggacccccatccaagaggagcaggccgacgcccactccaccctggccaagatcagagtgaagttcagcaggagcgcagacgcccccgcgtaccagcagggccagaaccagctctataacgagctcaatctaggacgaagagaggagtacgatgttttggacaagagacgtggccgggaccctgagatggggggaaagccgagaaggaagaaccctcaggaaggcctgtacaatgaactgcagaaagataagatggcggaggcctacagtgagattgggatgaaaggcgagcgccggaggggcaaggggcacgatggcctttaccagggtctcagtacagccaccaaggacacctacgacgcccttcacatgcaggccctgccccctcgcggctctggcgagggaaggggttccctgcttacttgcggcgacgtcgaagagaatcccggtccgatggccctcccagtaactgccctccttttgcccctcgcactccttcttcatgccgctcgccccaactgggtcaacgtgattagcgatttgaagaaaatcgaggaccttatacagtctatgcatattgacgctacactgtatactgagagtgatgtacacccgtcctgtaaggtaacggccatgaaatgctttcttctggagctccaggtcatcagcttggagtctggggacgcaagcatccacgatacggttgaaaacctcatcatccttgcgaacaactctctctcatctaatggaaacgttacagagagtgggtgtaaggagtgcgaagagttggaagaaaaaaacatcaaagaatttcttcaatccttcgttcacatagtgcaaatgttcattaacacgtccactaccacacccgccccgaggccacctacgccggcaccgactatcgccagtcaacccctctctctgcgccccgaggcttgccggcctgcggctggtggggcggtccacacccggggcctggattttgcgtgcgatatatacatctgggcacctcttgccggcacctgcggagtgctgcttctctcactcgttattacgctgtactgctaa

SEQ ID NO: 2229 - DNA, 2154 bp, synthetic construct
  misc_feature 1..2154: note = Synthetic
  source 1..2154: mol_type = other DNA
atggccttaccagtgaccgccttgctcctgccgctggccttgctgctccacgccgccaggccggaaattgtgctgactcagtctccagactttcagtctgtgactccaaaggagaaagtcaccatcacctgccgggccagtcagaccattggcagtagcttacactggtaccagcagaaaccagatcagtctccaaagctcctcatcaagcatgcttcccagtccttctcaggggtcccctcgaggttcagtggcagtggatctgggacagatttcaccctcaccgtcaatagcctggaagctgaagatgctgcaacgtattactgtcatcagagtagtagtttaccgtggacgttcggccaagggaccaaggtggaaatcaaaggcagcaccagcggcagcggcaagcccggctccggagagggcagcaccaagggccaggtgcagctggtggagtctgggggaggcgtggtccagcctgggaggtccctgagactttcctgtgcagcgtctggattcaccttcagtagtcatgacatgcactgggtccgccaggctccaggcaaggggctggactgggtggcagttatatggagtgatggaaataataaatactatgcagactccgcgaagggccggttcaccatctccagagacaattccaagaacacggtgtatctgcaaatgaacagcctgagagccgaggacacggctatatattactgtgcgagaggtgacaactggaacgacgaacactcctactattactacatggacgtctggggcaaggggaccacggtcaccgtctcctcagcggccgcaaccacgacgccagcgccgcggccaccaacaccggcgcccaccatcgcgtcgcagcccctgtccctgcgcccagaggcgtgccggccagcggcggggggcgcagtgcacacgagggggctggacttcgcctgtgatatctacatctgggcgcccttggccgggacttgtggggtccttctcctgtcactggttatcaccctttactgccggagggaccagaggctgccccccgatgcccacaagccccctgggggaggcagtttccggacccccatccaagaggagcaggccgacgcccactccaccctggccaagatcagagtgaagttcagcaggagcgcagacgcccccgcgtaccagcagggccagaaccagctctataacgagctcaatctaggacgaagagaggagtacgatgttttggacaagagacgtggccgggaccctgagatggggggaaagccgagaaggaagaaccctcaggaaggcctgtacaatgaactgcagaaagataagatggcggaggcctacagtgagattgggatgaaaggcgagcgccggaggggcaaggggcacgatggcctttaccagggtctcagtacagccaccaaggacacctacgacgcccttcacatgcaggccctgccccctcgcggctctggcgagggaaggggttccctgcttacttgcggcgacgtcgaagagaatcccggtccgatggccctcccagtaactgccctccttttgcccctcgcactccttcttcatgccgctcgccccaactgggtcaacgtgattagcgatttgaagaaaatcgaggaccttatacagtctatgcatattgacgctacactgtatactgagagtgatgtacacccgtcctgtaaggtaacggccatgaaatgctttcttctggagctccaggtcatcagcttggagtctggggacgcaagcatccacgatacggttgaaaacctcatcatccttgcgaacaactctctctcatctaatggaaacgttacagagagtgggtgtaaggagtgcgaagagttggaagaaaaaaacatcaaagaatttcttcaatccttcgttcacatagtgcaaatgttcattaacacgtccactaccacacccgccccgaggccacctacgccggcaccgactatcgccagtcaacccctctctctgcgccccgaggcttgccggcctgcggctggtggggcggtccacacccggggcctggattttgcgtgcgatatatacatctgggcacctcttgccggcacctgcggagtgctgcttctctcactcgttattacgctgtactgctaa

SEQ ID NO: 2230 - DNA, 2151 bp, synthetic construct
  misc_feature 1..2151: note = Synthetic
  source 1..2151: mol_type = other DNA
atggccttaccagtgaccgccttgctcctgccgctggccttgctgctccacgccgccaggccggacatacagatgacccagtctccatcctccctgtctgcatctgtaggagacagagtcaccatcacttgccgggcaagccagagcattagcaactatttaaattggtatcaccagaaaccagggaaagcccctaagctcctgatctatgctgcatccagtttggaaagtggggtcccatcaaggttcagtggcagtggatctgggacagatttcactctcaccatcagcagtctgcaacctgaagattttgcaacttactactgtcaacagagttacagtaacccgctcactttcggcggagggaccaaggtggagagcaaaggcagcaccagcggcagcggcaagcccggctccggagagggcagcaccaagggccagcttcagctggtgcagtctggagctgaggtgaagaagcctggggcctcagtgaaggtctcctgcaaggcttctggttacacctttaccaactatggtatcagctggttgcgacaggcccctggacaagggcttgagtggatgggatggatcagtggttacaatgataacacacactatgcacagaagttccagggcagagtcaccatgaccacagacacatccacgaccacagcctacatggaactgaggaacctgagatctgacgacacggccgtgtattactgtgcgagagatgggatagcagctcgtccagtctactactactacatggacgtctggggcaaagggaccacggtcaccgtctcctcagcggccgcaaccacgacgccagcgccgcggccaccaacaccggcgcccaccatcgcgtcgcagcccctgtccctgcgcccagaggcgtgccggccagcggcggggggcgcagtgcacacgagggggctggacttcgcctgtgatatctacatctgggcgcccttggccgggacttgtggggtccttctcctgtcactggttatcaccctttactgccggagggaccagaggctgccccccgatgcccacaagccccctgggggaggcagtttccggacccccatccaagaggagcaggccgacgcccactccaccctggccaagatcagagtgaagttcagcaggagcgcagacgcccccgcgtaccagcagggccagaaccagctctataacgagctcaatctaggacgaagagaggagtacgatgttttggacaagagacgtggccgggaccctgagatggggggaaagccgagaaggaagaaccctcaggaaggcctgtacaatgaactgcagaaagataagatggcggaggcctacagtgagattgggatgaaaggcgagcgccggaggggcaaggggcacgatggcctttaccagggtctcagtacagccaccaaggacacctacgacgcccttcacatgcaggccctgccccctcgcggctctggcgagggaaggggttccctgcttacttgcggcgacgtcgaagagaatcccggtccgatggccctcccagtaactgccctccttttgcccctcgcactccttcttcatgccgctcgccccaactgggtcaacgtgattagcgatttgaagaaaatcgaggaccttatacagtctatgcatattgacgctacactgtatactgagagtgatgtacacccgtcctgtaaggtaacggccatgaaatgctttcttctggagctccaggtcatcagcttggagtctggggacgcaagcatccacgatacggttgaaaacctcatcatccttgcgaacaactctctctcatctaatggaaacgttacagagagtgggtgtaaggagtgcgaagagttggaagaaaaaaacatcaaagaatttcttcaatccttcgttcacatagtgcaaatgttcattaacacgtccactaccacacccgccccgaggccacctacgccggcaccgactatcgccagtcaacccctctctctgcgccccgaggcttgccggcctgcggctggtggggcggtccacacccggggcctggattttgcgtgcgatatatacatctgggcacctcttgccggcacctgcggagtgctgcttctctcactcgttattacgctgtactgctaa

SEQ ID NO: 2231 - DNA, 2154 bp, synthetic construct
  misc_feature 1..2154: note = Synthetic
  source 1..2154: mol_type = other DNA
atggccttaccagtgaccgccttgctcctgccgctggccttgctgctccacgccgccaggccggaaattgtgctgactcagtctccagactttcagtctgtgactccaaaggagaaagtcaccatcacctgccgggccagtcagagcattggtagtagcttacactggtaccagcagaaaccagatcagtctccaaagctcctcatcaagtttgcttcccagtccttctcaggggtcccctcgaggttcagtggcagtggatctgggacagatttcaccctcaccatccatagcctggaagctgaagatgctgcaacgtattactgtcatcagagtggtagtttaccgtggacgttcggccaagggaccaaggtggaaatcaaaggcagcaccagcggcagcggcaagcccggctccggagagggcagcaccaagggccaggtgcagctggtggagtctgggggaggcgtggtccagcctgggaggtccctgagactctcctgtgtagcgtctggattcaccttcagtagcaatgacatatactgggtccgccaggccccaggcaaggggctggagtgggtggcagttatatggtatgatggaagtaataaatactatgcagactccgtgaagggccgattcaccatctccagagacaattccaagaacacgctgtatctgcaaatgaacagcctgagagccgaggacacggctgtgtattactgtgcgagaggtgacaactggaacgacgaacaccactaccactactacatggacgtctggggcaaagggaccacggtcaccgtctcctcagcggccgcaaccacgacgccagcgccgcggccaccaacaccggcgcccaccatcgcgtcgcagcccctgtccctgcgcccagaggcgtgccggccagcggcggggggcgcagtgcacacgagggggctggacttcgcctgtgatatctacatctgggcgcccttggccgggacttgtggggtccttctcctgtcactggttatcaccctttactgccggagggaccagaggctgccccccgatgcccacaagccccctgggggaggcagtttccggacccccatccaagaggagcaggccgacgcccactccaccctggccaagatcagagtgaagttcagcaggagcgcagacgcccccgcgtaccagcagggccagaaccagctctataacgagctcaatctaggacgaagagaggagtacgatgttttggacaagagacgtggccgggaccctgagatggggggaaagccgagaaggaagaaccctcaggaaggcctgtacaatgaactgcagaaagataagatggcggaggcctacagtgagattgggatgaaaggcgagcgccggaggggcaaggggcacgatggcctttaccagggtctcagtacagccaccaaggacacctacgacgcccttcacatgcaggccctgccccctcgcggctctggcgagggaaggggttccctgcttacttgcggcgacgtcgaagagaatcccggtccgatggccctcccagtaactgccctccttttgcccctcgcactccttcttcatgccgctcgccccaactgggtcaacgtgattagcgatttgaagaaaatcgaggaccttatacagtctatgcatattgacgctacactgtatactgagagtgatgtacacccgtcctgtaaggtaacggccatgaaatgctttcttctggagctccaggtcatcagcttggagtctggggacgcaagcatccacgatacggttgaaaacctcatcatccttgcgaacaactctctctcatctaatggaaacgttacagagagtgggtgtaaggagtgcgaagagttggaagaaaaaaacatcaaagaatttcttcaatccttcgttcacatagtgcaaatgttcattaacacgtccactaccacacccgccccgaggccacctacgccggcaccgactatcgccagtcaacccctctctctgcgccccgaggcttgccggcctgcggctggtggggcggtccacacccggggcctggattttgcgtgcgatatatacatctgggcacctcttgccggcacctgcggagtgctgcttctctcactcgttattacgctgtactgctaa

SEQ ID NO: 2232 - DNA, 2134 bp, synthetic construct
  misc_feature 1..2134: note = Synthetic
  source 1..2134: mol_type = other DNA
atggccttaccagtgaccgccttgctcctgccgctggccttgctgctccacgccgccaggccgggtgacccaggagccatcgttctcagtgtcccctggagggacagtcacactcacttgtggcttgagctctggctcagtctctactagttactaccccagctggtaccagcagaccccaggccaggctccacgcacgctcatctacagcacaaacattcgctcttctggggtccctgatcgcttctctggctccatccttgggaacaaagctgccctcaccatcacgggggcccaggcagatgatgaatctgattattactgtgtgctgtatatgggtagtgacattgtggtattcggcggagggaccaagctgaccgtcctaggcagcaccagcggcagcggcaagcccggctccggagagggcagcaccaagggccaggtgcagttggtggagtctgggggaggcgtggtccagcctgggaggtccctgagactctcctgtgcagcctctggattcaccttcagtagctatggcatgcactgggtccgccaggctccaggcaaggggctggagtgggtggcagttatatcatatgatggaagtaataaatactatgcagactccgtgaagggccgattcaccatctccagggacaattccaagaccacgctgtatctgcaaatgaacagcctgagagctgaggacacggctgtgtattactgtgcgagagatcactactactactacatggacgtctggggcaaagggaccacggtcaccgtctcctcagcggccgcaaccacgacgccagcgccgcggccaccaacaccggcgcccaccatcgcgtcgcagcccctgtccctgcgcccagaggcgtgccggccagcggcggggggcgcagtgcacacgagggggctggacttcgcctgtgatatctacatctgggcgcccttggccgggacttgtggggtccttctcctgtcactggttatcaccctttactgccggagggaccagaggctgccccccgatgcccacaagccccctgggggaggcagtttccggacccccatccaagaggagcaggccgacgcccactccaccctggccaagatcagagtgaagttcagcaggagcgcagacgcccccgcgtaccagcagggccagaaccagctctataacgagctcaatctaggacgaagagaggagtacgatgttttggacaagagacgtggccgggaccctgagatggggggaaagccgagaaggaagaaccctcaggaaggcctgtacaatgaactgcagaaagataagatggcggaggcctacagtgagattgggatgaaaggcgagcgccggaggggcaaggggcacgatggcctttaccagggtctcagtacagccaccaaggacacctacgacgcccttcacatgcaggccctgccccctcgcggctctggcgagggaaggggttccctgcttacttgcggcgacgtcgaagagaatcccggtccgatggccctcccagtaactgccctccttttgcccctcgcactccttcttcatgccgctcgccccaactgggtcaacgtgattagcgatttgaagaaaatcgaggaccttatacagtctatgcatattgacgctacactgtatactgagagtgatgtacacccgtcctgtaaggtaacggccatgaaatgctttcttctggagctccaggtcatcagcttggagtctggggacgcaagcatccacgatacggttgaaaacctcatcatccttgcgaacaactctctctcatctaatggaaacgttacagagagtgggtgtaaggagtgcgaagagttggaagaaaaaaacatcaaagaatttcttcaatccttcgttcacatagtgcaaatgttcattaacacgtccactaccacacccgccccgaggccacctacgccggcaccgactatcgccagtcaacccctctctctgcgccccgaggcttgccggcctgcggctggtggggcggtccacacccggggcctggattttgcgtgcgatatatacatctgggcacctcttgccggcacctgcggagtgctgcttctctcactcgttattacgctgtactgctaa

SEQ ID NO: 2233 - DNA, 2148 bp, synthetic construct
  misc_feature 1..2148: note = Synthetic
  source 1..2148: mol_type = other DNA
atggccttaccagtgaccgccttgctcctgccgctggccttgctgctccacgccgccaggccggaaattgtgttgacacagtctccagccaccctgtctttgtctccaggggaaagagccaccctctcctgcagggccagtcagagtgttagcagctactttgcctggtaccaacagaaacctggccaggctcccaggctcctcatctatgatgcatccaacagggccactggcatcccagccaggttcagtggcagtgggtctgggacagacttcactctcaccatcagcagcctggagcctgaagattttgcagtttattactgtcagcagcgtagcaactggcctctcactttcggcggagggaccaaggtggagatcaaaggcagcaccagcggcagcggcaagcccggctccggagagggcagcaccaagggccaactgcagctgcaggagtcgggcccaggactggtgaagccttcggagaccctgtccctcacctgcactgtctctggtggctccatcagcagtagtagttactactggggctggatccgccagcccccagggaaggggctggagtggattgggagtctctattatagtgggagcacctactacaacccgtccctcaagagtcgagtcaccatatccgttgacacgtccaagaaccagttctccctgaagctgagctctgtgaccgccgcagacacggctgtgtattactgtgcggccgtacaactggaacgacgtgggtacttctacatggacgtctggggcaaagggaccacggtcaccgtctcctcagcggccgcaaccacgacgccagcgccgcggccaccaacaccggcgcccaccatcgcgtcgcagcccctgtccctgcgcccagaggcgtgccggccagcggcggggggcgcagtgcacacgagggggctggacttcgcctgtgatatctacatctgggcgcccttggccgggacttgtggggtccttctcctgtcactggttatcaccctttactgccggagggaccagaggctgccccccgatgcccacaagccccctgggggaggcagtttccggacccccatccaagaggagcaggccgacgcccactccaccctggccaagatcagagtgaagttcagcaggagcgcagacgcccccgcgtaccagcagggccagaaccagctctataacgagctcaatctaggacgaagagaggagtacgatgttttggacaagagacgtggccgggaccctgagatggggggaaagccgagaaggaagaaccctcaggaaggcctgtacaatgaactgcagaaagataagatggcggaggcctacagtgagattgggatgaaaggcgagcgccggaggggcaaggggcacgatggcctttaccagggtctcagtacagccaccaaggacacctacgacgcccttcacatgcaggccctgccccctcgcggctctggcgagggaaggggttccctgcttacttgcggcgacgtcgaagagaatcccggtccgatggccctcccagtaactgccctccttttgcccctcgcactccttcttcatgccgctcgccccaactgggtcaacgtgattagcgatttgaagaaaatcgaggaccttatacagtctatgcatattgacgctacactgtatactgagagtgatgtacacccgtcctgtaaggtaacggccatgaaatgctttcttctggagctccaggtcatcagcttggagtctggggacgcaagcatccacgatacggttgaaaacctcatcatccttgcgaacaactctctctcatctaatggaaacgttacagagagtgggtgtaaggagtgcgaagagttggaagaaaaaaacatcaaagaatttcttcaatccttcgttcacatagtgcaaatgttcattaacacgtccactaccacacccgccccgaggccacctacgccggcaccgactatcgccagtcaacccctctctctgcgccccgaggcttgccggcctgcggctggtggggcggtccacacccggggcctggattttgcgtgcgatatatacatctgggcacctcttgccggcacctgcggagtgctgcttctctcactcgttattacgctgtactgctaa

SEQ ID NO: 2234 - DNA, 2154 bp, synthetic construct
  misc_feature 1..2154: note = Synthetic
  source 1..2154: mol_type = other DNA
atggccttaccagtgaccgccttgctcctgccgctggccttgctgctccacgccgccaggccgcagactgtagtgacccaggaaccatcgttctcagtgtcccctggagggacagtcacactcacttgtggcttgacctctggctcagtctctactagttactaccccaactggtaccagcagaccccaggccaggctccacgcacgctcatctatagtacaaatattcgctcttctggggtccctgatcgcttctctggctccatccttgggaacaaagctgccctcaccatcacgggggcccaggcagatgatgaatctgattattactgtgtgctgtatatgggtagtggcatgtttattttcggcagtggaaccaaggtcactgtcctaggcagcaccagcggcagcggcaagcccggctccggagagggcagcaccaagggccaggtgcagctggtggagtctgggggaggcgtggtccagcctgggaggtccctgagactctcctgtgcagcatctggattcaccttcagtaactatggcatgcactgggtccgccaggctccaggcaaggggctggagtggatggcagttatatggtctgatggacataataaatactatgcagactccgtgaagggccgattcaccatctccagagacaattccaagaacacgctgtatctgcaaatgaacagcctgagagccgaggacacggctgtgtattactgtgcgagggcacaattggaacgacggtacttctactacatggacgtctggggcaaagggaccacggtcaccgtctcctcagcggccgcaaccacgacgccagcgccgcggccaccaacaccggcgcccaccatcgcgtcgcagcccctgtccctgcgcccagaggcgtgccggccagcggcggggggcgcagtgcacacgagggggctggacttcgcctgtgatatctacatctgggcgcccttggccgggacttgtggggtccttctcctgtcactggttatcaccctttactgccggagggaccagaggctgccccccgatgcccacaagccccctgggggaggcagtttccggacccccatccaagaggagcaggccgacgcccactccaccctggccaagatcagagtgaagttcagcaggagcgcagacgcccccgcgtaccagcagggccagaaccagctctataacgagctcaatctaggacgaagagaggagtacgatgttttggacaagagacgtggccgggaccctgagatggggggaaagccgagaaggaagaaccctcaggaaggcctgtacaatgaactgcagaaagataagatggcggaggcctacagtgagattgggatgaaaggcgagcgccggaggggcaaggggcacgatggcctttaccagggtctcagtacagccaccaaggacacctacgacgcccttcacatgcaggccctgccccctcgcggctctggcgagggaaggggttccctgcttacttgcggcgacgtcgaagagaatcccggtccgatggccctcccagtaactgccctccttttgcccctcgcactccttcttcatgccgctcgccccaactgggtcaacgtgattagcgatttgaagaaaatcgaggaccttatacagtctatgcatattgacgctacactgtatactgagagtgatgtacacccgtcctgtaaggtaacggccatgaaatgctttcttctggagctccaggtcatcagcttggagtctggggacgcaagcatccacgatacggttgaaaacctcatcatccttgcgaacaactctctctcatctaatggaaacgttacagagagtgggtgtaaggagtgcgaagagttggaagaaaaaaacatcaaagaatttcttcaatccttcgttcacatagtgcaaatgttcattaacacgtccactaccacacccgccccgaggccacctacgccggcaccgactatcgccagtcaacccctctctctgcgccccgaggcttgccggcctgcggctggtggggcggtccacacccggggcctggattttgcgtgcgatatatacatctgggcacctcttgccggcacctgcggagtgctgcttctctcactcgttattacgctgtactgctaa

SEQ ID NO: 2235 - DNA, 2154 bp, synthetic construct
  misc_feature 1..2154: note = Synthetic
  source 1..2154: mol_type = other DNA
atggccttaccagtgaccgccttgctcctgccgctggccttgctgctccacgccgccaggccggacatccagatgacccagtctccatcctcactgtctgcatctgtaggagacagagtcaccatcacttgtcgggcgagtcagggtattagcagctggttagcctggtatcagcagaaaccagagaaagcccctaagtccctgatctatgctgcatccagtttacagggtggggtcccatcaaggttcagcggcagtggatctgggacagatttcactctcaccatcagcagcctgcagcctgaagattttgcaacttattactgccaacagtatgatagttacccgtacacttttggccaggggaccaagctggagatcaaaggcagcaccagcggcagcggcaagcccggctccggagagggcagcaccaagggccaggtgcagctggtgcagtctggggctgaggtgaagaagcctggggcctcagtgaaggtctcctgcaaggcttctggatacaccttcaccagttatgatatcaactgggtgcgacaggccactggacaagggcttgagtggatgggatggatgatccctaacagtggtgacacaggctctgcacagaagttccagggcagagtcaccatgaccaggaacacctccataggcacagcctacatggagctgagcagcctgagatctgaggacacggccgtttattactgtgcgagaggcggatattgtaatagtaccagttgctactactactacatggacgtctggggcaaagggaccacggtcaccgtctcctcagcggccgcaaccacgacgccagcgccgcggccaccaacaccggcgcccaccatcgcgtcgcagcccctgtccctgcgcccagaggcgtgccggccagcggcggggggcgcagtgcacacgagggggctggacttcgcctgtgatatctacatctgggcgcccttggccgggacttgtggggtccttctcctgtcactggttatcaccctttactgccggagggaccagaggctgccccccgatgcccacaagccccctgggggaggcagtttccggacccccatccaagaggagcaggccgacgcccactccaccctggccaagatcagagtgaagttcagcaggagcgcagacgcccccgcgtaccagcagggccagaaccagctctataacgagctcaatctaggacgaagagaggagtacgatgttttggacaagagacgtggccgggaccctgagatggggggaaagccgagaaggaagaaccctcaggaaggcctgtacaatgaactgcagaaagataagatggcggaggcctacagtgagattgggatgaaaggcgagcgccggaggggcaaggggcacgatggcctttaccagggtctcagtacagccaccaaggacacctacgacgcccttcacatgcaggccctgccccctcgcggctctggcgagggaaggggttccctgcttacttgcggcgacgtcgaagagaatcccggtccgatggccctcccagtaactgccctccttttgcccctcgcactccttcttcatgccgctcgccccaactgggtcaacgtgattagcgatttgaagaaaatcgaggaccttatacagtctatgcatattgacgctacactgtatactgagagtgatgtacacccgtcctgtaaggtaacggccatgaaatgctttcttctggagctccaggtcatcagcttggagtctggggacgcaagcatccacgatacggttgaaaacctcatcatccttgcgaacaactctctctcatctaatggaaacgttacagagagtgggtgtaaggagtgcgaagagttggaagaaaaaaacatcaaagaatttcttcaatccttcgttcacatagtgcaaatgttcattaacacgtccactaccacacccgccccgaggccacctacgccggcaccgactatcgccagtcaacccctctctctgcgccccgaggcttgccggcctgcggctggtggggcggtccacacccggggcctggattttgcgtgcgatatatacatctgggcacctcttgccggcacctgcggagtgctgcttctctcactcgttattacgctgtactgctaa

SEQ ID NO: 2236 - DNA, 2157 bp, synthetic construct
  misc_feature 1..2157: note = Synthetic
  source 1..2157: mol_type = other DNA
atggccttaccagtgaccgccttgctcctgccgctggccttgctgctccacgccgccaggccggacatccaggtgacccagtctccaaccttcctgtctgcatctgtaggagacagagtcaccatcacttgccgggccagtcagggcattagcagttatttagcctggtatcagcaaaaaccagggaaagcccctaagctcctgatctatggtgcatccactttgcaaagtggggtcccatcaaggttcagcggcagtggatctgggacagaattcactctcacaatcagcagcctgcagcctgaagattttgcaacttattactgtcaacagcttaatagttacccgtggacgttcggccaagggaccaaggtggaaatcaaaggcagcaccagcggcagcggcaagcccggctccggagagggcagcaccaagggccaggtgcagctggtgcagtctggggctgaggtgaagaagcctggggcctcagtgaaggtctcctgcaaggcttctggatacaccttcaccagttatgatatcaactgggtgcgacaggccactggacaagggcttgagtggatgggatggatgaaccctaatagtggtaacacagtctatgcacagaagttccagggcagagtcaccatgaccaggaacacctccataagcacagcctacatggagctgagcagcctgagatctgaggacacggccgtgtattactgtgcgagaggaggcgatttttggagtggttaccatgactactactactacatggacgtctggggcaaagggaccacggtcaccgtctcctcagcggccgcaaccacgacgccagcgccgcggccaccaacaccggcgcccaccatcgcgtcgcagcccctgtccctgcgcccagaggcgtgccggccagcggcggggggcgcagtgcacacgagggggctggacttcgcctgtgatatctacatctgggcgcccttggccgggacttgtggggtccttctcctgtcactggttatcaccctttactgccggagggaccagaggctgccccccgatgcccacaagccccctgggggaggcagtttccggacccccatccaagaggagcaggccgacgcccactccaccctggccaagatcagagtgaagttcagcaggagcgcagacgcccccgcgtaccagcagggccagaaccagctctataacgagctcaatctaggacgaagagaggagtacgatgttttggacaagagacgtggccgggaccctgagatggggggaaagccgagaaggaagaaccctcaggaaggcctgtacaatgaactgcagaaagataagatggcggaggcctacagtgagattgggatgaaaggcgagcgccggaggggcaaggggcacgatggcctttaccagggtctcagtacagccaccaaggacacctacgacgcccttcacatgcaggccctgccccctcgcggctctggcgagggaaggggttccctgcttacttgcggcgacgtcgaagagaatcccggtccgatggccctcccagtaactgccctccttttgcccctcgcactccttcttcatgccgctcgccccaactgggtcaacgtgattagcgatttgaagaaaatcgaggaccttatacagtctatgcatattgacgctacactgtatactgagagtgatgtacacccgtcctgtaaggtaacggccatgaaatgctttcttctggagctccaggtcatcagcttggagtctggggacgcaagcatccacgatacggttgaaaacctcatcatccttgcgaacaactctctctcatctaatggaaacgttacagagagtgggtgtaaggagtgcgaagagttggaagaaaaaaacatcaaagaatttcttcaatccttcgttcacatagtgcaaatgttcattaacacgtccactaccacacccgccccgaggccacctacgccggcaccgactatcgccagtcaacccctctctctgcgccccgaggcttgccggcctgcggctggtggggcggtccacacccggggcctggattttgcgtgcgatatatacatctgggcacctcttgccggcacctgcggagtgctgcttctctcactcgttattacgctgtactgctaa

SEQ ID NO: 2237 - DNA, 2151 bp, synthetic construct
  misc_feature 1..2151: note = Synthetic
  source 1..2151: mol_type = other DNA
atggccttaccagtgaccgccttgctcctgccgctggccttgctgctccacgccgccaggccgtcctatgagctgactcagccaccctcagtgtccgtgtccccaggacagacagccagcatcacctgctctggagataaattgggggataaatatgcttgctggtatcagcagaagccaggccagtcccctgtgctggtcatctatcaagatagcaagcggccctcagggatccctgagcgattctctggctccaactctgggaacacagccactctgaccatcagcgggacccaggctatggatgaggctgactattactgtcaggcgtgggacagcagcactgctgtgttcggaggaggcacccagctgaccgccctcggcagcaccagcggcagcggcaagcccggctccggagagggcagcaccaagggccaggtgcagctgcaggagtcgggcccaggactggtgaagccttcggagaccctgtccctcacctgcactgtctctggtggctccatcagtagttactactggagctggatccggcagcccgccgggaagggactggagtggattgggcgtatctataccagtgggagcaccaactacaacccctccctcaagagtcgagtcaccatgtcagtagacacgtccaagaaccagttctccctgaagctgagctctgtgaccgccgcggacacggccgtgtattactgtgcgagagaggagtaccagctgctaccggccctctactactactactacatggacgtctggggcaaagggaccacggtcaccgtctcctcagcggccgcaaccacgacgccagcgccgcggccaccaacaccggcgcccaccatcgcgtcgcagcccctgtccctgcgcccagaggcgtgccggccagcggcggggggcgcagtgcacacgagggggctggacttcgcctgtgatatctacatctgggcgcccttggccgggacttgtggggtccttctcctgtcactggttatcaccctttactgccggagggaccagaggctgccccccgatgcccacaagccccctgggggaggcagtttccggacccccatccaagaggagcaggccgacgcccactccaccctggccaagatcagagtgaagttcagcaggagcgcagacgcccccgcgtaccagcagggccagaaccagctctataacgagctcaatctaggacgaagagaggagtacgatgttttggacaagagacgtggccgggaccctgagatggggggaaagccgagaaggaagaaccctcaggaaggcctgtacaatgaactgcagaaagataagatggcggaggcctacagtgagattgggatgaaaggcgagcgccggaggggcaaggggcacgatggcctttaccagggtctcagtacagccaccaaggacacctacgacgcccttcacatgcaggccctgccccctcgcggctctggcgagggaaggggttccctgcttacttgcggcgacgtcgaagagaatcccggtccgatggccctcccagtaactgccctccttttgcccctcgcactccttcttcatgccgctcgccccaactgggtcaacgtgattagcgatttgaagaaaatcgaggaccttatacagtctatgcatattgacgctacactgtatactgagagtgatgtacacccgtcctgtaaggtaacggccatgaaatgctttcttctggagctccaggtcatcagcttggagtctggggacgcaagcatccacgatacggttgaaaacctcatcatccttgcgaacaactctctctcatctaatggaaacgttacagagagtgggtgtaaggagtgcgaagagttggaagaaaaaaacatcaaagaatttcttcaatccttcgttcacatagtgcaaatgttcattaacacgtccactaccacacccgccccgaggccacctacgccggcaccgactatcgccagtcaacccctctctctgcgccccgaggcttgccggcctgcggctggtggggcggtccacacccggggcctggattttgcgtgcgatatatacatctgggcacctcttgccggcacctgcggagtgctgcttctctcactcgttattacgctgtactgctaa

SEQ ID NO: 2238 - DNA, 2154 bp, synthetic construct
  misc_feature 1..2154: note = Synthetic
  source 1..2154: mol_type = other DNA
atggccttaccagtgaccgccttgctcctgccgctggccttgctgctccacgccgccaggccgcagactgtagtgacccaggaaccatcgttctcagtgtcccctggagggacagtcacactcacttgtggcttgacctctggctcagtctctactagttactaccccaactggtaccagcagaccccaggccaggctccacgcacgctcatctacagcacaaatattcgctcttctggggtccctgatcgcttctctggctccatccttgggaacaaagctgccctcaccatcacgggggcccaggcagatgatgaatctgattattactgtgtgctgtatatgggtagtggcatgtttattttcggcagtggaaccaaggtcactgtcctaggcagcaccagcggcagcggcaagcccggctccggagagggcagcaccaagggccaggtgcagctggtggagtctgggggaggcgtggtccagcctgggaggtccctgagactctcctgtgcagcaactggattcaccttcagtagctatggcatgcactgggtccgccaggctccaggcaaggggctggagtggatggtagttatatggtctgatggacataataaatactatgcagactccgtgaagggccgattcaccatctccagagacaattccaagaacacgctgtatctgcaaatgaacagcctgagagccgaggacacggctgtgtattactgtgcgagggcacaactggaacgacggtacttctactacatggacgtctggggcaaagggaccacggtcaccgtctcctcagcggccgcaaccacgacgccagcgccgcggccaccaacaccggcgcccaccatcgcgtcgcagcccctgtccctgcgcccagaggcgtgccggccagcggcggggggcgcagtgcacacgagggggctggacttcgcctgtgatatctacatctgggcgcccttggccgggacttgtggggtccttctcctgtcactggttatcaccctttactgccggagggaccagaggctgccccccgatgcccacaagccccctgggggaggcagtttccggacccccatccaagaggagcaggccgacgcccactccaccctggccaagatcagagtgaagttcagcaggagcgcagacgcccccgcgtaccagcagggccagaaccagctctataacgagctcaatctaggacgaagagaggagtacgatgttttggacaagagacgtggccgggaccctgagatggggggaaagccgagaaggaagaaccctcaggaaggcctgtacaatgaactgcagaaagataagatggcggaggcctacagtgagattgggatgaaaggcgagcgccggaggggcaaggggcacgatggcctttaccagggtctcagtacagccaccaaggacacctacgacgcccttcacatgcaggccctgccccctcgcggctctggcgagggaaggggttccctgcttacttgcggcgacgtcgaagagaatcccggtccgatggccctcccagtaactgccctccttttgcccctcgcactccttcttcatgccgctcgccccaactgggtcaacgtgattagcgatttgaagaaaatcgaggaccttatacagtctatgcatattgacgctacactgtatactgagagtgatgtacacccgtcctgtaaggtaacggccatgaaatgctttcttctggagctccaggtcatcagcttggagtctggggacgcaagcatccacgatacggttgaaaacctcatcatccttgcgaacaactctctctcatctaatggaaacgttacagagagtgggtgtaaggagtgcgaagagttggaagaaaaaaacatcaaagaatttcttcaatccttcgttcacatagtgcaaatgttcattaacacgtccactaccacacccgccccgaggccacctacgccggcaccgactatcgccagtcaacccctctctctgcgccccgaggcttgccggcctgcggctggtggggcggtccacacccggggcctggattttgcgtgcgatatatacatctgggcacctcttgccggcacctgcggagtgctgcttctctcactcgttattacgctgtactgctaa

SEQ ID NO: 2239 - DNA, 2154 bp, synthetic construct
  misc_feature 1..2154: note = Synthetic
  source 1..2154: mol_type = other DNA
atggccttaccagtgaccgccttgctcctgccgctggccttgctgctccacgccgccaggccggaaattgtgctgactcagtctccagactttcagtctgtgactccaaaggagaaagtcaccatcacctgccgggccagtcagagcattggtagtagcttacactggtaccagcagaaaccagatcagtctccaatgctcctcatcaagtttgcttcccagtccatctcaggggtcccctcgaggttcagtggcagtggatctgggacagatttcaccctcaccatcaatagcctggaagctgaagatgctgcagcgtattactgtcatcagagtagtagtttaccgtggacgttcggccaagggaccaaggtggaaatcaaaggcagcaccagcggcagcggcaagcccggctccggagagggcagcaccaagggccaggtgcagctggtggagtctgggggaggcgtggtccagcctgggaggtccctgagactctcctgtgcagcgtctggattcaccttcactagttatgacatgcactgggtccgccaggctccaggcaaggggctggagtgggtgacaattatatggtttgatggaagtaataaatactatgcagactccgtgaagggccgattcaccatctccagagacaattccaagaacacgctgtatctgcaaatgaacagcctgagcgccgaggacacggctgtgtattactgtgcgagaggagacaactggaacgaccggtactactactactactacatggacgtctggggcaaagggaccacggtcaccgtctcctcagcggccgcaaccacgacgccagcgccgcggccaccaacaccggcgcccaccatcgcgtcgcagcccctgtccctgcgcccagaggcgtgccggccagcggcggggggcgcagtgcacacgagggggctggacttcgcctgtgatatctacatctgggcgcccttggccgggacttgtggggtccttctcctgtcactggttatcaccctttactgccggagggaccagaggctgccccccgatgcccacaagccccctgggggaggcagtttccggacccccatccaagaggagcaggccgacgcccactccaccctggccaagatcagagtgaagttcagcaggagcgcagacgcccccgcgtaccagcagggccagaaccagctctataacgagctcaatctaggacgaagagaggagtacgatgttttggacaagagacgtggccgggaccctgagatggggggaaagccgagaaggaagaaccctcaggaaggcctgtacaatgaactgcagaaagataagatggcggaggcctacagtgagattgggatgaaaggcgagcgccggaggggcaaggggcacgatggcctttaccagggtctcagtacagccaccaaggacacctacgacgcccttcacatgcaggccctgccccctcgcggctctggcgagggaaggggttccctgcttacttgcggcgacgtcgaagagaatcccggtccgatggccctcccagtaactgccctccttttgcccctcgcactccttcttcatgccgctcgccccaactgggtcaacgtgattagcgatttgaagaaaatcgaggaccttatacagtctatgcatattgacgctacactgtatactgagagtgatgtacacccgtcctgtaaggtaacggccatgaaatgctttcttctggagctccaggtcatcagcttggagtctggggacgcaagcatccacgatacggttgaaaacctcatcatccttgcgaacaactctctctcatctaatggaaacgttacagagagtgggtgtaaggagtgcgaagagttggaagaaaaaaacatcaaagaatttcttcaatccttcgttcacatagtgcaaatgttcattaacacgtccactaccacacccgccccgaggccacctacgccggcaccgactatcgccagtcaacccctctctctgcgccccgaggcttgccggcctgcggctggtggggcggtccacacccggggcctggattttgcgtgcgatatatacatctgggcacctcttgccggcacctgcggagtgctgcttctctcactcgttattacgctgtactgctaa

SEQ ID NO: 2240 - DNA, 2169 bp, synthetic construct
  misc_feature 1..2169: note = Synthetic
  source 1..2169: mol_type = other DNA
atggccttaccagtgaccgccttgctcctgccgctggccttgctgctccacgccgccaggccggatattgtgatgacccagcctccactctcctcgcctgtcacccttggacagccggcctccatctcctgcaggtctagtcaaagcctcgtacacagtgatggaaacacctacttgagttggcttcagcagaggccaggccagcctccaagactcctaatttataaggtttctaaccggttctctggggtcccagacagattcagtggcagtggggcagggacagatttcacactgaaaatcagcagggtggaagctgaggatgtcggggtttattactgcacgcaagctacacaatttcctcacacttttggccaggggaccaagctggagatcaaaggcagcaccagcggcagcggcaagcccggctccggagagggcagcaccaagggccaggttcagctggtgcagtctggagctgaggtgaagaagcctggggcctcagtgaaggtctcctgcaaggcttctggttacacctttaccagctatggtatcagctgggtgcgacaggcccctggacaagggcttgagtggatggggtggatcagcgcttacaatggtcacacagactatacacagaaactccagggcagagtcaccatgaccacagacacatccacgaccacagcctacatggaactgaggagcctgagctctgccgacacggccgtgtattactgtgtgagagaagtggtacttcccaccacggactactactacttttacatggacgtctggggcaaagggaccacggtcaccgtctcctcagcggccgcaaccacgacgccagcgccgcggccaccaacaccggcgcccaccatcgcgtcgcagcccctgtccctgcgcccagaggcgtgccggccagcggcggggggcgcagtgcacacgagggggctggacttcgcctgtgatatctacatctgggcgcccttggccgggacttgtggggtccttctcctgtcactggttatcaccctttactgccggagggaccagaggctgccccccgatgcccacaagccccctgggggaggcagtttccggacccccatccaagaggagcaggccgacgcccactccaccctggccaagatcagagtgaagttcagcaggagcgcagacgcccccgcgtaccagcagggccagaaccagctctataacgagctcaatctaggacgaagagaggagtacgatgttttggacaagagacgtggccgggaccctgagatggggggaaagccgagaaggaagaaccctcaggaaggcctgtacaatgaactgcagaaagataagatggcggaggcctacagtgagattgggatgaaaggcgagcgccggaggggcaaggggcacgatggcctttaccagggtctcagtacagccaccaaggacacctacgacgcccttcacatgcaggccctgccccctcgcggctctggcgagggaaggggttccctgcttacttgcggcgacgtcgaagagaatcccggtccgatggccctcccagtaactgccctccttttgcccctcgcactccttcttcatgccgctcgccccaactgggtcaacgtgattagcgatttgaagaaaatcgaggaccttatacagtctatgcatattgacgctacactgtatactgagagtgatgtacacccgtcctgtaaggtaacggccatgaaatgctttcttctggagctccaggtcatcagcttggagtctggggacgcaagcatccacgatacggttgaaaacctcatcatccttgcgaacaactctctctcatctaatggaaacgttacagagagtgggtgtaaggagtgcgaagagttggaagaaaaaaacatcaaagaatttcttcaatccttcgttcacatagtgcaaatgttcattaacacgtccactaccacacccgccccgaggccacctacgccggcaccgactatcgccagtcaacccctctctctgcgccccgaggcttgccggcctgcggctggtggggcggtccacacccggggcctggattttgcgtgcgatatatacatctgggcacctcttgccggcacctgcggagtgctgcttctctcactcgttattacgctgtactgctaa

SEQ ID NO: 2241 - DNA, 2166 bp, synthetic construct
  misc_feature 1..2166: note = Synthetic
  source 1..2166: mol_type = other DNA
atggccttaccagtgaccgccttgctcctgccgctggccttgctgctccacgccgccaggccggacatccagatgacccagtctccatcctcactgtctgcatctgtaggagacagagtcaccatcacttgtcgggcgagtcagggtattagcagctggttagcctggtatcagcagaaaccagagaaagcccctaagtccctgatctatgctgcatccagtttgcaaagtggggtcccatcaaggttcagcggcagtggatctgggacagatttcactctcaccatcagcagcctgcagcctgaagattttgcaacttattactgccaacagtataatagttacccgtacacttttggccaggggaccaagctggagatcaaaggcagcaccagcggcagcggcaagcccggctccggagagggcagcaccaagggccaggtccagctggtacagtctggggctgaggtgaagaagcctggggcctcagtgaaggtctcctgcaaggtttccggatacaccctcactgaattatccatgcactgggtgcgacaggctcctggaaaagggcttgagtggatgggaggttttgatcctgaagatggtgaaacaatctacgcacagaagttccagggcagagtcaccatgaccgaggacacatctacagacacagcctacatggagctgagcagcctgagatctgaggacacggccgtgtattactgtgcaacaggacgtattactatggttcggggagttattatcccctactactactactacatggacgtctggggcaaagggaccacggtcaccgtctcctcagcggccgcaaccacgacgccagcgccgcggccaccaacaccggcgcccaccatcgcgtcgcagcccctgtccctgcgcccagaggcgtgccggccagcggcggggggcgcagtgcacacgagggggctggacttcgcctgtgatatctacatctgggcgcccttggccgggacttgtggggtccttctcctgtcactggttatcaccctttactgccggagggaccagaggctgccccccgatgcccacaagccccctgggggaggcagtttccggacccccatccaagaggagcaggccgacgcccactccaccctggccaagatcagagtgaagttcagcaggagcgcagacgcccccgcgtaccagcagggccagaaccagctctataacgagctcaatctaggacgaagagaggagtacgatgttttggacaagagacgtggccgggaccctgagatggggggaaagccgagaaggaagaaccctcaggaaggcctgtacaatgaactgcagaaagataagatggcggaggcctacagtgagattgggatgaaaggcgagcgccggaggggcaaggggcacgatggcctttaccagggtctcagtacagccaccaaggacacctacgacgcccttcacatgcaggccctgccccctcgcggctctggcgagggaaggggttccctgcttacttgcggcgacgtcgaagagaatcccggtccgatggccctcccagtaactgccctccttttgcccctcgcactccttcttcatgccgctcgccccaactgggtcaacgtgattagcgatttgaagaaaatcgaggaccttatacagtctatgcatattgacgctacactgtatactgagagtgatgtacacccgtcctgtaaggtaacggccatgaaatgctttcttctggagctccaggtcatcagcttggagtctggggacgcaagcatccacgatacggttgaaaacctcatcatccttgcgaacaactctctctcatctaatggaaacgttacagagagtgggtgtaaggagtgcgaagagttggaagaaaaaaacatcaaagaatttcttcaatccttcgttcacatagtgcaaatgttcattaacacgtccactaccacacccgccccgaggccacctacgccggcaccgactatcgccagtcaacccctctctctgcgccccgaggcttgccggcctgcggctggtggggcggtccacacccggggcctggattttgcgtgcgatatatacatctgggcacctcttgccggcacctgcggagtgctgcttctctcactcgttattacgctgtactgctaa

SEQ ID NO: 2242 - DNA, 2160 bp, synthetic construct
  misc_feature 1..2160: note = Synthetic
  source 1..2160: mol_type = other DNA
atggccttaccagtgaccgccttgctcctgccgctggccttgctgctccacgccgccaggccggatattgtgatgacccagactccactctctctgtccgtcacccctggacagccggcctccatctcctgcaagtctagtaagagcctcctgcatagtgatggaaagacctatttgtattggtacctgcagaagccaggccagcctccacagctcctgatctatgaagtttccaaccggttctctggagtgccagataggttcagtggcagcgggtcagggacagatttcacactgaaaatcagccgggtggaggctgaggatgttggggtttattactgcatgcaaagtatacaatttccgtggacgttcggccaagggaccaaggtggaaatcaagggcagcaccagcggcagcggcaagcccggctccggagagggcagcaccaagggccaggttcagctggtgcagtctggaactgaggtgaagaagcctggggcctcagtgaaggtctcctgcaaggcttctggttacacctttaccaactatggtatcggctgggtgcgacaggcccctggacaagggcttgagtggatgggatggatcatcgcttacaatggttacacaaagtatgcacagattctccagggcagagtcaccatgaccacagacacatccacgaacacagcttatatggaactgaggagcctgagatctgacgacacggccgtgtattactgtgcgagacagcagctcgggggggactaccactactacatggacgtctggggcaaagggaccacggtcaccgtctcctcagcggccgcaaccacgacgccagcgccgcggccaccaacaccggcgcccaccatcgcgtcgcagcccctgtccctgcgcccagaggcgtgccggccagcggcggggggcgcagtgcacacgagggggctggacttcgcctgtgatatctacatctgggcgcccttggccgggacttgtggggtccttctcctgtcactggttatcaccctttactgccggagggaccagaggctgccccccgatgcccacaagccccctgggggaggcagtttccggacccccatccaagaggagcaggccgacgcccactccaccctggccaagatcagagtgaagttcagcaggagcgcagacgcccccgcgtaccagcagggccagaaccagctctataacgagctcaatctaggacgaagagaggagtacgatgttttggacaagagacgtggccgggaccctgagatggggggaaagccgagaaggaagaaccctcaggaaggcctgtacaatgaactgcagaaagataagatggcggaggcctacagtgagattgggatgaaaggcgagcgccggaggggcaaggggcacgatggcctttaccagggtctcagtacagccaccaaggacacctacgacgcccttcacatgcaggccctgccccctcgcggctctggcgagggaaggggttccctgcttacttgcggcgacgtcgaagagaatcccggtccgatggccctcccagtaactgccctccttttgcccctcgcactccttcttcatgccgctcgccccaactgggtcaacgtgattagcgatttgaagaaaatcgaggaccttatacagtctatgcatattgacgctacactgtatactgagagtgatgtacacccgtcctgtaaggtaacggccatgaaatgctttcttctggagctccaggtcatcagcttggagtctggggacgcaagcatccacgatacggttgaaaacctcatcatccttgcgaacaactctctctcatctaatggaaacgttacagagagtgggtgtaaggagtgcgaagagttggaagaaaaaaacatcaaagaatttcttcaatccttcgttcacatagtgcaaatgttcattaacacgtccactaccacacccgccccgaggccacctacgccggcaccgactatcgccagtcaacccctctctctgcgccccgaggcttgccggcctgcggctggtggggcggtccacacccggggcctggattttgcgtgcgatatatacatctgggcacctcttgccggcacctgcggagtgctgcttctctcactcgttattacgctgtactgctaa

SEQ ID NO: 2243 - DNA, 2160 bp, synthetic construct
  misc_feature 1..2160: note = Synthetic
  source 1..2160: mol_type = other DNA
atggccttaccagtgaccgccttgctcctgccgctggccttgctgctccacgccgccaggccggatattgtgatgacccagactccactctctctgtccgtcacccctggacagccggcctccatctcctgcaagtctagtaagagcctcctgcatagtgatggaaagacctatttgtattggtacctgcagaagccaggccagcctccacagctcctgatctatgaagtttccacccggttctctggagtgccagataggttcagtggcagcgggtcagggacagatttcacactgaaaatcagccgggtggaggctgaggatgttggggtttattactgcatgcaaagtatacagtttccgtggacgttcggccaagggaccaaggtggaaatcaaaggcagcaccagcggcagcggcaagcccggctccggagagggcagcaccaagggccaggttcagctggtgcagtctggaactgaggtgaagaagcctggggcctcagtgaaggtctcctgcaaggcttctggttacacctttaccaactatggtatcggctgggtgcgacaggcccctggacaagggcttgagtggatgggatggatcatcgcttacaatggttacacaaagtatgcacagattctccagggcagagtcaccatgaccacggacacatccacgaacacagcctatatggaactgaggagcctgagatctgacgacacggccgtgtattactgtgcgcgacagcagctcgggggggactaccactactacatggacgtctggggcaaagggaccacggtcaccgtctcttcagcggccgcaaccacgacgccagcgccgcggccaccaacaccggcgcccaccatcgcgtcgcagcccctgtccctgcgcccagaggcgtgccggccagcggcggggggcgcagtgcacacgagggggctggacttcgcctgtgatatctacatctgggcgcccttggccgggacttgtggggtccttctcctgtcactggttatcaccctttactgccggagggaccagaggctgccccccgatgcccacaagccccctgggggaggcagtttccggacccccatccaagaggagcaggccgacgcccactccaccctggccaagatcagagtgaagttcagcaggagcgcagacgcccccgcgtaccagcagggccagaaccagctctataacgagctcaatctaggacgaagagaggagtacgatgttttggacaagagacgtggccgggaccctgagatggggggaaagccgagaaggaagaaccctcaggaaggcctgtacaatgaactgcagaaagataagatggcggaggcctacagtgagattgggatgaaaggcgagcgccggaggggcaaggggcacgatggcctttaccagggtctcagtacagccaccaaggacacctacgacgcccttcacatgcaggccctgccccctcgcggctctggcgagggaaggggttccctgcttacttgcggcgacgtcgaagagaatcccggtccgatggccctcccagtaactgccctccttttgcccctcgcactccttcttcatgccgctcgccccaactgggtcaacgtgattagcgatttgaagaaaatcgaggaccttatacagtctatgcatattgacgctacactgtatactgagagtgatgtacacccgtcctgtaaggtaacggccatgaaatgctttcttctggagctccaggtcatcagcttggagtctggggacgcaagcatccacgatacggttgaaaacctcatcatccttgcgaacaactctctctcatctaatggaaacgttacagagagtgggtgtaaggagtgcgaagagttggaagaaaaaaacatcaaagaatttcttcaatccttcgttcacatagtgcaaatgttcattaacacgtccactaccacacccgccccgaggccacctacgccggcaccgactatcgccagtcaacccctctctctgcgccccgaggcttgccggcctgcggctggtggggcggtccacacccggggcctggattttgcgtgcgatatatacatctgggcacctcttgccggcacctgcggagtgctgcttctctcactcgttattacgctgtactgctaa

SEQ ID NO: 2244 - DNA, 2154 bp, synthetic construct
  misc_feature 1..2154: note = Synthetic
  source 1..2154: mol_type = other DNA
atggccttaccagtgaccgccttgctcctgccgctggccttgctgctccacgccgccaggccggacatccagatgacccagtctccatcctcactgtctgcctctgtaggagacagagtcaccatcacttgtcgggcgagtcagggtattagcaactggttagcctggtatcagcagaaaccagagaaagcccctaagtccctgatctatgctgcatccagtttgcaaggtggggtcccatcaagattcagcggcagtggatctgggacagatttcactctcaccatcagcagcctgcagcctgaagattttgcaacttattactgccaacagtatgatagttacccgtacacttttggccaggggaccaagctggagatcaaaggcagcaccagcggcagcggcaagcccggctccggagagggcagcaccaagggccaggtgcagctggtgcagtctgggactgaggtgaagaagcctggggcctcagtgaaggtctcctgtaagacttctggatacaccttcaccagttatgatatcaactgggtgcgacaggccactggacaagggcttgagtggatgggatggatgaaccctatcagtggtgacacaggctctgcacagaagttccagggcagagtcaccatgaccaggaacacctccataggcacagcctacatggagctgagcagcctgagatctgaggacacggccgtttattactgtgcgagaggcggatattgtagtagtaccagctgctactactactacatggacgtctggggcaaagggaccacggtcaccgtctcctcagcggccgcaaccacgacgccagcgccgcggccaccaacaccggcgcccaccatcgcgtcgcagcccctgtccctgcgcccagaggcgtgccggccagcggcggggggcgcagtgcacacgagggggctggacttcgcctgtgatatctacatctgggcgcccttggccgggacttgtggggtccttctcctgtcactggttatcaccctttactgccggagggaccagaggctgccccccgatgcccacaagccccctgggggaggcagtttccggacccccatccaagaggagcaggccgacgcccactccaccctggccaagatcagagtgaagttcagcaggagcgcagacgcccccgcgtaccagcagggccagaaccagctctataacgagctcaatctaggacgaagagaggagtacgatgttttggacaagagacgtggccgggaccctgagatggggggaaagccgagaaggaagaaccctcaggaaggcctgtacaatgaactgcagaaagataagatggcggaggcctacagtgagattgggatgaaaggcgagcgccggaggggcaaggggcacgatggcctttaccagggtctcagtacagccaccaaggacacctacgacgcccttcacatgcaggccctgccccctcgcggctctggcgagggaaggggttccctgcttacttgcggcgacgtcgaagagaatcccggtccgatggccctcccagtaactgccctccttttgcccctcgcactccttcttcatgccgctcgccccaactgggtcaacgtgattagcgatttgaagaaaatcgaggaccttatacagtctatgcatattgacgctacactgtatactgagagtgatgtacacccgtcctgtaaggtaacggccatgaaatgctttcttctggagctccaggtcatcagcttggagtctggggacgcaagcatccacgatacggttgaaaacctcatcatccttgcgaacaactctctctcatctaatggaaacgttacagagagtgggtgtaaggagtgcgaagagttggaagaaaaaaacatcaaagaatttcttcaatccttcgttcacatagtgcaaatgttcattaacacgtccactaccacacccgccccgaggccacctacgccggcaccgactatcgccagtcaacccctctctctgcgccccgaggcttgccggcctgcggctggtggggcggtccacacccggggcctggattttgcgtgcgatatatacatctgggcacctcttgccggcacctgcggagtgctgcttctctcactcgttattacgctgtactgctaa

SEQ ID NO: 2245 - DNA, 2154 bp, synthetic construct
  misc_feature 1..2154: note = Synthetic
  source 1..2154: mol_type = other DNA
atggccttaccagtgaccgccttgctcctgccgctggccttgctgctccacgccgccaggccggacatccagatgacccagtctccatcctcactgtctgcatctgtaggagacagagtcaccatcacttgtcgggcgagtcagggtattagcagctggttagcctggtatcagcagaaaccagagaaagcccctaagtccctgatctatgctgcatccagtttacaaggtggggtcccatcaaggttcagcggcagtggatctgggacagatttcactctcaccatcagcagcctgcagcctgaagattttgcaacttattactgccaacagtatgatagttacccgtacacttttggccaggggaccaagctggagatcaaaggcagcaccagcggcagcggcaagcccggctccggagagggcagcaccaagggccaggtgcagctggtgcagtctggggctgaggtgaagaagcctggggcctcagtgaaggtctcctgcaaggcttctggatacaccttcaccagttatgatatcaactgggtgcgacaggccactggacaagggcttgagtggatgggatggatgatccctaacagtggtgacacaggctctgcacagaagttccagggcagagtcaccatgaccaggaacacctccataagcacagcctacatggagctgagcagcctgagatctgaggacacggccgtttattactgtgcgagaggcggatattgtaatagtaccagttgctactactactacatggacgtctggggcaaagggaccacggtcaccgtctcctcagcggccgcaaccacgacgccagcgccgcggccaccaacaccggcgcccaccatcgcgtcgcagcccctgtccctgcgcccagaggcgtgccggccagcggcggggggcgcagtgcacacgagggggctggacttcgcctgtgatatctacatctgggcgcccttggccgggacttgtggggtccttctcctgtcactggttatcaccctttactgccggagggaccagaggctgccccccgatgcccacaagccccctgggggaggcagtttccggacccccatccaagaggagcaggccgacgcccactccaccctggccaagatcagagtgaagttcagcaggagcgcagacgcccccgcgtaccagcagggccagaaccagctctataacgagctcaatctaggacgaagagaggagtacgatgttttggacaagagacgtggccgggaccctgagatggggggaaagccgagaaggaagaaccctcaggaaggcctgtacaatgaactgcagaaagataagatggcggaggcctacagtgagattgggatgaaaggcgagcgccggaggggcaaggggcacgatggcctttaccagggtctcagtacagccaccaaggacacctacgacgcccttcacatgcaggccctgccccctcgcggctctggcgagggaaggggttccctgcttacttgcggcgacgtcgaagagaatcccggtccgatggccctcccagtaactgccctccttttgcccctcgcactccttcttcatgccgctcgccccaactgggtcaacgtgattagcgatttgaagaaaatcgaggaccttatacagtctatgcatattgacgctacactgtatactgagagtgatgtacacccgtcctgtaaggtaacggccatgaaatgctttcttctggagctccaggtcatcagcttggagtctggggacgcaagcatccacgatacggttgaaaacctcatcatccttgcgaacaactctctctcatctaatggaaacgttacagagagtgggtgtaaggagtgcgaagagttggaagaaaaaaacatcaaagaatttcttcaatccttcgttcacatagtgcaaatgttcattaacacgtccactaccacacccgccccgaggccacctacgccggcaccgactatcgccagtcaacccctctctctgcgccccgaggcttgccggcctgcggctggtggggcggtccacacccggggcctggattttgcgtgcgatatatacatctgggcacctcttgccggcacctgcggagtgctgcttctctcactcgttattacgctgtactgctaa

SEQ ID NO: 2246 - DNA, 2157 bp, synthetic construct
  misc_feature 1..2157: note = Synthetic
  source 1..2157: mol_type = other DNA
atggccttaccagtgaccgccttgctcctgccgctggccttgctgctccacgccgccaggccggaaattgtgttgacgcagtctccaggcaccctgtctttgtctccaggggaaagagccaccctctcctgcagggccagtcagagtgttagcagcagctacttagcctggtaccagcagaaacctggccaggctcccaggctcctcatctatggtgcatccagcagggccactggcatcccagacaggttcagtgacagtgggtctgggacagacttcactctcaccatcagcagactggagcctgaagattttgcagtgtattactgtcagcactatggtagctcacctccgaggatcactttcggccctgggaccaaagtggatatcaaaggcagcaccagcggcagcggcaagcccggctccggagagggcagcaccaagggcgaggtgcagttgttggagtctgggggaggcttggtacaacctggggggtccctgagactctcctgtgcagcctctggattcacctttagcagctatgtcatgaactgggtccgccaggctccagggaaggggctggaatgggtctcatctgttagtggtagtggtaataactcattctacgcagactccgtgaagggccggttcaccatctccagagacaattccaagaacacgctgtatctgcaaatgaacagcctgagagccgaggacacggccgtatattactgtgcgagtcgtagttccagttatctctactactactactacatggacgtctggggcaaagggaccaccgtcaccgtctcctcagcggccgcaaccacgacgccagcgccgcggccaccaacaccggcgcccaccatcgcgtcgcagcccctgtccctgcgcccagaggcgtgccggccagcggcggggggcgcagtgcacacgagggggctggacttcgcctgtgatatctacatctgggcgcccttggccgggacttgtggggtccttctcctgtcactggttatcaccctttactgccggagggaccagaggctgccccccgatgcccacaagccccctgggggaggcagtttccggacccccatccaagaggagcaggccgacgcccactccaccctggccaagatcagagtgaagttcagcaggagcgcagacgcccccgcgtaccagcagggccagaaccagctctataacgagctcaatctaggacgaagagaggagtacgatgttttggacaagagacgtggccgggaccctgagatggggggaaagccgagaaggaagaaccctcaggaaggcctgtacaatgaactgcagaaagataagatggcggaggcctacagtgagattgggatgaaaggcgagcgccggaggggcaaggggcacgatggcctttaccagggtctcagtacagccaccaaggacacctacgacgcccttcacatgcaggccctgccccctcgcggctctggcgagggaaggggttccctgcttacttgcggcgacgtcgaagagaatcccggtccgatggccctcccagtaactgccctccttttgcccctcgcactccttcttcatgccgctcgccccaactgggtcaacgtgattagcgatttgaagaaaatcgaggaccttatacagtctatgcatattgacgctacactgtatactgagagtgatgtacacccgtcctgtaaggtaacggccatgaaatgctttcttctggagctccaggtcatcagcttggagtctggggacgcaagcatccacgatacggttgaaaacctcatcatccttgcgaacaactctctctcatctaatggaaacgttacagagagtgggtgtaaggagtgcgaagagttggaagaaaaaaacatcaaagaatttcttcaatccttcgttcacatagtgcaaatgttcattaacacgtccactaccacacccgccccgaggccacctacgccggcaccgactatcgccagtcaacccctctctctgcgccccgaggcttgccggcctgcggctggtggggcggtccacacccggggcctggattttgcgtgcgatatatacatctgggcacctcttgccggcacctgcggagtgctgcttctctcactcgttattacgctgtactgctaa

SEQ ID NO: 2247 - DNA, 2154 bp, synthetic construct
  misc_feature 1..2154: note = Synthetic
  source 1..2154: mol_type = other DNA
atggccttaccagtgaccgccttgctcctgccgctggccttgctgctccacgccgccaggccggagatcgtgctgacccagagccccgacttccagtctgtgacacctaaggaaaaggttacaattacctgtagagcttcccagaccatcggctcttctctgcactggtaccagcagaaacctgatcagtctccaaagctgctgatcaagcacgccagccagagcttctctggcgtccccagccggttttctggcagcggcagcggaacagattttacactgacagtgaactcactggaagccgaggatgccgccacctactactgccatcagagctccagcctcccttggaccttcggccagggcacgaaggtggaaatcaaaggcagcaccagcggcagcggcaagcccggctccggagagggcagcaccaagggccaagtgcagctggtggagagcggcggcggagtggtgcaacctggaagaagcctgcggctgagctgcgctgctagcggcttcaccttcagcagccacgacatgcactgggtgcggcaggcccctggcaagggcctggactgggtcgccgtgatctggagcgacggcaacaagaagtactacgtggacagcgccaagggcagattcaccatcagccgcgacaatagcaagaacaccgtgtacctgcagatgaacagcctgagagccgaggacaccgccatctactattgcgccagaggcgataattggaacgacgagcacagctactattactacatggacgtgtggggcaaaggcacaaccgtgaccgtgtcctccgcggccgcaaccacgacgccagcgccgcggccaccaacaccggcgcccaccatcgcgtcgcagcccctgtccctgcgcccagaggcgtgccggccagcggcggggggcgcagtgcacacgagggggctggacttcgcctgtgatatctacatctgggcgcccttggccgggacttgtggggtccttctcctgtcactggttatcaccctttactgccggagggaccagaggctgccccccgatgcccacaagccccctgggggaggcagtttccggacccccatccaagaggagcaggccgacgcccactccaccctggccaagatcagagtgaagttcagcaggagcgcagacgcccccgcgtaccagcagggccagaaccagctctataacgagctcaatctaggacgaagagaggagtacgatgttttggacaagagacgtggccgggaccctgagatggggggaaagccgagaaggaagaaccctcaggaaggcctgtacaatgaactgcagaaagataagatggcggaggcctacagtgagattgggatgaaaggcgagcgccggaggggcaaggggcacgatggcctttaccagggtctcagtacagccaccaaggacacctacgacgcccttcacatgcaggccctgccccctcgcggctctggcgagggaaggggttccctgcttacttgcggcgacgtcgaagagaatcccggtccgatggccctcccagtaactgccctccttttgcccctcgcactccttcttcatgccgctcgccccaactgggtcaacgtgattagcgatttgaagaaaatcgaggaccttatacagtctatgcatattgacgctacactgtatactgagagtgatgtacacccgtcctgtaaggtaacggccatgaaatgctttcttctggagctccaggtcatcagcttggagtctggggacgcaagcatccacgatacggttgaaaacctcatcatccttgcgaacaactctctctcatctaatggaaacgttacagagagtgggtgtaaggagtgcgaagagttggaagaaaaaaacatcaaagaatttcttcaatccttcgttcacatagtgcaaatgttcattaacacgtccactaccacacccgccccgaggccacctacgccggcaccgactatcgccagtcaacccctctctctgcgccccgaggcttgccggcctgcggctggtggggcggtccacacccggggcctggattttgcgtgcgatatatacatctgggcacctcttgccggcacctgcggagtgctgcttctctcactcgttattacgctgtactgctaa

SEQ ID NO: 2248 - DNA, 2154 bp, synthetic construct
  misc_feature 1..2154: note = Synthetic
  source 1..2154: mol_type = other DNA
atggccttaccagtgaccgccttgctcctgccgctggccttgctgctccacgccgccaggccggagatcgtgctgacacagtccccagattttcagagcgtgacccccaaggaaaaggtgacaatcacctgcagagccagccagaccatcggcagcagcctgcactggtaccagcagaaacccgatcagtctcctaagctgctgatcaagcacgccagccagagcttcagcggcgttcccagcaggttcagcggaagcggcagcggcaccgacttcaccctgaccgtgaactctctcgaggccgaggacgccgctacatactactgccaccagagcagctccctgccttggaccttcggccagggcaccaaggtcgaaattaagggcagcaccagcggcagcggcaagcccggctccggagagggcagcaccaagggccaagtgcagctggtggaaagcggcggcggagtggtgcaacctggcagatctctgcggctgtcttgtgccgcctctggatttacattcagctctcatgatatgcactgggtgcggcaggcccctggcaaaggcctggactgggtcgccgtgatctggagcgacggcaacaacaagtactacgccgacagcgccaagggaagattcaccatcagccgggacaattctaaaaacaccgtgtacctgcagatgaacagcctgagagctgaggacaccgccatctactattgcgccagaggagataattggaacgacgagcacagctactactactatatggacgtgtggggcaagggcacaacagtgaccgtgtcctccgcggccgcaaccacgacgccagcgccgcggccaccaacaccggcgcccaccatcgcgtcgcagcccctgtccctgcgcccagaggcgtgccggccagcggcggggggcgcagtgcacacgagggggctggacttcgcctgtgatatctacatctgggcgcccttggccgggacttgtggggtccttctcctgtcactggttatcaccctttactgccggagggaccagaggctgccccccgatgcccacaagccccctgggggaggcagtttccggacccccatccaagaggagcaggccgacgcccactccaccctggccaagatcagagtgaagttcagcaggagcgcagacgcccccgcgtaccagcagggccagaaccagctctataacgagctcaatctaggacgaagagaggagtacgatgttttggacaagagacgtggccgggaccctgagatggggggaaagccgagaaggaagaaccctcaggaaggcctgtacaatgaactgcagaaagataagatggcggaggcctacagtgagattgggatgaaaggcgagcgccggaggggcaaggggcacgatggcctttaccagggtctcagtacagccaccaaggacacctacgacgcccttcacatgcaggccctgccccctcgcggctctggcgagggaaggggttccctgcttacttgcggcgacgtcgaagagaatcccggtccgatggccctcccagtaactgccctccttttgcccctcgcactccttcttcatgccgctcgccccaactgggtcaacgtgattagcgatttgaagaaaatcgaggaccttatacagtctatgcatattgacgctacactgtatactgagagtgatgtacacccgtcctgtaaggtaacggccatgaaatgctttcttctggagctccaggtcatcagcttggagtctggggacgcaagcatccacgatacggttgaaaacctcatcatccttgcgaacaactctctctcatctaatggaaacgttacagagagtgggtgtaaggagtgcgaagagttggaagaaaaaaacatcaaagaatttcttcaatccttcgttcacatagtgcaaatgttcattaacacgtccactaccacacccgccccgaggccacctacgccggcaccgactatcgccagtcaacccctctctctgcgccccgaggcttgccggcctgcggctggtggggcggtccacacccggggcctggattttgcgtgcgatatatacatctgggcacctcttgccggcacctgcggagtgctgcttctctcactcgttattacgctgtactgctaa

SEQ ID NO: 2249 - DNA, 2151 bp, synthetic construct
  misc_feature 1..2151: note = Synthetic
  source 1..2151: mol_type = other DNA
atggccttaccagtgaccgccttgctcctgccgctggccttgctgctccacgccgccaggccggatatccagatgacccagagccccagcagcctgagcgccagcgtgggcgaccgggtcacaatcacctgcagagccagccagagcatcagcaattacctgaactggtaccaccagaagcccggcaaagcccctaagctgctgatctacgctgcttctagcctcgagagcggcgtgcctagcagattcagcggcagcggcagcggaacagatttcaccctgacaatcagctctctgcaacctgaggacttcgccacatactattgtcagcagtcctacagcaatcctctgaccttcggcggcggcacaaaggtggaatctaagggcagcaccagcggcagcggcaagcccggctccggagagggcagcaccaagggccaactgcagctggtgcagagcggagccgaggtgaagaagcctggcgctagcgttaaggtgtcctgcaaggcctccggctacacctttaccaactacggcatctcctggctgcgccaggccccaggccagggcctggagtggatgggctggatctccggatacaacgacaacacccactacgcccagaaattccagggtagagtgactatgaccaccgataccagcacaacaacagcctacatggaactgagaaacctgcggagcgacgacaccgccgtgtactactgcgcccgggacggcattgccgctagacctgtgtactactattacatggacgtgtggggcaagggcaccaccgtgacagtgtcttctgcggccgcaaccacgacgccagcgccgcggccaccaacaccggcgcccaccatcgcgtcgcagcccctgtccctgcgcccagaggcgtgccggccagcggcggggggcgcagtgcacacgagggggctggacttcgcctgtgatatctacatctgggcgcccttggccgggacttgtggggtccttctcctgtcactggttatcaccctttactgccggagggaccagaggctgccccccgatgcccacaagccccctgggggaggcagtttccggacccccatccaagaggagcaggccgacgcccactccaccctggccaagatcagagtgaagttcagcaggagcgcagacgcccccgcgtaccagcagggccagaaccagctctataacgagctcaatctaggacgaagagaggagtacgatgttttggacaagagacgtggccgggaccctgagatggggggaaagccgagaaggaagaaccctcaggaaggcctgtacaatgaactgcagaaagataagatggcggaggcctacagtgagattgggatgaaaggcgagcgccggaggggcaaggggcacgatggcctttaccagggtctcagtacagccaccaaggacacctacgacgcccttcacatgcaggccctgccccctcgcggctctggcgagggaaggggttccctgcttacttgcggcgacgtcgaagagaatcccggtccgatggccctcccagtaactgccctccttttgcccctcgcactccttcttcatgccgctcgccccaactgggtcaacgtgattagcgatttgaagaaaatcgaggaccttatacagtctatgcatattgacgctacactgtatactgagagtgatgtacacccgtcctgtaaggtaacggccatgaaatgctttcttctggagctccaggtcatcagcttggagtctggggacgcaagcatccacgatacggttgaaaacctcatcatccttgcgaacaactctctctcatctaatggaaacgttacagagagtgggtgtaaggagtgcgaagagttggaagaaaaaaacatcaaagaatttcttcaatccttcgttcacatagtgcaaatgttcattaacacgtccactaccacacccgccccgaggccacctacgccggcaccgactatcgccagtcaacccctctctctgcgccccgaggcttgccggcctgcggctggtggggcggtccacacccggggcctggattttgcgtgcgatatatacatctgggcacctcttgccggcacctgcggagtgctgcttctctcactcgttattacgctgtactgctaa

SEQ ID NO: 2250 - DNA, 2148 bp, synthetic construct
  misc_feature 1..2148: note = Synthetic
  source 1..2148: mol_type = other DNA
atggccttaccagtgaccgccttgctcctgccgctggccttgctgctccacgccgccaggccggagattgttctgacccagagccctgatttccagagcgtgacccccaaggaaaaggtgacaatcacctgccgggccagccaaagcatcggctccagcctgcactggtatcagcagaagcccgaccagtccccaaagctgctgatcaaattcgcctctcagtcattcagcggcgtgccttcccggttcagcggaagcggcagcggcacagactttaccctgacaatccacagcctggaagccgaggacgccgctacatactactgccaccagagcggcagcctgccctggacattcggccagggcacgaaggtggagatcaagggcagcaccagcggcagcggcaagcccggctccggagagggcagcaccaagggccaagtgcagctggtggagagcgggggaggtgtcgtgcagcctggaagaagcctcagactgtcttgtgtggccagcggctttaccttcagctctaatgacatctactgggtgcggcaggcccctggcaagggcctggaatgggtcgctgtgatctggtacgacggcagcaacaaatactacgccgattctgtgaagggcagattcaccatcagcagagataattctaagaacaccctgtacctgcagatgaacagcctgagagccgaggataccgccgtgtactattgcgccaggggcgacaactggaacgacgagcaccattaccactactacatggacgtgtggggcaaaggcaccaccgtgaccgtggcggccgcaaccacgacgccagcgccgcggccaccaacaccggcgcccaccatcgcgtcgcagcccctgtccctgcgcccagaggcgtgccggccagcggcggggggcgcagtgcacacgagggggctggacttcgcctgtgatatctacatctgggcgcccttggccgggacttgtggggtccttctcctgtcactggttatcaccctttactgccggagggaccagaggctgccccccgatgcccacaagccccctgggggaggcagtttccggacccccatccaagaggagcaggccgacgcccactccaccctggccaagatcagagtgaagttcagcaggagcgcagacgcccccgcgtaccagcagggccagaaccagctctataacgagctcaatctaggacgaagagaggagtacgatgttttggacaagagacgtggccgggaccctgagatggggggaaagccgagaaggaagaaccctcaggaaggcctgtacaatgaactgcagaaagataagatggcggaggcctacagtgagattgggatgaaaggcgagcgccggaggggcaaggggcacgatggcctttaccagggtctcagtacagccaccaaggacacctacgacgcccttcacatgcaggccctgccccctcgcggctctggcgagggaaggggttccctgcttacttgcggcgacgtcgaagagaatcccggtccgatggccctcccagtaactgccctccttttgcccctcgcactccttcttcatgccgctcgccccaactgggtcaacgtgattagcgatttgaagaaaatcgaggaccttatacagtctatgcatattgacgctacactgtatactgagagtgatgtacacccgtcctgtaaggtaacggccatgaaatgctttcttctggagctccaggtcatcagcttggagtctggggacgcaagcatccacgatacggttgaaaacctcatcatccttgcgaacaactctctctcatctaatggaaacgttacagagagtgggtgtaaggagtgcgaagagttggaagaaaaaaacatcaaagaatttcttcaatccttcgttcacatagtgcaaatgttcattaacacgtccactaccacacccgccccgaggccacctacgccggcaccgactatcgccagtcaacccctctctctgcgccccgaggcttgccggcctgcggctggtggggcggtccacacccggggcctggattttgcgtgcgatatatacatctgggcacctcttgccggcacctgcggagtgctgcttctctcactcgttattacgctgtactgctaa

SEQ ID NO: 2251 - DNA, 2142 bp, synthetic construct; identical to SEQ ID NO: 2137
  misc_feature 1..2142: note = Synthetic
  source 1..2142: mol_type = other DNA

SEQ ID NO: 2252 - DNA, 2148 bp, synthetic construct
  misc_feature 1..2148: note = Synthetic
  source 1..2148: mol_type = other DNA
atggccttaccagtgaccgccttgctcctgccgctggccttgctgctccacgccgccaggccggagatcgtgctgacacagtcccctgctaccctgagcctgagccctggcgagcgggccaccctgagctgcagagccagccagagcgtgtccagctactttgcctggtatcagcagaagcctggccaggccccacggctgctgatctacgacgcctctaatagagccacaggcatcccagctagattcagcggctccggctccggaaccgatttcaccctgaccatctctagcctcgagcctgaggacttcgccgtttactattgtcagcaaagaagcaactggcctctgacatttggcggaggcacaaaggtggaaatcaagggcagcaccagcggcagcggcaagcccggctccggagagggcagcaccaagggccaactgcagctgcaggagagcggccctggactggtgaagcccagcgagacactgagcctgacatgcaccgtgtccggaggctctatcagcagcagcagctactactggggatggattagacagccccccggcaagggcctggaatggatcggcagcctgtactacagcggcagcacctactacaaccccagcctgaagtctagagtgaccatcagcgtggacaccagcaagaaccagttcagcctgaaactgagctctgtcacagccgccgataccgccgtgtactactgcgccgctgtgcagctggaaaggcggggctacttctacatggacgtgtggggcaaaggcaccaccgtgacagtgtctagcgcggccgcaaccacgacgccagcgccgcggccaccaacaccggcgcccaccatcgcgtcgcagcccctgtccctgcgcccagaggcgtgccggccagcggcggggggcgcagtgcacacgagggggctggacttcgcctgtgatatctacatctgggcgcccttggccgggacttgtggggtccttctcctgtcactggttatcaccctttactgccggagggaccagaggctgccccccgatgcccacaagccccctgggggaggcagtttccggacccccatccaagaggagcaggccgacgcccactccaccctggccaagatcagagtgaagttcagcaggagcgcagacgcccccgcgtaccagcagggccagaaccagctctataacgagctcaatctaggacgaagagaggagtacgatgttttggacaagagacgtggccgggaccctgagatggggggaaagccgagaaggaagaaccctcaggaaggcctgtacaatgaactgcagaaagataagatggcggaggcctacagtgagattgggatgaaaggcgagcgccggaggggcaaggggcacgatggcctttaccagggtctcagtacagccaccaaggacacctacgacgcccttcacatgcaggccctgccccctcgcggctctggcgagggaaggggttccctgcttacttgcggcgacgtcgaagagaatcccggtccgatggccctcccagtaactgccctccttttgcccctcgcactccttcttcatgccgctcgccccaactgggtcaacgtgattagcgatttgaagaaaatcgaggaccttatacagtctatgcatattgacgctacactgtatactgagagtgatgtacacccgtcctgtaaggtaacggccatgaaatgctttcttctggagctccaggtcatcagcttggagtctggggacgcaagcatccacgatacggttgaaaacctcatcatccttgcgaacaactctctctcatctaatggaaacgttacagagagtgggtgtaaggagtgcgaagagttggaagaaaaaaacatcaaagaatttcttcaatccttcgttcacatagtgcaaatgttcattaacacgtccactaccacacccgccccgaggccacctacgccggcaccgactatcgccagtcaacccctctctctgcgccccgaggcttgccggcctgcggctggtggggcggtccacacccggggcctggattttgcgtgcgatatatacatctgggcacctcttgccggcacctgcggagtgctgcttctctcactcgttattacgctgtactgctaa

SEQ ID NO: 2253 - DNA, 2154 bp, synthetic construct
  misc_feature 1..2154: note = Synthetic
  source 1..2154: mol_type = other DNA
atggccttaccagtgaccgccttgctcctgccgctggccttgctgctccacgccgccaggccgcagaccgtcgtgacccaggagcctagcttcagcgtgtccccaggcggaaccgtcacactgacatgcggcctcacaagcggcagcgtgtccaccagctactaccccaactggtaccagcagacacctggacaggcccctagaaccctgatctacagcaccaacatccggagcagcggagtgcccgacagattttctggcagcatcctgggcaacaaggccgctctgaccatcaccggcgctcaggccgacgacgagagcgactactactgcgtgctgtacatgggcagcggcatgttcatcttcggcagcggcacaaaggtgacagtgctgggcagcaccagcggcagcggcaagcccggctccggagagggcagcaccaagggccaagtgcaactggtggaaagcggcggcggcgttgtgcagcctggcagaagcctgcggctgtcatgcgccgccagcggttttaccttctctaattacggcatgcactgggtgcggcaggctcccggcaaaggcctggaatggatggccgtgatctggtccgatggccacaacaagtactacgccgatagcgtgaaaggcagattcaccattagcagagataattctaagaacaccctgtacctgcagatgaacagcctgcgcgccgaggacaccgccgtgtactattgtgccagagcccagctggagcggagatacttctactatatggacgtgtggggcaagggcaccaccgtgacagtgtctagcgcggccgcaaccacgacgccagcgccgcggccaccaacaccggcgcccaccatcgcgtcgcagcccctgtccctgcgcccagaggcgtgccggccagcggcggggggcgcagtgcacacgagggggctggacttcgcctgtgatatctacatctgggcgcccttggccgggacttgtggggtccttctcctgtcactggttatcaccctttactgccggagggaccagaggctgccccccgatgcccacaagccccctgggggaggcagtttccggacccccatccaagaggagcaggccgacgcccactccaccctggccaagatcagagtgaagttcagcaggagcgcagacgcccccgcgtaccagcagggccagaaccagctctataacgagctcaatctaggacgaagagaggagtacgatgttttggacaagagacgtggccgggaccctgagatggggggaaagccgagaaggaagaaccctcaggaaggcctgtacaatgaactgcagaaagataagatggcggaggcctacagtgagattgggatgaaaggcgagcgccggaggggcaaggggcacgatggcctttaccagggtctcagtacagccaccaaggacacctacgacgcccttcacatgcaggccctgccccctcgcggctctggcgagggaaggggttccctgcttacttgcggcgacgtcgaagagaatcccggtccgatggccctcccagtaactgccctccttttgcccctcgcactccttcttcatgccgctcgccccaactgggtcaacgtgattagcgatttgaagaaaatcgaggaccttatacagtctatgcatattgacgctacactgtatactgagagtgatgtacacccgtcctgtaaggtaacggccatgaaatgctttcttctggagctccaggtcatcagcttggagtctggggacgcaagcatccacgatacggttgaaaacctcatcatccttgcgaacaactctctctcatctaatggaaacgttacagagagtgggtgtaaggagtgcgaagagttggaagaaaaaaacatcaaagaatttcttcaatccttcgttcacatagtgcaaatgttcattaacacgtccactaccacacccgccccgaggccacctacgccggcaccgactatcgccagtcaacccctctctctgcgccccgaggcttgccggcctgcggctggtggggcggtccacacccggggcctggattttgcgtgcgatatatacatctgggcacctcttgccggcacctgcggagtgctgcttctctcactcgttattacgctgtactgctaa

SEQ ID NO: 2254 - DNA, 2154 bp, synthetic construct
  misc_feature 1..2154: note = Synthetic
  source 1..2154: mol_type = other DNA
atggccttaccagtgaccgccttgctcctgccgctggccttgctgctccacgccgccaggccggacatccagatgacacagagccctagcagcctgtctgcttccgtgggcgatagagtgacaatcacctgccgggcctcccagggcatcagctcctggctggcctggtaccagcagaagcctgagaaggcccctaagagcctgatctacgccgcttctagcctgcagggaggcgtgccaagtcggttcagcggcagcggcagcggcacagacttcaccctgaccatttcttctctgcaacctgaggacttcgccacctactactgtcagcaatacgacagctacccctacacctttggccagggcaccaagctggaaatcaagtggcagcaccagcggcagcggcaagcccggctccggagagggcagcaccaagggccaggttcagctggtgcagagcggagccgaggtgaaaaagcccggcgcaagcgtgaaggtgtcttgcaaggcctccggatataccttcaccagctacgatatcaactgggtgcggcaggccacaggccagggtctcgaatggatgggctggatgatccccaattctggcgacacaggcagcgcccaaaagttccagggcagagtgacaatgaccagaaacaccagcatcggaacagcctacatggaactgagctccctgagaagcgaggataccgccgtgtactattgtgccagaggcggctactgcaacagcacctcctgctactactactacatggacgtgtggggcaaaggcacaaccgtcaccgtgagctcgcggccgcaaccacgacgccagcgccgcggccaccaacaccggcgcccaccatcgcgtcgcagcccctgtccctgcgcccagaggcgtgccggccagcggcggggggcgcagtgcacacgagggggctggacttcgcctgtgatatctacatctgggcgcccttggccgggacttgtggggtccttctcctgtcactggttatcaccctttactgccggagggaccagaggctgccccccgatgcccacaagccccctgggggaggcagtttccggacccccatccaagaggagcaggccgacgcccactccaccctggccaagatcagagtgaagttcagcaggagcgcagacgcccccgcgtaccagcagggccagaaccagctctataacgagctcaatctaggacgaagagaggagtacgatgttttggacaagagacgtggccgggaccctgagatggggggaaagccgagaaggaagaaccctcaggaaggcctgtacaatgaactgcagaaagataagatggcggaggcctacagtgagattgggatgaaaggcgagcgccggaggggcaaggggcacgatggcctttaccagggtctcagtacagccaccaaggacacctacgacgcccttcacatgcaggccctgccccctcgcggctctggcgagggaaggggttccctgcttacttgcggcgacgtcgaagagaatcccggtccgatggccctcccagtaactgccctccttttgcccctcgcactccttcttcatgccgctcgccccaactgggtcaacgtgattagcgatttgaagaaaatcgaggaccttatacagtctatgcatattgacgctacactgtatactgagagtgatgtacacccgtcctgtaaggtaacggccatgaaatgctttcttctggagctccaggtcatcagcttggagtctggggacgcaagcatccacgatacggttgaaaacctcatcatccttgcgaacaactctctctcatctaatggaaacgttacagagagtgggtgtaaggagtgcgaagagttggaagaaaaaaacatcaaagaatttcttcaatccttcgttcacatagtgcaaatgttcattaacacgtccactaccacacccgccccgaggccacctacgccggcaccgactatcgccagtcaacccctctctctgcgccccgaggcttgccggcctgcggctggtggggcggtccacacccggggcctggattttgcgtgcgatatatacatctgggcacctcttgccggcacctgcggagtgctgcttctctcactcgttattacgctgtactgctaa

SEQ ID NO: 2255 - DNA, 2157 bp, synthetic construct
  misc_feature 1..2157: note = Synthetic
  source 1..2157: mol_type = other DNA
atggccttaccagtgaccgccttgctcctgccgctggccttgctgctccacgccgccaggccggatatccaggtcacacagagccctacctttctgagcgcttctgtgggcgaccgggtgaccatcacatgccgggccagccagggtattagcagctacctggcttggtaccagcagaagcccggcaaagcccctaagctgctgatctacggcgcttctaccctgcagtccggcgtgcccagcagattcagcggcagcggaagcggaacagagttcaccctgacaatctccagcctccaacctgaggacttcgccacatactattgtcagcaactgaatagctatccttggacattcggccagggcaccaaggtggaaatcaagggcagcaccagcggcagcggcaagcccggctccggagagggcagcaccaagggccaggttcaactggtgcagagcggcgccgaggtgaagaagcctggcgccagcgtgaaagtgtcctgcaaggccagcggatacacgtttaccagctacgacatcaactgggtcagacaggccaccggccagggcctggaatggatgggatggatgaaccccaacagcggcaacaccgtgtacgcccagaaattccagggcagagtgaccatgacacggaacaccagcatcagcaccgcctacatggaactgagctctctgagatccgaggatacagccgtgtactactgcgccagaggcggagatttctggagcggctaccacgactactactactacatggacgtgtggggcaagggcaccaccgtgaccgtgtcttctgcggccgcaaccacgacgccagcgccgcggccaccaacaccggcgcccaccatcgcgtcgcagcccctgtccctgcgcccagaggcgtgccggccagcggcggggggcgcagtgcacacgagggggctggacttcgcctgtgatatctacatctgggcgcccttggccgggacttgtggggtccttctcctgtcactggttatcaccctttactgccggagggaccagaggctgccccccgatgcccacaagccccctgggggaggcagtttccggacccccatccaagaggagcaggccgacgcccactccaccctggccaagatcagagtgaagttcagcaggagcgcagacgcccccgcgtaccagcagggccagaaccagctctataacgagctcaatctaggacgaagagaggagtacgatgttttggacaagagacgtggccgggaccctgagatggggggaaagccgagaaggaagaaccctcaggaaggcctgtacaatgaactgcagaaagataagatggcggaggcctacagtgagattgggatgaaaggcgagcgccggaggggcaaggggcacgatggcctttaccagggtctcagtacagccaccaaggacacctacgacgcccttcacatgcaggccctgccccctcgcggctctggcgagggaaggggttccctgcttacttgcggcgacgtcgaagagaatcccggtccgatggccctcccagtaactgccctccttttgcccctcgcactccttcttcatgccgctcgccccaactgggtcaacgtgattagcgatttgaagaaaatcgaggaccttatacagtctatgcatattgacgctacactgtatactgagagtgatgtacacccgtcctgtaaggtaacggccatgaaatgctttcttctggagctccaggtcatcagcttggagtctggggacgcaagcatccacgatacggttgaaaacctcatcatccttgcgaacaactctctctcatctaatggaaacgttacagagagtgggtgtaaggagtgcgaagagttggaagaaaaaaacatcaaagaatttcttcaatccttcgttcacatagtgcaaatgttcattaacacgtccactaccacacccgccccgaggccacctacgccggcaccgactatcgccagtcaacccctctctctgcgccccgaggcttgccggcctgcggctggtggggcggtccacacccggggcctggattttgcgtgcgatatatacatctgggcacctcttgccggcacctgcggagtgctgcttctctcactcgttattacgctgtactgctaa

SEQ ID NO: 2256 - DNA, 2151 bp, synthetic construct
  misc_feature 1..2151: note = Synthetic
  source 1..2151: mol_type = other DNA
atggccttaccagtgaccgccttgctcctgccgctggccttgctgctccacgccgccaggccgagctacgagctgacccagcctccatctgtctccgtgtctccaggccaaacagccagcatcacctgcagcggagataagctgggcgacaagtacgcctgctggtaccagcagaagcccggccagagccctgtgctggtgatctaccaggacagcaagcggcctagcggcatccccgagagattcagcggctccaacagcggcaataccgctacactgacaatcagcggcacacaggccatggatgaggccgactactactgccaggcctgggacagctctaccgccgtgttcggcggcggaacccagctcaccgccctgggcagcaccagcggcagcggcaagcccggctccggagagggcagcaccaagggccaagtgcagctgcaggagagcggtcctggcctggttaagcctagcgagacactgtctctgacttgcaccgtgtccggcggatctatcagcagctactactggtcctggatcagacagcccgccggcaaaggcctggaatggattggaagaatctacaccagcggcagcaccaactacaaccccagcctgaagtccagagtgacaatgagcgtggacacatctaagaaccagtttagcctgaaactgagcagcgtgaccgccgccgatacagctgtgtactattgtgcccgggaagaataccagctgctgcctgccctgtactactattactacatggacgtgtggggcaagggcaccaccgtgaccgtgtccagcgcggccgcaaccacgacgccagcgccgcggccaccaacaccggcgcccaccatcgcgtcgcagcccctgtccctgcgcccagaggcgtgccggccagcggcggggggcgcagtgcacacgagggggctggacttcgcctgtgatatctacatctgggcgcccttggccgggacttgtggggtccttctcctgtcactggttatcaccctttactgccggagggaccagaggctgccccccgatgcccacaagccccctgggggaggcagtttccggacccccatccaagaggagcaggccgacgcccactccaccctggccaagatcagagtgaagttcagcaggagcgcagacgcccccgcgtaccagcagggccagaaccagctctataacgagctcaatctaggacgaagagaggagtacgatgttttggacaagagacgtggccgggaccctgagatggggggaaagccgagaaggaagaaccctcaggaaggcctgtacaatgaactgcagaaagataagatggcggaggcctacagtgagattgggatgaaaggcgagcgccggaggggcaaggggcacgatggcctttaccagggtctcagtacagccaccaaggacacctacgacgcccttcacatgcaggccctgccccctcgcggctctggcgagggaaggggttccctgcttacttgcggcgacgtcgaagagaatcccggtccgatggccctcccagtaactgccctccttttgcccctcgcactccttcttcatgccgctcgccccaactgggtcaacgtgattagcgatttgaagaaaatcgaggaccttatacagtctatgcatattgacgctacactgtatactgagagtgatgtacacccgtcctgtaaggtaacggccatgaaatgctttcttctggagctccaggtcatcagcttggagtctggggacgcaagcatccacgatacggttgaaaacctcatcatccttgcgaacaactctctctcatctaatggaaacgttacagagagtgggtgtaaggagtgcgaagagttggaagaaaaaaacatcaaagaatttcttcaatccttcgttcacatagtgcaaatgttcattaacacgtccactaccacacccgccccgaggccacctacgccggcaccgactatcgccagtcaacccctctctctgcgccccgaggcttgccggcctgcggctggtggggcggtccacacccggggcctggattttgcgtgcgatatatacatctgggcacctcttgccggcacctgcggagtgctgcttctctcactcgttattacgctgtactgctaa

SEQ ID NO: 2257 - DNA, 2154 bp, synthetic construct
  misc_feature 1..2154: note = Synthetic
  source 1..2154: mol_type = other DNA
atggccttaccagtgaccgccttgctcctgccgctggccttgctgctccacgccgccaggccgcagaccgtggtcacccaggagcctagctttagcgtgtccccaggaggtacagtgaccctgacatgcggcctgactagcggatctgtgtccaccagctactaccccaactggtaccagcagacacctggccaggcccctagaaccctgatctacagcaccaatatccggagctccggcgtgcccgacagattcagcggaagcatcctgggcaacaaggccgctctgaccatcaccggcgcccaagctgatgacgagagcgactactattgtgtgctgtacatgggcagcggcatgttcatcttcggctctggcaccaaggtgaccgtgctgggcagcaccagcggcagcggcaagcccggctccggagagggcagcaccaagggccaagtgcagctggtggaatctggcggcggcgtggtgcagcctggtaggagcctgcggctgtcatgcgccgccacaggcttcaccttcagcagctacggcatgcactgggtcagacaggcccctggcaagggactggagtggatggtggtgatctggtccgatggccacaataaatactacgccgacagcgtgaagggcagatttaccattagccgggacaacagcaagaacaccctgtacctgcagatgaacagcctgagagctgaagataccgccgtgtactactgcgccagagcccagctcgagcggagatacttctactatatggacgtgtggggcaaaggcacaacagtgaccgtttcttctgcggccgcaaccacgacgccagcgccgcggccaccaacaccggcgcccaccatcgcgtcgcagcccctgtccctgcgcccagaggcgtgccggccagcggcggggggcgcagtgcacacgagggggctggacttcgcctgtgatatctacatctgggcgcccttggccgggacttgtggggtccttctcctgtcactggttatcaccctttactgccggagggaccagaggctgccccccgatgcccacaagccccctgggggaggcagtttccggacccccatccaagaggagcaggccgacgcccactccaccctggccaagatcagagtgaagttcagcaggagcgcagacgcccccgcgtaccagcagggccagaaccagctctataacgagctcaatctaggacgaagagaggagtacgatgttttggacaagagacgtggccgggaccctgagatggggggaaagccgagaaggaagaaccctcaggaaggcctgtacaatgaactgcagaaagataagatggcggaggcctacagtgagattgggatgaaaggcgagcgccggaggggcaaggggcacgatggcctttaccagggtctcagtacagccaccaaggacacctacgacgcccttcacatgcaggccctgccccctcgcggctctggcgagggaaggggttccctgcttacttgcggcgacgtcgaagagaatcccggtccgatggccctcccagtaactgccctccttttgcccctcgcactccttcttcatgccgctcgccccaactgggtcaacgtgattagcgatttgaagaaaatcgaggaccttatacagtctatgcatattgacgctacactgtatactgagagtgatgtacacccgtcctgtaaggtaacggccatgaaatgctttcttctggagctccaggtcatcagcttggagtctggggacgcaagcatccacgatacggttgaaaacctcatcatccttgcgaacaactctctctcatctaatggaaacgttacagagagtgggtgtaaggagtgcgaagagttggaagaaaaaaacatcaaagaatttcttcaatccttcgttcacatagtgcaaatgttcattaacacgtccactaccacacccgccccgaggccacctacgccggcaccgactatcgccagtcaacccctctctctgcgccccgaggcttgccggcctgcggctggtggggcggtccacacccggggcctggattttgcgtgcgatatatacatctgggcacctcttgccggcacctgcggagtgctgcttctctcactcgttattacgctgtactgctaa

SEQ ID NO: 2258 - DNA, 2154 bp, synthetic construct
  misc_feature 1..2154: note = Synthetic
  source 1..2154: mol_type = other DNA
atggccttaccagtgaccgccttgctcctgccgctggccttgctgctccacgccgccaggccggagatcgtgctgacccagtctccagatttccagtccgtgacccctaaggaaaaggtgaccatcacatgcagagccagccagtccatcggctctagcctgcactggtaccagcagaagcccgaccagtctcctatgctgctgatcaaattcgcctctcagagcatcagcggcgtgcccagccggttcagcggcagcggctccggcaccgacttcacactgacaatcaacagtctggaggccgaggatgccgctgcttactactgtcaccagagcagcagcctgccttggacatttggccagggcaccaaggtggaaattaagggcagcaccagcggcagcggcaagcccggctccggagagggcagcaccaagggccaagtgcagctggtcgagagcggaggcggcgttgtgcaacctggaaggagcctgcggctgagctgcgccgcttctggcttcacctttactagctacgacatgcactgggtgcggcaggcccctggcaagggcctggaatgggtcaccatcatctggttcgacggcagcaacaagtactacgccgatagcgtgaagggcagattcaccatcagcagagataatagcaagaataccctgtacctgcagatgaactctctctccgccgaggacaccgccgtgtactactgcgccagaggcgacaactggaacgacagatactattattactactacatggacgtgtggggcaaaggcaccaccgtgacagtgtccagcgcggccgcaaccacgacgccagcgccgcggccaccaacaccggcgcccaccatcgcgtcgcagcccctgtccctgcgcccagaggcgtgccggccagcggcggggggcgcagtgcacacgagggggctggacttcgcctgtgatatctacatctgggcgcccttggccgggacttgtggggtccttctcctgtcactggttatcaccctttactgccggagggaccagaggctgccccccgatgcccacaagccccctgggggaggcagtttccggacccccatccaagaggagcaggccgacgcccactccaccctggccaagatcagagtgaagttcagcaggagcgcagacgcccccgcgtaccagcagggccagaaccagctctataacgagctcaatctaggacgaagagaggagtacgatgttttggacaagagacgtggccgggaccctgagatggggggaaagccgagaaggaagaaccctcaggaaggcctgtacaatgaactgcagaaagataagatggcggaggcctacagtgagattgggatgaaaggcgagcgccggaggggcaaggggcacgatggcctttaccagggtctcagtacagccaccaaggacacctacgacgcccttcacatgcaggccctgccccctcgcggctctggcgagggaaggggttccctgcttacttgcggcgacgtcgaagagaatcccggtccgatggccctcccagtaactgccctccttttgcccctcgcactccttcttcatgccgctcgccccaactgggtcaacgtgattagcgatttgaagaaaatcgaggaccttatacagtctatgcatattgacgctacactgtatactgagagtgatgtacacccgtcctgtaaggtaacggccatgaaatgctttcttctggagctccaggtcatcagcttggagtctggggacgcaagcatccacgatacggttgaaaacctcatcatccttgcgaacaactctctctcatctaatggaaacgttacagagagtgggtgtaaggagtgcgaagagttggaagaaaaaaacatcaaagaatttcttcaatccttcgttcacatagtgcaaatgttcattaacacgtccactaccacacccgccccgaggccacctacgccggcaccgactatcgccagtcaacccctctctctgcgccccgaggcttgccggcctgcggctggtggggcggtccacacccggggcctggattttgcgtgcgatatatacatctgggcacctcttgccggcacctgcggagtgctgcttctctcactcgttattacgctgtactgctaa

SEQ ID NO: 2259 - DNA, 2169 bp, synthetic construct
  misc_feature 1..2169: note = Synthetic
  source 1..2169: mol_type = other DNA
atggccttaccagtgaccgccttgctcctgccgctggccttgctgctccacgccgccaggccggacatcgtgatgacccagcctcctctgagcagccctgtgacactgggccagccagctagcatcagctgtagatcttctcagtccctggtgcacagcgacggcaatacctacctgtcttggctgcagcagcggcctggccagccccccagactgctgatctacaaggtgtccaaccgcttcagcggcgtgccagacagattcagcggctctggcgccggcaccgacttcaccctgaagatcagcagagtcgaggccgaagatgtgggagtttactattgcacccaagctacacagttcccccacacctttggccagggcaccaagctcgagatcaagggcagcaccagcggcagcggcaagcccggctccggagagggcagcaccaagggccaagtgcagctggtccagagcggcgctgaggtgaagaaacctggcgcctctgtgaaagtgtcctgcaaggccagcggctacacctttaccagctacggcattagctgggtgcggcaggcccctggccagggtcttgagtggatgggctggatcagcgcctacaacggccacacagattatacacaaaagctgcagggcagagtgaccatgacaaccgataccagcaccaccacagcctacatggaactgagaagcctgagctctgccgacaccgccgtgtactactgcgtgcgggaagtggtgctgcctaccacagactactactacttctacatggacgtgtggggcaagggcaccacagtgacagtcagctccgcggccgcaaccacgacgccagcgccgcggccaccaacaccggcgcccaccatcgcgtcgcagcccctgtccctgcgcccagaggcgtgccggccagcggcggggggcgcagtgcacacgagggggctggacttcgcctgtgatatctacatctgggcgcccttggccgggacttgtggggtccttctcctgtcactggttatcaccctttactgccggagggaccagaggctgccccccgatgcccacaagccccctgggggaggcagtttccggacccccatccaagaggagcaggccgacgcccactccaccctggccaagatcagagtgaagttcagcaggagcgcagacgcccccgcgtaccagcagggccagaaccagctctataacgagctcaatctaggacgaagagaggagtacgatgttttggacaagagacgtggccgggaccctgagatggggggaaagccgagaaggaagaaccctcaggaaggcctgtacaatgaactgcagaaagataagatggcggaggcctacagtgagattgggatgaaaggcgagcgccggaggggcaaggggcacgatggcctttaccagggtctcagtacagccaccaaggacacctacgacgcccttcacatgcaggccctgccccctcgcggctctggcgagggaaggggttccctgcttacttgcggcgacgtcgaagagaatcccggtccgatggccctcccagtaactgccctccttttgcccctcgcactccttcttcatgccgctcgccccaactgggtcaacgtgattagcgatttgaagaaaatcgaggaccttatacagtctatgcatattgacgctacactgtatactgagagtgatgtacacccgtcctgtaaggtaacggccatgaaatgctttcttctggagctccaggtcatcagcttggagtctggggacgcaagcatccacgatacggttgaaaacctcatcatccttgcgaacaactctctctcatctaatggaaacgttacagagagtgggtgtaaggagtgcgaagagttggaagaaaaaaacatcaaagaatttcttcaatccttcgttcacatagtgcaaatgttcattaacacgtccactaccacacccgccccgaggccacctacgccggcaccgactatcgccagtcaacccctctctctgcgccccgaggcttgccggcctgcggctggtggggcggtccacacccggggcctggattttgcgtgcgatatatacatctgggcacctcttgccggcacctgcggagtgctgcttctctcactcgttattacgctgtactgctaa

SEQ ID NO: 2260 - DNA, 2166 bp, synthetic construct
  misc_feature 1..2166: note = Synthetic
  source 1..2166: mol_type = other DNA
atggccttaccagtgaccgccttgctcctgccgctggccttgctgctccacgccgccaggccggatatccagatgacacagagcccaagcagcctgagcgccagcgtgggcgacagagtgaccatcacatgcagagccagccagggcatcagcagctggctggcttggtaccagcaaaagcctgagaaggcccctaagagcctcatctacgccgctagcagcctgcagtccggcgtgccaagcagattcagcggctctggctctggcacagacttcaccctgaccatttccagcctgcaacctgaggattttgccacatactattgtcagcagtacaacagctacccttacaccttcggccagggcaccaagctggaaatcaagggcagcaccagcggcagcggcaagcccggctccggagagggcagcaccaagggccaagttcagctggtgcagagcggagccgaggtgaaaaagcccggcgcttctgtgaaggtgtcctgcaaggtgtctggctacaccctgacagagctgagcatgcactgggtccggcaggcccctggcaaaggcctggaatggatgggaggcttcgaccccgaagacggggagacaatctacgcccagaaattccagggcagagtgacaatgaccgaggacaccagcaccgatacagcctacatggaactgtcttccctgcggagcgaggacaccgccgtgtactactgcgccaccggcagaatcaccatggtgcggggcgtcatcatcccctactactattactacatggacgtgtggggcaagggcaccaccgtgaccgtgtcctctgcggccgcaaccacgacgccagcgccgcggccaccaacaccggcgcccaccatcgcgtcgcagcccctgtccctgcgcccagaggcgtgccggccagcggcggggggcgcagtgcacacgagggggctggacttcgcctgtgatatctacatctgggcgcccttggccgggacttgtggggtccttctcctgtcactggttatcaccctttactgccggagggaccagaggctgccccccgatgcccacaagccccctgggggaggcagtttccggacccccatccaagaggagcaggccgacgcccactccaccctggccaagatcagagtgaagttcagcaggagcgcagacgcccccgcgtaccagcagggccagaaccagctctataacgagctcaatctaggacgaagagaggagtacgatgttttggacaagagacgtggccgggaccctgagatggggggaaagccgagaaggaagaaccctcaggaaggcctgtacaatgaactgcagaaagataagatggcggaggcctacagtgagattgggatgaaaggcgagcgccggaggggcaaggggcacgatggcctttaccagggtctcagtacagccaccaaggacacctacgacgcccttcacatgcaggccctgccccctcgcggctctggcgagggaaggggttccctgcttacttgcggcgacgtcgaagagaatcccggtccgatggccctcccagtaactgccctccttttgcccctcgcactccttcttcatgccgctcgccccaactgggtcaacgtgattagcgatttgaagaaaatcgaggaccttatacagtctatgcatattgacgctacactgtatactgagagtgatgtacacccgtcctgtaaggtaacggccatgaaatgctttcttctggagctccaggtcatcagcttggagtctggggacgcaagcatccacgatacggttgaaaacctcatcatccttgcgaacaactctctctcatctaatggaaacgttacagagagtgggtgtaaggagtgcgaagagttggaagaaaaaaacatcaaagaatttcttcaatccttcgttcacatagtgcaaatgttcattaacacgtccactaccacacccgccccgaggccacctacgccggcaccgactatcgccagtcaacccctctctctgcgccccgaggcttgccggcctgcggctggtggggcggtccacacccggggcctggattttgcgtgcgatatatacatctgggcacctcttgccggcacctgcggagtgctgcttctctcactcgttattacgctgtactgctaa

SEQ ID NO: 2261 - DNA, 2160 bp, synthetic construct
  misc_feature 1..2160: note = Synthetic
  source 1..2160: mol_type = other DNA
atggccttaccagtgaccgccttgctcctgccgctggccttgctgctccacgccgccaggccggatatcgtgatgacccagacccccctgagcctgtccgtgaccccaggacaacctgccagcattagctgcaagagcagcaagtccctgctgcacagcgacggcaagacatacctgtactggtacctgcaaaagcccggccagcctcctcagctgctcatctacgaggtgtccaaccggttctctggcgtgcctgatagattcagcggaagcggcagcggaacagacttcacactgaagatcagcagagtcgaggccgaggacgtgggcgtttactactgcatgcagagcatccagttcccctggacattcggccagggcacaaaagtggaaatcaagggcagcaccagcggcagcggcaagcccggctccggagagggcagcaccaagggccaagtgcagctggtgcagagcggcaccgaggtgaagaagccaggcgcctctgtgaaagtgtcttgtaaagccagcggctacacctttaccaattacggcatcggctgggtgcggcaggcccctggacagggactggaatggatgggctggatcatcgcctacaacggctacacaaagtacgcccagatcctgcagggcagagtgacaatgaccaccgacaccagcaccaacaccgcttatatggaactgagaagcctgcggagcgacgacaccgccgtgtactattgcgccagacagcagctgggcggagattaccactactacatggacgtgtggggcaagggcaccaccgtcacagtgtccagcgcggccgcaaccacgacgccagcgccgcggccaccaacaccggcgcccaccatcgcgtcgcagcccctgtccctgcgcccagaggcgtgccggccagcggcggggggcgcagtgcacacgagggggctggacttcgcctgtgatatctacatctgggcgcccttggccgggacttgtggggtccttctcctgtcactggttatcaccctttactgccggagggaccagaggctgccccccgatgcccacaagccccctgggggaggcagtttccggacccccatccaagaggagcaggccgacgcccactccaccctggccaagatcagagtgaagttcagcaggagcgcagacgcccccgcgtaccagcagggccagaaccagctctataacgagctcaatctaggacgaagagaggagtacgatgttttggacaagagacgtggccgggaccctgagatggggggaaagccgagaaggaagaaccctcaggaaggcctgtacaatgaactgcagaaagataagatggcggaggcctacagtgagattgggatgaaaggcgagcgccggaggggcaaggggcacgatggcctttaccagggtctcagtacagccaccaaggacacctacgacgcccttcacatgcaggccctgccccctcgcggctctggcgagggaaggggttccctgcttacttgcggcgacgtcgaagagaatcccggtccgatggccctcccagtaactgccctccttttgcccctcgcactccttcttcatgccgctcgccccaactgggtcaacgtgattagcgatttgaagaaaatcgaggaccttatacagtctatgcatattgacgctacactgtatactgagagtgatgtacacccgtcctgtaaggtaacggccatgaaatgctttcttctggagctccaggtcatcagcttggagtctggggacgcaagcatccacgatacggttgaaaacctcatcatccttgcgaacaactctctctcatctaatggaaacgttacagagagtgggtgtaaggagtgcgaagagttggaagaaaaaaacatcaaagaatttcttcaatccttcgttcacatagtgcaaatgttcattaacacgtccactaccacacccgccccgaggccacctacgccggcaccgactatcgccagtcaacccctctctctgcgccccgaggcttgccggcctgcggctggtggggcggtccacacccggggcctggattttgcgtgcgatatatacatctgggcacctcttgccggcacctgcggagtgctgcttctctcactcgttattacgctgtactgctaa

SEQ ID NO: 2262 - DNA, 2160 bp, synthetic construct
  misc_feature 1..2160: note = Synthetic
  source 1..2160: mol_type = other DNA
atggccttaccagtgaccgccttgctcctgccgctggccttgctgctccacgccgccaggccggacatcgtgatgacccagacccctctgagcctgagcgtgacacctggacagcccgcttctattagctgtaaaagcagcaagtccctgctgcacagcgacggcaagacctacctgtactggtacctgcagaaacctggccagcctccacagctgctgatctacgaggtgtctacaagattcagcggagtgcctgatagattcagcggcagcggatctggaacagatttcaccctgaagatcagccgggttgaggccgaggacgtgggcgtgtactattgcatgcagtccatccagttcccctggaccttcggccagggcacaaaggtggaaatcaagggcagcaccagcggcagcggcaagcccggctccggagagggcagcaccaagggccaagtgcagctggtgcaaagcggcaccgaggtgaaaaagcccggcgcctctgtgaaggtctcctgcaaggccagcggatacacatttacaaattacggcatcggctgggtgcggcaggcccctggccagggcctggaatggatgggctggatcatcgcctacaacggctacaccaagtacgcccagatcctgcaaggcagagtcaccatgaccacagacaccagcaccaacaccgcttatatggaactgagaagcctgcggagcgacgatacagccgtgtactactgcgccagacagcagctcggcggcgactaccactactacatggacgtgtggggcaagggcaccaccgtgaccgtgtccagcgcggccgcaaccacgacgccagcgccgcggccaccaacaccggcgcccaccatcgcgtcgcagcccctgtccctgcgcccagaggcgtgccggccagcggcggggggcgcagtgcacacgagggggctggacttcgcctgtgatatctacatctgggcgcccttggccgggacttgtggggtccttctcctgtcactggttatcaccctttactgccggagggaccagaggctgccccccgatgcccacaagccccctgggggaggcagtttccggacccccatccaagaggagcaggccgacgcccactccaccctggccaagatcagagtgaagttcagcaggagcgcagacgcccccgcgtaccagcagggccagaaccagctctataacgagctcaatctaggacgaagagaggagtacgatgttttggacaagagacgtggccgggaccctgagatggggggaaagccgagaaggaagaaccctcaggaaggcctgtacaatgaactgcagaaagataagatggcggaggcctacagtgagattgggatgaaaggcgagcgccggaggggcaaggggcacgatggcctttaccagggtctcagtacagccaccaaggacacctacgacgcccttcacatgcaggccctgccccctcgcggctctggcgagggaaggggttccctgcttacttgcggcgacgtcgaagagaatcccggtccgatggccctcccagtaactgccctccttttgcccctcgcactccttcttcatgccgctcgccccaactgggtcaacgtgattagcgatttgaagaaaatcgaggaccttatacagtctatgcatattgacgctacactgtatactgagagtgatgtacacccgtcctgtaaggtaacggccatgaaatgctttcttctggagctccaggtcatcagcttggagtctggggacgcaagcatccacgatacggttgaaaacctcatcatccttgcgaacaactctctctcatctaatggaaacgttacagagagtgggtgtaaggagtgcgaagagttggaagaaaaaaacatcaaagaatttcttcaatccttcgttcacatagtgcaaatgttcattaacacgtccactaccacacccgccccgaggccacctacgccggcaccgactatcgccagtcaacccctctctctgcgccccgaggcttgccggcctgcggctggtggggcggtccacacccggggcctggattttgcgtgcgatatatacatctgggcacctcttgccggcacctgcggagtgctgcttctctcactcgttattacgctgtactgctaa

SEQ ID NO: 2263 - DNA, 2154 bp, synthetic construct
  misc_feature 1..2154: note = Synthetic
  source 1..2154: mol_type = other DNA
atggccttaccagtgaccgccttgctcctgccgctggccttgctgctccacgccgccaggccggatatccagatgacacagtcccctagctctctgtctgcttctgttggagatagagtgaccatcacctgccgggccagccagggcatcagcaactggctggcctggtaccagcagaagcccgagaaggcccctaagagcctgatctacgccgctagctccctccagggcggcgtgccatctagattcagcggctcaggcagcggaaccgacttcaccctgaccatcagctccctgcaacctgaggattttgccacatactactgccagcaatacgacagctacccctacaccttcggccagggcaccaagctggaaatcaagggcagcaccagcggcagcggcaagcccggctccggagagggcagcaccaagggccaagtgcagctggtgcagagcggaacagaggtgaaaaagcctggcgccagcgtgaaggtgtcttgtaaaaccagcggttatacattcacctcctacgacattaactgggtgcggcaggccaccggccagggcctggaatggatgggctggatgaaccccatctccggcgacacaggcagcgcccagaagttccagggaagagtgaccatgaccagaaataccagcatcggcaccgcctacatggaactgagcagcctgcggagcgaggacaccgccgtgtactactgcgccagaggcggatactgtagcagtacatcttgctactactattacatggacgtgtggggcaagggcacaacagtgacagtcagcagcgcggccgcaaccacgacgccagcgccgcggccaccaacaccggcgcccaccatcgcgtcgcagcccctgtccctgcgcccagaggcgtgccggccagcggcggggggcgcagtgcacacgagggggctggacttcgcctgtgatatctacatctgggcgcccttggccgggacttgtggggtccttctcctgtcactggttatcaccctttactgccggagggaccagaggctgccccccgatgcccacaagccccctgggggaggcagtttccggacccccatccaagaggagcaggccgacgcccactccaccctggccaagatcagagtgaagttcagcaggagcgcagacgcccccgcgtaccagcagggccagaaccagctctataacgagctcaatctaggacgaagagaggagtacgatgttttggacaagagacgtggccgggaccctgagatggggggaaagccgagaaggaagaaccctcaggaaggcctgtacaatgaactgcagaaagataagatggcggaggcctacagtgagattgggatgaaaggcgagcgccggaggggcaaggggcacgatggcctttaccagggtctcagtacagccaccaaggacacctacgacgcccttcacatgcaggccctgccccctcgcggctctggcgagggaaggggttccctgcttacttgcggcgacgtcgaagagaatcccggtccgatggccctcccagtaactgccctccttttgcccctcgcactccttcttcatgccgctcgccccaactgggtcaacgtgattagcgatttgaagaaaatcgaggaccttatacagtctatgcatattgacgctacactgtatactgagagtgatgtacacccgtcctgtaaggtaacggccatgaaatgctttcttctggagctccaggtcatcagcttggagtctggggacgcaagcatccacgatacggttgaaaacctcatcatccttgcgaacaactctctctcatctaatggaaacgttacagagagtgggtgtaaggagtgcgaagagttggaagaaaaaaacatcaaagaatttcttcaatccttcgttcacatagtgcaaatgttcattaacacgtccactaccacacccgccccgaggccacctacgccggcaccgactatcgccagtcaacccctctctctgcgccccgaggcttgccggcctgcggctggtggggcggtccacacccggggcctggattttgcgtgcgatatatacatctgggcacctcttgccggcacctgcggagtgctgcttctctcactcgttattacgctgtactgctaa

SEQ ID NO: 2264 - DNA, 2154 bp, synthetic construct
  misc_feature 1..2154: note = Synthetic
  source 1..2154: mol_type = other DNA
atggccttaccagtgaccgccttgctcctgccgctggccttgctgctccacgccgccaggccggacatccagatgacacagagccctagcagcctgagcgcctctgtgggcgaccgggtgaccatcacctgcagagccagccagggcatcagcagctggctggcctggtaccagcagaagcccgagaaggcccctaagtccctgatctacgccgccagctccctccagggcggagtgccatctagattcagcggctctggatctggcacagacttcaccctgaccatcagctctctgcagcctgaggattttgccacatactactgccagcaatacgacagctacccctacacattcggccaaggcacaaagctggaaatcaagggcagcaccagcggcagcggcaagcccggctccggagagggcagcaccaagggccaagtgcagctggtgcagagcggcgccgaggtgaagaagcctggcgcttccgtgaaggtgtcctgtaaagcttctggatacaccttcacctcttatgatattaactgggtgcggcaggccaccggccagggcctggaatggatgggctggatgatccccaacagcggcgataccggctccgcccagaaattccagggaagagttaccatgacaagaaacaccagcatcagcaccgcctacatggaactgagcagcctgcggagcgaggacaccgctgtgtactactgcgccagaggcggctactgtaatagcacaagctgctactattactacatggacgtgtggggcaagggcaccacagtgacagtcagctccgcggccgcaaccacgacgccagcgccgcggccaccaacaccggcgcccaccatcgcgtcgcagcccctgtccctgcgcccagaggcgtgccggccagcggcggggggcgcagtgcacacgagggggctggacttcgcctgtgatatctacatctgggcgcccttggccgggacttgtggggtccttctcctgtcactggttatcaccctttactgccggagggaccagaggctgccccccgatgcccacaagccccctgggggaggcagtttccggacccccatccaagaggagcaggccgacgcccactccaccctggccaagatcagagtgaagttcagcaggagcgcagacgcccccgcgtaccagcagggccagaaccagctctataacgagctcaatctaggacgaagagaggagtacgatgttttggacaagagacgtggccgggaccctgagatggggggaaagccgagaaggaagaaccctcaggaaggcctgtacaatgaactgcagaaagataagatggcggaggcctacagtgagattgggatgaaaggcgagcgccggaggggcaaggggcacgatggcctttaccagggtctcagtacagccaccaaggacacctacgacgcccttcacatgcaggccctgccccctcgcggctctggcgagggaaggggttccctgcttacttgcggcgacgtcgaagagaatcccggtccgatggccctcccagtaactgccctccttttgcccctcgcactccttcttcatgccgctcgccccaactgggtcaacgtgattagcgatttgaagaaaatcgaggaccttatacagtctatgcatattgacgctacactgtatactgagagtgatgtacacccgtcctgtaaggtaacggccatgaaatgctttcttctggagctccaggtcatcagcttggagtctggggacgcaagcatccacgatacggttgaaaacctcatcatccttgcgaacaactctctctcatctaatggaaacgttacagagagtgggtgtaaggagtgcgaagagttggaagaaaaaaacatcaaagaatttcttcaatccttcgttcacatagtgcaaatgttcattaacacgtccactaccacacccgccccgaggccacctacgccggcaccgactatcgccagtcaacccctctctctgcgccccgaggcttgccggcctgcggctggtggggcggtccacacccggggcctggattttgcgtgcgatatatacatctgggcacctcttgccggcacctgcggagtgctgcttctctcactcgttattacgctgtactgctaa

SEQ ID NO: 2265 - DNA, 2157 bp, synthetic construct
  misc_feature 1..2157: note = Synthetic
  source 1..2157: mol_type = other DNA
atggccttaccagtgaccgccttgctcctgccgctggccttgctgctccacgccgccaggccggagatcgtgctgacccaaagccccggcaccctgagcctgagccctggcgagagagccaccctgtcttgtagagcctctcagagcgtttctagctcctacctggcctggtaccagcagaagcccggacaggcccctagactgctgatctacggcgccagcagcagagctacaggcatccccgatagattcagcgacagcggctcaggcacagacttcaccctgacaattagccggctggaacccgaggatttcgccgtgtactattgccagcactacggcagctctcctccaagaatcaccttcggccctggcaccaaggtggacatcaaaggcagcaccagcggcagcggcaagcccggctccggagagggcagcaccaagggcgaggtgcagctgctggaaagcggaggcggcctggtgcaacctggaggttctctgcggctgagctgcgccgctagcggcttcacatttagcagctacgtgatgaactgggtgcggcaggctcctggaaagggcctggaatgggtctccagcgtgtccggcagcggcaacaacagcttttacgccgatagcgtgaagggcagattcaccatcagccgggacaacagcaagaacaccctctacctgcagatgaattctctgagagccgaggacaccgccgtgtactactgcgccagcaggtcctcttcttacctgtactactactattacatggacgtgtggggcaaaggcacaacagtgaccgtctccagcgcggccgcaaccacgacgccagcgccgcggccaccaacaccggcgcccaccatcgcgtcgcagcccctgtccctgcgcccagaggcgtgccggccagcggcggggggcgcagtgcacacgagggggctggacttcgcctgtgatatctacatctgggcgcccttggccgggacttgtggggtccttctcctgtcactggttatcaccctttactgccggagggaccagaggctgccccccgatgcccacaagccccctgggggaggcagtttccggacccccatccaagaggagcaggccgacgcccactccaccctggccaagatcagagtgaagttcagcaggagcgcagacgcccccgcgtaccagcagggccagaaccagctctataacgagctcaatctaggacgaagagaggagtacgatgttttggacaagagacgtggccgggaccctgagatggggggaaagccgagaaggaagaaccctcaggaaggcctgtacaatgaactgcagaaagataagatggcggaggcctacagtgagattgggatgaaaggcgagcgccggaggggcaaggggcacgatggcctttaccagggtctcagtacagccaccaaggacacctacgacgcccttcacatgcaggccctgccccctcgcggctctggcgagggaaggggttccctgcttacttgcggcgacgtcgaagagaatcccggtccgatggccctcccagtaactgccctccttttgcccctcgcactccttcttcatgccgctcgccccaactgggtcaacgtgattagcgatttgaagaaaatcgaggaccttatacagtctatgcatattgacgctacactgtatactgagagtgatgtacacccgtcctgtaaggtaacggccatgaaatgctttcttctggagctccaggtcatcagcttggagtctggggacgcaagcatccacgatacggttgaaaacctcatcatccttgcgaacaactctctctcatctaatggaaacgttacagagagtgggtgtaaggagtgcgaagagttggaagaaaaaaacatcaaagaatttcttcaatccttcgttcacatagtgcaaatgttcattaacacgtccactaccacacccgccccgaggccacctacgccggcaccgactatcgccagtcaacccctctctctgcgccccgaggcttgccggcctgcggctggtggggcggtccacacccggggcctggattttgcgtgcgatatatacatctgggcacctcttgccggcacctgcggagtgctgcttctctcactcgttattacgctgtactgctaa

SEQ ID NO: 2266 - protein, 493 aa, synthetic construct
  REGION 1..493: note = Synthetic
MALPVTALLLPLALLLHAARPEIVLTQSPDFQSVTPKEKVTITCRASQTIGSSLHWYQQKPDQSPKLLIKHASQSFSGVPSRFSGSGSGTDFTLTVNSLEAEDAATYYCHQSSSLPWTFGQGTKVEIKGSTSGSGKPGSGEGSTKGQVQLVESGGGVVQPGRSLRLSCAASGFTFSSHDMHWVRQAPGKGLDWVAVIWSDGNKKYYVDSAKGRFTISRDNSKNTVYLQMNSLRAEDTAIYYCARGDNWNDEHSYYYYMDVWGKGTTVTVSSAAAIEVMYPPPYLDNEKSNGTIIHVKGKHLCPSPLFPGPSKPFWVLVVVGGVLACYSLLVTVAFIIFWVRSKRSRLLHSDYMNMTPRRPGPTRKHYQPYAPPRDFAAYRSRVKFSRSADAPAYQQGQNQLYNELNLGRREEYDVLDKRRGRDPEMGGKPRRKNPQEGLYNELQKDKMAEAYSEIGMKGERRRGKGHDGLYQGLSTATKDTYDALHMQALPPR

SEQ ID NO: 2267 - protein, 493 aa, synthetic construct
  REGION 1..493: note = Synthetic
MALPVTALLLPLALLLHAARPEIVLTQSPDFQSVTPKEKVTITCRASQTIGSSLHWYQQKPDQSPKLLIKHASQSFSGVPSRFSGSGSGTDFTLTVNSLEAEDAATYYCHQSSSLPWTFGQGTKVEIKGSTSGSGKPGSGEGSTKGQVQLVESGGGVVQPGRSLRLSCAASGFTFSSHDMHWVRQAPGKGLDWVAVIWSDGNNKYYADSAKGRFTISRDNSKNTVYLQMNSLRAEDTAIYYCARGDNWNDEHSYYYYMDVWGKGTTVTVSSAAAIEVMYPPPYLDNEKSNGTIIHVKGKHLCPSPLFPGPSKPFWVLVVVGGVLACYSLLVTVAFIIFWVRSKRSRLLHSDYMNMTPRRPGPTRKHYQPYAPPRDFAAYRSRVKFSRSADAPAYQQGQNQLYNELNLGRREEYDVLDKRRGRDPEMGGKPRRKNPQEGLYNELQKDKMAEAYSEIGMKGERRRGKGHDGLYQGLSTATKDTYDALHMQALPPR

SEQ ID NO: 2268 - protein, 492 aa, synthetic construct
  REGION 1..492: note = Synthetic
MALPVTALLLPLALLLHAARPDIQMTQSPSSLSASVGDRVTITCRASQSISNYLNWYHQKPGKAPKLLIYAASSLESGVPSRFSGSGSGTDFTLTISSLQPEDFATYYCQQSYSNPLTFGGGTKVESKGSTSGSGKPGSGEGSTKGQLQLVQSGAEVKKPGASVKVSCKASGYTFTNYGISWLRQAPGQGLEWMGWISGYNDNTHYAQKFQGRVTMTTDTSTTTAYMELRNLRSDDTAVYYCARDGIAARPVYYYYMDVWGKGTTVTVSSAAAIEVMYPPPYLDNEKSNGTIIHVKGKHLCPSPLFPGPSKPFWVLVVVGGVLACYSLLVTVAFIIFWVRSKRSRLLHSDYMNMTPRRPGPTRKHYQPYAPPRDFAAYRSRVKFSRSADAPAYQQGQNQLYNELNLGRREEYDVLDKRRGRDPEMGGKPRRKNPQEGLYNELQKDKMAEAYSEIGMKGERRRGKGHDGLYQGLSTATKDTYDALHMQALPPR

SEQ ID NO: 2269 - protein, 493 aa, synthetic construct
  REGION 1..493: note = Synthetic
MALPVTALLLPLALLLHAARPEIVLTQSPDFQSVTPKEKVTITCRASQSIGSSLHWYQQKPDQSPKLLIKFASQSFSGVPSRFSGSGSGTDFTLTIHSLEAEDAATYYCHQSGSLPWTFGQGTKVEIKGSTSGSGKPGSGEGSTKGQVQLVESGGGVVQPGRSLRLSCVASGFTFSSNDIYWVRQAPGKGLEWVAVIWYDGSNKYYADSVKGRFTISRDNSKNTLYLQMNSLRAEDTAVYYCARGDNWNDEHHYHYYMDVWGKGTTVTVSSAAAIEVMYPPPYLDNEKSNGTIIHVKGKHLCPSPLFPGPSKPFWVLVVVGGVLACYSLLVTVAFIIFWVRSKRSRLLHSDYMNMTPRRPGPTRKHYQPYAPPRDFAAYRSRVKFSRSADAPAYQQGQNQLYNELNLGRREEYDVLDKRRGRDPEMGGKPRRKNPQEGLYNELQKDKMAEAYSEIGMKGERRRGKGHDGLYQGLSTATKDTYDALHMQALPPR

SEQ ID NO: 2270 - protein, 486 aa, synthetic construct
  REGION 1..486: note = Synthetic
MALPVTALLLPLALLLHAARPVTQEPSFSVSPGGTVTLTCGLSSGSVSTSYYPSWYQQTPGQAPRTLIYSTNIRSSGVPDRFSGSILGNKAALTITGAQADDESDYYCVLYMGSDIVVFGGGTKLTVLGSTSGSGKPGSGEGSTKGQVQLVESGGGVVQPGRSLRLSCAASGFTFSSYGMHWVRQAPGKGLEWVAVISYDGSNKYYADSVKGRFTISRDNSKTTLYLQMNSLRAEDTAVYYCARDHYYYYMDVWGKGTTVTVSSAAAIEVMYPPPYLDNEKSNGTIIHVKGKHLCPSPLFPGPSKPFWVLVVVGGVLACYSLLVTVAFIIFWVRSKRSRLLHSDYMNMTPRRPGPTRKHYQPYAPPRDFAAYRSRVKFSRSADAPAYQQGQNQLYNELNLGRREEYDVLDKRRGRDPEMGGKPRRKNPQEGLYNELQKDKMAEAYSEIGMKGERRRGKGHDGLYQGLSTATKDTYDALHMQALPPR

SEQ ID NO: 2271 - protein, 491 aa, synthetic construct
  REGION 1..491: note = Synthetic
MALPVTALLLPLALLLHAARPEIVLTQSPATLSLSPGERATLSCRASQSVSSYFAWYQQKPGQAPRLLIYDASNRATGIPARFSGSGSGTDFTLTISSLEPEDFAVYYCQQRSNWPLTFGGGTKVEIKGSTSGSGKPGSGEGSTKGQLQLQESGPGLVKPSETLSLTCTVSGGSISSSSYYWGWIRQPPGKGLEWIGSLYYSGSTYYNPSLKSRVTISVDTSKNQFSLKLSSVTAADTAVYYCAAVQLERRGYFYMDVWGKGTTVTVSSAAAIEVMYPPPYLDNEKSNGTIIHVKGKHLCPSPLFPGPSKPFWVLVVVGGVLACYSLLVTVAFIIFWVRSKRSRLLHSDYMNMTPRRPGPTRKHYQPYAPPRDFAAYRSRVKFSRSADAPAYQQGQNQLYNELNLGRREEYDVLDKRRGRDPEMGGKPRRKNPQEGLYNELQKDKMAEAYSEIGMKGERRRGKGHDGLYQGLSTATKDTYDALHMQALPPR

SEQ ID NO: 2272 - protein, 493 aa, synthetic construct
  REGION 1..493: note = Synthetic
MALPVTALLLPLALLLHAARPQTVVTQEPSFSVSPGGTVTLTCGLTSGSVSTSYYPNWYQQTPGQAPRTLIYSTNIRSSGVPDRFSGSILGNKAALTITGAQADDESDYYCVLYMGSGMFIFGSGTKVTVLGSTSGSGKPGSGEGSTKGQVQLVESGGGVVQPGRSLRLSCAASGFTFSNYGMHWVRQAPGKGLEWMAVIWSDGHNKYYADSVKGRFTISRDNSKNTLYLQMNSLRAEDTAVYYCARAQLERRYFYYMDVWGKGTTVTVSSAAAIEVMYPPPYLDNEKSNGTIIHVKGKHLCPSPLFPGPSKPFWVLVVVGGVLACYSLLVTVAFIIFWVRSKRSRLLHSDYMNMTPRRPGPTRKHYQPYAPPRDFAAYRSRVKFSRSADAPAYQQGQNQLYNELNLGRREEYDVLDKRRGRDPEMGGKPRRKNPQEGLYNELQKDKMAEAYSEIGMKGERRRGKGHDGLYQGLSTATKDTYDALHMQALPPR

SEQ ID NO: 2273 - protein, 493 aa, synthetic construct
  REGION 1..493: note = Synthetic
MALPVTALLLPLALLLHAARPDIQMTQSPSSLSASVGDRVTITCRASQGISSWLAWYQQKPEKAPKSLIYAASSLQGGVPSRFSGSGSGTDFTLTISSLQPEDFATYYCQQYDSYPYTFGQGTKLEIKGSTSGSGKPGSGEGSTKGQVQLVQSGAEVKKPGASVKVSCKASGYTFTSYDINWVRQATGQGLEWMGWMIPNSGDTGSAQKFQGRVTMTRNTSIGTAYMELSSLRSEDTAVYYCARGGYCNSTSCYYYYMDVWGKGTTVTVSSAAAIEVMYPPPYLDNEKSNGTIIHVKGKHLCPSPLFPGPSKPFWVLVVVGGVLACYSLLVTVAFIIFWVRSKRSRLLHSDYMNMTPRRPGPTRKHYQPYAPPRDFAAYRSRVKFSRSADAPAYQQGQNQLYNELNLGRREEYDVLDKRRGRDPEMGGKPRRKNPQEGLYNELQKDKMAEAYSEIGMKGERRRGKGHDGLYQGLSTATKDTYDALHMQALPPR

SEQ ID NO: 2274 - protein, 494 aa, synthetic construct
  REGION 1..494: note = Synthetic
MALPVTALLLPLALLLHAARPDIQVTQSPTFLSASVGDRVTITCRASQGISSYLAWYQQKPGKAPKLLIYGASTLQSGVPSRFSGSGSGTEFTLTISSLQPEDFATYYCQQLNSYPWTFGQGTKVEIKGSTSGSGKPGSGEGSTKGQVQLVQSGAEVKKPGASVKVSCKASGYTFTSYDINWVRQATGQGLEWMGWMNPNSGNTVYAQKFQGRVTMTRNTSISTAYMELSSLRSEDTAVYYCARGGDFWSGYHDYYYYMDVWGKGTTVTVSSAAAIEVMYPPPYLDNEKSNGTIIHVKGKHLCPSPLFPGPSKPFWVLVVVGGVLACYSLLVTVAFIIFWVRSKRSRLLHSDYMNMTPRRPGPTRKHYQPYAPPRDFAAYRSRVKFSRSADAPAYQQGQNQLYNELNLGRREEYDVLDKRRGRDPEMGGKPRRKNPQEGLYNELQKDKMAEAYSEIGMKGERRRGKGHDGLYQGLSTATKDTYDALHMQALPPR

SEQ ID NO: 2275 - protein, 492 aa, synthetic construct
  REGION 1..492: note = Synthetic
MALPVTALLLPLALLLHAARPSYELTQPPSVSVSPGQTASITCSGDKLGDKYACWYQQKPGQSPVLVIYQDSKRPSGIPERFSGSNSGNTATLTISGTQAMDEADYYCQAWDSSTAVFGGGTQLTALGSTSGSGKPGSGEGSTKGQVQLQESGPGLVKPSETLSLTCTVSGGSISSYYWSWIRQPAGKGLEWIGRIYTSGSTNYNPSLKSRVTMSVDTSKNQFSLKLSSVTAADTAVYYCAREEYQLLPALYYYYYMDVWGKGTTVTVSSAAAIEVMYPPPYLDNEKSNGTIIHVKGKHLCPSPLFPGPSKPFWVLVVVGGVLACYSLLVTVAFIIFWVRSKRSRLLHSDYMNMTPRRPGPTRKHYQPYAPPRDFAAYRSRVKFSRSADAPAYQQGQNQLYNELNLGRREEYDVLDKRRGRDPEMGGKPRRKNPQEGLYNELQKDKMAEAYSEIGMKGERRRGKGHDGLYQGLSTATKDTYDALHMQALPPR

SEQ ID NO: 2276 - protein, 493 aa, synthetic construct
  REGION 1..493: note = Synthetic
MALPVTALLLPLALLLHAARPQTVVTQEPSFSVSPGGTVTLTCGLTSGSVSTSYYPNWYQQTPGQAPRTLIYSTNIRSSGVPDRFSGSILGNKAALTITGAQADDESDYYCVLYMGSGMFIFGSGTKVTVLGSTSGSGKPGSGEGSTKGQVQLVESGGGVVQPGRSLRLSCAATGFTFSSYGMHWVRQAPGKGLEWMVVIWSDGHNKYYADSVKGRFTISRDNSKNTLYLQMNSLRAEDTAVYYCARAQLERRYFYYMDVWGKGTTVTVSSAAAIEVMYPPPYLDNEKSNGTIIHVKGKHLCPSPLFPGPSKPFWVLVVVGGVLACYSLLVTVAFIIFWVRSKRSRLLHSDYMNMTPRRPGPTRKHYQPYAPPRDFAAYRSRVKFSRSADAPAYQQGQNQLYNELNLGRREEYDVLDKRRGRDPEMGGKPRRKNPQEGLYNELQKDKMAEAYSEIGMKGERRRGKGHDGLYQGLSTATKDTYDALHMQALPPR

SEQ ID NO: 2277 - protein, 493 aa, synthetic construct
  REGION 1..493: note = Synthetic
MALPVTALLLPLALLLHAARPEIVLTQSPDFQSVTPKEKVTITCRASQSIGSSLHWYQQKPDQSPMLLIKFASQSISGVPSRFSGSGSGTDFTLTINSLEAEDAAAYYCHQSSSLPWTFGQGTKVEIKGSTSGSGKPGSGEGSTKGQVQLVESGGGVVQPGRSLRLSCAASGFTFTSYDMHWVRQAPGKGLEWVTIIWFDGSNKYYADSVKGRFTISRDNSKNTLYLQMNSLSAEDTAVYYCARGDNWNDRYYYYYYMDVWGKGTTVTVSSAAAIEVMYPPPYLDNEKSNGTIIHVKGKHLCPSPLFPGPSKPFWVLVVVGGVLACYSLLVTVAFIIFWVRSKRSRLLHSDYMNMTPRRPGPTRKHYQPYAPPRDFAAYRSRVKFSRSADAPAYQQGQNQLYNELNLGRREEYDVLDKRRGRDPEMGGKPRRKNPQEGLYNELQKDKMAEAYSEIGMKGERRRGKGHDGLYQGLSTATKDTYDALHMQALPPR

SEQ ID NO: 2278 - protein, 498 aa, synthetic construct
  REGION 1..498: note = Synthetic
MALPVTALLLPLALLLHAARPDIVMTQPPLSSPVTLGQPASISCRSSQSLVHSDGNTYLSWLQQRPGQPPRLLIYKVSNRFSGVPDRFSGSGAGTDFTLKISRVEAEDVGVYYCTQATQFPHTFGQGTKLEIKGSTSGSGKPGSGEGSTKGQVQLVQSGAEVKKPGASVKVSCKASGYTFTSYGISWVRQAPGQGLEWMGWISAYNGHTDYTQKLQGRVTMTTDTSTTTAYMELRSLSSADTAVYYCVREVVLPTTDYYYFYMDVWGKGTTVTVSSAAAIEVMYPPPYLDNEKSNGTIIHVKGKHLCPSPLFPGPSKPFWVLVVVGGVLACYSLLVTVAFIIFWVRSKRSRLLHSDYMNMTPRRPGPTRKHYQPYAPPRDFAAYRSRVKFSRSADAPAYQQGQNQLYNELNLGRREEYDVLDKRRGRDPEMGGKPRRKNPQEGLYNELQKDKMAEAYSEIGMKGERRRGKGHDGLYQGLSTATKDTYDALHMQALPPR

SEQ ID NO: 2279 - protein, 497 aa, synthetic construct
  REGION 1..497: note = Synthetic
MALPVTALLLPLALLLHAARPDIQMTQSPSSLSASVGDRVTITCRASQGISSWLAWYQQKPEKAPKSLIYAASSLQSGVPSRFSGSGSGTDFTLTISSLQPEDFATYYCQQYNSYPYTFGQGTKLEIKGSTSGSGKPGSGEGSTKGQVQLVQSGAEVKKPGASVKVSCKVSGYTLTELSMHWVRQAPGKGLEWMGGFDPEDGETIYAQKFQGRVTMTEDTSTDTAYMELSSLRSEDTAVYYCATGRITMVRGVIIPYYYYYMDVWGKGTTVTVSSAAAIEVMYPPPYLDNEKSNGTIIHVKGKHLCPSPLFPGPSKPFWVLVVVGGVLACYSLLVTVAFIIFWVRSKRSRLLHSDYMNMTPRRPGPTRKHYQPYAPPRDFAAYRSRVKFSRSADAPAYQQGQNQLYNELNLGRREEYDVLDKRRGRDPEMGGKPRRKNPQEGLYNELQKDKMAEAYSEIGMKGERRRGKGHDGLYQGLSTATKDTYDALHMQALPPR

SEQ ID NO: 2280 - protein, 495 aa, synthetic construct
  REGION 1..495: note = Synthetic
MALPVTALLLPLALLLHAARPDIVMTQTPLSLSVTPGQPASISCKSSKSLLHSDGKTYLYWYLQKPGQPPQLLIYEVSNRFSGVPDRFSGSGSGTDFTLKISRVEAEDVGVYYCMQSIQFPWTFGQGTKVEIKGSTSGSGKPGSGEGSTKGQVQLVQSGTEVKKPGASVKVSCKASGYTFTNYGIGWVRQAPGQGLEWMGWIIAYNGYTKYAQILQGRVTMTTDTSTNTAYMELRSLRSDDTAVYYCARQQLGGDYHYYMDVWGKGTTVTVSSAAAIEVMYPPPYLDNEKSNGTIIHVKGKHLCPSPLFPGPSKPFWVLVVVGGVLACYSLLVTVAFIIFWVRSKRSRLLHSDYMNMTPRRPGPTRKHYQPYAPPRDFAAYRSRVKFSRSADAPAYQQGQNQLYNELNLGRREEYDVLDKRRGRDPEMGGKPRRKNPQEGLYNELQKDKMAEAYSEIGMKGERRRGKGHDGLYQGLSTATKDTYDALHMQALPPR

SEQ ID NO: 2281 - protein, 495 aa, synthetic construct
  REGION 1..495: note = Synthetic
MALPVTALLLPLALLLHAARPDIVMTQTPLSLSVTPGQPASISCKSSKSLLHSDGKTYLYWYLQKPGQPPQLLIYEVSTRFSGVPDRFSGSGSGTDFTLKISRVEAEDVGVYYCMQSIQFPWTFGQGTKVEIKGSTSGSGKPGSGEGSTKGQVQLVQSGTEVKKPGASVKVSCKASGYTFTNYGIGWVRQAPGQGLEWMGWIIAYNGYTKYAQILQGRVTMTTDTSTNTAYMELRSLRSDDTAVYYCARQQLGGDYHYYMDVWGKGTTVTVSSAAAIEVMYPPPYLDNEKSNGTIIHVKGKHLCPSPLFPGPSKPFWVLVVVGGVLACYSLLVTVAFIIFWVRSKRSRLLHSDYMNMTPRRPGPTRKHYQPYAPPRDFAAYRSRVKFSRSADAPAYQQGQNQLYNELNLGRREEYDVLDKRRGRDPEMGGKPRRKNPQEGLYNELQKDKMAEAYSEIGMKGERRRGKGHDGLYQGLSTATKDTYDALHMQALPPR

SEQ ID NO: 2282 - protein, 493 aa, synthetic construct
  REGION 1..493: note = Synthetic
MALPVTALLLPLALLLHAARPDIQMTQSPSSLSASVGDRVTITCRASQGISNWLAWYQQKPEKAPKSLIYAASSLQGGVPSRFSGSGSGTDFTLTISSLQPEDFATYYCQQYDSYPYTFGQGTKLEIKGSTSGSGKPGSGEGSTKGQVQLVQSGTEVKKPGASVKVSCKTSGYTFTSYDINWVRQATGQGLEWMGWMNPISGDTGSAQKFQGRVTMTRNTSIGTAYMELSSLRSEDTAVYYCARGGYCSSTSCYYYYMDVWGKGTTVTVSSAAAIEVMYPPPYLDNEKSNGTIIHVKGKHLCPSPLFPGPSKPFWVLVVVGGVLACYSLLVTVAFIIFWVRSKRSRLLHSDYMNMTPRRPGPTRKHYQPYAPPRDFAAYRSRVKFSRSADAPAYQQGQNQLYNELNLGRREEYDVLDKRRGRDPEMGGKPRRKNPQEGLYNELQKDKMAEAYSEIGMKGERRRGKGHDGLYQGLSTATKDTYDALHMQALPPR

SEQ ID NO: 2283 - protein, 493 aa, synthetic construct
  REGION 1..493: note = Synthetic
MALPVTALLLPLALLLHAARPDIQMTQSPSSLSASVGDRVTITCRASQGISSWLAWYQQKPEKAPKSLIYAASSLQGGVPSRFSGSGSGTDFTLTISSLQPEDFATYYCQQYDSYPYTFGQGTKLEIKGSTSGSGKPGSGEGSTKGQVQLVQSGAEVKKPGASVKVSCKASGYTFTSYDINWVRQATGQGLEWMGWMIPNSGDTGSAQKFQGRVTMTRNTSISTAYMELSSLRSEDTAVYYCARGGYCNSTSCYYYYMDVWGKGTTVTVSSAAAIEVMYPPPYLDNEKSNGTIIHVKGKHLCPSPLFPGPSKPFWVLVVVGGVLACYSLLVTVAFIIFWVRSKRSRLLHSDYMNMTPRRPGPTRKHYQPYAPPRDFAAYRSRVKFSRSADAPAYQQGQNQLYNELNLGRREEYDVLDKRRGRDPEMGGKPRRKNPQEGLYNELQKDKMAEAYSEIGMKGERRRGKGHDGLYQGLSTATKDTYDALHMQALPPR

SEQ ID NO: 2284 - protein, 494 aa, synthetic construct
  REGION 1..494: note = Synthetic
MALPVTALLLPLALLLHAARPEIVLTQSPGTLSLSPGERATLSCRASQSVSSSYLAWYQQKPGQAPRLLIYGASSRATGIPDRFSDSGSGTDFTLTISRLEPEDFAVYYCQHYGSSPPRITFGPGTKVDIKGSTSGSGKPGSGEGSTKGEVQLLESGGGLVQPGGSLRLSCAASGFTFSSYVMNWVRQAPGKGLEWVSSVSGSGNNSFYADSVKGRFTISRDNSKNTLYLQMNSLRAEDTAVYYCASRSSSYLYYYYYMDVWGKGTTVTVSSAAAIEVMYPPPYLDNEKSNGTIIHVKGKHLCPSPLFPGPSKPFWVLVVVGGVLACYSLLVTVAFIIFWVRSKRSRLLHSDYMNMTPRRPGPTRKHYQPYAPPRDFAAYRSRVKFSRSADAPAYQQGQNQLYNELNLGRREEYDVLDKRRGRDPEMGGKPRRKNPQEGLYNELQKDKMAEAYSEIGMKGERRRGKGHDGLYQGLSTATKDTYDALHMQALPPR

SEQ ID NO: 2285 - DNA, 1479 bp, synthetic construct
  misc_feature 1..1479: note = Synthetic
  source 1..1479: mol_type = other DNA
atggccttaccagtgaccgccttgctcctgccgctggccttgctgctccacgccgccaggccggaaattgtgctgactcagtctccagactttcagtctgtgactccaaaggagaaagtcaccatcacctgccgggccagtcagaccattggcagtagcttacactggtaccagcagaaaccagatcagtctccaaagctcctcatcaagcatgcttcccagtccttctcaggggtcccctcgaggttcagtggcagtggatctgggacagatttcaccctcaccgtcaatagcctggaagctgaagatgctgcaacgtattactgtcatcagagtagtagtttaccgtggacgttcggccaagggaccaaggtggaaatcaaaggcagcaccagcggcagcggcaagcccggctccggagagggcagcaccaagggccaggtgcagctggtggagtctgggggaggcgtggtccagcctgggaggtccctgagactttcctgtgcagcgtctggattcaccttcagcagtcatgacatgcactgggtccgccaggctccaggcaaggggctggactgggtggcagttatatggagtgatggaaataaaaaatactatgtagactccgcgaagggccggttcaccatctccagagacaattccaagaacacggtgtatctgcaaatgaacagcctgagagccgaggacacggctatatattactgtgcgagaggtgacaactggaacgacgaacactcctactattactacatggacgtctggggcaaggggaccacggtcaccgtctcctcagcggccgcaattgaagttatgtatcctcctccttacctagacaatgagaagagcaatggaaccattatccatgtgaaagggaaacacctttgtccaagtcccctatttcccggaccttctaagcccttttgggtgctggtggtggttgggggagtcctggcttgctatagcttgctagtaacagtggcctttattattttctgggtgaggagtaagaggagcaggctcctgcacagtgactacatgaacatgactccccgccgccccgggcccacccgcaagcattaccagccctatgccccaccacgcgacttcgcagcctatcgctccagagtgaagttcagcaggagcgcagacgcccccgcgtaccagcagggccagaaccagctctataacgagctcaatctaggacgaagagaggagtacgatgttttggacaagagacgtggccgggaccctgagatggggggaaagccgagaaggaagaaccctcaggaaggcctgtacaatgaactgcagaaagataagatggcggaggcctacagtgagattgggatgaaaggcgagcgccggaggggcaaggggcacgatggcctttaccagggtctcagtacagccaccaaggacacctacgacgcccttcacatgcaggccctgccccctcgc

SEQ ID NO: 2286 - DNA, 1479 bp, synthetic construct
  misc_feature 1..1479: note = Synthetic
  source 1..1479: mol_type = other DNA
atggccttaccagtgaccgccttgctcctgccgctggccttgctgctccacgccgccaggccggaaattgtgctgactcagtctccagactttcagtctgtgactccaaaggagaaagtcaccatcacctgccgggccagtcagaccattggcagtagcttacactggtaccagcagaaaccagatcagtctccaaagctcctcatcaagcatgcttcccagtccttctcaggggtcccctcgaggttcagtggcagtggatctgggacagatttcaccctcaccgtcaatagcctggaagctgaagatgctgcaacgtattactgtcatcagagtagtagtttaccgtggacgttcggccaagggaccaaggtggaaatcaaaggcagcaccagcggcagcggcaagcccggctccggagagggcagcaccaagggccaggtgcagctggtggagtctgggggaggcgtggtccagcctgggaggtccctgagactttcctgtgcagcgtctggattcaccttcagtagtcatgacatgcactgggtccgccaggctccaggcaaggggctggactgggtggcagttatatggagtgatggaaataataaatactatgcagactccgcgaagggccggttcaccatctccagagacaattccaagaacacggtgtatctgcaaatgaacagcctgagagccgaggacacggctatatattactgtgcgagaggtgacaactggaacgacgaacactcctactattactacatggacgtctggggcaaggggaccacggtcaccgtctcctcagcggccgcaattgaagttatgtatcctcctccttacctagacaatgagaagagcaatggaaccattatccatgtgaaagggaaacacctttgtccaagtcccctatttcccggaccttctaagcccttttgggtgctggtggtggttgggggagtcctggcttgctatagcttgctagtaacagtggcctttattattttctgggtgaggagtaagaggagcaggctcctgcacagtgactacatgaacatgactccccgccgccccgggcccacccgcaagcattaccagccctatgccccaccacgcgacttcgcagcctatcgctccagagtgaagttcagcaggagcgcagacgcccccgcgtaccagcagggccagaaccagctctataacgagctcaatctaggacgaagagaggagtacgatgttttggacaagagacgtggccgggaccctgagatggggggaaagccgagaaggaagaaccctcaggaaggcctgtacaatgaactgcagaaagataagatggcggaggcctacagtgagattgggatgaaaggcgagcgccggaggggcaaggggcacgatggcctttaccagggtctcagtacagccaccaaggacacctacgacgcccttcacatgcaggccctgccccctcgc

SEQ ID NO: 2287 - DNA, 1476 bp, synthetic construct
  misc_feature 1..1476: note = Synthetic
  source 1..1476: mol_type = other DNA
atggccttaccagtgaccgccttgctcctgccgctggccttgctgctccacgccgccaggccggacatacagatgacccagtctccatcctccctgtctgcatctgtaggagacagagtcaccatcacttgccgggcaagccagagcattagcaactatttaaattggtatcaccagaaaccagggaaagcccctaagctcctgatctatgctgcatccagtttggaaagtggggtcccatcaaggttcagtggcagtggatctgggacagatttcactctcaccatcagcagtctgcaacctgaagattttgcaacttactactgtcaacagagttacagtaacccgctcactttcggcggagggaccaaggtggagagcaaaggcagcaccagcggcagcggcaagcccggctccggagagggcagcaccaagggccagcttcagctggtgcagtctggagctgaggtgaagaagcctggggcctcagtgaaggtctcctgcaaggcttctggttacacctttaccaactatggtatcagctggttgcgacaggcccctggacaagggcttgagtggatgggatggatcagtggttacaatgataacacacactatgcacagaagttccagggcagagtcaccatgaccacagacacatccacgaccacagcctacatggaactgaggaacctgagatctgacgacacggccgtgtattactgtgcgagagatgggatagcagctcgtccagtctactactactacatggacgtctggggcaaagggaccacggtcaccgtctcctcagcggccgcaattgaagttatgtatcctcctccttacctagacaatgagaagagcaatggaaccattatccatgtgaaagggaaacacctttgtccaagtcccctatttcccggaccttctaagcccttttgggtgctggtggtggttgggggagtcctggcttgctatagcttgctagtaacagtggcctttattattttctgggtgaggagtaagaggagcaggctcctgcacagtgactacatgaacatgactccccgccgccccgggcccacccgcaagcattaccagccctatgccccaccacgcgacttcgcagcctatcgctccagagtgaagttcagcaggagcgcagacgcccccgcgtaccagcagggccagaaccagctctataacgagctcaatctaggacgaagagaggagtacgatgttttggacaagagacgtggccgggaccctgagatggggggaaagccgagaaggaagaaccctcaggaaggcctgtacaatgaactgcagaaagataagatggcggaggcctacagtgagattgggatgaaaggcgagcgccggaggggcaaggggcacgatggcctttaccagggtctcagtacagccaccaaggacacctacgacgcccttcacatgcaggccctgccccctcgc

SEQ ID NO: 2288 - DNA, 1479 bp, synthetic construct
  misc_feature 1..1479: note = Synthetic
  source 1..1479: mol_type = other DNA
atggccttaccagtgaccgccttgctcctgccgctggccttgctgctccacgccgccaggccggaaattgtgctgactcagtctccagactttcagtctgtgactccaaaggagaaagtcaccatcacctgccgggccagtcagagcattggtagtagcttacactggtaccagcagaaaccagatcagtctccaaagctcctcatcaagtttgcttcccagtccttctcaggggtcccctcgaggttcagtggcagtggatctgggacagatttcaccctcaccatccatagcctggaagctgaagatgctgcaacgtattactgtcatcagagtggtagtttaccgtggacgttcggccaagggaccaaggtggaaatcaaaggcagcaccagcggcagcggcaagcccggctccggagagggcagcaccaagggccaggtgcagctggtggagtctgggggaggcgtggtccagcctgggaggtccctgagactctcctgtgtagcgtctggattcaccttcagtagcaatgacatatactgggtccgccaggccccaggcaaggggctggagtgggtggcagttatatggtatgatggaagtaataaatactatgcagactccgtgaagggccgattcaccatctccagagacaattccaagaacacgctgtatctgcaaatgaacagcctgagagccgaggacacggctgtgtattactgtgcgagaggtgacaactggaacgacgaacaccactaccactactacatggacgtctggggcaaagggaccacggtcaccgtctcctcagcggccgcaattgaagttatgtatcctcctccttacctagacaatgagaagagcaatggaaccattatccatgtgaaagggaaacacctttgtccaagtcccctatttcccggaccttctaagcccttttgggtgctggtggtggttgggggagtcctggcttgctatagcttgctagtaacagtggcctttattattttctgggtgaggagtaagaggagcaggctcctgcacagtgactacatgaacatgactccccgccgccccgggcccacccgcaagcattaccagccctatgccccaccacgcgacttcgcagcctatcgctccagagtgaagttcagcaggagcgcagacgcccccgcgtaccagcagggccagaaccagctctataacgagctcaatctaggacgaagagaggagtacgatgttttggacaagagacgtggccgggaccctgagatggggggaaagccgagaaggaagaaccctcaggaaggcctgtacaatgaactgcagaaagataagatggcggaggcctacagtgagattgggatgaaaggcgagcgccggaggggcaaggggcacgatggcctttaccagggtctcagtacagccaccaaggacacctacgacgcccttcacatgcaggccctgccccctcgc

SEQ ID NO: 2289 - DNA, 1459 bp, synthetic construct
  misc_feature 1..1459: note = Synthetic
  source 1..1459: mol_type = other DNA
atggccttaccagtgaccgccttgctcctgccgctggccttgctgctccacgccgccaggccgggtgacccaggagccatcgttctcagtgtcccctggagggacagtcacactcacttgtggcttgagctctggctcagtctctactagttactaccccagctggtaccagcagaccccaggccaggctccacgcacgctcatctacagcacaaacattcgctcttctggggtccctgatcgcttctctggctccatccttgggaacaaagctgccctcaccatcacgggggcccaggcagatgatgaatctgattattactgtgtgctgtatatgggtagtgacattgtggtattcggcggagggaccaagctgaccgtcctaggcagcaccagcggcagcggcaagcccggctccggagagggcagcaccaagggccaggtgcagttggtggagtctgggggaggcgtggtccagcctgggaggtccctgagactctcctgtgcagcctctggattcaccttcagtagctatggcatgcactgggtccgccaggctccaggcaaggggctggagtgggtggcagttatatcatatgatggaagtaataaatactatgcagactccgtgaagggccgattcaccatctccagggacaattccaagaccacgctgtatctgcaaatgaacagcctgagagctgaggacacggctgtgtattactgtgcgagagatcactactactactacatggacgtctggggcaaagggaccacggtcaccgtctcctcagcggccgcaattgaagttatgtatcctcctccttacctagacaatgagaagagcaatggaaccattatccatgtgaaagggaaacacctttgtccaagtcccctatttcccggaccttctaagcccttttgggtgctggtggtggttgggggagtcctggcttgctatagcttgctagtaacagtggcctttattattttctgggtgaggagtaagaggagcaggctcctgcacagtgactacatgaacatgactccccgccgccccgggcccacccgcaagcattaccagccctatgccccaccacgcgacttcgcagcctatcgctccagagtgaagttcagcaggagcgcagacgcccccgcgtaccagcagggccagaaccagctctataacgagctcaatctaggacgaagagaggagtacgatgttttggacaagagacgtggccgggaccctgagatggggggaaagccgagaaggaagaaccctcaggaaggcctgtacaatgaactgcagaaagataagatggcggaggcctacagtgagattgggatgaaaggcgagcgccggaggggcaaggggcacgatggcctttaccagggtctcagtacagccaccaaggacacctacgacgcccttcacatgcaggccctgccccctcgc

SEQ ID NO: 2290 - DNA, 1473 bp, synthetic construct
  misc_feature 1..1473: note = Synthetic
  source 1..1473: mol_type = other DNA
atggccttaccagtgaccgccttgctcctgccgctggccttgctgctccacgccgccaggccggaaattgtgttgacacagtctccagccaccctgtctttgtctccaggggaaagagccaccctctcctgcagggccagtcagagtgttagcagctactttgcctggtaccaacagaaacctggccaggctcccaggctcctcatctatgatgcatccaacagggccactggcatcccagccaggttcagtggcagtgggtctgggacagacttcactctcaccatcagcagcctggagcctgaagattttgcagtttattactgtcagcagcgtagcaactggcctctcactttcggcggagggaccaaggtggagatcaaaggcagcaccagcggcagcggcaagcccggctccggagagggcagcaccaagggccaactgcagctgcaggagtcgggcccaggactggtgaagccttcggagaccctgtccctcacctgcactgtctctggtggctccatcagcagtagtagttactactggggctggatccgccagcccccagggaaggggctggagtggattgggagtctctattatagtgggagcacctactacaacccgtccctcaagagtcgagtcaccatatccgttgacacgtccaagaaccagttctccctgaagctgagctctgtgaccgccgcagacacggctgtgtattactgtgcggccgtacaactggaacgacgtgggtacttctacatggacgtctggggcaaagggaccacggtcaccgtctcctcagcggccgcaattgaagttatgtatcctcctccttacctagacaatgagaagagcaatggaaccattatccatgtgaaagggaaacacctttgtccaagtcccctatttcccggaccttctaagcccttttgggtgctggtggtggttgggggagtcctggcttgctatagcttgctagtaacagtggcctttattattttctgggtgaggagtaagaggagcaggctcctgcacagtgactacatgaacatgactccccgccgccccgggcccacccgcaagcattaccagccctatgccccaccacgcgacttcgcagcctatcgctccagagtgaagttcagcaggagcgcagacgcccccgcgtaccagcagggccagaaccagctctataacgagctcaatctaggacgaagagaggagtacgatgttttggacaagagacgtggccgggaccctgagatggggggaaagccgagaaggaagaaccctcaggaaggcctgtacaatgaactgcagaaagataagatggcggaggcctacagtgagattgggatgaaaggcgagcgccggaggggcaaggggcacgatggcctttaccagggtctcagtacagccaccaaggacacctacgacgcccttcacatgcaggccctgccccctcgc

SEQ ID NO: 2291 - DNA, 1479 bp, synthetic construct
  misc_feature 1..1479: note = Synthetic
  source 1..1479: mol_type = other DNA
atggccttaccagtgaccgccttgctcctgccgctggccttgctgctccacgccgccaggccgcagactgtagtgacccaggaaccatcgttctcagtgtcccctggagggacagtcacactcacttgtggcttgacctctggctcagtctctactagttactaccccaactggtaccagcagaccccaggccaggctccacgcacgctcatctatagtacaaatattcgctcttctggggtccctgatcgcttctctggctccatccttgggaacaaagctgccctcaccatcacgggggcccaggcagatgatgaatctgattattactgtgtgctgtatatgggtagtggcatgtttattttcggcagtggaaccaaggtcactgtcctaggcagcaccagcggcagcggcaagcccggctccggagagggcagcaccaagggccaggtgcagctggtggagtctgggggaggcgtggtccagcctgggaggtccctgagactctcctgtgcagcatctggattcaccttcagtaactatggcatgcactgggtccgccaggctccaggcaaggggctggagtggatggcagttatatggtctgatggacataataaatactatgcagactccgtgaagggccgattcaccatctccagagacaattccaagaacacgctgtatctgcaaatgaacagcctgagagccgaggacacggctgtgtattactgtgcgagggcacaattggaacgacggtacttctactacatggacgtctggggcaaagggaccacggtcaccgtctcctcagcggccgcaattgaagttatgtatcctcctccttacctagacaatgagaagagcaatggaaccattatccatgtgaaagggaaacacctttgtccaagtcccctatttcccggaccttctaagcccttttgggtgctggtggtggttgggggagtcctggcttgctatagcttgctagtaacagtggcctttattattttctgggtgaggagtaagaggagcaggctcctgcacagtgactacatgaacatgactccccgccgccccgggcccacccgcaagcattaccagccctatgccccaccacgcgacttcgcagcctatcgctccagagtgaagttcagcaggagcgcagacgcccccgcgtaccagcagggccagaaccagctctataacgagctcaatctaggacgaagagaggagtacgatgttttggacaagagacgtggccgggaccctgagatggggggaaagccgagaaggaagaaccctcaggaaggcctgtacaatgaactgcagaaagataagatggcggaggcctacagtgagattgggatgaaaggcgagcgccggaggggcaaggggcacgatggcctttaccagggtctcagtacagccaccaaggacacctacgacgcccttcacatgcaggccctgccccctcgc

SEQ ID NO: 2292 - DNA, 1479 bp, synthetic construct
  misc_feature 1..1479: note = Synthetic
  source 1..1479: mol_type = other DNA
atggccttaccagtgaccgccttgctcctgccgctggccttgctgctccacgccgccaggccggacatccagatgacccagtctccatcctcactgtctgcatctgtaggagacagagtcaccatcacttgtcgggcgagtcagggtattagcagctggttagcctggtatcagcagaaaccagagaaagcccctaagtccctgatctatgctgcatccagtttacagggtggggtcccatcaaggttcagcggcagtggatctgggacagatttcactctcaccatcagcagcctgcagcctgaagattttgcaacttattactgccaacagtatgatagttacccgtacacttttggccaggggaccaagctggagatcaaaggcagcaccagcggcagcggcaagcccggctccggagagggcagcaccaagggccaggtgcagctggtgcagtctggggctgaggtgaagaagcctggggcctcagtgaaggtctcctgcaaggcttctggatacaccttcaccagttatgatatcaactgggtgcgacaggccactggacaagggcttgagtggatgggatggatgatccctaacagtggtgacacaggctctgcacagaagttccagggcagagtcaccatgaccaggaacacctccataggcacagcctacatggagctgagcagcctgagatctgaggacacggccgtttattactgtgcgagaggcggatattgtaatagtaccagttgctactactactacatggacgtctggggcaaagggaccacggtcaccgtctcctcagcggccgcaattgaagttatgtatcctcctccttacctagacaatgagaagagcaatggaaccattatccatgtgaaagggaaacacctttgtccaagtcccctatttcccggaccttctaagcccttttgggtgctggtggtggttgggggagtcctggcttgctatagcttgctagtaacagtggcctttattattttctgggtgaggagtaagaggagcaggctcctgcacagtgactacatgaacatgactccccgccgccccgggcccacccgcaagcattaccagccctatgccccaccacgcgacttcgcagcctatcgctccagagtgaagttcagcaggagcgcagacgcccccgcgtaccagcagggccagaaccagctctataacgagctcaatctaggacgaagagaggagtacgatgttttggacaagagacgtggccgggaccctgagatggggggaaagccgagaaggaagaaccctcaggaaggcctgtacaatgaactgcagaaagataagatggcggaggcctacagtgagattgggatgaaaggcgagcgccggaggggcaaggggcacgatggcctttaccagggtctcagtacagccaccaaggacacctacgacgcccttcacatgcaggccctgccccctcgc

SEQ ID NO: 2293 - DNA, 1482 bp, synthetic construct
  misc_feature 1..1482: note = Synthetic
  source 1..1482: mol_type = other DNA
atggccttaccagtgaccgccttgctcctgccgctggccttgctgctccacgccgccaggccggacatccaggtgacccagtctccaaccttcctgtctgcatctgtaggagacagagtcaccatcacttgccgggccagtcagggcattagcagttatttagcctggtatcagcaaaaaccagggaaagcccctaagctcctgatctatggtgcatccactttgcaaagtggggtcccatcaaggttcagcggcagtggatctgggacagaattcactctcacaatcagcagcctgcagcctgaagattttgcaacttattactgtcaacagcttaatagttacccgtggacgttcggccaagggaccaaggtggaaatcaaaggcagcaccagcggcagcggcaagcccggctccggagagggcagcaccaagggccaggtgcagctggtgcagtctggggctgaggtgaagaagcctggggcctcagtgaaggtctcctgcaaggcttctggatacaccttcaccagttatgatatcaactgggtgcgacaggccactggacaagggcttgagtggatgggatggatgaaccctaatagtggtaacacagtctatgcacagaagttccagggcagagtcaccatgaccaggaacacctccataagcacagcctacatggagctgagcagcctgagatctgaggacacggccgtgtattactgtgcgagaggaggcgatttttggagtggttaccatgactactactactacatggacgtctggggcaaagggaccacggtcaccgtctcctcagcggccgcaattgaagttatgtatcctcctccttacctagacaatgagaagagcaatggaaccattatccatgtgaaagggaaacacctttgtccaagtcccctatttcccggaccttctaagcccttttgggtgctggtggtggttgggggagtcctggcttgctatagcttgctagtaacagtggcctttattattttctgggtgaggagtaagaggagcaggctcctgcacagtgactacatgaacatgactccccgccgccccgggcccacccgcaagcattaccagccctatgccccaccacgcgacttcgcagcctatcgctccagagtgaagttcagcaggagcgcagacgcccccgcgtaccagcagggccagaaccagctctataacgagctcaatctaggacgaagagaggagtacgatgttttggacaagagacgtggccgggaccctgagatggggggaaagccgagaaggaagaaccctcaggaaggcctgtacaatgaactgcagaaagataagatggcggaggcctacagtgagattgggatgaaaggcgagcgccggaggggcaaggggcacgatggcctttaccagggtctcagtacagccaccaaggacacctacgacgcccttcacatgcaggccctgccccctcgc

SEQ ID NO: 2294 - DNA, 1476 bp, synthetic construct
  misc_feature 1..1476: note = Synthetic
  source 1..1476: mol_type = other DNA
atggccttaccagtgaccgccttgctcctgccgctggccttgctgctccacgccgccaggccgtcctatgagctgactcagccaccctcagtgtccgtgtccccaggacagacagccagcatcacctgctctggagataaattgggggataaatatgcttgctggtatcagcagaagccaggccagtcccctgtgctggtcatctatcaagatagcaagcggccctcagggatccctgagcgattctctggctccaactctgggaacacagccactctgaccatcagcgggacccaggctatggatgaggctgactattactgtcaggcgtgggacagcagcactgctgtgttcggaggaggcacccagctgaccgccctcggcagcaccagcggcagcggcaagcccggctccggagagggcagcaccaagggccaggtgcagctgcaggagtcgggcccaggactggtgaagccttcggagaccctgtccctcacctgcactgtctctggtggctccatcagtagttactactggagctggatccggcagcccgccgggaagggactggagtggattgggcgtatctataccagtgggagcaccaactacaacccctccctcaagagtcgagtcaccatgtcagtagacacgtccaagaaccagttctccctgaagctgagctctgtgaccgccgcggacacggccgtgtattactgtgcgagagaggagtaccagctgctaccggccctctactactactactacatggacgtctggggcaaagggaccacggtcaccgtctcctcagcggccgcaattgaagttatgtatcctcctccttacctagacaatgagaagagcaatggaaccattatccatgtgaaagggaaacacctttgtccaagtcccctatttcccggaccttctaagcccttttgggtgctggtggtggttgggggagtcctggcttgctatagcttgctagtaacagtggcctttattattttctgggtgaggagtaagaggagcaggctcctgcacagtgactacatgaacatgactccccgccgccccgggcccacccgcaagcattaccagccctatgccccaccacgcgacttcgcagcctatcgctccagagtgaagttcagcaggagcgcagacgcccccgcgtaccagcagggccagaaccagctctataacgagctcaatctaggacgaagagaggagtacgatgttttggacaagagacgtggccgggaccctgagatggggggaaagccgagaaggaagaaccctcaggaaggcctgtacaatgaactgcagaaagataagatggcggaggcctacagtgagattgggatgaaaggcgagcgccggaggggcaaggggcacgatggcctttaccagggtctcagtacagccaccaaggacacctacgacgcccttcacatgcaggccctgccccctcgc

SEQ ID NO: 2295 - DNA, 1479 bp, synthetic construct
  misc_feature 1..1479: note = Synthetic
  source 1..1479: mol_type = other DNA
atggccttaccagtgaccgccttgctcctgccgctggccttgctgctccacgccgccaggccgcagactgtagtgacccaggaaccatcgttctcagtgtcccctggagggacagtcacactcacttgtggcttgacctctggctcagtctctactagttactaccccaactggtaccagcagaccccaggccaggctccacgcacgctcatctacagcacaaatattcgctcttctggggtccctgatcgcttctctggctccatccttgggaacaaagctgccctcaccatcacgggggcccaggcagatgatgaatctgattattactgtgtgctgtatatgggtagtggcatgtttattttcggcagtggaaccaaggtcactgtcctaggcagcaccagcggcagcggcaagcccggctccggagagggcagcaccaagggccaggtgcagctggtggagtctgggggaggcgtggtccagcctgggaggtccctgagactctcctgtgcagcaactggattcaccttcagtagctatggcatgcactgggtccgccaggctccaggcaaggggctggagtggatggtagttatatggtctgatggacataataaatactatgcagactccgtgaagggccgattcaccatctccagagacaattccaagaacacgctgtatctgcaaatgaacagcctgagagccgaggacacggctgtgtattactgtgcgagggcacaactggaacgacggtacttctactacatggacgtctggggcaaagggaccacggtcaccgtctcctcagcggccgcaattgaagttatgtatcctcctccttacctagacaatgagaagagcaatggaaccattatccatgtgaaagggaaacacctttgtccaagtcccctatttcccggaccttctaagcccttttgggtgctggtggtggttgggggagtcctggcttgctatagcttgctagtaacagtggcctttattattttctgggtgaggagtaagaggagcaggctcctgcacagtgactacatgaacatgactccccgccgccccgggcccacccgcaagcattaccagccctatgccccaccacgcgacttcgcagcctatcgctccagagtgaagttcagcaggagcgcagacgcccccgcgtaccagcagggccagaaccagctctataacgagctcaatctaggacgaagagaggagtacgatgttttggacaagagacgtggccgggaccctgagatggggggaaagccgagaaggaagaaccctcaggaaggcctgtacaatgaactgcagaaagataagatggcggaggcctacagtgagattgggatgaaaggcgagcgccggaggggcaaggggcacgatggcctttaccagggtctcagtacagccaccaaggacacctacgacgcccttcacatgcaggccctgccccctcgc

SEQ ID NO: 2296 - DNA, 1479 bp, synthetic construct
  misc_feature 1..1479: note = Synthetic
  source 1..1479: mol_type = other DNA
atggccttaccagtgaccgccttgctcctgccgctggccttgctgctccacgccgccaggccggaaattgtgctgactcagtctccagactttcagtctgtgactccaaaggagaaagtcaccatcacctgccgggccagtcagagcattggtagtagcttacactggtaccagcagaaaccagatcagtctccaatgctcctcatcaagtttgcttcccagtccatctcaggggtcccctcgaggttcagtggcagtggatctgggacagatttcaccctcaccatcaatagcctggaagctgaagatgctgcagcgtattactgtcatcagagtagtagtttaccgtggacgttcggccaagggaccaaggtggaaatcaaaggcagcaccagcggcagcggcaagcccggctccggagagggcagcaccaagggccaggtgcagctggtggagtctgggggaggcgtggtccagcctgggaggtccctgagactctcctgtgcagcgtctggattcaccttcactagttatgacatgcactgggtccgccaggctccaggcaaggggctggagtgggtgacaattatatggtttgatggaagtaataaatactatgcagactccgtgaagggccgattcaccatctccagagacaattccaagaacacgctgtatctgcaaatgaacagcctgagcgccgaggacacggctgtgtattactgtgcgagaggagacaactggaacgaccggtactactactactactacatggacgtctggggcaaagggaccacggtcaccgtctcctcagcggccgcaattgaagttatgtatcctcctccttacctagacaatgagaagagcaatggaaccattatccatgtgaaagggaaacacctttgtccaagtcccctatttcccggaccttctaagcccttttgggtgctggtggtggttgggggagtcctggcttgctatagcttgctagtaacagtggcctttattattttctgggtgaggagtaagaggagcaggctcctgcacagtgactacatgaacatgactccccgccgccccgggcccacccgcaagcattaccagccctatgccccaccacgcgacttcgcagcctatcgctccagagtgaagttcagcaggagcgcagacgcccccgcgtaccagcagggccagaaccagctctataacgagctcaatctaggacgaagagaggagtacgatgttttggacaagagacgtggccgggaccctgagatggggggaaagccgagaaggaagaaccctcaggaaggcctgtacaatgaactgcagaaagataagatggcggaggcctacagtgagattgggatgaaaggcgagcgccggaggggcaaggggcacgatggcctttaccagggtctcagtacagccaccaaggacacctacgacgcccttcacatgcaggccctgccccctcgc

SEQ ID NO: 2297 - DNA, 1494 bp, synthetic construct
  misc_feature 1..1494: note = Synthetic
  source 1..1494: mol_type = other DNA
atggccttaccagtgaccgccttgctcctgccgctggccttgctgctccacgccgccaggccggatattgtgatgacccagcctccactctcctcgcctgtcacccttggacagccggcctccatctcctgcaggtctagtcaaagcctcgtacacagtgatggaaacacctacttgagttggcttcagcagaggccaggccagcctccaagactcctaatttataaggtttctaaccggttctctggggtcccagacagattcagtggcagtggggcagggacagatttcacactgaaaatcagcagggtggaagctgaggatgtcggggtttattactgcacgcaagctacacaatttcctcacacttttggccaggggaccaagctggagatcaaaggcagcaccagcggcagcggcaagcccggctccggagagggcagcaccaagggccaggttcagctggtgcagtctggagctgaggtgaagaagcctggggcctcagtgaaggtctcctgcaaggcttctggttacacctttaccagctatggtatcagctgggtgcgacaggcccctggacaagggcttgagtggatggggtggatcagcgcttacaatggtcacacagactatacacagaaactccagggcagagtcaccatgaccacagacacatccacgaccacagcctacatggaactgaggagcctgagctctgccgacacggccgtgtattactgtgtgagagaagtggtacttcccaccacggactactactacttttacatggacgtctggggcaaagggaccacggtcaccgtctcctcagcggccgcaattgaagttatgtatcctcctccttacctagacaatgagaagagcaatggaaccattatccatgtgaaagggaaacacctttgtccaagtcccctatttcccggaccttctaagcccttttgggtgctggtggtggttgggggagtcctggcttgctatagcttgctagtaacagtggcctttattattttctgggtgaggagtaagaggagcaggctcctgcacagtgactacatgaacatgactccccgccgccccgggcccacccgcaagcattaccagccctatgccccaccacgcgacttcgcagcctatcgctccagagtgaagttcagcaggagcgcagacgcccccgcgtaccagcagggccagaaccagctctataacgagctcaatctaggacgaagagaggagtacgatgttttggacaagagacgtggccgggaccctgagatggggggaaagccgagaaggaagaaccctcaggaaggcctgtacaatgaactgcagaaagataagatggcggaggcctacagtgagattgggatgaaaggcgagcgccggaggggcaaggggcacgatggcctttaccagggtctcagtacagccaccaaggacacctacgacgcccttcacatgcaggccctgccccctcgc

SEQ ID NO: 2298 - DNA, 1491 bp, synthetic construct
  misc_feature 1..1491: note = Synthetic
  source 1..1491: mol_type = other DNA
atggccttaccagtgaccgccttgctcctgccgctggccttgctgctccacgccgccaggccggacatccagatgacccagtctccatcctcactgtctgcatctgtaggagacagagtcaccatcacttgtcgggcgagtcagggtattagcagctggttagcctggtatcagcagaaaccagagaaagcccctaagtccctgatctatgctgcatccagtttgcaaagtggggtcccatcaaggttcagcggcagtggatctgggacagatttcactctcaccatcagcagcctgcagcctgaagattttgcaacttattactgccaacagtataatagttacccgtacacttttggccaggggaccaagctggagatcaaaggcagcaccagcggcagcggcaagcccggctccggagagggcagcaccaagggccaggtccagctggtacagtctggggctgaggtgaagaagcctggggcctcagtgaaggtctcctgcaaggtttccggatacaccctcactgaattatccatgcactgggtgcgacaggctcctggaaaagggcttgagtggatgggaggttttgatcctgaagatggtgaaacaatctacgcacagaagttccagggcagagtcaccatgaccgaggacacatctacagacacagcctacatggagctgagcagcctgagatctgaggacacggccgtgtattactgtgcaacaggacgtattactatggttcggggagttattatcccctactactactactacatggacgtctggggcaaagggaccacggtcaccgtctcctcagcggccgcaattgaagttatgtatcctcctccttacctagacaatgagaagagcaatggaaccattatccatgtgaaagggaaacacctttgtccaagtcccctatttcccggaccttctaagcccttttgggtgctggtggtggttgggggagtcctggcttgctatagcttgctagtaacagtggcctttattattttctgggtgaggagtaagaggagcaggctcctgcacagtgactacatgaacatgactccccgccgccccgggcccacccgcaagcattaccagccctatgccccaccacgcgacttcgcagcctatcgctccagagtgaagttcagcaggagcgcagacgcccccgcgtaccagcagggccagaaccagctctataacgagctcaatctaggacgaagagaggagtacgatgttttggacaagagacgtggccgggaccctgagatggggggaaagccgagaaggaagaaccctcaggaaggcctgtacaatgaactgcagaaagataagatggcggaggcctacagtgagattgggatgaaaggcgagcgccggaggggcaaggggcacgatggcctttaccagggtctcagtacagccaccaaggacacctacgacgcccttcacatgcaggccctgccccctcgc

SEQ ID NO: 2299 - DNA, 1485 bp, synthetic construct
  misc_feature 1..1485: note = Synthetic
  source 1..1485: mol_type = other DNA
atggccttaccagtgaccgccttgctcctgccgctggccttgctgctccacgccgccaggccggatattgtgatgacccagactccactctctctgtccgtcacccctggacagccggcctccatctcctgcaagtctagtaagagcctcctgcatagtgatggaaagacctatttgtattggtacctgcagaagccaggccagcctccacagctcctgatctatgaagtttccaaccggttctctggagtgccagataggttcagtggcagcgggtcagggacagatttcacactgaaaatcagccgggtggaggctgaggatgttggggtttattactgcatgcaaagtatacaatttccgtggacgttcggccaagggaccaaggtggaaatcaagggcagcaccagcggcagcggcaagcccggctccggagagggcagcaccaagggccaggttcagctggtgcagtctggaactgaggtgaagaagcctggggcctcagtgaaggtctcctgcaaggcttctggttacacctttaccaactatggtatcggctgggtgcgacaggcccctggacaagggcttgagtggatgggatggatcatcgcttacaatggttacacaaagtatgcacagattctccagggcagagtcaccatgaccacagacacatccacgaacacagcttatatggaactgaggagcctgagatctgacgacacggccgtgtattactgtgcgagacagcagctcgggggggactaccactactacatggacgtctggggcaaagggaccacggtcaccgtctcctcagcggccgcaattgaagttatgtatcctcctccttacctagacaatgagaagagcaatggaaccattatccatgtgaaagggaaacacctttgtccaagtcccctatttcccggaccttctaagcccttttgggtgctggtggtggttgggggagtcctggcttgctatagcttgctagtaacagtggcctttattattttctgggtgaggagtaagaggagcaggctcctgcacagtgactacatgaacatgactccccgccgccccgggcccacccgcaagcattaccagccctatgccccaccacgcgacttcgcagcctatcgctccagagtgaagttcagcaggagcgcagacgcccccgcgtaccagcagggccagaaccagctctataacgagctcaatctaggacgaagagaggagtacgatgttttggacaagagacgtggccgggaccctgagatggggggaaagccgagaaggaagaaccctcaggaaggcctgtacaatgaactgcagaaagataagatggcggaggcctacagtgagattgggatgaaaggcgagcgccggaggggcaaggggcacgatggcctttaccagggtctcagtacagccaccaaggacacctacgacgcccttcacatgcaggccctgccccctcgc

SEQ ID NO: 2300 - DNA, 1485 bp, synthetic construct
  misc_feature 1..1485: note = Synthetic
  source 1..1485: mol_type = other DNA
atggccttaccagtgaccgccttgctcctgccgctggccttgctgctccacgccgccaggccggatattgtgatgacccagactccactctctctgtccgtcacccctggacagccggcctccatctcctgcaagtctagtaagagcctcctgcatagtgatggaaagacctatttgtattggtacctgcagaagccaggccagcctccacagctcctgatctatgaagtttccacccggttctctggagtgccagataggttcagtggcagcgggtcagggacagatttcacactgaaaatcagccgggtggaggctgaggatgttggggtttattactgcatgcaaagtatacagtttccgtggacgttcggccaagggaccaaggtggaaatcaaaggcagcaccagcggcagcggcaagcccggctccggagagggcagcaccaagggccaggttcagctggtgcagtctggaactgaggtgaagaagcctggggcctcagtgaaggtctcctgcaaggcttctggttacacctttaccaactatggtatcggctgggtgcgacaggcccctggacaagggcttgagtggatgggatggatcatcgcttacaatggttacacaaagtatgcacagattctccagggcagagtcaccatgaccacggacacatccacgaacacagcctatatggaactgaggagcctgagatctgacgacacggccgtgtattactgtgcgcgacagcagctcgggggggactaccactactacatggacgtctggggcaaagggaccacggtcaccgtctcttcagcggccgcaattgaagttatgtatcctcctccttacctagacaatgagaagagcaatggaaccattatccatgtgaaagggaaacacctttgtccaagtcccctatttcccggaccttctaagcccttttgggtgctggtggtggttgggggagtcctggcttgctatagcttgctagtaacagtggcctttattattttctgggtgaggagtaagaggagcaggctcctgcacagtgactacatgaacatgactccccgccgccccgggcccacccgcaagcattaccagccctatgccccaccacgcgacttcgcagcctatcgctccagagtgaagttcagcaggagcgcagacgcccccgcgtaccagcagggccagaaccagctctataacgagctcaatctaggacgaagagaggagtacgatgttttggacaagagacgtggccgggaccctgagatggggggaaagccgagaaggaagaaccctcaggaaggcctgtacaatgaactgcagaaagataagatggcggaggcctacagtgagattgggatgaaaggcgagcgccggaggggcaaggggcacgatggcctttaccagggtctcagtacagccaccaaggacacctacgacgcccttcacatgcaggccctgccccctcgc

SEQ ID NO: 2301 - DNA, 1479 bp, synthetic construct
  misc_feature 1..1479: note = Synthetic
  source 1..1479: mol_type = other DNA
atggccttaccagtgaccgccttgctcctgccgctggccttgctgctccacgccgccaggccggacatccagatgacccagtctccatcctcactgtctgcctctgtaggagacagagtcaccatcacttgtcgggcgagtcagggtattagcaactggttagcctggtatcagcagaaaccagagaaagcccctaagtccctgatctatgctgcatccagtttgcaaggtggggtcccatcaagattcagcggcagtggatctgggacagatttcactctcaccatcagcagcctgcagcctgaagattttgcaacttattactgccaacagtatgatagttacccgtacacttttggccaggggaccaagctggagatcaaaggcagcaccagcggcagcggcaagcccggctccggagagggcagcaccaagggccaggtgcagctggtgcagtctgggactgaggtgaagaagcctggggcctcagtgaaggtctcctgtaagacttctggatacaccttcaccagttatgatatcaactgggtgcgacaggccactggacaagggcttgagtggatgggatggatgaaccctatcagtggtgacacaggctctgcacagaagttccagggcagagtcaccatgaccaggaacacctccataggcacagcctacatggagctgagcagcctgagatctgaggacacggccgtttattactgtgcgagaggcggatattgtagtagtaccagctgctactactactacatggacgtctggggcaaagggaccacggtcaccgtctcctcagcggccgcaattgaagttatgtatcctcctccttacctagacaatgagaagagcaatggaaccattatccatgtgaaagggaaacacctttgtccaagtcccctatttcccggaccttctaagcccttttgggtgctggtggtggttgggggagtcctggcttgctatagcttgctagtaacagtggcctttattattttctgggtgaggagtaagaggagcaggctcctgcacagtgactacatgaacatgactccccgccgccccgggcccacccgcaagcattaccagccctatgccccaccacgcgacttcgcagcctatcgctccagagtgaagttcagcaggagcgcagacgcccccgcgtaccagcagggccagaaccagctctataacgagctcaatctaggacgaagagaggagtacgatgttttggacaagagacgtggccgggaccctgagatggggggaaagccgagaaggaagaaccctcaggaaggcctgtacaatgaactgcagaaagataagatggcggaggcctacagtgagattgggatgaaaggcgagcgccggaggggcaaggggcacgatggcctttaccagggtctcagtacagccaccaaggacacctacgacgcccttcacatgcaggccctgccccctcgc

SEQ ID NO: 2302 - DNA, 1479 bp, synthetic construct
  misc_feature 1..1479: note = Synthetic
  source 1..1479: mol_type = other DNA
atggccttaccagtgaccgccttgctcctgccgctggccttgctgctccacgccgccaggccggacatccagatgacccagtctccatcctcactgtctgcatctgtaggagacagagtcaccatcacttgtcgggcgagtcagggtattagcagctggttagcctggtatcagcagaaaccagagaaagcccctaagtccctgatctatgctgcatccagtttacaaggtggggtcccatcaaggttcagcggcagtggatctgggacagatttcactctcaccatcagcagcctgcagcctgaagattttgcaacttattactgccaacagtatgatagttacccgtacacttttggccaggggaccaagctggagatcaaaggcagcaccagcggcagcggcaagcccggctccggagagggcagcaccaagggccaggtgcagctggtgcagtctggggctgaggtgaagaagcctggggcctcagtgaaggtctcctgcaaggcttctggatacaccttcaccagttatgatatcaactgggtgcgacaggccactggacaagggcttgagtggatgggatggatgatccctaacagtggtgacacaggctctgcacagaagttccagggcagagtcaccatgaccaggaacacctccataagcacagcctacatggagctgagcagcctgagatctgaggacacggccgtttattactgtgcgagaggcggatattgtaatagtaccagttgctactactactacatggacgtctggggcaaagggaccacggtcaccgtctcctcagcggccgcaattgaagttatgtatcctcctccttacctagacaatgagaagagcaatggaaccattatccatgtgaaagggaaacacctttgtccaagtcccctatttcccggaccttctaagcccttttgggtgctggtggtggttgggggagtcctggcttgctatagcttgctagtaacagtggcctttattattttctgggtgaggagtaagaggagcaggctcctgcacagtgactacatgaacatgactccccgccgccccgggcccacccgcaagcattaccagccctatgccccaccacgcgacttcgcagcctatcgctccagagtgaagttcagcaggagcgcagacgcccccgcgtaccagcagggccagaaccagctctataacgagctcaatctaggacgaagagaggagtacgatgttttggacaagagacgtggccgggaccctgagatggggggaaagccgagaaggaagaaccctcaggaaggcctgtacaatgaactgcagaaagataagatggcggaggcctacagtgagattgggatgaaaggcgagcgccggaggggcaaggggcacgatggcctttaccagggtctcagtacagccaccaaggacacctacgacgcccttcacatgcaggccctgccccctcgc

SEQ ID NO: 2303 - DNA, 1482 bp, synthetic construct
  misc_feature 1..1482: note = Synthetic
  source 1..1482: mol_type = other DNA
atggccttaccagtgaccgccttgctcctgccgctggccttgctgctccacgccgccaggccggaaattgtgttgacgcagtctccaggcaccctgtctttgtctccaggggaaagagccaccctctcctgcagggccagtcagagtgttagcagcagctacttagcctggtaccagcagaaacctggccaggctcccaggctcctcatctatggtgcatccagcagggccactggcatcccagacaggttcagtgacagtgggtctgggacagacttcactctcaccatcagcagactggagcctgaagattttgcagtgtattactgtcagcactatggtagctcacctccgaggatcactttcggccctgggaccaaagtggatatcaaaggcagcaccagcggcagcggcaagcccggctccggagagggcagcaccaagggcgaggtgcagttgttggagtctgggggaggcttggtacaacctggggggtccctgagactctcctgtgcagcctctggattcacctttagcagctatgtcatgaactgggtccgccaggctccagggaaggggctggaatgggtctcatctgttagtggtagtggtaataactcattctacgcagactccgtgaagggccggttcaccatctccagagacaattccaagaacacgctgtatctgcaaatgaacagcctgagagccgaggacacggccgtatattactgtgcgagtcgtagttccagttatctctactactactactacatggacgtctggggcaaagggaccaccgtcaccgtctcctcagcggccgcaattgaagttatgtatcctcctccttacctagacaatgagaagagcaatggaaccattatccatgtgaaagggaaacacctttgtccaagtcccctatttcccggaccttctaagcccttttgggtgctggtggtggttgggggagtcctggcttgctatagcttgctagtaacagtggcctttattattttctgggtgaggagtaagaggagcaggctcctgcacagtgactacatgaacatgactccccgccgccccgggcccacccgcaagcattaccagccctatgccccaccacgcgacttcgcagcctatcgctccagagtgaagttcagcaggagcgcagacgcccccgcgtaccagcagggccagaaccagctctataacgagctcaatctaggacgaagagaggagtacgatgttttggacaagagacgtggccgggaccctgagatggggggaaagccgagaaggaagaaccctcaggaaggcctgtacaatgaactgcagaaagataagatggcggaggcctacagtgagattgggatgaaaggcgagcgccggaggggcaaggggcacgatggcctttaccagggtctcagtacagccaccaaggacacctacgacgcccttcacatgcaggccctgccccctcgc

SEQ ID NO: 2304 - DNA, 1479 bp, synthetic construct
  misc_feature 1..1479: note = Synthetic
  source 1..1479: mol_type = other DNA
atggccttaccagtgaccgccttgctcctgccgctggccttgctgctccacgccgccaggccggagatcgtgctgacccagagccccgacttccagtctgtgacacctaaggaaaaggttacaattacctgtagagcttcccagaccatcggctcttctctgcactggtaccagcagaaacctgatcagtctccaaagctgctgatcaagcacgccagccagagcttctctggcgtccccagccggttttctggcagcggcagcggaacagattttacactgacagtgaactcactggaagccgaggatgccgccacctactactgccatcagagctccagcctcccttggaccttcggccagggcacgaaggtggaaatcaaaggcagcaccagcggcagcggcaagcccggctccggagagggcagcaccaagggccaagtgcagctggtggagagcggcggcggagtggtgcaacctggaagaagcctgcggctgagctgcgctgctagcggcttcaccttcagcagccacgacatgcactgggtgcggcaggcccctggcaagggcctggactgggtcgccgtgatctggagcgacggcaacaagaagtactacgtggacagcgccaagggcagattcaccatcagccgcgacaatagcaagaacaccgtgtacctgcagatgaacagcctgagagccgaggacaccgccatctactattgcgccagaggcgataattggaacgacgagcacagctactattactacatggacgtgtggggcaaaggcacaaccgtgaccgtgtcctccgcggccgcaattgaagttatgtatcctcctccttacctagacaatgagaagagcaatggaaccattatccatgtgaaagggaaacacctttgtccaagtcccctatttcccggaccttctaagcccttttgggtgctggtggtggttgggggagtcctggcttgctatagcttgctagtaacagtggcctttattattttctgggtgaggagtaagaggagcaggctcctgcacagtgactacatgaacatgactccccgccgccccgggcccacccgcaagcattaccagccctatgccccaccacgcgacttcgcagcctatcgctccagagtgaagttcagcaggagcgcagacgcccccgcgtaccagcagggccagaaccagctctataacgagctcaatctaggacgaagagaggagtacgatgttttggacaagagacgtggccgggaccctgagatggggggaaagccgagaaggaagaaccctcaggaaggcctgtacaatgaactgcagaaagataagatggcggaggcctacagtgagattgggatgaaaggcgagcgccggaggggcaaggggcacgatggcctttaccagggtctcagtacagccaccaaggacacctacgacgcccttcacatgcaggccctgccccctcgc

SEQ ID NO: 2305 - DNA, 1479 bp, synthetic construct
  misc_feature 1..1479: note = Synthetic
  source 1..1479: mol_type = other DNA
atggccttaccagtgaccgccttgctcctgccgctggccttgctgctccacgccgccaggccggagatcgtgctgacacagtccccagattttcagagcgtgacccccaaggaaaaggtgacaatcacctgcagagccagccagaccatcggcagcagcctgcactggtaccagcagaaacccgatcagtctcctaagctgctgatcaagcacgccagccagagcttcagcggcgttcccagcaggttcagcggaagcggcagcggcaccgacttcaccctgaccgtgaactctctcgaggccgaggacgccgctacatactactgccaccagagcagctccctgccttggaccttcggccagggcaccaaggtcgaaattaagggcagcaccagcggcagcggcaagcccggctccggagagggcagcaccaagggccaagtgcagctggtggaaagcggcggcggagtggtgcaacctggcagatctctgcggctgtcttgtgccgcctctggatttacattcagctctcatgatatgcactgggtgcggcaggcccctggcaaaggcctggactgggtcgccgtgatctggagcgacggcaacaacaagtactacgccgacagcgccaagggaagattcaccatcagccgggacaattctaaaaacaccgtgtacctgcagatgaacagcctgagagctgaggacaccgccatctactattgcgccagaggagataattggaacgacgagcacagctactactactatatggacgtgtggggcaagggcacaacagtgaccgtgtcctccgcggccgcaattgaagttatgtatcctcctccttacctagacaatgagaagagcaatggaaccattatccatgtgaaagggaaacacctttgtccaagtcccctatttcccggaccttctaagcccttttgggtgctggtggtggttgggggagtcctggcttgctatagcttgctagtaacagtggcctttattattttctgggtgaggagtaagaggagcaggctcctgcacagtgactacatgaacatgactccccgccgccccgggcccacccgcaagcattaccagccctatgccccaccacgcgacttcgcagcctatcgctccagagtgaagttcagcaggagcgcagacgcccccgcgtaccagcagggccagaaccagctctataacgagctcaatctaggacgaagagaggagtacgatgttttggacaagagacgtggccgggaccctgagatggggggaaagccgagaaggaagaaccctcaggaaggcctgtacaatgaactgcagaaagataagatggcggaggcctacagtgagattgggatgaaaggcgagcgccggaggggcaaggggcacgatggcctttaccagggtctcagtacagccaccaaggacacctacgacgcccttcacatgcaggccctgccccctcgc

SEQ ID NO: 2306 - DNA, 1476 bp, synthetic construct
  misc_feature 1..1476: note = Synthetic
  source 1..1476: mol_type = other DNA
atggccttaccagtgaccgccttgctcctgccgctggccttgctgctccacgccgccaggccggatatccagatgacccagagccccagcagcctgagcgccagcgtgggcgaccgggtcacaatcacctgcagagccagccagagcatcagcaattacctgaactggtaccaccagaagcccggcaaagcccctaagctgctgatctacgctgcttctagcctcgagagcggcgtgcctagcagattcagcggcagcggcagcggaacagatttcaccctgacaatcagctctctgcaacctgaggacttcgccacatactattgtcagcagtcctacagcaatcctctgaccttcggcggcggcacaaaggtggaatctaagggcagcaccagcggcagcggcaagcccggctccggagagggcagcaccaagggccaactgcagctggtgcagagcggagccgaggtgaagaagcctggcgctagcgttaaggtgtcctgcaaggcctccggctacacctttaccaactacggcatctcctggctgcgccaggccccaggccagggcctggagtggatgggctggatctccggatacaacgacaacacccactacgcccagaaattccagggtagagtgactatgaccaccgataccagcacaacaacagcctacatggaactgagaaacctgcggagcgacgacaccgccgtgtactactgcgcccgggacggcattgccgctagacctgtgtactactattacatggacgtgtggggcaagggcaccaccgtgacagtgtcttctgcggccgcaattgaagttatgtatcctcctccttacctagacaatgagaagagcaatggaaccattatccatgtgaaagggaaacacctttgtccaagtcccctatttcccggaccttctaagcccttttgggtgctggtggtggttgggggagtcctggcttgctatagcttgctagtaacagtggcctttattattttctgggtgaggagtaagaggagcaggctcctgcacagtgactacatgaacatgactccccgccgccccgggcccacccgcaagcattaccagccctatgccccaccacgcgacttcgcagcctatcgctccagagtgaagttcagcaggagcgcagacgcccccgcgtaccagcagggccagaaccagctctataacgagctcaatctaggacgaagagaggagtacgatgttttggacaagagacgtggccgggaccctgagatggggggaaagccgagaaggaagaaccctcaggaaggcctgtacaatgaactgcagaaagataagatggcggaggcctacagtgagattgggatgaaaggcgagcgccggaggggcaaggggcacgatggcctttaccagggtctcagtacagccaccaaggacacctacgacgcccttcacatgcaggccctgccccctcgc

SEQ ID NO: 2307 - DNA, 1473 bp, synthetic construct
  misc_feature 1..1473: note = Synthetic
  source 1..1473: mol_type = other DNA
atggccttaccagtgaccgccttgctcctgccgctggccttgctgctccacgccgccaggccggagattgttctgacccagagccctgatttccagagcgtgacccccaaggaaaaggtgacaatcacctgccgggccagccaaagcatcggctccagcctgcactggtatcagcagaagcccgaccagtccccaaagctgctgatcaaattcgcctctcagtcattcagcggcgtgccttcccggttcagcggaagcggcagcggcacagactttaccctgacaatccacagcctggaagccgaggacgccgctacatactactgccaccagagcggcagcctgccctggacattcggccagggcacgaaggtggagatcaagggcagcaccagcggcagcggcaagcccggctccggagagggcagcaccaagggccaagtgcagctggtggagagcgggggaggtgtcgtgcagcctggaagaagcctcagactgtcttgtgtggccagcggctttaccttcagctctaatgacatctactgggtgcggcaggcccctggcaagggcctggaatgggtcgctgtgatctggtacgacggcagcaacaaatactacgccgattctgtgaagggcagattcaccatcagcagagataattctaagaacaccctgtacctgcagatgaacagcctgagagccgaggataccgccgtgtactattgcgccaggggcgacaactggaacgacgagcaccattaccactactacatggacgtgtggggcaaaggcaccaccgtgaccgtggcggccgcaattgaagttatgtatcctcctccttacctagacaatgagaagagcaatggaaccattatccatgtgaaagggaaacacctttgtccaagtcccctatttcccggaccttctaagcccttttgggtgctggtggtggttgggggagtcctggcttgctatagcttgctagtaacagtggcctttattattttctgggtgaggagtaagaggagcaggctcctgcacagtgactacatgaacatgactccccgccgccccgggcccacccgcaagcattaccagccctatgccccaccacgcgacttcgcagcctatcgctccagagtgaagttcagcaggagcgcagacgcccccgcgtaccagcagggccagaaccagctctataacgagctcaatctaggacgaagagaggagtacgatgttttggacaagagacgtggccgggaccctgagatggggggaaagccgagaaggaagaaccctcaggaaggcctgtacaatgaactgcagaaagataagatggcggaggcctacagtgagattgggatgaaaggcgagcgccggaggggcaaggggcacgatggcctttaccagggtctcagtacagccaccaaggacacctacgacgcccttcacatgcaggccctgccccctcgc

SEQ ID NO: 2308 - DNA, 1467 bp, synthetic construct
  misc_feature 1..1467: note = Synthetic
  source 1..1467: mol_type = other DNA
atggccttaccagtgaccgccttgctcctgccgctggccttgctgctccacgccgccaggccgcaagtgcagctggtggaaagcggcggcggtgttgtgcaacctggcagaagcctgcggctgtcatgcgccgccagcggcttcaccttcagctcttacggcatgcactgggtgcggcaggcccctggaaagggactggaatgggtcgccgtgatcagctacgacggctccaacaagtactacgccgacagcgtgaaaggcagattcaccatctctagggacaacagcaagaccaccctctacctgcagatgaacagcctgagagccgaggacaccgccgtgtactattgtgccagagatcactactactactacatggacgtgtggggcaagggcaccaccgtgaccgtgtcttctggcagcaccagcggcagcggcaagcccggctccggagagggcagcaccaagggccagaccgtggtgactcaggagcccagcttcagcgtcagccccggcggaacagtgaccctgacatgcggcctgagcagcggcagcgtgtccaccagctactatcctagctggtaccagcagacaccaggccaggctcctagaaccctgatctacagcaccaacatccggagcagcggcgtgcctgatagatttagcggctctatcctgggaaataaagccgctctgaccattacaggcgcccaggctgatgacgagagcgactactactgcgtgctgtacatgggctctgatatcgtggttttcggcggcggcacaaagctgacagtgctggcggccgcaattgaagttatgtatcctcctccttacctagacaatgagaagagcaatggaaccattatccatgtgaaagggaaacacctttgtccaagtcccctatttcccggaccttctaagcccttttgggtgctggtggtggttgggggagtcctggcttgctatagcttgctagtaacagtggcctttattattttctgggtgaggagtaagaggagcaggctcctgcacagtgactacatgaacatgactccccgccgccccgggcccacccgcaagcattaccagccctatgccccaccacgcgacttcgcagcctatcgctccagagtgaagttcagcaggagcgcagacgcccccgcgtaccagcagggccagaaccagctctataacgagctcaatctaggacgaagagaggagtacgatgttttggacaagagacgtggccgggaccctgagatggggggaaagccgagaaggaagaaccctcaggaaggcctgtacaatgaactgcagaaagataagatggcggaggcctacagtgagattgggatgaaaggcgagcgccggaggggcaaggggcacgatggcctttaccagggtctcagtacagccaccaaggacacctacgacgcccttcacatgcaggccctgccccctcgc

SEQ ID NO: 2309 - DNA, 1473 bp, synthetic construct
  misc_feature 1..1473: note = Synthetic
  source 1..1473: mol_type = other DNA
atggccttaccagtgaccgccttgctcctgccgctggccttgctgctccacgccgccaggccggagatcgtgctgacacagtcccctgctaccctgagcctgagccctggcgagcgggccaccctgagctgcagagccagccagagcgtgtccagctactttgcctggtatcagcagaagcctggccaggccccacggctgctgatctacgacgcctctaatagagccacaggcatcccagctagattcagcggctccggctccggaaccgatttcaccctgaccatctctagcctcgagcctgaggacttcgccgtttactattgtcagcaaagaagcaactggcctctgacatttggcggaggcacaaaggtggaaatcaagggcagcaccagcggcagcggcaagcccggctccggagagggcagcaccaagggccaactgcagctgcaggagagcggccctggactggtgaagcccagcgagacactgagcctgacatgcaccgtgtccggaggctctatcagcagcagcagctactactggggatggattagacagccccccggcaagggcctggaatggatcggcagcctgtactacagcggcagcacctactacaaccccagcctgaagtctagagtgaccatcagcgtggacaccagcaagaaccagttcagcctgaaactgagctctgtcacagccgccgataccgccgtgtactactgcgccgctgtgcagctggaaaggcggggctacttctacatggacgtgtggggcaaaggcaccaccgtgacagtgtctagcgcggccgcaattgaagttatgtatcctcctccttacctagacaatgagaagagcaatggaaccattatccatgtgaaagggaaacacctttgtccaagtcccctatttcccggaccttctaagcccttttgggtgctggtggtggttgggggagtcctggcttgctatagcttgctagtaacagtggcctttattattttctgggtgaggagtaagaggagcaggctcctgcacagtgactacatgaacatgactccccgccgccccgggcccacccgcaagcattaccagccctatgccccaccacgcgacttcgcagcctatcgctccagagtgaagttcagcaggagcgcagacgcccccgcgtaccagcagggccagaaccagctctataacgagctcaatctaggacgaagagaggagtacgatgttttggacaagagacgtggccgggaccctgagatggggggaaagccgagaaggaagaaccctcaggaaggcctgtacaatgaactgcagaaagataagatggcggaggcctacagtgagattgggatgaaaggcgagcgccggaggggcaaggggcacgatggcctttaccagggtctcagtacagccaccaaggacacctacgacgcccttcacatgcaggccctgccccctcgc

SEQ ID NO: 2310 - DNA, 1479 bp, synthetic construct
  misc_feature 1..1479: note = Synthetic
  source 1..1479: mol_type = other DNA
atggccttaccagtgaccgccttgctcctgccgctggccttgctgctccacgccgccaggccgcagaccgtcgtgacccaggagcctagcttcagcgtgtccccaggcggaaccgtcacactgacatgcggcctcacaagcggcagcgtgtccaccagctactaccccaactggtaccagcagacacctggacaggcccctagaaccctgatctacagcaccaacatccggagcagcggagtgcccgacagattttctggcagcatcctgggcaacaaggccgctctgaccatcaccggcgctcaggccgacgacgagagcgactactactgcgtgctgtacatgggcagcggcatgttcatcttcggcagcggcacaaaggtgacagtgctgggcagcaccagcggcagcggcaagcccggctccggagagggcagcaccaagggccaagtgcaactggtggaaagcggcggcggcgttgtgcagcctggcagaagcctgcggctgtcatgcgccgccagcggttttaccttctctaattacggcatgcactgggtgcggcaggctcccggcaaaggcctggaatggatggccgtgatctggtccgatggccacaacaagtactacgccgatagcgtgaaaggcagattcaccattagcagagataattctaagaacaccctgtacctgcagatgaacagcctgcgcgccgaggacaccgccgtgtactattgtgccagagcccagctggagcggagatacttctactatatggacgtgtggggcaagggcaccaccgtgacagtgtctagcgcggccgcaattgaagttatgtatcctcctccttacctagacaatgagaagagcaatggaaccattatccatgtgaaagggaaacacctttgtccaagtcccctatttcccggaccttctaagcccttttgggtgctggtggtggttgggggagtcctggcttgctatagcttgctagtaacagtggcctttattattttctgggtgaggagtaagaggagcaggctcctgcacagtgactacatgaacatgactccccgccgccccgggcccacccgcaagcattaccagccctatgccccaccacgcgacttcgcagcctatcgctccagagtgaagttcagcaggagcgcagacgcccccgcgtaccagcagggccagaaccagctctataacgagctcaatctaggacgaagagaggagtacgatgttttggacaagagacgtggccgggaccctgagatggggggaaagccgagaaggaagaaccctcaggaaggcctgtacaatgaactgcagaaagataagatggcggaggcctacagtgagattgggatgaaaggcgagcgccggaggggcaaggggcacgatggcctttaccagggtctcagtacagccaccaaggacacctacgacgcccttcacatgcaggccctgccccctcgc

SEQ ID NO: 2311 - DNA, 1479 bp, synthetic construct
  misc_feature 1..1479: note = Synthetic
  source 1..1479: mol_type = other DNA
atggccttaccagtgaccgccttgctcctgccgctggccttgctgctccacgccgccaggccggacatccagatgacacagagccctagcagcctgtctgcttccgtgggcgatagagtgacaatcacctgccgggcctcccagggcatcagctcctggctggcctggtaccagcagaagcctgagaaggcccctaagagcctgatctacgccgcttctagcctgcagggaggcgtgccaagtcggttcagcggcagcggcagcggcacagacttcaccctgaccatttcttctctgcaacctgaggacttcgccacctactactgtcagcaatacgacagctacccctacacctttggccagggcaccaagctggaaatcaagtggcagcaccagcggcagcggcaagcccggctccggagagggcagcaccaagggccaggttcagctggtgcagagcggagccgaggtgaaaaagcccggcgcaagcgtgaaggtgtcttgcaaggcctccggatataccttcaccagctacgatatcaactgggtgcggcaggccacaggccagggtctcgaatggatgggctggatgatccccaattctggcgacacaggcagcgcccaaaagttccagggcagagtgacaatgaccagaaacaccagcatcggaacagcctacatggaactgagctccctgagaagcgaggataccgccgtgtactattgtgccagaggcggctactgcaacagcacctcctgctactactactacatggacgtgtggggcaaaggcacaaccgtcaccgtgagctcgcggccgcaattgaagttatgtatcctcctccttacctagacaatgagaagagcaatggaaccattatccatgtgaaagggaaacacctttgtccaagtcccctatttcccggaccttctaagcccttttgggtgctggtggtggttgggggagtcctggcttgctatagcttgctagtaacagtggcctttattattttctgggtgaggagtaagaggagcaggctcctgcacagtgactacatgaacatgactccccgccgccccgggcccacccgcaagcattaccagccctatgccccaccacgcgacttcgcagcctatcgctccagagtgaagttcagcaggagcgcagacgcccccgcgtaccagcagggccagaaccagctctataacgagctcaatctaggacgaagagaggagtacgatgttttggacaagagacgtggccgggaccctgagatggggggaaagccgagaaggaagaaccctcaggaaggcctgtacaatgaactgcagaaagataagatggcggaggcctacagtgagattgggatgaaaggcgagcgccggaggggcaaggggcacgatggcctttaccagggtctcagtacagccaccaaggacacctacgacgcccttcacatgcaggccctgccccctcgc

SEQ ID NO: 2312 - DNA, 1482 bp, synthetic construct
  misc_feature 1..1482: note = Synthetic
  source 1..1482: mol_type = other DNA
atggccttaccagtgaccgccttgctcctgccgctggccttgctgctccacgccgccaggccggatatccaggtcacacagagccctacctttctgagcgcttctgtgggcgaccgggtgaccatcacatgccgggccagccagggtattagcagctacctggcttggtaccagcagaagcccggcaaagcccctaagctgctgatctacggcgcttctaccctgcagtccggcgtgcccagcagattcagcggcagcggaagcggaacagagttcaccctgacaatctccagcctccaacctgaggacttcgccacatactattgtcagcaactgaatagctatccttggacattcggccagggcaccaaggtggaaatcaagggcagcaccagcggcagcggcaagcccggctccggagagggcagcaccaagggccaggttcaactggtgcagagcggcgccgaggtgaagaagcctggcgccagcgtgaaagtgtcctgcaaggccagcggatacacgtttaccagctacgacatcaactgggtcagacaggccaccggccagggcctggaatggatgggatggatgaaccccaacagcggcaacaccgtgtacgcccagaaattccagggcagagtgaccatgacacggaacaccagcatcagcaccgcctacatggaactgagctctctgagatccgaggatacagccgtgtactactgcgccagaggcggagatttctggagcggctaccacgactactactactacatggacgtgtggggcaagggcaccaccgtgaccgtgtcttctgcggccgcaattgaagttatgtatcctcctccttacctagacaatgagaagagcaatggaaccattatccatgtgaaagggaaacacctttgtccaagtcccctatttcccggaccttctaagcccttttgggtgctggtggtggttgggggagtcctggcttgctatagcttgctagtaacagtggcctttattattttctgggtgaggagtaagaggagcaggctcctgcacagtgactacatgaacatgactccccgccgccccgggcccacccgcaagcattaccagccctatgccccaccacgcgacttcgcagcctatcgctccagagtgaagttcagcaggagcgcagacgcccccgcgtaccagcagggccagaaccagctctataacgagctcaatctaggacgaagagaggagtacgatgttttggacaagagacgtggccgggaccctgagatggggggaaagccgagaaggaagaaccctcaggaaggcctgtacaatgaactgcagaaagataagatggcggaggcctacagtgagattgggatgaaaggcgagcgccggaggggcaaggggcacgatggcctttaccagggtctcagtacagccaccaaggacacctacgacgcccttcacatgcaggccctgccccctcgc

SEQ ID NO: 2313 - DNA, 1476 bp, synthetic construct
  misc_feature 1..1476: note = Synthetic
  source 1..1476: mol_type = other DNA
atggccttaccagtgaccgccttgctcctgccgctggccttgctgctccacgccgccaggccgagctacgagctgacccagcctccatctgtctccgtgtctccaggccaaacagccagcatcacctgcagcggagataagctgggcgacaagtacgcctgctggtaccagcagaagcccggccagagccctgtgctggtgatctaccaggacagcaagcggcctagcggcatccccgagagattcagcggctccaacagcggcaataccgctacactgacaatcagcggcacacaggccatggatgaggccgactactactgccaggcctgggacagctctaccgccgtgttcggcggcggaacccagctcaccgccctgggcagcaccagcggcagcggcaagcccggctccggagagggcagcaccaagggccaagtgcagctgcaggagagcggtcctggcctggttaagcctagcgagacactgtctctgacttgcaccgtgtccggcggatctatcagcagctactactggtcctggatcagacagcccgccggcaaaggcctggaatggattggaagaatctacaccagcggcagcaccaactacaaccccagcctgaagtccagagtgacaatgagcgtggacacatctaagaaccagtttagcctgaaactgagcagcgtgaccgccgccgatacagctgtgtactattgtgcccgggaagaataccagctgctgcctgccctgtactactattactacatggacgtgtggggcaagggcaccaccgtgaccgtgtccagcgcggccgcaattgaagttatgtatcctcctccttacctagacaatgagaagagcaatggaaccattatccatgtgaaagggaaacacctttgtccaagtcccctatttcccggaccttctaagcccttttgggtgctggtggtggttgggggagtcctggcttgctatagcttgctagtaacagtggcctttattattttctgggtgaggagtaagaggagcaggctcctgcacagtgactacatgaacatgactccccgccgccccgggcccacccgcaagcattaccagccctatgccccaccacgcgacttcgcagcctatcgctccagagtgaagttcagcaggagcgcagacgcccccgcgtaccagcagggccagaaccagctctataacgagctcaatctaggacgaagagaggagtacgatgttttggacaagagacgtggccgggaccctgagatggggggaaagccgagaaggaagaaccctcaggaaggcctgtacaatgaactgcagaaagataagatggcggaggcctacagtgagattgggatgaaaggcgagcgccggaggggcaaggggcacgatggcctttaccagggtctcagtacagccaccaaggacacctacgacgcccttcacatgcaggccctgccccctcgc

SEQ ID NO: 2314 - DNA, 1479 bp, synthetic construct
  misc_feature 1..1479: note = Synthetic
  source 1..1479: mol_type = other DNA
atggccttaccagtgaccgccttgctcctgccgctggccttgctgctccacgccgccaggccgcagaccgtggtcacccaggagcctagctttagcgtgtccccaggaggtacagtgaccctgacatgcggcctgactagcggatctgtgtccaccagctactaccccaactggtaccagcagacacctggccaggcccctagaaccctgatctacagcaccaatatccggagctccggcgtgcccgacagattcagcggaagcatcctgggcaacaaggccgctctgaccatcaccggcgcccaagctgatgacgagagcgactactattgtgtgctgtacatgggcagcggcatgttcatcttcggctctggcaccaaggtgaccgtgctgggcagcaccagcggcagcggcaagcccggctccggagagggcagcaccaagggccaagtgcagctggtggaatctggcggcggcgtggtgcagcctggtaggagcctgcggctgtcatgcgccgccacaggcttcaccttcagcagctacggcatgcactgggtcagacaggcccctggcaagggactggagtggatggtggtgatctggtccgatggccacaataaatactacgccgacagcgtgaagggcagatttaccattagccgggacaacagcaagaacaccctgtacctgcagatgaacagcctgagagctgaagataccgccgtgtactactgcgccagagcccagctcgagcggagatacttctactatatggacgtgtggggcaaaggcacaacagtgaccgtttcttctgcggccgcaattgaagttatgtatcctcctccttacctagacaatgagaagagcaatggaaccattatccatgtgaaagggaaacacctttgtccaagtcccctatttcccggaccttctaagcccttttgggtgctggtggtggttgggggagtcctggcttgctatagcttgctagtaacagtggcctttattattttctgggtgaggagtaagaggagcaggctcctgcacagtgactacatgaacatgactccccgccgccccgggcccacccgcaagcattaccagccctatgccccaccacgcgacttcgcagcctatcgctccagagtgaagttcagcaggagcgcagacgcccccgcgtaccagcagggccagaaccagctctataacgagctcaatctaggacgaagagaggagtacgatgttttggacaagagacgtggccgggaccctgagatggggggaaagccgagaaggaagaaccctcaggaaggcctgtacaatgaactgcagaaagataagatggcggaggcctacagtgagattgggatgaaaggcgagcgccggaggggcaaggggcacgatggcctttaccagggtctcagtacagccaccaaggacacctacgacgcccttcacatgcaggccctgccccctcgc

SEQ ID NO: 2315 - DNA, 1479 bp, synthetic construct
  misc_feature 1..1479: note = Synthetic
  source 1..1479: mol_type = other DNA
atggccttaccagtgaccgccttgctcctgccgctggccttgctgctccacgccgccaggccggagatcgtgctgacccagtctccagatttccagtccgtgacccctaaggaaaaggtgaccatcacatgcagagccagccagtccatcggctctagcctgcactggtaccagcagaagcccgaccagtctcctatgctgctgatcaaattcgcctctcagagcatcagcggcgtgcccagccggttcagcggcagcggctccggcaccgacttcacactgacaatcaacagtctggaggccgaggatgccgctgcttactactgtcaccagagcagcagcctgccttggacatttggccagggcaccaaggtggaaattaagggcagcaccagcggcagcggcaagcccggctccggagagggcagcaccaagggccaagtgcagctggtcgagagcggaggcggcgttgtgcaacctggaaggagcctgcggctgagctgcgccgcttctggcttcacctttactagctacgacatgcactgggtgcggcaggcccctggcaagggcctggaatgggtcaccatcatctggttcgacggcagcaacaagtactacgccgatagcgtgaagggcagattcaccatcagcagagataatagcaagaataccctgtacctgcagatgaactctctctccgccgaggacaccgccgtgtactactgcgccagaggcgacaactggaacgacagatactattattactactacatggacgtgtggggcaaaggcaccaccgtgacagtgtccagcgcggccgcaattgaagttatgtatcctcctccttacctagacaatgagaagagcaatggaaccattatccatgtgaaagggaaacacctttgtccaagtcccctatttcccggaccttctaagcccttttgggtgctggtggtggttgggggagtcctggcttgctatagcttgctagtaacagtggcctttattattttctgggtgaggagtaagaggagcaggctcctgcacagtgactacatgaacatgactccccgccgccccgggcccacccgcaagcattaccagccctatgccccaccacgcgacttcgcagcctatcgctccagagtgaagttcagcaggagcgcagacgcccccgcgtaccagcagggccagaaccagctctataacgagctcaatctaggacgaagagaggagtacgatgttttggacaagagacgtggccgggaccctgagatggggggaaagccgagaaggaagaaccctcaggaaggcctgtacaatgaactgcagaaagataagatggcggaggcctacagtgagattgggatgaaaggcgagcgccggaggggcaaggggcacgatggcctttaccagggtctcagtacagccaccaaggacacctacgacgcccttcacatgcaggccctgccccctcgc

SEQ ID NO: 2316 - DNA, 1494 bp, synthetic construct
  misc_feature 1..1494: note = Synthetic
  source 1..1494: mol_type = other DNA
atggccttaccagtgaccgccttgctcctgccgctggccttgctgctccacgccgccaggccggacatcgtgatgacccagcctcctctgagcagccctgtgacactgggccagccagctagcatcagctgtagatcttctcagtccctggtgcacagcgacggcaatacctacctgtcttggctgcagcagcggcctggccagccccccagactgctgatctacaaggtgtccaaccgcttcagcggcgtgccagacagattcagcggctctggcgccggcaccgacttcaccctgaagatcagcagagtcgaggccgaagatgtgggagtttactattgcacccaagctacacagttcccccacacctttggccagggcaccaagctcgagatcaagggcagcaccagcggcagcggcaagcccggctccggagagggcagcaccaagggccaagtgcagctggtccagagcggcgctgaggtgaagaaacctggcgcctctgtgaaagtgtcctgcaaggccagcggctacacctttaccagctacggcattagctgggtgcggcaggcccctggccagggtcttgagtggatgggctggatcagcgcctacaacggccacacagattatacacaaaagctgcagggcagagtgaccatgacaaccgataccagcaccaccacagcctacatggaactgagaagcctgagctctgccgacaccgccgtgtactactgcgtgcgggaagtggtgctgcctaccacagactactactacttctacatggacgtgtggggcaagggcaccacagtgacagtcagctccgcggccgcaattgaagttatgtatcctcctccttacctagacaatgagaagagcaatggaaccattatccatgtgaaagggaaacacctttgtccaagtcccctatttcccggaccttctaagcccttttgggtgctggtggtggttgggggagtcctggcttgctatagcttgctagtaacagtggcctttattattttctgggtgaggagtaagaggagcaggctcctgcacagtgactacatgaacatgactccccgccgccccgggcccacccgcaagcattaccagccctatgccccaccacgcgacttcgcagcctatcgctccagagtgaagttcagcaggagcgcagacgcccccgcgtaccagcagggccagaaccagctctataacgagctcaatctaggacgaagagaggagtacgatgttttggacaagagacgtggccgggaccctgagatggggggaaagccgagaaggaagaaccctcaggaaggcctgtacaatgaactgcagaaagataagatggcggaggcctacagtgagattgggatgaaaggcgagcgccggaggggcaaggggcacgatggcctttaccagggtctcagtacagccaccaaggacacctacgacgcccttcacatgcaggccctgccccctcgc

SEQ ID NO: 2317 - DNA, 1491 bp, synthetic construct
  misc_feature 1..1491: note = Synthetic
  source 1..1491: mol_type = other DNA
atggccttaccagtgaccgccttgctcctgccgctggccttgctgctccacgccgccaggccggatatccagatgacacagagcccaagcagcctgagcgccagcgtgggcgacagagtgaccatcacatgcagagccagccagggcatcagcagctggctggcttggtaccagcaaaagcctgagaaggcccctaagagcctcatctacgccgctagcagcctgcagtccggcgtgccaagcagattcagcggctctggctctggcacagacttcaccctgaccatttccagcctgcaacctgaggattttgccacatactattgtcagcagtacaacagctacccttacaccttcggccagggcaccaagctggaaatcaagggcagcaccagcggcagcggcaagcccggctccggagagggcagcaccaagggccaagttcagctggtgcagagcggagccgaggtgaaaaagcccggcgcttctgtgaaggtgtcctgcaaggtgtctggctacaccctgacagagctgagcatgcactgggtccggcaggcccctggcaaaggcctggaatggatgggaggcttcgaccccgaagacggggagacaatctacgcccagaaattccagggcagagtgacaatgaccgaggacaccagcaccgatacagcctacatggaactgtcttccctgcggagcgaggacaccgccgtgtactactgcgccaccggcagaatcaccatggtgcggggcgtcatcatcccctactactattactacatggacgtgtggggcaagggcaccaccgtgaccgtgtcctctgcggccgcaattgaagttatgtatcctcctccttacctagacaatgagaagagcaatggaaccattatccatgtgaaagggaaacacctttgtccaagtcccctatttcccggaccttctaagcccttttgggtgctggtggtggttgggggagtcctggcttgctatagcttgctagtaacagtggcctttattattttctgggtgaggagtaagaggagcaggctcctgcacagtgactacatgaacatgactccccgccgccccgggcccacccgcaagcattaccagccctatgccccaccacgcgacttcgcagcctatcgctccagagtgaagttcagcaggagcgcagacgcccccgcgtaccagcagggccagaaccagctctataacgagctcaatctaggacgaagagaggagtacgatgttttggacaagagacgtggccgggaccctgagatggggggaaagccgagaaggaagaaccctcaggaaggcctgtacaatgaactgcagaaagataagatggcggaggcctacagtgagattgggatgaaaggcgagcgccggaggggcaaggggcacgatggcctttaccagggtctcagtacagccaccaaggacacctacgacgcccttcacatgcaggccctgccccctcgc

SEQ ID NO: 2318 - DNA, 1485 bp, synthetic construct
  misc_feature 1..1485: note = Synthetic
  source 1..1485: mol_type = other DNA
atggccttaccagtgaccgccttgctcctgccgctggccttgctgctccacgccgccaggccggatatcgtgatgacccagacccccctgagcctgtccgtgaccccaggacaacctgccagcattagctgcaagagcagcaagtccctgctgcacagcgacggcaagacatacctgtactggtacctgcaaaagcccggccagcctcctcagctgctcatctacgaggtgtccaaccggttctctggcgtgcctgatagattcagcggaagcggcagcggaacagacttcacactgaagatcagcagagtcgaggccgaggacgtgggcgtttactactgcatgcagagcatccagttcccctggacattcggccagggcacaaaagtggaaatcaagggcagcaccagcggcagcggcaagcccggctccggagagggcagcaccaagggccaagtgcagctggtgcagagcggcaccgaggtgaagaagccaggcgcctctgtgaaagtgtcttgtaaagccagcggctacacctttaccaattacggcatcggctgggtgcggcaggcccctggacagggactggaatggatgggctggatcatcgcctacaacggctacacaaagtacgcccagatcctgcagggcagagtgacaatgaccaccgacaccagcaccaacaccgcttatatggaactgagaagcctgcggagcgacgacaccgccgtgtactattgcgccagacagcagctgggcggagattaccactactacatggacgtgtggggcaagggcaccaccgtcacagtgtccagcgcggccgcaattgaagttatgtatcctcctccttacctagacaatgagaagagcaatggaaccattatccatgtgaaagggaaacacctttgtccaagtcccctatttcccggaccttctaagcccttttgggtgctggtggtggttgggggagtcctggcttgctatagcttgctagtaacagtggcctttattattttctgggtgaggagtaagaggagcaggctcctgcacagtgactacatgaacatgactccccgccgccccgggcccacccgcaagcattaccagccctatgccccaccacgcgacttcgcagcctatcgctccagagtgaagttcagcaggagcgcagacgcccccgcgtaccagcagggccagaaccagctctataacgagctcaatctaggacgaagagaggagtacgatgttttggacaagagacgtggccgggaccctgagatggggggaaagccgagaaggaagaaccctcaggaaggcctgtacaatgaactgcagaaagataagatggcggaggcctacagtgagattgggatgaaaggcgagcgccggaggggcaaggggcacgatggcctttaccagggtctcagtacagccaccaaggacacctacgacgcccttcacatgcaggccctgccccctcgc

SEQ ID NO: 2319 - DNA, 1485 bp, synthetic construct
  misc_feature 1..1485: note = Synthetic
  source 1..1485: mol_type = other DNA
atggccttaccagtgaccgccttgctcctgccgctggccttgctgctccacgccgccaggccggacatcgtgatgacccagacccctctgagcctgagcgtgacacctggacagcccgcttctattagctgtaaaagcagcaagtccctgctgcacagcgacggcaagacctacctgtactggtacctgcagaaacctggccagcctccacagctgctgatctacgaggtgtctacaagattcagcggagtgcctgatagattcagcggcagcggatctggaacagatttcaccctgaagatcagccgggttgaggccgaggacgtgggcgtgtactattgcatgcagtccatccagttcccctggaccttcggccagggcacaaaggtggaaatcaagggcagcaccagcggcagcggcaagcccggctccggagagggcagcaccaagggccaagtgcagctggtgcaaagcggcaccgaggtgaaaaagcccggcgcctctgtgaaggtctcctgcaaggccagcggatacacatttacaaattacggcatcggctgggtgcggcaggcccctggccagggcctggaatggatgggctggatcatcgcctacaacggctacaccaagtacgcccagatcctgcaaggcagagtcaccatgaccacagacaccagcaccaacaccgcttatatggaactgagaagcctgcggagcgacgatacagccgtgtactactgcgccagacagcagctcggcggcgactaccactactacatggacgtgtggggcaagggcaccaccgtgaccgtgtccagcgcggccgcaattgaagttatgtatcctcctccttacctagacaatgagaagagcaatggaaccattatccatgtgaaagggaaacacctttgtccaagtcccctatttcccggaccttctaagcccttttgggtgctggtggtggttgggggagtcctggcttgctatagcttgctagtaacagtggcctttattattttctgggtgaggagtaagaggagcaggctcctgcacagtgactacatgaacatgactccccgccgccccgggcccacccgcaagcattaccagccctatgccccaccacgcgacttcgcagcctatcgctccagagtgaagttcagcaggagcgcagacgcccccgcgtaccagcagggccagaaccagctctataacgagctcaatctaggacgaagagaggagtacgatgttttggacaagagacgtggccgggaccctgagatggggggaaagccgagaaggaagaaccctcaggaaggcctgtacaatgaactgcagaaagataagatggcggaggcctacagtgagattgggatgaaaggcgagcgccggaggggcaaggggcacgatggcctttaccagggtctcagtacagccaccaaggacacctacgacgcccttcacatgcaggccctgccccctcgc

SEQ ID NO: 2320 - DNA, 1479 bp, synthetic construct
  misc_feature 1..1479: note = Synthetic
  source 1..1479: mol_type = other DNA
atggccttaccagtgaccgccttgctcctgccgctggccttgctgctccacgccgccaggccggatatccagatgacacagtcccctagctctctgtctgcttctgttggagatagagtgaccatcacctgccgggccagccagggcatcagcaactggctggcctggtaccagcagaagcccgagaaggcccctaagagcctgatctacgccgctagctccctccagggcggcgtgccatctagattcagcggctcaggcagcggaaccgacttcaccctgaccatcagctccctgcaacctgaggattttgccacatactactgccagcaatacgacagctacccctacaccttcggccagggcaccaagctggaaatcaagggcagcaccagcggcagcggcaagcccggctccggagagggcagcaccaagggccaagtgcagctggtgcagagcggaacagaggtgaaaaagcctggcgccagcgtgaaggtgtcttgtaaaaccagcggttatacattcacctcctacgacattaactgggtgcggcaggccaccggccagggcctggaatggatgggctggatgaaccccatctccggcgacacaggcagcgcccagaagttccagggaagagtgaccatgaccagaaataccagcatcggcaccgcctacatggaactgagcagcctgcggagcgaggacaccgccgtgtactactgcgccagaggcggatactgtagcagtacatcttgctactactattacatggacgtgtggggcaagggcacaacagtgacagtcagcagcgcggccgcaattgaagttatgtatcctcctccttacctagacaatgagaagagcaatggaaccattatccatgtgaaagggaaacacctttgtccaagtcccctatttcccggaccttctaagcccttttgggtgctggtggtggttgggggagtcctggcttgctatagcttgctagtaacagtggcctttattattttctgggtgaggagtaagaggagcaggctcctgcacagtgactacatgaacatgactccccgccgccccgggcccacccgcaagcattaccagccctatgccccaccacgcgacttcgcagcctatcgctccagagtgaagttcagcaggagcgcagacgcccccgcgtaccagcagggccagaaccagctctataacgagctcaatctaggacgaagagaggagtacgatgttttggacaagagacgtggccgggaccctgagatggggggaaagccgagaaggaagaaccctcaggaaggcctgtacaatgaactgcagaaagataagatggcggaggcctacagtgagattgggatgaaaggcgagcgccggaggggcaaggggcacgatggcctttaccagggtctcagtacagccaccaaggacacctacgacgcccttcacatgcaggccctgccccctcgc

SEQ ID NO: 2321 - DNA, 1479 bp, synthetic construct
  misc_feature 1..1479: note = Synthetic
  source 1..1479: mol_type = other DNA
atggccttaccagtgaccgccttgctcctgccgctggccttgctgctccacgccgccaggccggacatccagatgacacagagccctagcagcctgagcgcctctgtgggcgaccgggtgaccatcacctgcagagccagccagggcatcagcagctggctggcctggtaccagcagaagcccgagaaggcccctaagtccctgatctacgccgccagctccctccagggcggagtgccatctagattcagcggctctggatctggcacagacttcaccctgaccatcagctctctgcagcctgaggattttgccacatactactgccagcaatacgacagctacccctacacattcggccaaggcacaaagctggaaatcaagggcagcaccagcggcagcggcaagcccggctccggagagggcagcaccaagggccaagtgcagctggtgcagagcggcgccgaggtgaagaagcctggcgcttccgtgaaggtgtcctgtaaagcttctggatacaccttcacctcttatgatattaactgggtgcggcaggccaccggccagggcctggaatggatgggctggatgatccccaacagcggcgataccggctccgcccagaaattccagggaagagttaccatgacaagaaacaccagcatcagcaccgcctacatggaactgagcagcctgcggagcgaggacaccgctgtgtactactgcgccagaggcggctactgtaatagcacaagctgctactattactacatggacgtgtggggcaagggcaccacagtgacagtcagctccgcggccgcaattgaagttatgtatcctcctccttacctagacaatgagaagagcaatggaaccattatccatgtgaaagggaaacacctttgtccaagtcccctatttcccggaccttctaagcccttttgggtgctggtggtggttgggggagtcctggcttgctatagcttgctagtaacagtggcctttattattttctgggtgaggagtaagaggagcaggctcctgcacagtgactacatgaacatgactccccgccgccccgggcccacccgcaagcattaccagccctatgccccaccacgcgacttcgcagcctatcgctccagagtgaagttcagcaggagcgcagacgcccccgcgtaccagcagggccagaaccagctctataacgagctcaatctaggacgaagagaggagtacgatgttttggacaagagacgtggccgggaccctgagatggggggaaagccgagaaggaagaaccctcaggaaggcctgtacaatgaactgcagaaagataagatggcggaggcctacagtgagattgggatgaaaggcgagcgccggaggggcaaggggcacgatggcctttaccagggtctcagtacagccaccaaggacacctacgacgcccttcacatgcaggccctgccccctcgc

SEQ ID NO: 2322 - DNA, 1482 bp, synthetic construct
  misc_feature 1..1482: note = Synthetic
  source 1..1482: mol_type = other DNA
atggccttaccagtgaccgccttgctcctgccgctggccttgctgctccacgccgccaggccggagatcgtgctgacccaaagccccggcaccctgagcctgagccctggcgagagagccaccctgtcttgtagagcctctcagagcgtttctagctcctacctggcctggtaccagcagaagcccggacaggcccctagactgctgatctacggcgccagcagcagagctacaggcatccccgatagattcagcgacagcggctcaggcacagacttcaccctgacaattagccggctggaacccgaggatttcgccgtgtactattgccagcactacggcagctctcctccaagaatcaccttcggccctggcaccaaggtggacatcaaaggcagcaccagcggcagcggcaagcccggctccggagagggcagcaccaagggcgaggtgcagctgctggaaagcggaggcggcctggtgcaacctggaggttctctgcggctgagctgcgccgctagcggcttcacatttagcagctacgtgatgaactgggtgcggcaggctcctggaaagggcctggaatgggtctccagcgtgtccggcagcggcaacaacagcttttacgccgatagcgtgaagggcagattcaccatcagccgggacaacagcaagaacaccctctacctgcagatgaattctctgagagccgaggacaccgccgtgtactactgcgccagcaggtcctcttcttacctgtactactactattacatggacgtgtggggcaaaggcacaacagtgaccgtctccagcgcggccgcaattgaagttatgtatcctcctccttacctagacaatgagaagagcaatggaaccattatccatgtgaaagggaaacacctttgtccaagtcccctatttcccggaccttctaagcccttttgggtgctggtggtggttgggggagtcctggcttgctatagcttgctagtaacagtggcctttattattttctgggtgaggagtaagaggagcaggctcctgcacagtgactacatgaacatgactccccgccgccccgggcccacccgcaagcattaccagccctatgccccaccacgcgacttcgcagcctatcgctccagagtgaagttcagcaggagcgcagacgcccccgcgtaccagcagggccagaaccagctctataacgagctcaatctaggacgaagagaggagtacgatgttttggacaagagacgtggccgggaccctgagatggggggaaagccgagaaggaagaaccctcaggaaggcctgtacaatgaactgcagaaagataagatggcggaggcctacagtgagattgggatgaaaggcgagcgccggaggggcaaggggcacgatggcctttaccagggtctcagtacagccaccaaggacacctacgacgcccttcacatgcaggccctgccccctcgc

SEQ ID NO: 2323 - protein, 718 aa, synthetic construct
  REGION 1..718: note = Synthetic
MALPVTALLLPLALLLHAARPEIVLTQSPDFQSVTPKEKVTITCRASQTIGSSLHWYQQKPDQSPKLLIKHASQSFSGVPSRFSGSGSGTDFTLTVNSLEAEDAATYYCHQSSSLPWTFGQGTKVEIKGSTSGSGKPGSGEGSTKGQVQLVESGGGVVQPGRSLRLSCAASGFTFSSHDMHWVRQAPGKGLDWVAVIWSDGNKKYYVDSAKGRFTISRDNSKNTVYLQMNSLRAEDTAIYYCARGDNWNDEHSYYYYMDVWGKGTTVTVSSAAAIEVMYPPPYLDNEKSNGTIIHVKGKHLCPSPLFPGPSKPFWVLVVVGGVLACYSLLVTVAFIIFWVRSKRSRLLHSDYMNMTPRRPGPTRKHYQPYAPPRDFAAYRSRVKFSRSADAPAYQQGQNQLYNELNLGRREEYDVLDKRRGRDPEMGGKPRRKNPQEGLYNELQKDKMAEAYSEIGMKGERRRGKGHDGLYQGLSTATKDTYDALHMQALPPRGSGEGRGSLLTCGDVEENPGPMALPVTALLLPLALLLHAARPNWVNVISDLKKIEDLIQSMHIDATLYTESDVHPSCKVTAMKCFLLELQVISLESGDASIHDTVENLIILANNSLSSNGNVTESGCKECEELEEKNIKEFLQSFVHIVQMFINTSTTTPAPRPPTPAPTIASQPLSLRPEACRPAAGGAVHTRGLDFACDIYIWAPLAGTCGVLLLSLVITLYC

SEQ ID NO: 2324 - protein, 718 aa, synthetic construct
  REGION 1..718: note = Synthetic
MALPVTALLLPLALLLHAARPEIVLTQSPDFQSVTPKEKVTITCRASQTIGSSLHWYQQKPDQSPKLLIKHASQSFSGVPSRFSGSGSGTDFTLTVNSLEAEDAATYYCHQSSSLPWTFGQGTKVEIKGSTSGSGKPGSGEGSTKGQVQLVESGGGVVQPGRSLRLSCAASGFTFSSHDMHWVRQAPGKGLDWVAVIWSDGNNKYYADSAKGRFTISRDNSKNTVYLQMNSLRAEDTAIYYCARGDNWNDEHSYYYYMDVWGKGTTVTVSSAAAIEVMYPPPYLDNEKSNGTIIHVKGKHLCPSPLFPGPSKPFWVLVVVGGVLACYSLLVTVAFIIFWVRSKRSRLLHSDYMNMTPRRPGPTRKHYQPYAPPRDFAAYRSRVKFSRSADAPAYQQGQNQLYNELNLGRREEYDVLDKRRGRDPEMGGKPRRKNPQEGLYNELQKDKMAEAYSEIGMKGERRRGKGHDGLYQGLSTATKDTYDALHMQALPPRGSGEGRGSLLTCGDVEENPGPMALPVTALLLPLALLLHAARPNWVNVISDLKKIEDLIQSMHIDATLYTESDVHPSCKVTAMKCFLLELQVISLESGDASIHDTVENLIILANNSLSSNGNVTESGCKECEELEEKNIKEFLQSFVHIVQMFINTSTTTPAPRPPTPAPTIASQPLSLRPEACRPAAGGAVHTRGLDFACDIYIWAPLAGTCGVLLLSLVITLYC

SEQ ID NO: 2325 - protein, 717 aa, synthetic construct
  REGION 1..717: note = Synthetic
MALPVTALLLPLALLLHAARPDIQMTQSPSSLSASVGDRVTITCRASQSISNYLNWYHQKPGKAPKLLIYAASSLESGVPSRFSGSGSGTDFTLTISSLQPEDFATYYCQQSYSNPLTFGGGTKVESKGSTSGSGKPGSGEGSTKGQLQLVQSGAEVKKPGASVKVSCKASGYTFTNYGISWLRQAPGQGLEWMGWISGYNDNTHYAQKFQGRVTMTTDTSTTTAYMELRNLRSDDTAVYYCARDGIAARPVYYYYMDVWGKGTTVTVSSAAAIEVMYPPPYLDNEKSNGTIIHVKGKHLCPSPLFPGPSKPFWVLVVVGGVLACYSLLVTVAFIIFWVRSKRSRLLHSDYMNMTPRRPGPTRKHYQPYAPPRDFAAYRSRVKFSRSADAPAYQQGQNQLYNELNLGRREEYDVLDKRRGRDPEMGGKPRRKNPQEGLYNELQKDKMAEAYSEIGMKGERRRGKGHDGLYQGLSTATKDTYDALHMQALPPRGSGEGRGSLLTCGDVEENPGPMALPVTALLLPLALLLHAARPNWVNVISDLKKIEDLIQSMHIDATLYTESDVHPSCKVTAMKCFLLELQVISLESGDASIHDTVENLIILANNSLSSNGNVTESGCKECEELEEKNIKEFLQSFVHIVQMFINTSTTTPAPRPPTPAPTIASQPLSLRPEACRPAAGGAVHTRGLDFACDIYIWAPLAGTCGVLLLSLVITLYC

SEQ ID NO: 2326 - protein, 718 aa, synthetic construct
  REGION 1..718: note = Synthetic
MALPVTALLLPLALLLHAARPEIVLTQSPDFQSVTPKEKVTITCRASQSIGSSLHWYQQKPDQSPKLLIKFASQSFSGVPSRFSGSGSGTDFTLTIHSLEAEDAATYYCHQSGSLPWTFGQGTKVEIKGSTSGSGKPGSGEGSTKGQVQLVESGGGVVQPGRSLRLSCVASGFTFSSNDIYWVRQAPGKGLEWVAVIWYDGSNKYYADSVKGRFTISRDNSKNTLYLQMNSLRAEDTAVYYCARGDNWNDEHHYHYYMDVWGKGTTVTVSSAAAIEVMYPPPYLDNEKSNGTIIHVKGKHLCPSPLFPGPSKPFWVLVVVGGVLACYSLLVTVAFIIFWVRSKRSRLLHSDYMNMTPRRPGPTRKHYQPYAPPRDFAAYRSRVKFSRSADAPAYQQGQNQLYNELNLGRREEYDVLDKRRGRDPEMGGKPRRKNPQEGLYNELQKDKMAEAYSEIGMKGERRRGKGHDGLYQGLSTATKDTYDALHMQALPPRGSGEGRGSLLTCGDVEENPGPMALPVTALLLPLALLLHAARPNWVNVISDLKKIEDLIQSMHIDATLYTESDVHPSCKVTAMKCFLLELQVISLESGDASIHDTVENLIILANNSLSSNGNVTESGCKECEELEEKNIKEFLQSFVHIVQMFINTSTTTPAPRPPTPAPTIASQPLSLRPEACRPAAGGAVHTRGLDFACDIYIWAPLAGTCGVLLLSLVITLYC

SEQ ID NO: 2327 - protein, 711 aa, synthetic construct
  REGION 1..711: note = Synthetic
MALPVTALLLPLALLLHAARPVTQEPSFSVSPGGTVTLTCGLSSGSVSTSYYPSWYQQTPGQAPRTLIYSTNIRSSGVPDRFSGSILGNKAALTITGAQADDESDYYCVLYMGSDIVVFGGGTKLTVLGSTSGSGKPGSGEGSTKGQVQLVESGGGVVQPGRSLRLSCAASGFTFSSYGMHWVRQAPGKGLEWVAVISYDGSNKYYADSVKGRFTISRDNSKTTLYLQMNSLRAEDTAVYYCARDHYYYYMDVWGKGTTVTVSSAAAIEVMYPPPYLDNEKSNGTIIHVKGKHLCPSPLFPGPSKPFWVLVVVGGVLACYSLLVTVAFIIFWVRSKRSRLLHSDYMNMTPRRPGPTRKHYQPYAPPRDFAAYRSRVKFSRSADAPAYQQGQNQLYNELNLGRREEYDVLDKRRGRDPEMGGKPRRKNPQEGLYNELQKDKMAEAYSEIGMKGERRRGKGHDGLYQGLSTATKDTYDALHMQALPPRGSGEGRGSLLTCGDVEENPGPMALPVTALLLPLALLLHAARPNWVNVISDLKKIEDLIQSMHIDATLYTESDVHPSCKVTAMKCFLLELQVISLESGDASIHDTVENLIILANNSLSSNGNVTESGCKECEELEEKNIKEFLQSFVHIVQMFINTSTTTPAPRPPTPAPTIASQPLSLRPEACRPAAGGAVHTRGLDFACDIYIWAPLAGTCGVLLLSLVITLYC

SEQ ID NO: 2328 - protein, 716 aa, synthetic construct
  REGION 1..716: note = Synthetic
MALPVTALLLPLALLLHAARPEIVLTQSPATLSLSPGERATLSCRASQSVSSYFAWYQQKPGQAPRLLIYDASNRATGIPARFSGSGSGTDFTLTISSLEPEDFAVYYCQQRSNWPLTFGGGTKVEIKGSTSGSGKPGSGEGSTKGQLQLQESGPGLVKPSETLSLTCTVSGGSISSSSYYWGWIRQPPGKGLEWIGSLYYSGSTYYNPSLKSRVTISVDTSKNQFSLKLSSVTAADTAVYYCAAVQLERRGYFYMDVWGKGTTVTVSSAAAIEVMYPPPYLDNEKSNGTIIHVKGKHLCPSPLFPGPSKPFWVLVVVGGVLACYSLLVTVAFIIFWVRSKRSRLLHSDYMNMTPRRPGPTRKHYQPYAPPRDFAAYRSRVKFSRSADAPAYQQGQNQLYNELNLGRREEYDVLDKRRGRDPEMGGKPRRKNPQEGLYNELQKDKMAEAYSEIGMKGERRRGKGHDGLYQGLSTATKDTYDALHMQALPPRGSGEGRGSLLTCGDVEENPGPMALPVTALLLPLALLLHAARPNWVNVISDLKKIEDLIQSMHIDATLYTESDVHPSCKVTAMKCFLLELQVISLESGDASIHDTVENLIILANNSLSSNGNVTESGCKECEELEEKNIKEFLQSFVHIVQMFINTSTTTPAPRPPTPAPTIASQPLSLRPEACRPAAGGAVHTRGLDFACDIYIWAPLAGTCGVLLLSLVITLYC

SEQ ID NO: 2329 - protein, 718 aa, synthetic construct
  REGION 1..718: note = Synthetic
MALPVTALLLPLALLLHAARPQTVVTQEPSFSVSPGGTVTLTCGLTSGSVSTSYYPNWYQQTPGQAPRTLIYSTNIRSSGVPDRFSGSILGNKAALTITGAQADDESDYYCVLYMGSGMFIFGSGTKVTVLGSTSGSGKPGSGEGSTKGQVQLVESGGGVVQPGRSLRLSCAASGFTFSNYGMHWVRQAPGKGLEWMAVIWSDGHNKYYADSVKGRFTISRDNSKNTLYLQMNSLRAEDTAVYYCARAQLERRYFYYMDVWGKGTTVTVSSAAAIEVMYPPPYLDNEKSNGTIIHVKGKHLCPSPLFPGPSKPFWVLVVVGGVLACYSLLVTVAFIIFWVRSKRSRLLHSDYMNMTPRRPGPTRKHYQPYAPPRDFAAYRSRVKFSRSADAPAYQQGQNQLYNELNLGRREEYDVLDKRRGRDPEMGGKPRRKNPQEGLYNELQKDKMAEAYSEIGMKGERRRGKGHDGLYQGLSTATKDTYDALHMQALPPRGSGEGRGSLLTCGDVEENPGPMALPVTALLLPLALLLHAARPNWVNVISDLKKIEDLIQSMHIDATLYTESDVHPSCKVTAMKCFLLELQVISLESGDASIHDTVENLIILANNSLSSNGNVTESGCKECEELEEKNIKEFLQSFVHIVQMFINTSTTTPAPRPPTPAPTIASQPLSLRPEACRPAAGGAVHTRGLDFACDIYIWAPLAGTCGVLLLSLVITLYC

SEQ ID NO: 2330 - protein, 718 aa, synthetic construct
  REGION 1..718: note = Synthetic
MALPVTALLLPLALLLHAARPDIQMTQSPSSLSASVGDRVTITCRASQGISSWLAWYQQKPEKAPKSLIYAASSLQGGVPSRFSGSGSGTDFTLTISSLQPEDFATYYCQQYDSYPYTFGQGTKLEIKGSTSGSGKPGSGEGSTKGQVQLVQSGAEVKKPGASVKVSCKASGYTFTSYDINWVRQATGQGLEWMGWMIPNSGDTGSAQKFQGRVTMTRNTSIGTAYMELSSLRSEDTAVYYCARGGYCNSTSCYYYYMDVWGKGTTVTVSSAAAIEVMYPPPYLDNEKSNGTIIHVKGKHLCPSPLFPGPSKPFWVLVVVGGVLACYSLLVTVAFIIFWVRSKRSRLLHSDYMNMTPRRPGPTRKHYQPYAPPRDFAAYRSRVKFSRSADAPAYQQGQNQLYNELNLGRREEYDVLDKRRGRDPEMGGKPRRKNPQEGLYNELQKDKMAEAYSEIGMKGERRRGKGHDGLYQGLSTATKDTYDALHMQALPPRGSGEGRGSLLTCGDVEENPGPMALPVTALLLPLALLLHAARPNWVNVISDLKKIEDLIQSMHIDATLYTESDVHPSCKVTAMKCFLLELQVISLESGDASIHDTVENLIILANNSLSSNGNVTESGCKECEELEEKNIKEFLQSFVHIVQMFINTSTTTPAPRPPTPAPTIASQPLSLRPEACRPAAGGAVHTRGLDFACDIYIWAPLAGTCGVLLLSLVITLYC

SEQ ID NO: 2331 - protein, 719 aa, synthetic construct
  REGION 1..719: note = Synthetic
MALPVTALLLPLALLLHAARPDIQVTQSPTFLSASVGDRVTITCRASQGISSYLAWYQQKPGKAPKLLIYGASTLQSGVPSRFSGSGSGTEFTLTISSLQPEDFATYYCQQLNSYPWTFGQGTKVEIKGSTSGSGKPGSGEGSTKGQVQLVQSGAEVKKPGASVKVSCKASGYTFTSYDINWVRQATGQGLEWMGWMNPNSGNTVYAQKFQGRVTMTRNTSISTAYMELSSLRSEDTAVYYCARGGDFWSGYHDYYYYMDVWGKGTTVTVSSAAAIEVMYPPPYLDNEKSNGTIIHVKGKHLCPSPLFPGPSKPFWVLVVVGGVLACYSLLVTVAFIIFWVRSKRSRLLHSDYMNMTPRRPGPTRKHYQPYAPPRDFAAYRSRVKFSRSADAPAYQQGQNQLYNELNLGRREEYDVLDKRRGRDPEMGGKPRRKNPQEGLYNELQKDKMAEAYSEIGMKGERRRGKGHDGLYQGLSTATKDTYDALHMQALPPRGSGEGRGSLLTCGDVEENPGPMALPVTALLLPLALLLHAARPNWVNVISDLKKIEDLIQSMHIDATLYTESDVHPSCKVTAMKCFLLELQVISLESGDASIHDTVENLIILANNSLSSNGNVTESGCKECEELEEKNIKEFLQSFVHIVQMFINTSTTTPAPRPPTPAPTIASQPLSLRPEACRPAAGGAVHTRGLDFACDIYIWAPLAGTCGVLLLSLVITLYC

SEQ ID NO: 2332 - protein, 717 aa, synthetic construct
  REGION 1..717: note = Synthetic
MALPVTALLLPLALLLHAARPSYELTQPPSVSVSPGQTASITCSGDKLGDKYACWYQQKPGQSPVLVIYQDSKRPSGIPERFSGSNSGNTATLTISGTQAMDEADYYCQAWDSSTAVFGGGTQLTALGSTSGSGKPGSGEGSTKGQVQLQESGPGLVKPSETLSLTCTVSGGSISSYYWSWIRQPAGKGLEWIGRIYTSGSTNYNPSLKSRVTMSVDTSKNQFSLKLSSVTAADTAVYYCAREEYQLLPALYYYYYMDVWGKGTTVTVSSAAAIEVMYPPPYLDNEKSNGTIIHVKGKHLCPSPLFPGPSKPFWVLVVVGGVLACYSLLVTVAFIIFWVRSKRSRLLHSDYMNMTPRRPGPTRKHYQPYAPPRDFAAYRSRVKFSRSADAPAYQQGQNQLYNELNLGRREEYDVLDKRRGRDPEMGGKPRRKNPQEGLYNELQKDKMAEAYSEIGMKGERRRGKGHDGLYQGLSTATKDTYDALHMQALPPRGSGEGRGSLLTCGDVEENPGPMALPVTALLLPLALLLHAARPNWVNVISDLKKIEDLIQSMHIDATLYTESDVHPSCKVTAMKCFLLELQVISLESGDASIHDTVENLIILANNSLSSNGNVTESGCKECEELEEKNIKEFLQSFVHIVQMFINTSTTTPAPRPPTPAPTIASQPLSLRPEACRPAAGGAVHTRGLDFACDIYIWAPLAGTCGVLLLSLVITLYC

SEQ ID NO: 2333 - protein, 718 aa, synthetic construct
  REGION 1..718: note = Synthetic
MALPVTALLLPLALLLHAARPQTVVTQEPSFSVSPGGTVTLTCGLTSGSVSTSYYPNWYQQTPGQAPRTLIYSTNIRSSGVPDRFSGSILGNKAALTITGAQADDESDYYCVLYMGSGMFIFGSGTKVTVLGSTSGSGKPGSGEGSTKGQVQLVESGGGVVQPGRSLRLSCAATGFTFSSYGMHWVRQAPGKGLEWMVVIWSDGHNKYYADSVKGRFTISRDNSKNTLYLQMNSLRAEDTAVYYCARAQLERRYFYYMDVWGKGTTVTVSSAAAIEVMYPPPYLDNEKSNGTIIHVKGKHLCPSPLFPGPSKPFWVLVVVGGVLACYSLLVTVAFIIFWVRSKRSRLLHSDYMNMTPRRPGPTRKHYQPYAPPRDFAAYRSRVKFSRSADAPAYQQGQNQLYNELNLGRREEYDVLDKRRGRDPEMGGKPRRKNPQEGLYNELQKDKMAEAYSEIGMKGERRRGKGHDGLYQGLSTATKDTYDALHMQALPPRGSGEGRGSLLTCGDVEENPGPMALPVTALLLPLALLLHAARPNWVNVISDLKKIEDLIQSMHIDATLYTESDVHPSCKVTAMKCFLLELQVISLESGDASIHDTVENLIILANNSLSSNGNVTESGCKECEELEEKNIKEFLQSFVHIVQMFINTSTTTPAPRPPTPAPTIASQPLSLRPEACRPAAGGAVHTRGLDFACDIYIWAPLAGTCGVLLLSLVITLYC

SEQ ID NO: 2334 - protein, 718 aa, synthetic construct
  REGION 1..718: note = Synthetic
MALPVTALLLPLALLLHAARPEIVLTQSPDFQSVTPKEKVTITCRASQSIGSSLHWYQQKPDQSPMLLIKFASQSISGVPSRFSGSGSGTDFTLTINSLEAEDAAAYYCHQSSSLPWTFGQGTKVEIKGSTSGSGKPGSGEGSTKGQVQLVESGGGVVQPGRSLRLSCAASGFTFTSYDMHWVRQAPGKGLEWVTIIWFDGSNKYYADSVKGRFTISRDNSKNTLYLQMNSLSAEDTAVYYCARGDNWNDRYYYYYYMDVWGKGTTVTVSSAAAIEVMYPPPYLDNEKSNGTIIHVKGKHLCPSPLFPGPSKPFWVLVVVGGVLACYSLLVTVAFIIFWVRSKRSRLLHSDYMNMTPRRPGPTRKHYQPYAPPRDFAAYRSRVKFSRSADAPAYQQGQNQLYNELNLGRREEYDVLDKRRGRDPEMGGKPRRKNPQEGLYNELQKDKMAEAYSEIGMKGERRRGKGHDGLYQGLSTATKDTYDALHMQALPPRGSGEGRGSLLTCGDVEENPGPMALPVTALLLPLALLLHAARPNWVNVISDLKKIEDLIQSMHIDATLYTESDVHPSCKVTAMKCFLLELQVISLESGDASIHDTVENLIILANNSLSSNGNVTESGCKECEELEEKNIKEFLQSFVHIVQMFINTSTTTPAPRPPTPAPTIASQPLSLRPEACRPAAGGAVHTRGLDFACDIYIWAPLAGTCGVLLLSLVITLYC

SEQ ID NO: 2335 - protein, 723 aa, synthetic construct
  REGION 1..723: note = Synthetic
MALPVTALLLPLALLLHAARPDIVMTQPPLSSPVTLGQPASISCRSSQSLVHSDGNTYLSWLQQRPGQPPRLLIYKVSNRFSGVPDRFSGSGAGTDFTLKISRVEAEDVGVYYCTQATQFPHTFGQGTKLEIKGSTSGSGKPGSGEGSTKGQVQLVQSGAEVKKPGASVKVSCKASGYTFTSYGISWVRQAPGQGLEWMGWISAYNGHTDYTQKLQGRVTMTTDTSTTTAYMELRSLSSADTAVYYCVREVVLPTTDYYYFYMDVWGKGTTVTVSSAAAIEVMYPPPYLDNEKSNGTIIHVKGKHLCPSPLFPGPSKPFWVLVVVGGVLACYSLLVTVAFIIFWVRSKRSRLLHSDYMNMTPRRPGPTRKHYQPYAPPRDFAAYRSRVKFSRSADAPAYQQGQNQLYNELNLGRREEYDVLDKRRGRDPEMGGKPRRKNPQEGLYNELQKDKMAEAYSEIGMKGERRRGKGHDGLYQGLSTATKDTYDALHMQALPPRGSGEGRGSLLTCGDVEENPGPMALPVTALLLPLALLLHAARPNWVNVISDLKKIEDLIQSMHIDATLYTESDVHPSCKVTAMKCFLLELQVISLESGDASIHDTVENLIILANNSLSSNGNVTESGCKECEELEEKNIKEFLQSFVHIVQMFINTSTTTPAPRPPTPAPTIASQPLSLRPEACRPAAGGAVHTRGLDFACDIYIWAPLAGTCGVLLLSLVITLYC

SEQ ID NO: 2336 - protein, 722 aa, synthetic construct
  REGION 1..722: note = Synthetic
MALPVTALLLPLALLLHAARPDIQMTQSPSSLSASVGDRVTITCRASQGISSWLAWYQQKPEKAPKSLIYAASSLQSGVPSRFSGSGSGTDFTLTISSLQPEDFATYYCQQYNSYPYTFGQGTKLEIKGSTSGSGKPGSGEGSTKGQVQLVQSGAEVKKPGASVKVSCKVSGYTLTELSMHWVRQAPGKGLEWMGGFDPEDGETIYAQKFQGRVTMTEDTSTDTAYMELSSLRSEDTAVYYCATGRITMVRGVIIPYYYYYMDVWGKGTTVTVSSAAAIEVMYPPPYLDNEKSNGTIIHVKGKHLCPSPLFPGPSKPFWVLVVVGGVLACYSLLVTVAFIIFWVRSKRSRLLHSDYMNMTPRRPGPTRKHYQPYAPPRDFAAYRSRVKFSRSADAPAYQQGQNQLYNELNLGRREEYDVLDKRRGRDPEMGGKPRRKNPQEGLYNELQKDKMAEAYSEIGMKGERRRGKGHDGLYQGLSTATKDTYDALHMQALPPRGSGEGRGSLLTCGDVEENPGPMALPVTALLLPLALLLHAARPNWVNVISDLKKIEDLIQSMHIDATLYTESDVHPSCKVTAMKCFLLELQVISLESGDASIHDTVENLIILANNSLSSNGNVTESGCKECEELEEKNIKEFLQSFVHIVQMFINTSTTTPAPRPPTPAPTIASQPLSLRPEACRPAAGGAVHTRGLDFACDIYIWAPLAGTCGVLLLSLVITLYC

SEQ ID NO: 2337 - protein, 720 aa, synthetic construct
  REGION 1..720: note = Synthetic
MALPVTALLLPLALLLHAARPDIVMTQTPLSLSVTPGQPASISCKSSKSLLHSDGKTYLYWYLQKPGQPPQLLIYEVSNRFSGVPDRFSGSGSGTDFTLKISRVEAEDVGVYYCMQSIQFPWTFGQGTKVEIKGSTSGSGKPGSGEGSTKGQVQLVQSGTEVKKPGASVKVSCKASGYTFTNYGIGWVRQAPGQGLEWMGWIIAYNGYTKYAQILQGRVTMTTDTSTNTAYMELRSLRSDDTAVYYCARQQLGGDYHYYMDVWGKGTTVTVSSAAAIEVMYPPPYLDNEKSNGTIIHVKGKHLCPSPLFPGPSKPFWVLVVVGGVLACYSLLVTVAFIIFWVRSKRSRLLHSDYMNMTPRRPGPTRKHYQPYAPPRDFAAYRSRVKFSRSADAPAYQQGQNQLYNELNLGRREEYDVLDKRRGRDPEMGGKPRRKNPQEGLYNELQKDKMAEAYSEIGMKGERRRGKGHDGLYQGLSTATKDTYDALHMQALPPRGSGEGRGSLLTCGDVEENPGPMALPVTALLLPLALLLHAARPNWVNVISDLKKIEDLIQSMHIDATLYTESDVHPSCKVTAMKCFLLELQVISLESGDASIHDTVENLIILANNSLSSNGNVTESGCKECEELEEKNIKEFLQSFVHIVQMFINTSTTTPAPRPPTPAPTIASQPLSLRPEACRPAAGGAVHTRGLDFACDIYIWAPLAGTCGVLLLSLVITLYC

SEQ ID NO: 2338 - protein, 720 aa, synthetic construct
  REGION 1..720: note = Synthetic
MALPVTALLLPLALLLHAARPDIVMTQTPLSLSVTPGQPASISCKSSKSLLHSDGKTYLYWYLQKPGQPPQLLIYEVSTRFSGVPDRFSGSGSGTDFTLKISRVEAEDVGVYYCMQSIQFPWTFGQGTKVEIKGSTSGSGKPGSGEGSTKGQVQLVQSGTEVKKPGASVKVSCKASGYTFTNYGIGWVRQAPGQGLEWMGWIIAYNGYTKYAQILQGRVTMTTDTSTNTAYMELRSLRSDDTAVYYCARQQLGGDYHYYMDVWGKGTTVTVSSAAAIEVMYPPPYLDNEKSNGTIIHVKGKHLCPSPLFPGPSKPFWVLVVVGGVLACYSLLVTVAFIIFWVRSKRSRLLHSDYMNMTPRRPGPTRKHYQPYAPPRDFAAYRSRVKFSRSADAPAYQQGQNQLYNELNLGRREEYDVLDKRRGRDPEMGGKPRRKNPQEGLYNELQKDKMAEAYSEIGMKGERRRGKGHDGLYQGLSTATKDTYDALHMQALPPRGSGEGRGSLLTCGDVEENPGPMALPVTALLLPLALLLHAARPNWVNVISDLKKIEDLIQSMHIDATLYTESDVHPSCKVTAMKCFLLELQVISLESGDASIHDTVENLIILANNSLSSNGNVTESGCKECEELEEKNIKEFLQSFVHIVQMFINTSTTTPAPRPPTPAPTIASQPLSLRPEACRPAAGGAVHTRGLDFACDIYIWAPLAGTCGVLLLSLVITLYC

SEQ ID NO: 2339 - protein, 718 aa, synthetic construct
  REGION 1..718: note = Synthetic
MALPVTALLLPLALLLHAARPDIQMTQSPSSLSASVGDRVTITCRASQGISNWLAWYQQKPEKAPKSLIYAASSLQGGVPSRFSGSGSGTDFTLTISSLQPEDFATYYCQQYDSYPYTFGQGTKLEIKGSTSGSGKPGSGEGSTKGQVQLVQSGTEVKKPGASVKVSCKTSGYTFTSYDINWVRQATGQGLEWMGWMNPISGDTGSAQKFQGRVTMTRNTSIGTAYMELSSLRSEDTAVYYCARGGYCSSTSCYYYYMDVWGKGTTVTVSSAAAIEVMYPPPYLDNEKSNGTIIHVKGKHLCPSPLFPGPSKPFWVLVVVGGVLACYSLLVTVAFIIFWVRSKRSRLLHSDYMNMTPRRPGPTRKHYQPYAPPRDFAAYRSRVKFSRSADAPAYQQGQNQLYNELNLGRREEYDVLDKRRGRDPEMGGKPRRKNPQEGLYNELQKDKMAEAYSEIGMKGERRRGKGHDGLYQGLSTATKDTYDALHMQALPPRGSGEGRGSLLTCGDVEENPGPMALPVTALLLPLALLLHAARPNWVNVISDLKKIEDLIQSMHIDATLYTESDVHPSCKVTAMKCFLLELQVISLESGDASIHDTVENLIILANNSLSSNGNVTESGCKECEELEEKNIKEFLQSFVHIVQMFINTSTTTPAPRPPTPAPTIASQPLSLRPEACRPAAGGAVHTRGLDFACDIYIWAPLAGTCGVLLLSLVITLYC

SEQ ID NO: 2340 - protein, 718 aa, synthetic construct
  REGION 1..718: note = Synthetic
MALPVTALLLPLALLLHAARPDIQMTQSPSSLSASVGDRVTITCRASQGISSWLAWYQQKPEKAPKSLIYAASSLQGGVPSRFSGSGSGTDFTLTISSLQPEDFATYYCQQYDSYPYTFGQGTKLEIKGSTSGSGKPGSGEGSTKGQVQLVQSGAEVKKPGASVKVSCKASGYTFTSYDINWVRQATGQGLEWMGWMIPNSGDTGSAQKFQGRVTMTRNTSISTAYMELSSLRSEDTAVYYCARGGYCNSTSCYYYYMDVWGKGTTVTVSSAAAIEVMYPPPYLDNEKSNGTIIHVKGKHLCPSPLFPGPSKPFWVLVVVGGVLACYSLLVTVAFIIFWVRSKRSRLLHSDYMNMTPRRPGPTRKHYQPYAPPRDFAAYRSRVKFSRSADAPAYQQGQNQLYNELNLGRREEYDVLDKRRGRDPEMGGKPRRKNPQEGLYNELQKDKMAEAYSEIGMKGERRRGKGHDGLYQGLSTATKDTYDALHMQALPPRGSGEGRGSLLTCGDVEENPGPMALPVTALLLPLALLLHAARPNWVNVISDLKKIEDLIQSMHIDATLYTESDVHPSCKVTAMKCFLLELQVISLESGDASIHDTVENLIILANNSLSSNGNVTESGCKECEELEEKNIKEFLQSFVHIVQMFINTSTTTPAPRPPTPAPTIASQPLSLRPEACRPAAGGAVHTRGLDFACDIYIWAPLAGTCGVLLLSLVITLYC

SEQ ID NO: 2341 - protein, 719 aa, synthetic construct
  REGION 1..719: note = Synthetic
MALPVTALLLPLALLLHAARPEIVLTQSPGTLSLSPGERATLSCRASQSVSSSYLAWYQQKPGQAPRLLIYGASSRATGIPDRFSDSGSGTDFTLTISRLEPEDFAVYYCQHYGSSPPRITFGPGTKVDIKGSTSGSGKPGSGEGSTKGEVQLLESGGGLVQPGGSLRLSCAASGFTFSSYVMNWVRQAPGKGLEWVSSVSGSGNNSFYADSVKGRFTISRDNSKNTLYLQMNSLRAEDTAVYYCASRSSSYLYYYYYMDVWGKGTTVTVSSAAAIEVMYPPPYLDNEKSNGTIIHVKGKHLCPSPLFPGPSKPFWVLVVVGGVLACYSLLVTVAFIIFWVRSKRSRLLHSDYMNMTPRRPGPTRKHYQPYAPPRDFAAYRSRVKFSRSADAPAYQQGQNQLYNELNLGRREEYDVLDKRRGRDPEMGGKPRRKNPQEGLYNELQKDKMAEAYSEIGMKGERRRGKGHDGLYQGLSTATKDTYDALHMQALPPRGSGEGRGSLLTCGDVEENPGPMALPVTALLLPLALLLHAARPNWVNVISDLKKIEDLIQSMHIDATLYTESDVHPSCKVTAMKCFLLELQVISLESGDASIHDTVENLIILANNSLSSNGNVTESGCKECEELEEKNIKEFLQSFVHIVQMFINTSTTTPAPRPPTPAPTIASQPLSLRPEACRPAAGGAVHTRGLDFACDIYIWAPLAGTCGVLLLSLVITLYC

SEQ ID NO: 2342 - DNA, 2157 bp, synthetic construct
  misc_feature 1..2157: note = Synthetic
  source 1..2157: mol_type = other DNA
atggccttaccagtgaccgccttgctcctgccgctggccttgctgctccacgccgccaggccggaaattgtgctgactcagtctccagactttcagtctgtgactccaaaggagaaagtcaccatcacctgccgggccagtcagaccattggcagtagcttacactggtaccagcagaaaccagatcagtctccaaagctcctcatcaagcatgcttcccagtccttctcaggggtcccctcgaggttcagtggcagtggatctgggacagatttcaccctcaccgtcaatagcctggaagctgaagatgctgcaacgtattactgtcatcagagtagtagtttaccgtggacgttcggccaagggaccaaggtggaaatcaaaggcagcaccagcggcagcggcaagcccggctccggagagggcagcaccaagggccaggtgcagctggtggagtctgggggaggcgtggtccagcctgggaggtccctgagactttcctgtgcagcgtctggattcaccttcagcagtcatgacatgcactgggtccgccaggctccaggcaaggggctggactgggtggcagttatatggagtgatggaaataaaaaatactatgtagactccgcgaagggccggttcaccatctccagagacaattccaagaacacggtgtatctgcaaatgaacagcctgagagccgaggacacggctatatattactgtgcgagaggtgacaactggaacgacgaacactcctactattactacatggacgtctggggcaaggggaccacggtcaccgtctcctcagcggccgcaattgaagttatgtatcctcctccttacctagacaatgagaagagcaatggaaccattatccatgtgaaagggaaacacctttgtccaagtcccctatttcccggaccttctaagcccttttgggtgctggtggtggttgggggagtcctggcttgctatagcttgctagtaacagtggcctttattattttctgggtgaggagtaagaggagcaggctcctgcacagtgactacatgaacatgactccccgccgccccgggcccacccgcaagcattaccagccctatgccccaccacgcgacttcgcagcctatcgctccagagtgaagttcagcaggagcgcagacgcccccgcgtaccagcagggccagaaccagctctataacgagctcaatctaggacgaagagaggagtacgatgttttggacaagagacgtggccgggaccctgagatggggggaaagccgagaaggaagaaccctcaggaaggcctgtacaatgaactgcagaaagataagatggcggaggcctacagtgagattgggatgaaaggcgagcgccggaggggcaaggggcacgatggcctttaccagggtctcagtacagccaccaaggacacctacgacgcccttcacatgcaggccctgccccctcgcggctctggcgagggaaggggttccctgcttacttgcggcgacgtcgaagagaatcccggtccgatggccctcccagtaactgccctccttttgcccctcgcactccttcttcatgccgctcgccccaactgggtcaacgtgattagcgatttgaagaaaatcgaggaccttatacagtctatgcatattgacgctacactgtatactgagagtgatgtacacccgtcctgtaaggtaacggccatgaaatgctttcttctggagctccaggtcatcagcttggagtctggggacgcaagcatccacgatacggttgaaaacctcatcatccttgcgaacaactctctctcatctaatggaaacgttacagagagtgggtgtaaggagtgcgaagagttggaagaaaaaaacatcaaagaatttcttcaatccttcgttcacatagtgcaaatgttcattaacacgtccactaccacacccgccccgaggccacctacgccggcaccgactatcgccagtcaacccctctctctgcgccccgaggcttgccggcctgcggctggtggggcggtccacacccggggcctggattttgcgtgcgatatatacatctgggcacctcttgccggcacctgcggagtgctgcttctctcactcgttattacgctgtactgctaa

SEQ ID NO: 2343 - DNA, 2157 bp, synthetic construct
  misc_feature 1..2157: note = Synthetic
  source 1..2157: mol_type = other DNA
atggccttaccagtgaccgccttgctcctgccgctggccttgctgctccacgccgccaggccggaaattgtgctgactcagtctccagactttcagtctgtgactccaaaggagaaagtcaccatcacctgccgggccagtcagaccattggcagtagcttacactggtaccagcagaaaccagatcagtctccaaagctcctcatcaagcatgcttcccagtccttctcaggggtcccctcgaggttcagtggcagtggatctgggacagatttcaccctcaccgtcaatagcctggaagctgaagatgctgcaacgtattactgtcatcagagtagtagtttaccgtggacgttcggccaagggaccaaggtggaaatcaaaggcagcaccagcggcagcggcaagcccggctccggagagggcagcaccaagggccaggtgcagctggtggagtctgggggaggcgtggtccagcctgggaggtccctgagactttcctgtgcagcgtctggattcaccttcagtagtcatgacatgcactgggtccgccaggctccaggcaaggggctggactgggtggcagttatatggagtgatggaaataataaatactatgcagactccgcgaagggccggttcaccatctccagagacaattccaagaacacggtgtatctgcaaatgaacagcctgagagccgaggacacggctatatattactgtgcgagaggtgacaactggaacgacgaacactcctactattactacatggacgtctggggcaaggggaccacggtcaccgtctcctcagcggccgcaattgaagttatgtatcctcctccttacctagacaatgagaagagcaatggaaccattatccatgtgaaagggaaacacctttgtccaagtcccctatttcccggaccttctaagcccttttgggtgctggtggtggttgggggagtcctggcttgctatagcttgctagtaacagtggcctttattattttctgggtgaggagtaagaggagcaggctcctgcacagtgactacatgaacatgactccccgccgccccgggcccacccgcaagcattaccagccctatgccccaccacgcgacttcgcagcctatcgctccagagtgaagttcagcaggagcgcagacgcccccgcgtaccagcagggccagaaccagctctataacgagctcaatctaggacgaagagaggagtacgatgttttggacaagagacgtggccgggaccctgagatggggggaaagccgagaaggaagaaccctcaggaaggcctgtacaatgaactgcagaaagataagatggcggaggcctacagtgagattgggatgaaaggcgagcgccggaggggcaaggggcacgatggcctttaccagggtctcagtacagccaccaaggacacctacgacgcccttcacatgcaggccctgccccctcgcggctctggcgagggaaggggttccctgcttacttgcggcgacgtcgaagagaatcccggtccgatggccctcccagtaactgccctccttttgcccctcgcactccttcttcatgccgctcgccccaactgggtcaacgtgattagcgatttgaagaaaatcgaggaccttatacagtctatgcatattgacgctacactgtatactgagagtgatgtacacccgtcctgtaaggtaacggccatgaaatgctttcttctggagctccaggtcatcagcttggagtctggggacgcaagcatccacgatacggttgaaaacctcatcatccttgcgaacaactctctctcatctaatggaaacgttacagagagtgggtgtaaggagtgcgaagagttggaagaaaaaaacatcaaagaatttcttcaatccttcgttcacatagtgcaaatgttcattaacacgtccactaccacacccgccccgaggccacctacgccggcaccgactatcgccagtcaacccctctctctgcgccccgaggcttgccggcctgcggctggtggggcggtccacacccggggcctggattttgcgtgcgatatatacatctgggcacctcttgccggcacctgcggagtgctgcttctctcactcgttattacgctgtactgctaa

SEQ ID NO: 2344 - DNA, 2154 bp, synthetic construct
  misc_feature 1..2154: note = Synthetic
  source 1..2154: mol_type = other DNA
atggccttaccagtgaccgccttgctcctgccgctggccttgctgctccacgccgccaggccggacatacagatgacccagtctccatcctccctgtctgcatctgtaggagacagagtcaccatcacttgccgggcaagccagagcattagcaactatttaaattggtatcaccagaaaccagggaaagcccctaagctcctgatctatgctgcatccagtttggaaagtggggtcccatcaaggttcagtggcagtggatctgggacagatttcactctcaccatcagcagtctgcaacctgaagattttgcaacttactactgtcaacagagttacagtaacccgctcactttcggcggagggaccaaggtggagagcaaaggcagcaccagcggcagcggcaagcccggctccggagagggcagcaccaagggccagcttcagctggtgcagtctggagctgaggtgaagaagcctggggcctcagtgaaggtctcctgcaaggcttctggttacacctttaccaactatggtatcagctggttgcgacaggcccctggacaagggcttgagtggatgggatggatcagtggttacaatgataacacacactatgcacagaagttccagggcagagtcaccatgaccacagacacatccacgaccacagcctacatggaactgaggaacctgagatctgacgacacggccgtgtattactgtgcgagagatgggatagcagctcgtccagtctactactactacatggacgtctggggcaaagggaccacggtcaccgtctcctcagcggccgcaattgaagttatgtatcctcctccttacctagacaatgagaagagcaatggaaccattatccatgtgaaagggaaacacctttgtccaagtcccctatttcccggaccttctaagcccttttgggtgctggtggtggttgggggagtcctggcttgctatagcttgctagtaacagtggcctttattattttctgggtgaggagtaagaggagcaggctcctgcacagtgactacatgaacatgactccccgccgccccgggcccacccgcaagcattaccagccctatgccccaccacgcgacttcgcagcctatcgctccagagtgaagttcagcaggagcgcagacgcccccgcgtaccagcagggccagaaccagctctataacgagctcaatctaggacgaagagaggagtacgatgttttggacaagagacgtggccgggaccctgagatggggggaaagccgagaaggaagaaccctcaggaaggcctgtacaatgaactgcagaaagataagatggcggaggcctacagtgagattgggatgaaaggcgagcgccggaggggcaaggggcacgatggcctttaccagggtctcagtacagccaccaaggacacctacgacgcccttcacatgcaggccctgccccctcgcggctctggcgagggaaggggttccctgcttacttgcggcgacgtcgaagagaatcccggtccgatggccctcccagtaactgccctccttttgcccctcgcactccttcttcatgccgctcgccccaactgggtcaacgtgattagcgatttgaagaaaatcgaggaccttatacagtctatgcatattgacgctacactgtatactgagagtgatgtacacccgtcctgtaaggtaacggccatgaaatgctttcttctggagctccaggtcatcagcttggagtctggggacgcaagcatccacgatacggttgaaaacctcatcatccttgcgaacaactctctctcatctaatggaaacgttacagagagtgggtgtaaggagtgcgaagagttggaagaaaaaaacatcaaagaatttcttcaatccttcgttcacatagtgcaaatgttcattaacacgtccactaccacacccgccccgaggccacctacgccggcaccgactatcgccagtcaacccctctctctgcgccccgaggcttgccggcctgcggctggtggggcggtccacacccggggcctggattttgcgtgcgatatatacatctgggcacctcttgccggcacctgcggagtgctgcttctctcactcgttattacgctgtactgctaa

SEQ ID NO: 2345 - DNA, 2157 bp, synthetic construct
  misc_feature 1..2157: note = Synthetic
  source 1..2157: mol_type = other DNA
atggccttaccagtgaccgccttgctcctgccgctggccttgctgctccacgccgccaggccggaaattgtgctgactcagtctccagactttcagtctgtgactccaaaggagaaagtcaccatcacctgccgggccagtcagagcattggtagtagcttacactggtaccagcagaaaccagatcagtctccaaagctcctcatcaagtttgcttcccagtccttctcaggggtcccctcgaggttcagtggcagtggatctgggacagatttcaccctcaccatccatagcctggaagctgaagatgctgcaacgtattactgtcatcagagtggtagtttaccgtggacgttcggccaagggaccaaggtggaaatcaaaggcagcaccagcggcagcggcaagcccggctccggagagggcagcaccaagggccaggtgcagctggtggagtctgggggaggcgtggtccagcctgggaggtccctgagactctcctgtgtagcgtctggattcaccttcagtagcaatgacatatactgggtccgccaggccccaggcaaggggctggagtgggtggcagttatatggtatgatggaagtaataaatactatgcagactccgtgaagggccgattcaccatctccagagacaattccaagaacacgctgtatctgcaaatgaacagcctgagagccgaggacacggctgtgtattactgtgcgagaggtgacaactggaacgacgaacaccactaccactactacatggacgtctggggcaaagggaccacggtcaccgtctcctcagcggccgcaattgaagttatgtatcctcctccttacctagacaatgagaagagcaatggaaccattatccatgtgaaagggaaacacctttgtccaagtcccctatttcccggaccttctaagcccttttgggtgctggtggtggttgggggagtcctggcttgctatagcttgctagtaacagtggcctttattattttctgggtgaggagtaagaggagcaggctcctgcacagtgactacatgaacatgactccccgccgccccgggcccacccgcaagcattaccagccctatgccccaccacgcgacttcgcagcctatcgctccagagtgaagttcagcaggagcgcagacgcccccgcgtaccagcagggccagaaccagctctataacgagctcaatctaggacgaagagaggagtacgatgttttggacaagagacgtggccgggaccctgagatggggggaaagccgagaaggaagaaccctcaggaaggcctgtacaatgaactgcagaaagataagatggcggaggcctacagtgagattgggatgaaaggcgagcgccggaggggcaaggggcacgatggcctttaccagggtctcagtacagccaccaaggacacctacgacgcccttcacatgcaggccctgccccctcgcggctctggcgagggaaggggttccctgcttacttgcggcgacgtcgaagagaatcccggtccgatggccctcccagtaactgccctccttttgcccctcgcactccttcttcatgccgctcgccccaactgggtcaacgtgattagcgatttgaagaaaatcgaggaccttatacagtctatgcatattgacgctacactgtatactgagagtgatgtacacccgtcctgtaaggtaacggccatgaaatgctttcttctggagctccaggtcatcagcttggagtctggggacgcaagcatccacgatacggttgaaaacctcatcatccttgcgaacaactctctctcatctaatggaaacgttacagagagtgggtgtaaggagtgcgaagagttggaagaaaaaaacatcaaagaatttcttcaatccttcgttcacatagtgcaaatgttcattaacacgtccactaccacacccgccccgaggccacctacgccggcaccgactatcgccagtcaacccctctctctgcgccccgaggcttgccggcctgcggctggtggggcggtccacacccggggcctggattttgcgtgcgatatatacatctgggcacctcttgccggcacctgcggagtgctgcttctctcactcgttattacgctgtactgctaa

SEQ ID NO: 2346 - DNA, 2137 bp, synthetic construct
  misc_feature 1..2137: note = Synthetic
  source 1..2137: mol_type = other DNA
atggccttaccagtgaccgccttgctcctgccgctggccttgctgctccacgccgccaggccgggtgacccaggagccatcgttctcagtgtcccctggagggacagtcacactcacttgtggcttgagctctggctcagtctctactagttactaccccagctggtaccagcagaccccaggccaggctccacgcacgctcatctacagcacaaacattcgctcttctggggtccctgatcgcttctctggctccatccttgggaacaaagctgccctcaccatcacgggggcccaggcagatgatgaatctgattattactgtgtgctgtatatgggtagtgacattgtggtattcggcggagggaccaagctgaccgtcctaggcagcaccagcggcagcggcaagcccggctccggagagggcagcaccaagggccaggtgcagttggtggagtctgggggaggcgtggtccagcctgggaggtccctgagactctcctgtgcagcctctggattcaccttcagtagctatggcatgcactgggtccgccaggctccaggcaaggggctggagtgggtggcagttatatcatatgatggaagtaataaatactatgcagactccgtgaagggccgattcaccatctccagggacaattccaagaccacgctgtatctgcaaatgaacagcctgagagctgaggacacggctgtgtattactgtgcgagagatcactactactactacatggacgtctggggcaaagggaccacggtcaccgtctcctcagcggccgcaattgaagttatgtatcctcctccttacctagacaatgagaagagcaatggaaccattatccatgtgaaagggaaacacctttgtccaagtcccctatttcccggaccttctaagcccttttgggtgctggtggtggttgggggagtcctggcttgctatagcttgctagtaacagtggcctttattattttctgggtgaggagtaagaggagcaggctcctgcacagtgactacatgaacatgactccccgccgccccgggcccacccgcaagcattaccagccctatgccccaccacgcgacttcgcagcctatcgctccagagtgaagttcagcaggagcgcagacgcccccgcgtaccagcagggccagaaccagctctataacgagctcaatctaggacgaagagaggagtacgatgttttggacaagagacgtggccgggaccctgagatggggggaaagccgagaaggaagaaccctcaggaaggcctgtacaatgaactgcagaaagataagatggcggaggcctacagtgagattgggatgaaaggcgagcgccggaggggcaaggggcacgatggcctttaccagggtctcagtacagccaccaaggacacctacgacgcccttcacatgcaggccctgccccctcgcggctctggcgagggaaggggttccctgcttacttgcggcgacgtcgaagagaatcccggtccgatggccctcccagtaactgccctccttttgcccctcgcactccttcttcatgccgctcgccccaactgggtcaacgtgattagcgatttgaagaaaatcgaggaccttatacagtctatgcatattgacgctacactgtatactgagagtgatgtacacccgtcctgtaaggtaacggccatgaaatgctttcttctggagctccaggtcatcagcttggagtctggggacgcaagcatccacgatacggttgaaaacctcatcatccttgcgaacaactctctctcatctaatggaaacgttacagagagtgggtgtaaggagtgcgaagagttggaagaaaaaaacatcaaagaatttcttcaatccttcgttcacatagtgcaaatgttcattaacacgtccactaccacacccgccccgaggccacctacgccggcaccgactatcgccagtcaacccctctctctgcgccccgaggcttgccggcctgcggctggtggggcggtccacacccggggcctggattttgcgtgcgatatatacatctgggcacctcttgccggcacctgcggagtgctgcttctctcactcgttattacgctgtactgctaa

SEQ ID NO: 2347 - DNA, 2151 bp, synthetic construct
  misc_feature 1..2151: note = Synthetic
  source 1..2151: mol_type = other DNA
atggccttaccagtgaccgccttgctcctgccgctggccttgctgctccacgccgccaggccggaaattgtgttgacacagtctccagccaccctgtctttgtctccaggggaaagagccaccctctcctgcagggccagtcagagtgttagcagctactttgcctggtaccaacagaaacctggccaggctcccaggctcctcatctatgatgcatccaacagggccactggcatcccagccaggttcagtggcagtgggtctgggacagacttcactctcaccatcagcagcctggagcctgaagattttgcagtttattactgtcagcagcgtagcaactggcctctcactttcggcggagggaccaaggtggagatcaaaggcagcaccagcggcagcggcaagcccggctccggagagggcagcaccaagggccaactgcagctgcaggagtcgggcccaggactggtgaagccttcggagaccctgtccctcacctgcactgtctctggtggctccatcagcagtagtagttactactggggctggatccgccagcccccagggaaggggctggagtggattgggagtctctattatagtgggagcacctactacaacccgtccctcaagagtcgagtcaccatatccgttgacacgtccaagaaccagttctccctgaagctgagctctgtgaccgccgcagacacggctgtgtattactgtgcggccgtacaactggaacgacgtgggtacttctacatggacgtctggggcaaagggaccacggtcaccgtctcctcagcggccgcaattgaagttatgtatcctcctccttacctagacaatgagaagagcaatggaaccattatccatgtgaaagggaaacacctttgtccaagtcccctatttcccggaccttctaagcccttttgggtgctggtggtggttgggggagtcctggcttgctatagcttgctagtaacagtggcctttattattttctgggtgaggagtaagaggagcaggctcctgcacagtgactacatgaacatgactccccgccgccccgggcccacccgcaagcattaccagccctatgccccaccacgcgacttcgcagcctatcgctccagagtgaagttcagcaggagcgcagacgcccccgcgtaccagcagggccagaaccagctctataacgagctcaatctaggacgaagagaggagtacgatgttttggacaagagacgtggccgggaccctgagatggggggaaagccgagaaggaagaaccctcaggaaggcctgtacaatgaactgcagaaagataagatggcggaggcctacagtgagattgggatgaaaggcgagcgccggaggggcaaggggcacgatggcctttaccagggtctcagtacagccaccaaggacacctacgacgcccttcacatgcaggccctgccccctcgcggctctggcgagggaaggggttccctgcttacttgcggcgacgtcgaagagaatcccggtccgatggccctcccagtaactgccctccttttgcccctcgcactccttcttcatgccgctcgccccaactgggtcaacgtgattagcgatttgaagaaaatcgaggaccttatacagtctatgcatattgacgctacactgtatactgagagtgatgtacacccgtcctgtaaggtaacggccatgaaatgctttcttctggagctccaggtcatcagcttggagtctggggacgcaagcatccacgatacggttgaaaacctcatcatccttgcgaacaactctctctcatctaatggaaacgttacagagagtgggtgtaaggagtgcgaagagttggaagaaaaaaacatcaaagaatttcttcaatccttcgttcacatagtgcaaatgttcattaacacgtccactaccacacccgccccgaggccacctacgccggcaccgactatcgccagtcaacccctctctctgcgccccgaggcttgccggcctgcggctggtggggcggtccacacccggggcctggattttgcgtgcgatatatacatctgggcacctcttgccggcacctgcggagtgctgcttctctcactcgttattacgctgtactgctaa

SEQ ID NO: 2348 - DNA, 2157 bp, synthetic construct
  misc_feature 1..2157: note = Synthetic
  source 1..2157: mol_type = other DNA
atggccttaccagtgaccgccttgctcctgccgctggccttgctgctccacgccgccaggccgcagactgtagtgacccaggaaccatcgttctcagtgtcccctggagggacagtcacactcacttgtggcttgacctctggctcagtctctactagttactaccccaactggtaccagcagaccccaggccaggctccacgcacgctcatctatagtacaaatattcgctcttctggggtccctgatcgcttctctggctccatccttgggaacaaagctgccctcaccatcacgggggcccaggcagatgatgaatctgattattactgtgtgctgtatatgggtagtggcatgtttattttcggcagtggaaccaaggtcactgtcctaggcagcaccagcggcagcggcaagcccggctccggagagggcagcaccaagggccaggtgcagctggtggagtctgggggaggcgtggtccagcctgggaggtccctgagactctcctgtgcagcatctggattcaccttcagtaactatggcatgcactgggtccgccaggctccaggcaaggggctggagtggatggcagttatatggtctgatggacataataaatactatgcagactccgtgaagggccgattcaccatctccagagacaattccaagaacacgctgtatctgcaaatgaacagcctgagagccgaggacacggctgtgtattactgtgcgagggcacaattggaacgacggtacttctactacatggacgtctggggcaaagggaccacggtcaccgtctcctcagcggccgcaattgaagttatgtatcctcctccttacctagacaatgagaagagcaatggaaccattatccatgtgaaagggaaacacctttgtccaagtcccctatttcccggaccttctaagcccttttgggtgctggtggtggttgggggagtcctggcttgctatagcttgctagtaacagtggcctttattattttctgggtgaggagtaagaggagcaggctcctgcacagtgactacatgaacatgactccccgccgccccgggcccacccgcaagcattaccagccctatgccccaccacgcgacttcgcagcctatcgctccagagtgaagttcagcaggagcgcagacgcccccgcgtaccagcagggccagaaccagctctataacgagctcaatctaggacgaagagaggagtacgatgttttggacaagagacgtggccgggaccctgagatggggggaaagccgagaaggaagaaccctcaggaaggcctgtacaatgaactgcagaaagataagatggcggaggcctacagtgagattgggatgaaaggcgagcgccggaggggcaaggggcacgatggcctttaccagggtctcagtacagccaccaaggacacctacgacgcccttcacatgcaggccctgccccctcgcggctctggcgagggaaggggttccctgcttacttgcggcgacgtcgaagagaatcccggtccgatggccctcccagtaactgccctccttttgcccctcgcactccttcttcatgccgctcgccccaactgggtcaacgtgattagcgatttgaagaaaatcgaggaccttatacagtctatgcatattgacgctacactgtatactgagagtgatgtacacccgtcctgtaaggtaacggccatgaaatgctttcttctggagctccaggtcatcagcttggagtctggggacgcaagcatccacgatacggttgaaaacctcatcatccttgcgaacaactctctctcatctaatggaaacgttacagagagtgggtgtaaggagtgcgaagagttggaagaaaaaaacatcaaagaatttcttcaatccttcgttcacatagtgcaaatgttcattaacacgtccactaccacacccgccccgaggccacctacgccggcaccgactatcgccagtcaacccctctctctgcgccccgaggcttgccggcctgcggctggtggggcggtccacacccggggcctggattttgcgtgcgatatatacatctgggcacctcttgccggcacctgcggagtgctgcttctctcactcgttattacgctgtactgctaa

SEQ ID NO: 2349 - DNA, 2157 bp, synthetic construct
  misc_feature 1..2157: note = Synthetic
  source 1..2157: mol_type = other DNA
atggccttaccagtgaccgccttgctcctgccgctggccttgctgctccacgccgccaggccggacatccagatgacccagtctccatcctcactgtctgcatctgtaggagacagagtcaccatcacttgtcgggcgagtcagggtattagcagctggttagcctggtatcagcagaaaccagagaaagcccctaagtccctgatctatgctgcatccagtttacagggtggggtcccatcaaggttcagcggcagtggatctgggacagatttcactctcaccatcagcagcctgcagcctgaagattttgcaacttattactgccaacagtatgatagttacccgtacacttttggccaggggaccaagctggagatcaaaggcagcaccagcggcagcggcaagcccggctccggagagggcagcaccaagggccaggtgcagctggtgcagtctggggctgaggtgaagaagcctggggcctcagtgaaggtctcctgcaaggcttctggatacaccttcaccagttatgatatcaactgggtgcgacaggccactggacaagggcttgagtggatgggatggatgatccctaacagtggtgacacaggctctgcacagaagttccagggcagagtcaccatgaccaggaacacctccataggcacagcctacatggagctgagcagcctgagatctgaggacacggccgtttattactgtgcgagaggcggatattgtaatagtaccagttgctactactactacatggacgtctggggcaaagggaccacggtcaccgtctcctcagcggccgcaattgaagttatgtatcctcctccttacctagacaatgagaagagcaatggaaccattatccatgtgaaagggaaacacctttgtccaagtcccctatttcccggaccttctaagcccttttgggtgctggtggtggttgggggagtcctggcttgctatagcttgctagtaacagtggcctttattattttctgggtgaggagtaagaggagcaggctcctgcacagtgactacatgaacatgactccccgccgccccgggcccacccgcaagcattaccagccctatgccccaccacgcgacttcgcagcctatcgctccagagtgaagttcagcaggagcgcagacgcccccgcgtaccagcagggccagaaccagctctataacgagctcaatctaggacgaagagaggagtacgatgttttggacaagagacgtggccgggaccctgagatggggggaaagccgagaaggaagaaccctcaggaaggcctgtacaatgaactgcagaaagataagatggcggaggcctacagtgagattgggatgaaaggcgagcgccggaggggcaaggggcacgatggcctttaccagggtctcagtacagccaccaaggacacctacgacgcccttcacatgcaggccctgccccctcgcggctctggcgagggaaggggttccctgcttacttgcggcgacgtcgaagagaatcccggtccgatggccctcccagtaactgccctccttttgcccctcgcactccttcttcatgccgctcgccccaactgggtcaacgtgattagcgatttgaagaaaatcgaggaccttatacagtctatgcatattgacgctacactgtatactgagagtgatgtacacccgtcctgtaaggtaacggccatgaaatgctttcttctggagctccaggtcatcagcttggagtctggggacgcaagcatccacgatacggttgaaaacctcatcatccttgcgaacaactctctctcatctaatggaaacgttacagagagtgggtgtaaggagtgcgaagagttggaagaaaaaaacatcaaagaatttcttcaatccttcgttcacatagtgcaaatgttcattaacacgtccactaccacacccgccccgaggccacctacgccggcaccgactatcgccagtcaacccctctctctgcgccccgaggcttgccggcctgcggctggtggggcggtccacacccggggcctggattttgcgtgcgatatatacatctgggcacctcttgccggcacctgcggagtgctgcttctctcactcgttattacgctgtactgctaa

SEQ ID NO: 2350 - DNA, 2160 bp, synthetic construct
  misc_feature 1..2160: note = Synthetic
  source 1..2160: mol_type = other DNA
atggccttaccagtgaccgccttgctcctgccgctggccttgctgctccacgccgccaggccggacatccaggtgacccagtctccaaccttcctgtctgcatctgtaggagacagagtcaccatcacttgccgggccagtcagggcattagcagttatttagcctggtatcagcaaaaaccagggaaagcccctaagctcctgatctatggtgcatccactttgcaaagtggggtcccatcaaggttcagcggcagtggatctgggacagaattcactctcacaatcagcagcctgcagcctgaagattttgcaacttattactgtcaacagcttaatagttacccgtggacgttcggccaagggaccaaggtggaaatcaaaggcagcaccagcggcagcggcaagcccggctccggagagggcagcaccaagggccaggtgcagctggtgcagtctggggctgaggtgaagaagcctggggcctcagtgaaggtctcctgcaaggcttctggatacaccttcaccagttatgatatcaactgggtgcgacaggccactggacaagggcttgagtggatgggatggatgaaccctaatagtggtaacacagtctatgcacagaagttccagggcagagtcaccatgaccaggaacacctccataagcacagcctacatggagctgagcagcctgagatctgaggacacggccgtgtattactgtgcgagaggaggcgatttttggagtggttaccatgactactactactacatggacgtctggggcaaagggaccacggtcaccgtctcctcagcggccgcaattgaagttatgtatcctcctccttacctagacaatgagaagagcaatggaaccattatccatgtgaaagggaaacacctttgtccaagtcccctatttcccggaccttctaagcccttttgggtgctggtggtggttgggggagtcctggcttgctatagcttgctagtaacagtggcctttattattttctgggtgaggagtaagaggagcaggctcctgcacagtgactacatgaacatgactccccgccgccccgggcccacccgcaagcattaccagccctatgccccaccacgcgacttcgcagcctatcgctccagagtgaagttcagcaggagcgcagacgcccccgcgtaccagcagggccagaaccagctctataacgagctcaatctaggacgaagagaggagtacgatgttttggacaagagacgtggccgggaccctgagatggggggaaagccgagaaggaagaaccctcaggaaggcctgtacaatgaactgcagaaagataagatggcggaggcctacagtgagattgggatgaaaggcgagcgccggaggggcaaggggcacgatggcctttaccagggtctcagtacagccaccaaggacacctacgacgcccttcacatgcaggccctgccccctcgcggctctggcgagggaaggggttccctgcttacttgcggcgacgtcgaagagaatcccggtccgatggccctcccagtaactgccctccttttgcccctcgcactccttcttcatgccgctcgccccaactgggtcaacgtgattagcgatttgaagaaaatcgaggaccttatacagtctatgcatattgacgctacactgtatactgagagtgatgtacacccgtcctgtaaggtaacggccatgaaatgctttcttctggagctccaggtcatcagcttggagtctggggacgcaagcatccacgatacggttgaaaacctcatcatccttgcgaacaactctctctcatctaatggaaacgttacagagagtgggtgtaaggagtgcgaagagttggaagaaaaaaacatcaaagaatttcttcaatccttcgttcacatagtgcaaatgttcattaacacgtccactaccacacccgccccgaggccacctacgccggcaccgactatcgccagtcaacccctctctctgcgccccgaggcttgccggcctgcggctggtggggcggtccacacccggggcctggattttgcgtgcgatatatacatctgggcacctcttgccggcacctgcggagtgctgcttctctcactcgttattacgctgtactgctaa

SEQ ID NO: 2351 - DNA, 2154 bp, synthetic construct
  misc_feature 1..2154: note = Synthetic
  source 1..2154: mol_type = other DNA
atggccttaccagtgaccgccttgctcctgccgctggccttgctgctccacgccgccaggccgtcctatgagctgactcagccaccctcagtgtccgtgtccccaggacagacagccagcatcacctgctctggagataaattgggggataaatatgcttgctggtatcagcagaagccaggccagtcccctgtgctggtcatctatcaagatagcaagcggccctcagggatccctgagcgattctctggctccaactctgggaacacagccactctgaccatcagcgggacccaggctatggatgaggctgactattactgtcaggcgtgggacagcagcactgctgtgttcggaggaggcacccagctgaccgccctcggcagcaccagcggcagcggcaagcccggctccggagagggcagcaccaagggccaggtgcagctgcaggagtcgggcccaggactggtgaagccttcggagaccctgtccctcacctgcactgtctctggtggctccatcagtagttactactggagctggatccggcagcccgccgggaagggactggagtggattgggcgtatctataccagtgggagcaccaactacaacccctccctcaagagtcgagtcaccatgtcagtagacacgtccaagaaccagttctccctgaagctgagctctgtgaccgccgcggacacggccgtgtattactgtgcgagagaggagtaccagctgctaccggccctctactactactactacatggacgtctggggcaaagggaccacggtcaccgtctcctcagcggccgcaattgaagttatgtatcctcctccttacctagacaatgagaagagcaatggaaccattatccatgtgaaagggaaacacctttgtccaagtcccctatttcccggaccttctaagcccttttgggtgctggtggtggttgggggagtcctggcttgctatagcttgctagtaacagtggcctttattattttctgggtgaggagtaagaggagcaggctcctgcacagtgactacatgaacatgactccccgccgccccgggcccacccgcaagcattaccagccctatgccccaccacgcgacttcgcagcctatcgctccagagtgaagttcagcaggagcgcagacgcccccgcgtaccagcagggccagaaccagctctataacgagctcaatctaggacgaagagaggagtacgatgttttggacaagagacgtggccgggaccctgagatggggggaaagccgagaaggaagaaccctcaggaaggcctgtacaatgaactgcagaaagataagatggcggaggcctacagtgagattgggatgaaaggcgagcgccggaggggcaaggggcacgatggcctttaccagggtctcagtacagccaccaaggacacctacgacgcccttcacatgcaggccctgccccctcgcggctctggcgagggaaggggttccctgcttacttgcggcgacgtcgaagagaatcccggtccgatggccctcccagtaactgccctccttttgcccctcgcactccttcttcatgccgctcgccccaactgggtcaacgtgattagcgatttgaagaaaatcgaggaccttatacagtctatgcatattgacgctacactgtatactgagagtgatgtacacccgtcctgtaaggtaacggccatgaaatgctttcttctggagctccaggtcatcagcttggagtctggggacgcaagcatccacgatacggttgaaaacctcatcatccttgcgaacaactctctctcatctaatggaaacgttacagagagtgggtgtaaggagtgcgaagagttggaagaaaaaaacatcaaagaatttcttcaatccttcgttcacatagtgcaaatgttcattaacacgtccactaccacacccgccccgaggccacctacgccggcaccgactatcgccagtcaacccctctctctgcgccccgaggcttgccggcctgcggctggtggggcggtccacacccggggcctggattttgcgtgcgatatatacatctgggcacctcttgccggcacctgcggagtgctgcttctctcactcgttattacgctgtactgctaa

SEQ ID NO: 2352 - DNA, 2157 bp, synthetic construct
  misc_feature 1..2157: note = Synthetic
  source 1..2157: mol_type = other DNA
atggccttaccagtgaccgccttgctcctgccgctggccttgctgctccacgccgccaggccgcagactgtagtgacccaggaaccatcgttctcagtgtcccctggagggacagtcacactcacttgtggcttgacctctggctcagtctctactagttactaccccaactggtaccagcagaccccaggccaggctccacgcacgctcatctacagcacaaatattcgctcttctggggtccctgatcgcttctctggctccatccttgggaacaaagctgccctcaccatcacgggggcccaggcagatgatgaatctgattattactgtgtgctgtatatgggtagtggcatgtttattttcggcagtggaaccaaggtcactgtcctaggcagcaccagcggcagcggcaagcccggctccggagagggcagcaccaagggccaggtgcagctggtggagtctgggggaggcgtggtccagcctgggaggtccctgagactctcctgtgcagcaactggattcaccttcagtagctatggcatgcactgggtccgccaggctccaggcaaggggctggagtggatggtagttatatggtctgatggacataataaatactatgcagactccgtgaagggccgattcaccatctccagagacaattccaagaacacgctgtatctgcaaatgaacagcctgagagccgaggacacggctgtgtattactgtgcgagggcacaactggaacgacggtacttctactacatggacgtctggggcaaagggaccacggtcaccgtctcctcagcggccgcaattgaagttatgtatcctcctccttacctagacaatgagaagagcaatggaaccattatccatgtgaaagggaaacacctttgtccaagtcccctatttcccggaccttctaagcccttttgggtgctggtggtggttgggggagtcctggcttgctatagcttgctagtaacagtggcctttattattttctgggtgaggagtaagaggagcaggctcctgcacagtgactacatgaacatgactccccgccgccccgggcccacccgcaagcattaccagccctatgccccaccacgcgacttcgcagcctatcgctccagagtgaagttcagcaggagcgcagacgcccccgcgtaccagcagggccagaaccagctctataacgagctcaatctaggacgaagagaggagtacgatgttttggacaagagacgtggccgggaccctgagatggggggaaagccgagaaggaagaaccctcaggaaggcctgtacaatgaactgcagaaagataagatggcggaggcctacagtgagattgggatgaaaggcgagcgccggaggggcaaggggcacgatggcctttaccagggtctcagtacagccaccaaggacacctacgacgcccttcacatgcaggccctgccccctcgcggctctggcgagggaaggggttccctgcttacttgcggcgacgtcgaagagaatcccggtccgatggccctcccagtaactgccctccttttgcccctcgcactccttcttcatgccgctcgccccaactgggtcaacgtgattagcgatttgaagaaaatcgaggaccttatacagtctatgcatattgacgctacactgtatactgagagtgatgtacacccgtcctgtaaggtaacggccatgaaatgctttcttctggagctccaggtcatcagcttggagtctggggacgcaagcatccacgatacggttgaaaacctcatcatccttgcgaacaactctctctcatctaatggaaacgttacagagagtgggtgtaaggagtgcgaagagttggaagaaaaaaacatcaaagaatttcttcaatccttcgttcacatagtgcaaatgttcattaacacgtccactaccacacccgccccgaggccacctacgccggcaccgactatcgccagtcaacccctctctctgcgccccgaggcttgccggcctgcggctggtggggcggtccacacccggggcctggattttgcgtgcgatatatacatctgggcacctcttgccggcacctgcggagtgctgcttctctcactcgttattacgctgtactgctaa

SEQ ID NO: 2353 - DNA, 2157 bp, synthetic construct
  misc_feature 1..2157: note = Synthetic
  source 1..2157: mol_type = other DNA
atggccttaccagtgaccgccttgctcctgccgctggccttgctgctccacgccgccaggccggaaattgtgctgactcagtctccagactttcagtctgtgactccaaaggagaaagtcaccatcacctgccgggccagtcagagcattggtagtagcttacactggtaccagcagaaaccagatcagtctccaatgctcctcatcaagtttgcttcccagtccatctcaggggtcccctcgaggttcagtggcagtggatctgggacagatttcaccctcaccatcaatagcctggaagctgaagatgctgcagcgtattactgtcatcagagtagtagtttaccgtggacgttcggccaagggaccaaggtggaaatcaaaggcagcaccagcggcagcggcaagcccggctccggagagggcagcaccaagggccaggtgcagctggtggagtctgggggaggcgtggtccagcctgggaggtccctgagactctcctgtgcagcgtctggattcaccttcactagttatgacatgcactgggtccgccaggctccaggcaaggggctggagtgggtgacaattatatggtttgatggaagtaataaatactatgcagactccgtgaagggccgattcaccatctccagagacaattccaagaacacgctgtatctgcaaatgaacagcctgagcgccgaggacacggctgtgtattactgtgcgagaggagacaactggaacgaccggtactactactactactacatggacgtctggggcaaagggaccacggtcaccgtctcctcagcggccgcaattgaagttatgtatcctcctccttacctagacaatgagaagagcaatggaaccattatccatgtgaaagggaaacacctttgtccaagtcccctatttcccggaccttctaagcccttttgggtgctggtggtggttgggggagtcctggcttgctatagcttgctagtaacagtggcctttattattttctgggtgaggagtaagaggagcaggctcctgcacagtgactacatgaacatgactccccgccgccccgggcccacccgcaagcattaccagccctatgccccaccacgcgacttcgcagcctatcgctccagagtgaagttcagcaggagcgcagacgcccccgcgtaccagcagggccagaaccagctctataacgagctcaatctaggacgaagagaggagtacgatgttttggacaagagacgtggccgggaccctgagatggggggaaagccgagaaggaagaaccctcaggaaggcctgtacaatgaactgcagaaagataagatggcggaggcctacagtgagattgggatgaaaggcgagcgccggaggggcaaggggcacgatggcctttaccagggtctcagtacagccaccaaggacacctacgacgcccttcacatgcaggccctgccccctcgcggctctggcgagggaaggggttccctgcttacttgcggcgacgtcgaagagaatcccggtccgatggccctcccagtaactgccctccttttgcccctcgcactccttcttcatgccgctcgccccaactgggtcaacgtgattagcgatttgaagaaaatcgaggaccttatacagtctatgcatattgacgctacactgtatactgagagtgatgtacacccgtcctgtaaggtaacggccatgaaatgctttcttctggagctccaggtcatcagcttggagtctggggacgcaagcatccacgatacggttgaaaacctcatcatccttgcgaacaactctctctcatctaatggaaacgttacagagagtgggtgtaaggagtgcgaagagttggaagaaaaaaacatcaaagaatttcttcaatccttcgttcacatagtgcaaatgttcattaacacgtccactaccacacccgccccgaggccacctacgccggcaccgactatcgccagtcaacccctctctctgcgccccgaggcttgccggcctgcggctggtggggcggtccacacccggggcctggattttgcgtgcgatatatacatctgggcacctcttgccggcacctgcggagtgctgcttctctcactcgttattacgctgtactgctaa

SEQ ID NO: 2354 - DNA, 2172 bp, synthetic construct
  misc_feature 1..2172: note = Synthetic
  source 1..2172: mol_type = other DNA
atggccttaccagtgaccgccttgctcctgccgctggccttgctgctccacgccgccaggccggatattgtgatgacccagcctccactctcctcgcctgtcacccttggacagccggcctccatctcctgcaggtctagtcaaagcctcgtacacagtgatggaaacacctacttgagttggcttcagcagaggccaggccagcctccaagactcctaatttataaggtttctaaccggttctctggggtcccagacagattcagtggcagtggggcagggacagatttcacactgaaaatcagcagggtggaagctgaggatgtcggggtttattactgcacgcaagctacacaatttcctcacacttttggccaggggaccaagctggagatcaaaggcagcaccagcggcagcggcaagcccggctccggagagggcagcaccaagggccaggttcagctggtgcagtctggagctgaggtgaagaagcctggggcctcagtgaaggtctcctgcaaggcttctggttacacctttaccagctatggtatcagctgggtgcgacaggcccctggacaagggcttgagtggatggggtggatcagcgcttacaatggtcacacagactatacacagaaactccagggcagagtcaccatgaccacagacacatccacgaccacagcctacatggaactgaggagcctgagctctgccgacacggccgtgtattactgtgtgagagaagtggtacttcccaccacggactactactacttttacatggacgtctggggcaaagggaccacggtcaccgtctcctcagcggccgcaattgaagttatgtatcctcctccttacctagacaatgagaagagcaatggaaccattatccatgtgaaagggaaacacctttgtccaagtcccctatttcccggaccttctaagcccttttgggtgctggtggtggttgggggagtcctggcttgctatagcttgctagtaacagtggcctttattattttctgggtgaggagtaagaggagcaggctcctgcacagtgactacatgaacatgactccccgccgccccgggcccacccgcaagcattaccagccctatgccccaccacgcgacttcgcagcctatcgctccagagtgaagttcagcaggagcgcagacgcccccgcgtaccagcagggccagaaccagctctataacgagctcaatctaggacgaagagaggagtacgatgttttggacaagagacgtggccgggaccctgagatggggggaaagccgagaaggaagaaccctcaggaaggcctgtacaatgaactgcagaaagataagatggcggaggcctacagtgagattgggatgaaaggcgagcgccggaggggcaaggggcacgatggcctttaccagggtctcagtacagccaccaaggacacctacgacgcccttcacatgcaggccctgccccctcgcggctctggcgagggaaggggttccctgcttacttgcggcgacgtcgaagagaatcccggtccgatggccctcccagtaactgccctccttttgcccctcgcactccttcttcatgccgctcgccccaactgggtcaacgtgattagcgatttgaagaaaatcgaggaccttatacagtctatgcatattgacgctacactgtatactgagagtgatgtacacccgtcctgtaaggtaacggccatgaaatgctttcttctggagctccaggtcatcagcttggagtctggggacgcaagcatccacgatacggttgaaaacctcatcatccttgcgaacaactctctctcatctaatggaaacgttacagagagtgggtgtaaggagtgcgaagagttggaagaaaaaaacatcaaagaatttcttcaatccttcgttcacatagtgcaaatgttcattaacacgtccactaccacacccgccccgaggccacctacgccggcaccgactatcgccagtcaacccctctctctgcgccccgaggcttgccggcctgcggctggtggggcggtccacacccggggcctggattttgcgtgcgatatatacatctgggcacctcttgccggcacctgcggagtgctgcttctctcactcgttattacgctgtactgctaa

SEQ ID NO: 2355 - DNA, 2169 bp, synthetic construct
  misc_feature 1..2169: note = Synthetic
  source 1..2169: mol_type = other DNA
atggccttaccagtgaccgccttgctcctgccgctggccttgctgctccacgccgccaggccggacatccagatgacccagtctccatcctcactgtctgcatctgtaggagacagagtcaccatcacttgtcgggcgagtcagggtattagcagctggttagcctggtatcagcagaaaccagagaaagcccctaagtccctgatctatgctgcatccagtttgcaaagtggggtcccatcaaggttcagcggcagtggatctgggacagatttcactctcaccatcagcagcctgcagcctgaagattttgcaacttattactgccaacagtataatagttacccgtacacttttggccaggggaccaagctggagatcaaaggcagcaccagcggcagcggcaagcccggctccggagagggcagcaccaagggccaggtccagctggtacagtctggggctgaggtgaagaagcctggggcctcagtgaaggtctcctgcaaggtttccggatacaccctcactgaattatccatgcactgggtgcgacaggctcctggaaaagggcttgagtggatgggaggttttgatcctgaagatggtgaaacaatctacgcacagaagttccagggcagagtcaccatgaccgaggacacatctacagacacagcctacatggagctgagcagcctgagatctgaggacacggccgtgtattactgtgcaacaggacgtattactatggttcggggagttattatcccctactactactactacatggacgtctggggcaaagggaccacggtcaccgtctcctcagcggccgcaattgaagttatgtatcctcctccttacctagacaatgagaagagcaatggaaccattatccatgtgaaagggaaacacctttgtccaagtcccctatttcccggaccttctaagcccttttgggtgctggtggtggttgggggagtcctggcttgctatagcttgctagtaacagtggcctttattattttctgggtgaggagtaagaggagcaggctcctgcacagtgactacatgaacatgactccccgccgccccgggcccacccgcaagcattaccagccctatgccccaccacgcgacttcgcagcctatcgctccagagtgaagttcagcaggagcgcagacgcccccgcgtaccagcagggccagaaccagctctataacgagctcaatctaggacgaagagaggagtacgatgttttggacaagagacgtggccgggaccctgagatggggggaaagccgagaaggaagaaccctcaggaaggcctgtacaatgaactgcagaaagataagatggcggaggcctacagtgagattgggatgaaaggcgagcgccggaggggcaaggggcacgatggcctttaccagggtctcagtacagccaccaaggacacctacgacgcccttcacatgcaggccctgccccctcgcggctctggcgagggaaggggttccctgcttacttgcggcgacgtcgaagagaatcccggtccgatggccctcccagtaactgccctccttttgcccctcgcactccttcttcatgccgctcgccccaactgggtcaacgtgattagcgatttgaagaaaatcgaggaccttatacagtctatgcatattgacgctacactgtatactgagagtgatgtacacccgtcctgtaaggtaacggccatgaaatgctttcttctggagctccaggtcatcagcttggagtctggggacgcaagcatccacgatacggttgaaaacctcatcatccttgcgaacaactctctctcatctaatggaaacgttacagagagtgggtgtaaggagtgcgaagagttggaagaaaaaaacatcaaagaatttcttcaatccttcgttcacatagtgcaaatgttcattaacacgtccactaccacacccgccccgaggccacctacgccggcaccgactatcgccagtcaacccctctctctgcgccccgaggcttgccggcctgcggctggtggggcggtccacacccggggcctggattttgcgtgcgatatatacatctgggcacctcttgccggcacctgcggagtgctgcttctctcactcgttattacgctgtactgctaa

SEQ ID NO: 2356 - DNA, 2163 bp, synthetic construct
  misc_feature 1..2163: note = Synthetic
  source 1..2163: mol_type = other DNA
atggccttaccagtgaccgccttgctcctgccgctggccttgctgctccacgccgccaggccggatattgtgatgacccagactccactctctctgtccgtcacccctggacagccggcctccatctcctgcaagtctagtaagagcctcctgcatagtgatggaaagacctatttgtattggtacctgcagaagccaggccagcctccacagctcctgatctatgaagtttccaaccggttctctggagtgccagataggttcagtggcagcgggtcagggacagatttcacactgaaaatcagccgggtggaggctgaggatgttggggtttattactgcatgcaaagtatacaatttccgtggacgttcggccaagggaccaaggtggaaatcaagggcagcaccagcggcagcggcaagcccggctccggagagggcagcaccaagggccaggttcagctggtgcagtctggaactgaggtgaagaagcctggggcctcagtgaaggtctcctgcaaggcttctggttacacctttaccaactatggtatcggctgggtgcgacaggcccctggacaagggcttgagtggatgggatggatcatcgcttacaatggttacacaaagtatgcacagattctccagggcagagtcaccatgaccacagacacatccacgaacacagcttatatggaactgaggagcctgagatctgacgacacggccgtgtattactgtgcgagacagcagctcgggggggactaccactactacatggacgtctggggcaaagggaccacggtcaccgtctcctcagcggccgcaattgaagttatgtatcctcctccttacctagacaatgagaagagcaatggaaccattatccatgtgaaagggaaacacctttgtccaagtcccctatttcccggaccttctaagcccttttgggtgctggtggtggttgggggagtcctggcttgctatagcttgctagtaacagtggcctttattattttctgggtgaggagtaagaggagcaggctcctgcacagtgactacatgaacatgactccccgccgccccgggcccacccgcaagcattaccagccctatgccccaccacgcgacttcgcagcctatcgctccagagtgaagttcagcaggagcgcagacgcccccgcgtaccagcagggccagaaccagctctataacgagctcaatctaggacgaagagaggagtacgatgttttggacaagagacgtggccgggaccctgagatggggggaaagccgagaaggaagaaccctcaggaaggcctgtacaatgaactgcagaaagataagatggcggaggcctacagtgagattgggatgaaaggcgagcgccggaggggcaaggggcacgatggcctttaccagggtctcagtacagccaccaaggacacctacgacgcccttcacatgcaggccctgccccctcgcggctctggcgagggaaggggttccctgcttacttgcggcgacgtcgaagagaatcccggtccgatggccctcccagtaactgccctccttttgcccctcgcactccttcttcatgccgctcgccccaactgggtcaacgtgattagcgatttgaagaaaatcgaggaccttatacagtctatgcatattgacgctacactgtatactgagagtgatgtacacccgtcctgtaaggtaacggccatgaaatgctttcttctggagctccaggtcatcagcttggagtctggggacgcaagcatccacgatacggttgaaaacctcatcatccttgcgaacaactctctctcatctaatggaaacgttacagagagtgggtgtaaggagtgcgaagagttggaagaaaaaaacatcaaagaatttcttcaatccttcgttcacatagtgcaaatgttcattaacacgtccactaccacacccgccccgaggccacctacgccggcaccgactatcgccagtcaacccctctctctgcgccccgaggcttgccggcctgcggctggtggggcggtccacacccggggcctggattttgcgtgcgatatatacatctgggcacctcttgccggcacctgcggagtgctgcttctctcactcgttattacgctgtactgctaa

SEQ ID NO: 2357 - DNA, 2163 bp, synthetic construct
  misc_feature 1..2163: note = Synthetic
  source 1..2163: mol_type = other DNA
atggccttaccagtgaccgccttgctcctgccgctggccttgctgctccacgccgccaggccggatattgtgatgacccagactccactctctctgtccgtcacccctggacagccggcctccatctcctgcaagtctagtaagagcctcctgcatagtgatggaaagacctatttgtattggtacctgcagaagccaggccagcctccacagctcctgatctatgaagtttccacccggttctctggagtgccagataggttcagtggcagcgggtcagggacagatttcacactgaaaatcagccgggtggaggctgaggatgttggggtttattactgcatgcaaagtatacagtttccgtggacgttcggccaagggaccaaggtggaaatcaaaggcagcaccagcggcagcggcaagcccggctccggagagggcagcaccaagggccaggttcagctggtgcagtctggaactgaggtgaagaagcctggggcctcagtgaaggtctcctgcaaggcttctggttacacctttaccaactatggtatcggctgggtgcgacaggcccctggacaagggcttgagtggatgggatggatcatcgcttacaatggttacacaaagtatgcacagattctccagggcagagtcaccatgaccacggacacatccacgaacacagcctatatggaactgaggagcctgagatctgacgacacggccgtgtattactgtgcgcgacagcagctcgggggggactaccactactacatggacgtctggggcaaagggaccacggtcaccgtctcttcagcggccgcaattgaagttatgtatcctcctccttacctagacaatgagaagagcaatggaaccattatccatgtgaaagggaaacacctttgtccaagtcccctatttcccggaccttctaagcccttttgggtgctggtggtggttgggggagtcctggcttgctatagcttgctagtaacagtggcctttattattttctgggtgaggagtaagaggagcaggctcctgcacagtgactacatgaacatgactccccgccgccccgggcccacccgcaagcattaccagccctatgccccaccacgcgacttcgcagcctatcgctccagagtgaagttcagcaggagcgcagacgcccccgcgtaccagcagggccagaaccagctctataacgagctcaatctaggacgaagagaggagtacgatgttttggacaagagacgtggccgggaccctgagatggggggaaagccgagaaggaagaaccctcaggaaggcctgtacaatgaactgcagaaagataagatggcggaggcctacagtgagattgggatgaaaggcgagcgccggaggggcaaggggcacgatggcctttaccagggtctcagtacagccaccaaggacacctacgacgcccttcacatgcaggccctgccccctcgcggctctggcgagggaaggggttccctgcttacttgcggcgacgtcgaagagaatcccggtccgatggccctcccagtaactgccctccttttgcccctcgcactccttcttcatgccgctcgccccaactgggtcaacgtgattagcgatttgaagaaaatcgaggaccttatacagtctatgcatattgacgctacactgtatactgagagtgatgtacacccgtcctgtaaggtaacggccatgaaatgctttcttctggagctccaggtcatcagcttggagtctggggacgcaagcatccacgatacggttgaaaacctcatcatccttgcgaacaactctctctcatctaatggaaacgttacagagagtgggtgtaaggagtgcgaagagttggaagaaaaaaacatcaaagaatttcttcaatccttcgttcacatagtgcaaatgttcattaacacgtccactaccacacccgccccgaggccacctacgccggcaccgactatcgccagtcaacccctctctctgcgccccgaggcttgccggcctgcggctggtggggcggtccacacccggggcctggattttgcgtgcgatatatacatctgggcacctcttgccggcacctgcggagtgctgcttctctcactcgttattacgctgtactgctaa

SEQ ID NO: 2358 - DNA, 2157 bp, synthetic construct
  misc_feature 1..2157: note = Synthetic
  source 1..2157: mol_type = other DNA
atggccttaccagtgaccgccttgctcctgccgctggccttgctgctccacgccgccaggccggacatccagatgacccagtctccatcctcactgtctgcctctgtaggagacagagtcaccatcacttgtcgggcgagtcagggtattagcaactggttagcctggtatcagcagaaaccagagaaagcccctaagtccctgatctatgctgcatccagtttgcaaggtggggtcccatcaagattcagcggcagtggatctgggacagatttcactctcaccatcagcagcctgcagcctgaagattttgcaacttattactgccaacagtatgatagttacccgtacacttttggccaggggaccaagctggagatcaaaggcagcaccagcggcagcggcaagcccggctccggagagggcagcaccaagggccaggtgcagctggtgcagtctgggactgaggtgaagaagcctggggcctcagtgaaggtctcctgtaagacttctggatacaccttcaccagttatgatatcaactgggtgcgacaggccactggacaagggcttgagtggatgggatggatgaaccctatcagtggtgacacaggctctgcacagaagttccagggcagagtcaccatgaccaggaacacctccataggcacagcctacatggagctgagcagcctgagatctgaggacacggccgtttattactgtgcgagaggcggatattgtagtagtaccagctgctactactactacatggacgtctggggcaaagggaccacggtcaccgtctcctcagcggccgcaattgaagttatgtatcctcctccttacctagacaatgagaagagcaatggaaccattatccatgtgaaagggaaacacctttgtccaagtcccctatttcccggaccttctaagcccttttgggtgctggtggtggttgggggagtcctggcttgctatagcttgctagtaacagtggcctttattattttctgggtgaggagtaagaggagcaggctcctgcacagtgactacatgaacatgactccccgccgccccgggcccacccgcaagcattaccagccctatgccccaccacgcgacttcgcagcctatcgctccagagtgaagttcagcaggagcgcagacgcccccgcgtaccagcagggccagaaccagctctataacgagctcaatctaggacgaagagaggagtacgatgttttggacaagagacgtggccgggaccctgagatggggggaaagccgagaaggaagaaccctcaggaaggcctgtacaatgaactgcagaaagataagatggcggaggcctacagtgagattgggatgaaaggcgagcgccggaggggcaaggggcacgatggcctttaccagggtctcagtacagccaccaaggacacctacgacgcccttcacatgcaggccctgccccctcgcggctctggcgagggaaggggttccctgcttacttgcggcgacgtcgaagagaatcccggtccgatggccctcccagtaactgccctccttttgcccctcgcactccttcttcatgccgctcgccccaactgggtcaacgtgattagcgatttgaagaaaatcgaggaccttatacagtctatgcatattgacgctacactgtatactgagagtgatgtacacccgtcctgtaaggtaacggccatgaaatgctttcttctggagctccaggtcatcagcttggagtctggggacgcaagcatccacgatacggttgaaaacctcatcatccttgcgaacaactctctctcatctaatggaaacgttacagagagtgggtgtaaggagtgcgaagagttggaagaaaaaaacatcaaagaatttcttcaatccttcgttcacatagtgcaaatgttcattaacacgtccactaccacacccgccccgaggccacctacgccggcaccgactatcgccagtcaacccctctctctgcgccccgaggcttgccggcctgcggctggtggggcggtccacacccggggcctggattttgcgtgcgatatatacatctgggcacctcttgccggcacctgcggagtgctgcttctctcactcgttattacgctgtactgctaa

SEQ ID NO: 2359 - DNA, 2157 bp, synthetic construct
  misc_feature 1..2157: note = Synthetic
  source 1..2157: mol_type = other DNA
atggccttaccagtgaccgccttgctcctgccgctggccttgctgctccacgccgccaggccggacatccagatgacccagtctccatcctcactgtctgcatctgtaggagacagagtcaccatcacttgtcgggcgagtcagggtattagcagctggttagcctggtatcagcagaaaccagagaaagcccctaagtccctgatctatgctgcatccagtttacaaggtggggtcccatcaaggttcagcggcagtggatctgggacagatttcactctcaccatcagcagcctgcagcctgaagattttgcaacttattactgccaacagtatgatagttacccgtacacttttggccaggggaccaagctggagatcaaaggcagcaccagcggcagcggcaagcccggctccggagagggcagcaccaagggccaggtgcagctggtgcagtctggggctgaggtgaagaagcctggggcctcagtgaaggtctcctgcaaggcttctggatacaccttcaccagttatgatatcaactgggtgcgacaggccactggacaagggcttgagtggatgggatggatgatccctaacagtggtgacacaggctctgcacagaagttccagggcagagtcaccatgaccaggaacacctccataagcacagcctacatggagctgagcagcctgagatctgaggacacggccgtttattactgtgcgagaggcggatattgtaatagtaccagttgctactactactacatggacgtctggggcaaagggaccacggtcaccgtctcctcagcggccgcaattgaagttatgtatcctcctccttacctagacaatgagaagagcaatggaaccattatccatgtgaaagggaaacacctttgtccaagtcccctatttcccggaccttctaagcccttttgggtgctggtggtggttgggggagtcctggcttgctatagcttgctagtaacagtggcctttattattttctgggtgaggagtaagaggagcaggctcctgcacagtgactacatgaacatgactccccgccgccccgggcccacccgcaagcattaccagccctatgccccaccacgcgacttcgcagcctatcgctccagagtgaagttcagcaggagcgcagacgcccccgcgtaccagcagggccagaaccagctctataacgagctcaatctaggacgaagagaggagtacgatgttttggacaagagacgtggccgggaccctgagatggggggaaagccgagaaggaagaaccctcaggaaggcctgtacaatgaactgcagaaagataagatggcggaggcctacagtgagattgggatgaaaggcgagcgccggaggggcaaggggcacgatggcctttaccagggtctcagtacagccaccaaggacacctacgacgcccttcacatgcaggccctgccccctcgcggctctggcgagggaaggggttccctgcttacttgcggcgacgtcgaagagaatcccggtccgatggccctcccagtaactgccctccttttgcccctcgcactccttcttcatgccgctcgccccaactgggtcaacgtgattagcgatttgaagaaaatcgaggaccttatacagtctatgcatattgacgctacactgtatactgagagtgatgtacacccgtcctgtaaggtaacggccatgaaatgctttcttctggagctccaggtcatcagcttggagtctggggacgcaagcatccacgatacggttgaaaacctcatcatccttgcgaacaactctctctcatctaatggaaacgttacagagagtgggtgtaaggagtgcgaagagttggaagaaaaaaacatcaaagaatttcttcaatccttcgttcacatagtgcaaatgttcattaacacgtccactaccacacccgccccgaggccacctacgccggcaccgactatcgccagtcaacccctctctctgcgccccgaggcttgccggcctgcggctggtggggcggtccacacccggggcctggattttgcgtgcgatatatacatctgggcacctcttgccggcacctgcggagtgctgcttctctcactcgttattacgctgtactgctaa

SEQ ID NO: 2360 - DNA, 2160 bp, synthetic construct
  misc_feature 1..2160: note = Synthetic
  source 1..2160: mol_type = other DNA
atggccttaccagtgaccgccttgctcctgccgctggccttgctgctccacgccgccaggccggaaattgtgttgacgcagtctccaggcaccctgtctttgtctccaggggaaagagccaccctctcctgcagggccagtcagagtgttagcagcagctacttagcctggtaccagcagaaacctggccaggctcccaggctcctcatctatggtgcatccagcagggccactggcatcccagacaggttcagtgacagtgggtctgggacagacttcactctcaccatcagcagactggagcctgaagattttgcagtgtattactgtcagcactatggtagctcacctccgaggatcactttcggccctgggaccaaagtggatatcaaaggcagcaccagcggcagcggcaagcccggctccggagagggcagcaccaagggcgaggtgcagttgttggagtctgggggaggcttggtacaacctggggggtccctgagactctcctgtgcagcctctggattcacctttagcagctatgtcatgaactgggtccgccaggctccagggaaggggctggaatgggtctcatctgttagtggtagtggtaataactcattctacgcagactccgtgaagggccggttcaccatctccagagacaattccaagaacacgctgtatctgcaaatgaacagcctgagagccgaggacacggccgtatattactgtgcgagtcgtagttccagttatctctactactactactacatggacgtctggggcaaagggaccaccgtcaccgtctcctcagcggccgcaattgaagttatgtatcctcctccttacctagacaatgagaagagcaatggaaccattatccatgtgaaagggaaacacctttgtccaagtcccctatttcccggaccttctaagcccttttgggtgctggtggtggttgggggagtcctggcttgctatagcttgctagtaacagtggcctttattattttctgggtgaggagtaagaggagcaggctcctgcacagtgactacatgaacatgactccccgccgccccgggcccacccgcaagcattaccagccctatgccccaccacgcgacttcgcagcctatcgctccagagtgaagttcagcaggagcgcagacgcccccgcgtaccagcagggccagaaccagctctataacgagctcaatctaggacgaagagaggagtacgatgttttggacaagagacgtggccgggaccctgagatggggggaaagccgagaaggaagaaccctcaggaaggcctgtacaatgaactgcagaaagataagatggcggaggcctacagtgagattgggatgaaaggcgagcgccggaggggcaaggggcacgatggcctttaccagggtctcagtacagccaccaaggacacctacgacgcccttcacatgcaggccctgccccctcgcggctctggcgagggaaggggttccctgcttacttgcggcgacgtcgaagagaatcccggtccgatggccctcccagtaactgccctccttttgcccctcgcactccttcttcatgccgctcgccccaactgggtcaacgtgattagcgatttgaagaaaatcgaggaccttatacagtctatgcatattgacgctacactgtatactgagagtgatgtacacccgtcctgtaaggtaacggccatgaaatgctttcttctggagctccaggtcatcagcttggagtctggggacgcaagcatccacgatacggttgaaaacctcatcatccttgcgaacaactctctctcatctaatggaaacgttacagagagtgggtgtaaggagtgcgaagagttggaagaaaaaaacatcaaagaatttcttcaatccttcgttcacatagtgcaaatgttcattaacacgtccactaccacacccgccccgaggccacctacgccggcaccgactatcgccagtcaacccctctctctgcgccccgaggcttgccggcctgcggctggtggggcggtccacacccggggcctggattttgcgtgcgatatatacatctgggcacctcttgccggcacctgcggagtgctgcttctctcactcgttattacgctgtactgctaa

SEQ ID NO: 2361 - DNA, 2157 bp, synthetic construct
  misc_feature 1..2157: note = Synthetic
  source 1..2157: mol_type = other DNA
atggccttaccagtgaccgccttgctcctgccgctggccttgctgctccacgccgccaggccggagatcgtgctgacccagagccccgacttccagtctgtgacacctaaggaaaaggttacaattacctgtagagcttcccagaccatcggctcttctctgcactggtaccagcagaaacctgatcagtctccaaagctgctgatcaagcacgccagccagagcttctctggcgtccccagccggttttctggcagcggcagcggaacagattttacactgacagtgaactcactggaagccgaggatgccgccacctactactgccatcagagctccagcctcccttggaccttcggccagggcacgaaggtggaaatcaaaggcagcaccagcggcagcggcaagcccggctccggagagggcagcaccaagggccaagtgcagctggtggagagcggcggcggagtggtgcaacctggaagaagcctgcggctgagctgcgctgctagcggcttcaccttcagcagccacgacatgcactgggtgcggcaggcccctggcaagggcctggactgggtcgccgtgatctggagcgacggcaacaagaagtactacgtggacagcgccaagggcagattcaccatcagccgcgacaatagcaagaacaccgtgtacctgcagatgaacagcctgagagccgaggacaccgccatctactattgcgccagaggcgataattggaacgacgagcacagctactattactacatggacgtgtggggcaaaggcacaaccgtgaccgtgtcctccgcggccgcaattgaagttatgtatcctcctccttacctagacaatgagaagagcaatggaaccattatccatgtgaaagggaaacacctttgtccaagtcccctatttcccggaccttctaagcccttttgggtgctggtggtggttgggggagtcctggcttgctatagcttgctagtaacagtggcctttattattttctgggtgaggagtaagaggagcaggctcctgcacagtgactacatgaacatgactccccgccgccccgggcccacccgcaagcattaccagccctatgccccaccacgcgacttcgcagcctatcgctccagagtgaagttcagcaggagcgcagacgcccccgcgtaccagcagggccagaaccagctctataacgagctcaatctaggacgaagagaggagtacgatgttttggacaagagacgtggccgggaccctgagatggggggaaagccgagaaggaagaaccctcaggaaggcctgtacaatgaactgcagaaagataagatggcggaggcctacagtgagattgggatgaaaggcgagcgccggaggggcaaggggcacgatggcctttaccagggtctcagtacagccaccaaggacacctacgacgcccttcacatgcaggccctgccccctcgcggctctggcgagggaaggggttccctgcttacttgcggcgacgtcgaagagaatcccggtccgatggccctcccagtaactgccctccttttgcccctcgcactccttcttcatgccgctcgccccaactgggtcaacgtgattagcgatttgaagaaaatcgaggaccttatacagtctatgcatattgacgctacactgtatactgagagtgatgtacacccgtcctgtaaggtaacggccatgaaatgctttcttctggagctccaggtcatcagcttggagtctggggacgcaagcatccacgatacggttgaaaacctcatcatccttgcgaacaactctctctcatctaatggaaacgttacagagagtgggtgtaaggagtgcgaagagttggaagaaaaaaacatcaaagaatttcttcaatccttcgttcacatagtgcaaatgttcattaacacgtccactaccacacccgccccgaggccacctacgccggcaccgactatcgccagtcaacccctctctctgcgccccgaggcttgccggcctgcggctggtggggcggtccacacccggggcctggattttgcgtgcgatatatacatctgggcacctcttgccggcacctgcggagtgctgcttctctcactcgttattacgctgtactgctaa

SEQ ID NO: 2362 - DNA, 2157 bp, synthetic construct
  misc_feature 1..2157: note = Synthetic
  source 1..2157: mol_type = other DNA
atggccttaccagtgaccgccttgctcctgccgctggccttgctgctccacgccgccaggccggagatcgtgctgacacagtccccagattttcagagcgtgacccccaaggaaaaggtgacaatcacctgcagagccagccagaccatcggcagcagcctgcactggtaccagcagaaacccgatcagtctcctaagctgctgatcaagcacgccagccagagcttcagcggcgttcccagcaggttcagcggaagcggcagcggcaccgacttcaccctgaccgtgaactctctcgaggccgaggacgccgctacatactactgccaccagagcagctccctgccttggaccttcggccagggcaccaaggtcgaaattaagggcagcaccagcggcagcggcaagcccggctccggagagggcagcaccaagggccaagtgcagctggtggaaagcggcggcggagtggtgcaacctggcagatctctgcggctgtcttgtgccgcctctggatttacattcagctctcatgatatgcactgggtgcggcaggcccctggcaaaggcctggactgggtcgccgtgatctggagcgacggcaacaacaagtactacgccgacagcgccaagggaagattcaccatcagccgggacaattctaaaaacaccgtgtacctgcagatgaacagcctgagagctgaggacaccgccatctactattgcgccagaggagataattggaacgacgagcacagctactactactatatggacgtgtggggcaagggcacaacagtgaccgtgtcctccgcggccgcaattgaagttatgtatcctcctccttacctagacaatgagaagagcaatggaaccattatccatgtgaaagggaaacacctttgtccaagtcccctatttcccggaccttctaagcccttttgggtgctggtggtggttgggggagtcctggcttgctatagcttgctagtaacagtggcctttattattttctgggtgaggagtaagaggagcaggctcctgcacagtgactacatgaacatgactccccgccgccccgggcccacccgcaagcattaccagccctatgccccaccacgcgacttcgcagcctatcgctccagagtgaagttcagcaggagcgcagacgcccccgcgtaccagcagggccagaaccagctctataacgagctcaatctaggacgaagagaggagtacgatgttttggacaagagacgtggccgggaccctgagatggggggaaagccgagaaggaagaaccctcaggaaggcctgtacaatgaactgcagaaagataagatggcggaggcctacagtgagattgggatgaaaggcgagcgccggaggggcaaggggcacgatggcctttaccagggtctcagtacagccaccaaggacacctacgacgcccttcacatgcaggccctgccccctcgcggctctggcgagggaaggggttccctgcttacttgcggcgacgtcgaagagaatcccggtccgatggccctcccagtaactgccctccttttgcccctcgcactccttcttcatgccgctcgccccaactgggtcaacgtgattagcgatttgaagaaaatcgaggaccttatacagtctatgcatattgacgctacactgtatactgagagtgatgtacacccgtcctgtaaggtaacggccatgaaatgctttcttctggagctccaggtcatcagcttggagtctggggacgcaagcatccacgatacggttgaaaacctcatcatccttgcgaacaactctctctcatctaatggaaacgttacagagagtgggtgtaaggagtgcgaagagttggaagaaaaaaacatcaaagaatttcttcaatccttcgttcacatagtgcaaatgttcattaacacgtccactaccacacccgccccgaggccacctacgccggcaccgactatcgccagtcaacccctctctctgcgccccgaggcttgccggcctgcggctggtggggcggtccacacccggggcctggattttgcgtgcgatatatacatctgggcacctcttgccggcacctgcggagtgctgcttctctcactcgttattacgctgtactgctaa

SEQ ID NO: 2363 - DNA, 2154 bp, synthetic construct
  misc_feature 1..2154: note = Synthetic
  source 1..2154: mol_type = other DNA
atggccttaccagtgaccgccttgctcctgccgctggccttgctgctccacgccgccaggccggatatccagatgacccagagccccagcagcctgagcgccagcgtgggcgaccgggtcacaatcacctgcagagccagccagagcatcagcaattacctgaactggtaccaccagaagcccggcaaagcccctaagctgctgatctacgctgcttctagcctcgagagcggcgtgcctagcagattcagcggcagcggcagcggaacagatttcaccctgacaatcagctctctgcaacctgaggacttcgccacatactattgtcagcagtcctacagcaatcctctgaccttcggcggcggcacaaaggtggaatctaagggcagcaccagcggcagcggcaagcccggctccggagagggcagcaccaagggccaactgcagctggtgcagagcggagccgaggtgaagaagcctggcgctagcgttaaggtgtcctgcaaggcctccggctacacctttaccaactacggcatctcctggctgcgccaggccccaggccagggcctggagtggatgggctggatctccggatacaacgacaacacccactacgcccagaaattccagggtagagtgactatgaccaccgataccagcacaacaacagcctacatggaactgagaaacctgcggagcgacgacaccgccgtgtactactgcgcccgggacggcattgccgctagacctgtgtactactattacatggacgtgtggggcaagggcaccaccgtgacagtgtcttctgcggccgcaattgaagttatgtatcctcctccttacctagacaatgagaagagcaatggaaccattatccatgtgaaagggaaacacctttgtccaagtcccctatttcccggaccttctaagcccttttgggtgctggtggtggttgggggagtcctggcttgctatagcttgctagtaacagtggcctttattattttctgggtgaggagtaagaggagcaggctcctgcacagtgactacatgaacatgactccccgccgccccgggcccacccgcaagcattaccagccctatgccccaccacgcgacttcgcagcctatcgctccagagtgaagttcagcaggagcgcagacgcccccgcgtaccagcagggccagaaccagctctataacgagctcaatctaggacgaagagaggagtacgatgttttggacaagagacgtggccgggaccctgagatggggggaaagccgagaaggaagaaccctcaggaaggcctgtacaatgaactgcagaaagataagatggcggaggcctacagtgagattgggatgaaaggcgagcgccggaggggcaaggggcacgatggcctttaccagggtctcagtacagccaccaaggacacctacgacgcccttcacatgcaggccctgccccctcgcggctctggcgagggaaggggttccctgcttacttgcggcgacgtcgaagagaatcccggtccgatggccctcccagtaactgccctccttttgcccctcgcactccttcttcatgccgctcgccccaactgggtcaacgtgattagcgatttgaagaaaatcgaggaccttatacagtctatgcatattgacgctacactgtatactgagagtgatgtacacccgtcctgtaaggtaacggccatgaaatgctttcttctggagctccaggtcatcagcttggagtctggggacgcaagcatccacgatacggttgaaaacctcatcatccttgcgaacaactctctctcatctaatggaaacgttacagagagtgggtgtaaggagtgcgaagagttggaagaaaaaaacatcaaagaatttcttcaatccttcgttcacatagtgcaaatgttcattaacacgtccactaccacacccgccccgaggccacctacgccggcaccgactatcgccagtcaacccctctctctgcgccccgaggcttgccggcctgcggctggtggggcggtccacacccggggcctggattttgcgtgcgatatatacatctgggcacctcttgccggcacctgcggagtgctgcttctctcactcgttattacgctgtactgctaa

SEQ ID NO: 2364 - DNA, 2151 bp, synthetic construct
  misc_feature 1..2151: note = Synthetic
  source 1..2151: mol_type = other DNA
atggccttaccagtgaccgccttgctcctgccgctggccttgctgctccacgccgccaggccggagattgttctgacccagagccctgatttccagagcgtgacccccaaggaaaaggtgacaatcacctgccgggccagccaaagcatcggctccagcctgcactggtatcagcagaagcccgaccagtccccaaagctgctgatcaaattcgcctctcagtcattcagcggcgtgccttcccggttcagcggaagcggcagcggcacagactttaccctgacaatccacagcctggaagccgaggacgccgctacatactactgccaccagagcggcagcctgccctggacattcggccagggcacgaaggtggagatcaagggcagcaccagcggcagcggcaagcccggctccggagagggcagcaccaagggccaagtgcagctggtggagagcgggggaggtgtcgtgcagcctggaagaagcctcagactgtcttgtgtggccagcggctttaccttcagctctaatgacatctactgggtgcggcaggcccctggcaagggcctggaatgggtcgctgtgatctggtacgacggcagcaacaaatactacgccgattctgtgaagggcagattcaccatcagcagagataattctaagaacaccctgtacctgcagatgaacagcctgagagccgaggataccgccgtgtactattgcgccaggggcgacaactggaacgacgagcaccattaccactactacatggacgtgtggggcaaaggcaccaccgtgaccgtggcggccgcaattgaagttatgtatcctcctccttacctagacaatgagaagagcaatggaaccattatccatgtgaaagggaaacacctttgtccaagtcccctatttcccggaccttctaagcccttttgggtgctggtggtggttgggggagtcctggcttgctatagcttgctagtaacagtggcctttattattttctgggtgaggagtaagaggagcaggctcctgcacagtgactacatgaacatgactccccgccgccccgggcccacccgcaagcattaccagccctatgccccaccacgcgacttcgcagcctatcgctccagagtgaagttcagcaggagcgcagacgcccccgcgtaccagcagggccagaaccagctctataacgagctcaatctaggacgaagagaggagtacgatgttttggacaagagacgtggccgggaccctgagatggggggaaagccgagaaggaagaaccctcaggaaggcctgtacaatgaactgcagaaagataagatggcggaggcctacagtgagattgggatgaaaggcgagcgccggaggggcaaggggcacgatggcctttaccagggtctcagtacagccaccaaggacacctacgacgcccttcacatgcaggccctgccccctcgcggctctggcgagggaaggggttccctgcttacttgcggcgacgtcgaagagaatcccggtccgatggccctcccagtaactgccctccttttgcccctcgcactccttcttcatgccgctcgccccaactgggtcaacgtgattagcgatttgaagaaaatcgaggaccttatacagtctatgcatattgacgctacactgtatactgagagtgatgtacacccgtcctgtaaggtaacggccatgaaatgctttcttctggagctccaggtcatcagcttggagtctggggacgcaagcatccacgatacggttgaaaacctcatcatccttgcgaacaactctctctcatctaatggaaacgttacagagagtgggtgtaaggagtgcgaagagttggaagaaaaaaacatcaaagaatttcttcaatccttcgttcacatagtgcaaatgttcattaacacgtccactaccacacccgccccgaggccacctacgccggcaccgactatcgccagtcaacccctctctctgcgccccgaggcttgccggcctgcggctggtggggcggtccacacccggggcctggattttgcgtgcgatatatacatctgggcacctcttgccggcacctgcggagtgctgcttctctcactcgttattacgctgtactgctaa

SEQ ID NO: 2365 - DNA, 2145 bp, synthetic construct
  misc_feature 1..2145: note = Synthetic
  source 1..2145: mol_type = other DNA
atggccttaccagtgaccgccttgctcctgccgctggccttgctgctccacgccgccaggccgcaagtgcagctggtggaaagcggcggcggtgttgtgcaacctggcagaagcctgcggctgtcatgcgccgccagcggcttcaccttcagctcttacggcatgcactgggtgcggcaggcccctggaaagggactggaatgggtcgccgtgatcagctacgacggctccaacaagtactacgccgacagcgtgaaaggcagattcaccatctctagggacaacagcaagaccaccctctacctgcagatgaacagcctgagagccgaggacaccgccgtgtactattgtgccagagatcactactactactacatggacgtgtggggcaagggcaccaccgtgaccgtgtcttctggcagcaccagcggcagcggcaagcccggctccggagagggcagcaccaagggccagaccgtggtgactcaggagcccagcttcagcgtcagccccggcggaacagtgaccctgacatgcggcctgagcagcggcagcgtgtccaccagctactatcctagctggtaccagcagacaccaggccaggctcctagaaccctgatctacagcaccaacatccggagcagcggcgtgcctgatagatttagcggctctatcctgggaaataaagccgctctgaccattacaggcgcccaggctgatgacgagagcgactactactgcgtgctgtacatgggctctgatatcgtggttttcggcggcggcacaaagctgacagtgctggcggccgcaattgaagttatgtatcctcctccttacctagacaatgagaagagcaatggaaccattatccatgtgaaagggaaacacctttgtccaagtcccctatttcccggaccttctaagcccttttgggtgctggtggtggttgggggagtcctggcttgctatagcttgctagtaacagtggcctttattattttctgggtgaggagtaagaggagcaggctcctgcacagtgactacatgaacatgactccccgccgccccgggcccacccgcaagcattaccagccctatgccccaccacgcgacttcgcagcctatcgctccagagtgaagttcagcaggagcgcagacgcccccgcgtaccagcagggccagaaccagctctataacgagctcaatctaggacgaagagaggagtacgatgttttggacaagagacgtggccgggaccctgagatggggggaaagccgagaaggaagaaccctcaggaaggcctgtacaatgaactgcagaaagataagatggcggaggcctacagtgagattgggatgaaaggcgagcgccggaggggcaaggggcacgatggcctttaccagggtctcagtacagccaccaaggacacctacgacgcccttcacatgcaggccctgccccctcgcggctctggcgagggaaggggttccctgcttacttgcggcgacgtcgaagagaatcccggtccgatggccctcccagtaactgccctccttttgcccctcgcactccttcttcatgccgctcgccccaactgggtcaacgtgattagcgatttgaagaaaatcgaggaccttatacagtctatgcatattgacgctacactgtatactgagagtgatgtacacccgtcctgtaaggtaacggccatgaaatgctttcttctggagctccaggtcatcagcttggagtctggggacgcaagcatccacgatacggttgaaaacctcatcatccttgcgaacaactctctctcatctaatggaaacgttacagagagtgggtgtaaggagtgcgaagagttggaagaaaaaaacatcaaagaatttcttcaatccttcgttcacatagtgcaaatgttcattaacacgtccactaccacacccgccccgaggccacctacgccggcaccgactatcgccagtcaacccctctctctgcgccccgaggcttgccggcctgcggctggtggggcggtccacacccggggcctggattttgcgtgcgatatatacatctgggcacctcttgccggcacctgcggagtgctgcttctctcactcgttattacgctgtactgctaa

SEQ ID NO: 2366 - DNA, 2151 bp, synthetic construct
  misc_feature 1..2151: note = Synthetic
  source 1..2151: mol_type = other DNA
atggccttaccagtgaccgccttgctcctgccgctggccttgctgctccacgccgccaggccggagatcgtgctgacacagtcccctgctaccctgagcctgagccctggcgagcgggccaccctgagctgcagagccagccagagcgtgtccagctactttgcctggtatcagcagaagcctggccaggccccacggctgctgatctacgacgcctctaatagagccacaggcatcccagctagattcagcggctccggctccggaaccgatttcaccctgaccatctctagcctcgagcctgaggacttcgccgtttactattgtcagcaaagaagcaactggcctctgacatttggcggaggcacaaaggtggaaatcaagggcagcaccagcggcagcggcaagcccggctccggagagggcagcaccaagggccaactgcagctgcaggagagcggccctggactggtgaagcccagcgagacactgagcctgacatgcaccgtgtccggaggctctatcagcagcagcagctactactggggatggattagacagccccccggcaagggcctggaatggatcggcagcctgtactacagcggcagcacctactacaaccccagcctgaagtctagagtgaccatcagcgtggacaccagcaagaaccagttcagcctgaaactgagctctgtcacagccgccgataccgccgtgtactactgcgccgctgtgcagctggaaaggcggggctacttctacatggacgtgtggggcaaaggcaccaccgtgacagtgtctagcgcggccgcaattgaagttatgtatcctcctccttacctagacaatgagaagagcaatggaaccattatccatgtgaaagggaaacacctttgtccaagtcccctatttcccggaccttctaagcccttttgggtgctggtggtggttgggggagtcctggcttgctatagcttgctagtaacagtggcctttattattttctgggtgaggagtaagaggagcaggctcctgcacagtgactacatgaacatgactccccgccgccccgggcccacccgcaagcattaccagccctatgccccaccacgcgacttcgcagcctatcgctccagagtgaagttcagcaggagcgcagacgcccccgcgtaccagcagggccagaaccagctctataacgagctcaatctaggacgaagagaggagtacgatgttttggacaagagacgtggccgggaccctgagatggggggaaagccgagaaggaagaaccctcaggaaggcctgtacaatgaactgcagaaagataagatggcggaggcctacagtgagattgggatgaaaggcgagcgccggaggggcaaggggcacgatggcctttaccagggtctcagtacagccaccaaggacacctacgacgcccttcacatgcaggccctgccccctcgcggctctggcgagggaaggggttccctgcttacttgcggcgacgtcgaagagaatcccggtccgatggccctcccagtaactgccctccttttgcccctcgcactccttcttcatgccgctcgccccaactgggtcaacgtgattagcgatttgaagaaaatcgaggaccttatacagtctatgcatattgacgctacactgtatactgagagtgatgtacacccgtcctgtaaggtaacggccatgaaatgctttcttctggagctccaggtcatcagcttggagtctggggacgcaagcatccacgatacggttgaaaacctcatcatccttgcgaacaactctctctcatctaatggaaacgttacagagagtgggtgtaaggagtgcgaagagttggaagaaaaaaacatcaaagaatttcttcaatccttcgttcacatagtgcaaatgttcattaacacgtccactaccacacccgccccgaggccacctacgccggcaccgactatcgccagtcaacccctctctctgcgccccgaggcttgccggcctgcggctggtggggcggtccacacccggggcctggattttgcgtgcgatatatacatctgggcacctcttgccggcacctgcggagtgctgcttctctcactcgttattacgctgtactgctaa

SEQ ID NO: 2367 - DNA, 2157 bp, synthetic construct
  misc_feature 1..2157: note = Synthetic
  source 1..2157: mol_type = other DNA
atggccttaccagtgaccgccttgctcctgccgctggccttgctgctccacgccgccaggccgcagaccgtcgtgacccaggagcctagcttcagcgtgtccccaggcggaaccgtcacactgacatgcggcctcacaagcggcagcgtgtccaccagctactaccccaactggtaccagcagacacctggacaggcccctagaaccctgatctacagcaccaacatccggagcagcggagtgcccgacagattttctggcagcatcctgggcaacaaggccgctctgaccatcaccggcgctcaggccgacgacgagagcgactactactgcgtgctgtacatgggcagcggcatgttcatcttcggcagcggcacaaaggtgacagtgctgggcagcaccagcggcagcggcaagcccggctccggagagggcagcaccaagggccaagtgcaactggtggaaagcggcggcggcgttgtgcagcctggcagaagcctgcggctgtcatgcgccgccagcggttttaccttctctaattacggcatgcactgggtgcggcaggctcccggcaaaggcctggaatggatggccgtgatctggtccgatggccacaacaagtactacgccgatagcgtgaaaggcagattcaccattagcagagataattctaagaacaccctgtacctgcagatgaacagcctgcgcgccgaggacaccgccgtgtactattgtgccagagcccagctggagcggagatacttctactatatggacgtgtggggcaagggcaccaccgtgacagtgtctagcgcggccgcaattgaagttatgtatcctcctccttacctagacaatgagaagagcaatggaaccattatccatgtgaaagggaaacacctttgtccaagtcccctatttcccggaccttctaagcccttttgggtgctggtggtggttgggggagtcctggcttgctatagcttgctagtaacagtggcctttattattttctgggtgaggagtaagaggagcaggctcctgcacagtgactacatgaacatgactccccgccgccccgggcccacccgcaagcattaccagccctatgccccaccacgcgacttcgcagcctatcgctccagagtgaagttcagcaggagcgcagacgcccccgcgtaccagcagggccagaaccagctctataacgagctcaatctaggacgaagagaggagtacgatgttttggacaagagacgtggccgggaccctgagatggggggaaagccgagaaggaagaaccctcaggaaggcctgtacaatgaactgcagaaagataagatggcggaggcctacagtgagattgggatgaaaggcgagcgccggaggggcaaggggcacgatggcctttaccagggtctcagtacagccaccaaggacacctacgacgcccttcacatgcaggccctgccccctcgcggctctggcgagggaaggggttccctgcttacttgcggcgacgtcgaagagaatcccggtccgatggccctcccagtaactgccctccttttgcccctcgcactccttcttcatgccgctcgccccaactgggtcaacgtgattagcgatttgaagaaaatcgaggaccttatacagtctatgcatattgacgctacactgtatactgagagtgatgtacacccgtcctgtaaggtaacggccatgaaatgctttcttctggagctccaggtcatcagcttggagtctggggacgcaagcatccacgatacggttgaaaacctcatcatccttgcgaacaactctctctcatctaatggaaacgttacagagagtgggtgtaaggagtgcgaagagttggaagaaaaaaacatcaaagaatttcttcaatccttcgttcacatagtgcaaatgttcattaacacgtccactaccacacccgccccgaggccacctacgccggcaccgactatcgccagtcaacccctctctctgcgccccgaggcttgccggcctgcggctggtggggcggtccacacccggggcctggattttgcgtgcgatatatacatctgggcacctcttgccggcacctgcggagtgctgcttctctcactcgttattacgctgtactgctaa

SEQ ID NO: 2368 - DNA, 2157 bp, synthetic construct
  misc_feature 1..2157: note = Synthetic
  source 1..2157: mol_type = other DNA
atggccttaccagtgaccgccttgctcctgccgctggccttgctgctccacgccgccaggccggacatccagatgacacagagccctagcagcctgtctgcttccgtgggcgatagagtgacaatcacctgccgggcctcccagggcatcagctcctggctggcctggtaccagcagaagcctgagaaggcccctaagagcctgatctacgccgcttctagcctgcagggaggcgtgccaagtcggttcagcggcagcggcagcggcacagacttcaccctgaccatttcttctctgcaacctgaggacttcgccacctactactgtcagcaatacgacagctacccctacacctttggccagggcaccaagctggaaatcaagtggcagcaccagcggcagcggcaagcccggctccggagagggcagcaccaagggccaggttcagctggtgcagagcggagccgaggtgaaaaagcccggcgcaagcgtgaaggtgtcttgcaaggcctccggatataccttcaccagctacgatatcaactgggtgcggcaggccacaggccagggtctcgaatggatgggctggatgatccccaattctggcgacacaggcagcgcccaaaagttccagggcagagtgacaatgaccagaaacaccagcatcggaacagcctacatggaactgagctccctgagaagcgaggataccgccgtgtactattgtgccagaggcggctactgcaacagcacctcctgctactactactacatggacgtgtggggcaaaggcacaaccgtcaccgtgagctcgcggccgcaattgaagttatgtatcctcctccttacctagacaatgagaagagcaatggaaccattatccatgtgaaagggaaacacctttgtccaagtcccctatttcccggaccttctaagcccttttgggtgctggtggtggttgggggagtcctggcttgctatagcttgctagtaacagtggcctttattattttctgggtgaggagtaagaggagcaggctcctgcacagtgactacatgaacatgactccccgccgccccgggcccacccgcaagcattaccagccctatgccccaccacgcgacttcgcagcctatcgctccagagtgaagttcagcaggagcgcagacgcccccgcgtaccagcagggccagaaccagctctataacgagctcaatctaggacgaagagaggagtacgatgttttggacaagagacgtggccgggaccctgagatggggggaaagccgagaaggaagaaccctcaggaaggcctgtacaatgaactgcagaaagataagatggcggaggcctacagtgagattgggatgaaaggcgagcgccggaggggcaaggggcacgatggcctttaccagggtctcagtacagccaccaaggacacctacgacgcccttcacatgcaggccctgccccctcgcggctctggcgagggaaggggttccctgcttacttgcggcgacgtcgaagagaatcccggtccgatggccctcccagtaactgccctccttttgcccctcgcactccttcttcatgccgctcgccccaactgggtcaacgtgattagcgatttgaagaaaatcgaggaccttatacagtctatgcatattgacgctacactgtatactgagagtgatgtacacccgtcctgtaaggtaacggccatgaaatgctttcttctggagctccaggtcatcagcttggagtctggggacgcaagcatccacgatacggttgaaaacctcatcatccttgcgaacaactctctctcatctaatggaaacgttacagagagtgggtgtaaggagtgcgaagagttggaagaaaaaaacatcaaagaatttcttcaatccttcgttcacatagtgcaaatgttcattaacacgtccactaccacacccgccccgaggccacctacgccggcaccgactatcgccagtcaacccctctctctgcgccccgaggcttgccggcctgcggctggtggggcggtccacacccggggcctggattttgcgtgcgatatatacatctgggcacctcttgccggcacctgcggagtgctgcttctctcactcgttattacgctgtactgctaa

SEQ ID NO: 2369 - DNA, 2160 bp, synthetic construct
  misc_feature 1..2160: note = Synthetic
  source 1..2160: mol_type = other DNA
atggccttaccagtgaccgccttgctcctgccgctggccttgctgctccacgccgccaggccggatatccaggtcacacagagccctacctttctgagcgcttctgtgggcgaccgggtgaccatcacatgccgggccagccagggtattagcagctacctggcttggtaccagcagaagcccggcaaagcccctaagctgctgatctacggcgcttctaccctgcagtccggcgtgcccagcagattcagcggcagcggaagcggaacagagttcaccctgacaatctccagcctccaacctgaggacttcgccacatactattgtcagcaactgaatagctatccttggacattcggccagggcaccaaggtggaaatcaagggcagcaccagcggcagcggcaagcccggctccggagagggcagcaccaagggccaggttcaactggtgcagagcggcgccgaggtgaagaagcctggcgccagcgtgaaagtgtcctgcaaggccagcggatacacgtttaccagctacgacatcaactgggtcagacaggccaccggccagggcctggaatggatgggatggatgaaccccaacagcggcaacaccgtgtacgcccagaaattccagggcagagtgaccatgacacggaacaccagcatcagcaccgcctacatggaactgagctctctgagatccgaggatacagccgtgtactactgcgccagaggcggagatttctggagcggctaccacgactactactactacatggacgtgtggggcaagggcaccaccgtgaccgtgtcttctgcggccgcaattgaagttatgtatcctcctccttacctagacaatgagaagagcaatggaaccattatccatgtgaaagggaaacacctttgtccaagtcccctatttcccggaccttctaagcccttttgggtgctggtggtggttgggggagtcctggcttgctatagcttgctagtaacagtggcctttattattttctgggtgaggagtaagaggagcaggctcctgcacagtgactacatgaacatgactccccgccgccccgggcccacccgcaagcattaccagccctatgccccaccacgcgacttcgcagcctatcgctccagagtgaagttcagcaggagcgcagacgcccccgcgtaccagcagggccagaaccagctctataacgagctcaatctaggacgaagagaggagtacgatgttttggacaagagacgtggccgggaccctgagatggggggaaagccgagaaggaagaaccctcaggaaggcctgtacaatgaactgcagaaagataagatggcggaggcctacagtgagattgggatgaaaggcgagcgccggaggggcaaggggcacgatggcctttaccagggtctcagtacagccaccaaggacacctacgacgcccttcacatgcaggccctgccccctcgcggctctggcgagggaaggggttccctgcttacttgcggcgacgtcgaagagaatcccggtccgatggccctcccagtaactgccctccttttgcccctcgcactccttcttcatgccgctcgccccaactgggtcaacgtgattagcgatttgaagaaaatcgaggaccttatacagtctatgcatattgacgctacactgtatactgagagtgatgtacacccgtcctgtaaggtaacggccatgaaatgctttcttctggagctccaggtcatcagcttggagtctggggacgcaagcatccacgatacggttgaaaacctcatcatccttgcgaacaactctctctcatctaatggaaacgttacagagagtgggtgtaaggagtgcgaagagttggaagaaaaaaacatcaaagaatttcttcaatccttcgttcacatagtgcaaatgttcattaacacgtccactaccacacccgccccgaggccacctacgccggcaccgactatcgccagtcaacccctctctctgcgccccgaggcttgccggcctgcggctggtggggcggtccacacccggggcctggattttgcgtgcgatatatacatctgggcacctcttgccggcacctgcggagtgctgcttctctcactcgttattacgctgtactgctaa

SEQ ID NO: 2370 - DNA, 2154 bp, synthetic construct
  misc_feature 1..2154: note = Synthetic
  source 1..2154: mol_type = other DNA
atggccttaccagtgaccgccttgctcctgccgctggccttgctgctccacgccgccaggccgagctacgagctgacccagcctccatctgtctccgtgtctccaggccaaacagccagcatcacctgcagcggagataagctgggcgacaagtacgcctgctggtaccagcagaagcccggccagagccctgtgctggtgatctaccaggacagcaagcggcctagcggcatccccgagagattcagcggctccaacagcggcaataccgctacactgacaatcagcggcacacaggccatggatgaggccgactactactgccaggcctgggacagctctaccgccgtgttcggcggcggaacccagctcaccgccctgggcagcaccagcggcagcggcaagcccggctccggagagggcagcaccaagggccaagtgcagctgcaggagagcggtcctggcctggttaagcctagcgagacactgtctctgacttgcaccgtgtccggcggatctatcagcagctactactggtcctggatcagacagcccgccggcaaaggcctggaatggattggaagaatctacaccagcggcagcaccaactacaaccccagcctgaagtccagagtgacaatgagcgtggacacatctaagaaccagtttagcctgaaactgagcagcgtgaccgccgccgatacagctgtgtactattgtgcccgggaagaataccagctgctgcctgccctgtactactattactacatggacgtgtggggcaagggcaccaccgtgaccgtgtccagcgcggccgcaattgaagttatgtatcctcctccttacctagacaatgagaagagcaatggaaccattatccatgtgaaagggaaacacctttgtccaagtcccctatttcccggaccttctaagcccttttgggtgctggtggtggttgggggagtcctggcttgctatagcttgctagtaacagtggcctttattattttctgggtgaggagtaagaggagcaggctcctgcacagtgactacatgaacatgactccccgccgccccgggcccacccgcaagcattaccagccctatgccccaccacgcgacttcgcagcctatcgctccagagtgaagttcagcaggagcgcagacgcccccgcgtaccagcagggccagaaccagctctataacgagctcaatctaggacgaagagaggagtacgatgttttggacaagagacgtggccgggaccctgagatggggggaaagccgagaaggaagaaccctcaggaaggcctgtacaatgaactgcagaaagataagatggcggaggcctacagtgagattgggatgaaaggcgagcgccggaggggcaaggggcacgatggcctttaccagggtctcagtacagccaccaaggacacctacgacgcccttcacatgcaggccctgccccctcgcggctctggcgagggaaggggttccctgcttacttgcggcgacgtcgaagagaatcccggtccgatggccctcccagtaactgccctccttttgcccctcgcactccttcttcatgccgctcgccccaactgggtcaacgtgattagcgatttgaagaaaatcgaggaccttatacagtctatgcatattgacgctacactgtatactgagagtgatgtacacccgtcctgtaaggtaacggccatgaaatgctttcttctggagctccaggtcatcagcttggagtctggggacgcaagcatccacgatacggttgaaaacctcatcatccttgcgaacaactctctctcatctaatggaaacgttacagagagtgggtgtaaggagtgcgaagagttggaagaaaaaaacatcaaagaatttcttcaatccttcgttcacatagtgcaaatgttcattaacacgtccactaccacacccgccccgaggccacctacgccggcaccgactatcgccagtcaacccctctctctgcgccccgaggcttgccggcctgcggctggtggggcggtccacacccggggcctggattttgcgtgcgatatatacatctgggcacctcttgccggcacctgcggagtgctgcttctctcactcgttattacgctgtactgctaa

SEQ ID NO: 2371 - DNA, 2157 bp, synthetic construct
  misc_feature 1..2157: note = Synthetic
  source 1..2157: mol_type = other DNA
atggccttaccagtgaccgccttgctcctgccgctggccttgctgctccacgccgccaggccgcagaccgtggtcacccaggagcctagctttagcgtgtccccaggaggtacagtgaccctgacatgcggcctgactagcggatctgtgtccaccagctactaccccaactggtaccagcagacacctggccaggcccctagaaccctgatctacagcaccaatatccggagctccggcgtgcccgacagattcagcggaagcatcctgggcaacaaggccgctctgaccatcaccggcgcccaagctgatgacgagagcgactactattgtgtgctgtacatgggcagcggcatgttcatcttcggctctggcaccaaggtgaccgtgctgggcagcaccagcggcagcggcaagcccggctccggagagggcagcaccaagggccaagtgcagctggtggaatctggcggcggcgtggtgcagcctggtaggagcctgcggctgtcatgcgccgccacaggcttcaccttcagcagctacggcatgcactgggtcagacaggcccctggcaagggactggagtggatggtggtgatctggtccgatggccacaataaatactacgccgacagcgtgaagggcagatttaccattagccgggacaacagcaagaacaccctgtacctgcagatgaacagcctgagagctgaagataccgccgtgtactactgcgccagagcccagctcgagcggagatacttctactatatggacgtgtggggcaaaggcacaacagtgaccgtttcttctgcggccgcaattgaagttatgtatcctcctccttacctagacaatgagaagagcaatggaaccattatccatgtgaaagggaaacacctttgtccaagtcccctatttcccggaccttctaagcccttttgggtgctggtggtggttgggggagtcctggcttgctatagcttgctagtaacagtggcctttattattttctgggtgaggagtaagaggagcaggctcctgcacagtgactacatgaacatgactccccgccgccccgggcccacccgcaagcattaccagccctatgccccaccacgcgacttcgcagcctatcgctccagagtgaagttcagcaggagcgcagacgcccccgcgtaccagcagggccagaaccagctctataacgagctcaatctaggacgaagagaggagtacgatgttttggacaagagacgtggccgggaccctgagatggggggaaagccgagaaggaagaaccctcaggaaggcctgtacaatgaactgcagaaagataagatggcggaggcctacagtgagattgggatgaaaggcgagcgccggaggggcaaggggcacgatggcctttaccagggtctcagtacagccaccaaggacacctacgacgcccttcacatgcaggccctgccccctcgcggctctggcgagggaaggggttccctgcttacttgcggcgacgtcgaagagaatcccggtccgatggccctcccagtaactgccctccttttgcccctcgcactccttcttcatgccgctcgccccaactgggtcaacgtgattagcgatttgaagaaaatcgaggaccttatacagtctatgcatattgacgctacactgtatactgagagtgatgtacacccgtcctgtaaggtaacggccatgaaatgctttcttctggagctccaggtcatcagcttggagtctggggacgcaagcatccacgatacggttgaaaacctcatcatccttgcgaacaactctctctcatctaatggaaacgttacagagagtgggtgtaaggagtgcgaagagttggaagaaaaaaacatcaaagaatttcttcaatccttcgttcacatagtgcaaatgttcattaacacgtccactaccacacccgccccgaggccacctacgccggcaccgactatcgccagtcaacccctctctctgcgccccgaggcttgccggcctgcggctggtggggcggtccacacccggggcctggattttgcgtgcgatatatacatctgggcacctcttgccggcacctgcggagtgctgcttctctcactcgttattacgctgtactgctaa

SEQ ID NO: 2372 - DNA, 2157 bp, synthetic construct
  misc_feature 1..2157: note = Synthetic
  source 1..2157: mol_type = other DNA
atggccttaccagtgaccgccttgctcctgccgctggccttgctgctccacgccgccaggccggagatcgtgctgacccagtctccagatttccagtccgtgacccctaaggaaaaggtgaccatcacatgcagagccagccagtccatcggctctagcctgcactggtaccagcagaagcccgaccagtctcctatgctgctgatcaaattcgcctctcagagcatcagcggcgtgcccagccggttcagcggcagcggctccggcaccgacttcacactgacaatcaacagtctggaggccgaggatgccgctgcttactactgtcaccagagcagcagcctgccttggacatttggccagggcaccaaggtggaaattaagggcagcaccagcggcagcggcaagcccggctccggagagggcagcaccaagggccaagtgcagctggtcgagagcggaggcggcgttgtgcaacctggaaggagcctgcggctgagctgcgccgcttctggcttcacctttactagctacgacatgcactgggtgcggcaggcccctggcaagggcctggaatgggtcaccatcatctggttcgacggcagcaacaagtactacgccgatagcgtgaagggcagattcaccatcagcagagataatagcaagaataccctgtacctgcagatgaactctctctccgccgaggacaccgccgtgtactactgcgccagaggcgacaactggaacgacagatactattattactactacatggacgtgtggggcaaaggcaccaccgtgacagtgtccagcgcggccgcaattgaagttatgtatcctcctccttacctagacaatgagaagagcaatggaaccattatccatgtgaaagggaaacacctttgtccaagtcccctatttcccggaccttctaagcccttttgggtgctggtggtggttgggggagtcctggcttgctatagcttgctagtaacagtggcctttattattttctgggtgaggagtaagaggagcaggctcctgcacagtgactacatgaacatgactccccgccgccccgggcccacccgcaagcattaccagccctatgccccaccacgcgacttcgcagcctatcgctccagagtgaagttcagcaggagcgcagacgcccccgcgtaccagcagggccagaaccagctctataacgagctcaatctaggacgaagagaggagtacgatgttttggacaagagacgtggccgggaccctgagatggggggaaagccgagaaggaagaaccctcaggaaggcctgtacaatgaactgcagaaagataagatggcggaggcctacagtgagattgggatgaaaggcgagcgccggaggggcaaggggcacgatggcctttaccagggtctcagtacagccaccaaggacacctacgacgcccttcacatgcaggccctgccccctcgcggctctggcgagggaaggggttccctgcttacttgcggcgacgtcgaagagaatcccggtccgatggccctcccagtaactgccctccttttgcccctcgcactccttcttcatgccgctcgccccaactgggtcaacgtgattagcgatttgaagaaaatcgaggaccttatacagtctatgcatattgacgctacactgtatactgagagtgatgtacacccgtcctgtaaggtaacggccatgaaatgctttcttctggagctccaggtcatcagcttggagtctggggacgcaagcatccacgatacggttgaaaacctcatcatccttgcgaacaactctctctcatctaatggaaacgttacagagagtgggtgtaaggagtgcgaagagttggaagaaaaaaacatcaaagaatttcttcaatccttcgttcacatagtgcaaatgttcattaacacgtccactaccacacccgccccgaggccacctacgccggcaccgactatcgccagtcaacccctctctctgcgccccgaggcttgccggcctgcggctggtggggcggtccacacccggggcctggattttgcgtgcgatatatacatctgggcacctcttgccggcacctgcggagtgctgcttctctcactcgttattacgctgtactgctaa

SEQ ID NO: 2373 - DNA, 2172 bp, synthetic construct
  misc_feature 1..2172: note = Synthetic
  source 1..2172: mol_type = other DNA
atggccttaccagtgaccgccttgctcctgccgctggccttgctgctccacgccgccaggccggacatcgtgatgacccagcctcctctgagcagccctgtgacactgggccagccagctagcatcagctgtagatcttctcagtccctggtgcacagcgacggcaatacctacctgtcttggctgcagcagcggcctggccagccccccagactgctgatctacaaggtgtccaaccgcttcagcggcgtgccagacagattcagcggctctggcgccggcaccgacttcaccctgaagatcagcagagtcgaggccgaagatgtgggagtttactattgcacccaagctacacagttcccccacacctttggccagggcaccaagctcgagatcaagggcagcaccagcggcagcggcaagcccggctccggagagggcagcaccaagggccaagtgcagctggtccagagcggcgctgaggtgaagaaacctggcgcctctgtgaaagtgtcctgcaaggccagcggctacacctttaccagctacggcattagctgggtgcggcaggcccctggccagggtcttgagtggatgggctggatcagcgcctacaacggccacacagattatacacaaaagctgcagggcagagtgaccatgacaaccgataccagcaccaccacagcctacatggaactgagaagcctgagctctgccgacaccgccgtgtactactgcgtgcgggaagtggtgctgcctaccacagactactactacttctacatggacgtgtggggcaagggcaccacagtgacagtcagctccgcggccgcaattgaagttatgtatcctcctccttacctagacaatgagaagagcaatggaaccattatccatgtgaaagggaaacacctttgtccaagtcccctatttcccggaccttctaagcccttttgggtgctggtggtggttgggggagtcctggcttgctatagcttgctagtaacagtggcctttattattttctgggtgaggagtaagaggagcaggctcctgcacagtgactacatgaacatgactccccgccgccccgggcccacccgcaagcattaccagccctatgccccaccacgcgacttcgcagcctatcgctccagagtgaagttcagcaggagcgcagacgcccccgcgtaccagcagggccagaaccagctctataacgagctcaatctaggacgaagagaggagtacgatgttttggacaagagacgtggccgggaccctgagatggggggaaagccgagaaggaagaaccctcaggaaggcctgtacaatgaactgcagaaagataagatggcggaggcctacagtgagattgggatgaaaggcgagcgccggaggggcaaggggcacgatggcctttaccagggtctcagtacagccaccaaggacacctacgacgcccttcacatgcaggccctgccccctcgcggctctggcgagggaaggggttccctgcttacttgcggcgacgtcgaagagaatcccggtccgatggccctcccagtaactgccctccttttgcccctcgcactccttcttcatgccgctcgccccaactgggtcaacgtgattagcgatttgaagaaaatcgaggaccttatacagtctatgcatattgacgctacactgtatactgagagtgatgtacacccgtcctgtaaggtaacggccatgaaatgctttcttctggagctccaggtcatcagcttggagtctggggacgcaagcatccacgatacggttgaaaacctcatcatccttgcgaacaactctctctcatctaatggaaacgttacagagagtgggtgtaaggagtgcgaagagttggaagaaaaaaacatcaaagaatttcttcaatccttcgttcacatagtgcaaatgttcattaacacgtccactaccacacccgccccgaggccacctacgccggcaccgactatcgccagtcaacccctctctctgcgccccgaggcttgccggcctgcggctggtggggcggtccacacccggggcctggattttgcgtgcgatatatacatctgggcacctcttgccggcacctgcggagtgctgcttctctcactcgttattacgctgtactgctaa

SEQ ID NO: 2374 - DNA, 2169 bp, synthetic construct
  misc_feature 1..2169: note = Synthetic
  source 1..2169: mol_type = other DNA
atggccttaccagtgaccgccttgctcctgccgctggccttgctgctccacgccgccaggccggatatccagatgacacagagcccaagcagcctgagcgccagcgtgggcgacagagtgaccatcacatgcagagccagccagggcatcagcagctggctggcttggtaccagcaaaagcctgagaaggcccctaagagcctcatctacgccgctagcagcctgcagtccggcgtgccaagcagattcagcggctctggctctggcacagacttcaccctgaccatttccagcctgcaacctgaggattttgccacatactattgtcagcagtacaacagctacccttacaccttcggccagggcaccaagctggaaatcaagggcagcaccagcggcagcggcaagcccggctccggagagggcagcaccaagggccaagttcagctggtgcagagcggagccgaggtgaaaaagcccggcgcttctgtgaaggtgtcctgcaaggtgtctggctacaccctgacagagctgagcatgcactgggtccggcaggcccctggcaaaggcctggaatggatgggaggcttcgaccccgaagacggggagacaatctacgcccagaaattccagggcagagtgacaatgaccgaggacaccagcaccgatacagcctacatggaactgtcttccctgcggagcgaggacaccgccgtgtactactgcgccaccggcagaatcaccatggtgcggggcgtcatcatcccctactactattactacatggacgtgtggggcaagggcaccaccgtgaccgtgtcctctgcggccgcaattgaagttatgtatcctcctccttacctagacaatgagaagagcaatggaaccattatccatgtgaaagggaaacacctttgtccaagtcccctatttcccggaccttctaagcccttttgggtgctggtggtggttgggggagtcctggcttgctatagcttgctagtaacagtggcctttattattttctgggtgaggagtaagaggagcaggctcctgcacagtgactacatgaacatgactccccgccgccccgggcccacccgcaagcattaccagccctatgccccaccacgcgacttcgcagcctatcgctccagagtgaagttcagcaggagcgcagacgcccccgcgtaccagcagggccagaaccagctctataacgagctcaatctaggacgaagagaggagtacgatgttttggacaagagacgtggccgggaccctgagatggggggaaagccgagaaggaagaaccctcaggaaggcctgtacaatgaactgcagaaagataagatggcggaggcctacagtgagattgggatgaaaggcgagcgccggaggggcaaggggcacgatggcctttaccagggtctcagtacagccaccaaggacacctacgacgcccttcacatgcaggccctgccccctcgcggctctggcgagggaaggggttccctgcttacttgcggcgacgtcgaagagaatcccggtccgatggccctcccagtaactgccctccttttgcccctcgcactccttcttcatgccgctcgccccaactgggtcaacgtgattagcgatttgaagaaaatcgaggaccttatacagtctatgcatattgacgctacactgtatactgagagtgatgtacacccgtcctgtaaggtaacggccatgaaatgctttcttctggagctccaggtcatcagcttggagtctggggacgcaagcatccacgatacggttgaaaacctcatcatccttgcgaacaactctctctcatctaatggaaacgttacagagagtgggtgtaaggagtgcgaagagttggaagaaaaaaacatcaaagaatttcttcaatccttcgttcacatagtgcaaatgttcattaacacgtccactaccacacccgccccgaggccacctacgccggcaccgactatcgccagtcaacccctctctctgcgccccgaggcttgccggcctgcggctggtggggcggtccacacccggggcctggattttgcgtgcgatatatacatctgggcacctcttgccggcacctgcggagtgctgcttctctcactcgttattacgctgtactgctaa

SEQ ID NO: 2375 - DNA, 2163 bp, synthetic construct
  misc_feature 1..2163: note = Synthetic
  source 1..2163: mol_type = other DNA
atggccttaccagtgaccgccttgctcctgccgctggccttgctgctccacgccgccaggccggatatcgtgatgacccagacccccctgagcctgtccgtgaccccaggacaacctgccagcattagctgcaagagcagcaagtccctgctgcacagcgacggcaagacatacctgtactggtacctgcaaaagcccggccagcctcctcagctgctcatctacgaggtgtccaaccggttctctggcgtgcctgatagattcagcggaagcggcagcggaacagacttcacactgaagatcagcagagtcgaggccgaggacgtgggcgtttactactgcatgcagagcatccagttcccctggacattcggccagggcacaaaagtggaaatcaagggcagcaccagcggcagcggcaagcccggctccggagagggcagcaccaagggccaagtgcagctggtgcagagcggcaccgaggtgaagaagccaggcgcctctgtgaaagtgtcttgtaaagccagcggctacacctttaccaattacggcatcggctgggtgcggcaggcccctggacagggactggaatggatgggctggatcatcgcctacaacggctacacaaagtacgcccagatcctgcagggcagagtgacaatgaccaccgacaccagcaccaacaccgcttatatggaactgagaagcctgcggagcgacgacaccgccgtgtactattgcgccagacagcagctgggcggagattaccactactacatggacgtgtggggcaagggcaccaccgtcacagtgtccagcgcggccgcaattgaagttatgtatcctcctccttacctagacaatgagaagagcaatggaaccattatccatgtgaaagggaaacacctttgtccaagtcccctatttcccggaccttctaagcccttttgggtgctggtggtggttgggggagtcctggcttgctatagcttgctagtaacagtggcctttattattttctgggtgaggagtaagaggagcaggctcctgcacagtgactacatgaacatgactccccgccgccccgggcccacccgcaagcattaccagccctatgccccaccacgcgacttcgcagcctatcgctccagagtgaagttcagcaggagcgcagacgcccccgcgtaccagcagggccagaaccagctctataacgagctcaatctaggacgaagagaggagtacgatgttttggacaagagacgtggccgggaccctgagatggggggaaagccgagaaggaagaaccctcaggaaggcctgtacaatgaactgcagaaagataagatggcggaggcctacagtgagattgggatgaaaggcgagcgccggaggggcaaggggcacgatggcctttaccagggtctcagtacagccaccaaggacacctacgacgcccttcacatgcaggccctgccccctcgcggctctggcgagggaaggggttccctgcttacttgcggcgacgtcgaagagaatcccggtccgatggccctcccagtaactgccctccttttgcccctcgcactccttcttcatgccgctcgccccaactgggtcaacgtgattagcgatttgaagaaaatcgaggaccttatacagtctatgcatattgacgctacactgtatactgagagtgatgtacacccgtcctgtaaggtaacggccatgaaatgctttcttctggagctccaggtcatcagcttggagtctggggacgcaagcatccacgatacggttgaaaacctcatcatccttgcgaacaactctctctcatctaatggaaacgttacagagagtgggtgtaaggagtgcgaagagttggaagaaaaaaacatcaaagaatttcttcaatccttcgttcacatagtgcaaatgttcattaacacgtccactaccacacccgccccgaggccacctacgccggcaccgactatcgccagtcaacccctctctctgcgccccgaggcttgccggcctgcggctggtggggcggtccacacccggggcctggattttgcgtgcgatatatacatctgggcacctcttgccggcacctgcggagtgctgcttctctcactcgttattacgctgtactgctaa

SEQ ID NO: 2376 - DNA, 2163 bp, synthetic construct
  misc_feature 1..2163: note = Synthetic
  source 1..2163: mol_type = other DNA
atggccttaccagtgaccgccttgctcctgccgctggccttgctgctccacgccgccaggccggacatcgtgatgacccagacccctctgagcctgagcgtgacacctggacagcccgcttctattagctgtaaaagcagcaagtccctgctgcacagcgacggcaagacctacctgtactggtacctgcagaaacctggccagcctccacagctgctgatctacgaggtgtctacaagattcagcggagtgcctgatagattcagcggcagcggatctggaacagatttcaccctgaagatcagccgggttgaggccgaggacgtgggcgtgtactattgcatgcagtccatccagttcccctggaccttcggccagggcacaaaggtggaaatcaagggcagcaccagcggcagcggcaagcccggctccggagagggcagcaccaagggccaagtgcagctggtgcaaagcggcaccgaggtgaaaaagcccggcgcctctgtgaaggtctcctgcaaggccagcggatacacatttacaaattacggcatcggctgggtgcggcaggcccctggccagggcctggaatggatgggctggatcatcgcctacaacggctacaccaagtacgcccagatcctgcaaggcagagtcaccatgaccacagacaccagcaccaacaccgcttatatggaactgagaagcctgcggagcgacgatacagccgtgtactactgcgccagacagcagctcggcggcgactaccactactacatggacgtgtggggcaagggcaccaccgtgaccgtgtccagcgcggccgcaattgaagttatgtatcctcctccttacctagacaatgagaagagcaatggaaccattatccatgtgaaagggaaacacctttgtccaagtcccctatttcccggaccttctaagcccttttgggtgctggtggtggttgggggagtcctggcttgctatagcttgctagtaacagtggcctttattattttctgggtgaggagtaagaggagcaggctcctgcacagtgactacatgaacatgactccccgccgccccgggcccacccgcaagcattaccagccctatgccccaccacgcgacttcgcagcctatcgctccagagtgaagttcagcaggagcgcagacgcccccgcgtaccagcagggccagaaccagctctataacgagctcaatctaggacgaagagaggagtacgatgttttggacaagagacgtggccgggaccctgagatggggggaaagccgagaaggaagaaccctcaggaaggcctgtacaatgaactgcagaaagataagatggcggaggcctacagtgagattgggatgaaaggcgagcgccggaggggcaaggggcacgatggcctttaccagggtctcagtacagccaccaaggacacctacgacgcccttcacatgcaggccctgccccctcgcggctctggcgagggaaggggttccctgcttacttgcggcgacgtcgaagagaatcccggtccgatggccctcccagtaactgccctccttttgcccctcgcactccttcttcatgccgctcgccccaactgggtcaacgtgattagcgatttgaagaaaatcgaggaccttatacagtctatgcatattgacgctacactgtatactgagagtgatgtacacccgtcctgtaaggtaacggccatgaaatgctttcttctggagctccaggtcatcagcttggagtctggggacgcaagcatccacgatacggttgaaaacctcatcatccttgcgaacaactctctctcatctaatggaaacgttacagagagtgggtgtaaggagtgcgaagagttggaagaaaaaaacatcaaagaatttcttcaatccttcgttcacatagtgcaaatgttcattaacacgtccactaccacacccgccccgaggccacctacgccggcaccgactatcgccagtcaacccctctctctgcgccccgaggcttgccggcctgcggctggtggggcggtccacacccggggcctggattttgcgtgcgatatatacatctgggcacctcttgccggcacctgcggagtgctgcttctctcactcgttattacgctgtactgctaa

SEQ ID NO: 2377 - DNA, 2157 bp, synthetic construct
  misc_feature 1..2157: note = Synthetic
  source 1..2157: mol_type = other DNA
atggccttaccagtgaccgccttgctcctgccgctggccttgctgctccacgccgccaggccggatatccagatgacacagtcccctagctctctgtctgcttctgttggagatagagtgaccatcacctgccgggccagccagggcatcagcaactggctggcctggtaccagcagaagcccgagaaggcccctaagagcctgatctacgccgctagctccctccagggcggcgtgccatctagattcagcggctcaggcagcggaaccgacttcaccctgaccatcagctccctgcaacctgaggattttgccacatactactgccagcaatacgacagctacccctacaccttcggccagggcaccaagctggaaatcaagggcagcaccagcggcagcggcaagcccggctccggagagggcagcaccaagggccaagtgcagctggtgcagagcggaacagaggtgaaaaagcctggcgccagcgtgaaggtgtcttgtaaaaccagcggttatacattcacctcctacgacattaactgggtgcggcaggccaccggccagggcctggaatggatgggctggatgaaccccatctccggcgacacaggcagcgcccagaagttccagggaagagtgaccatgaccagaaataccagcatcggcaccgcctacatggaactgagcagcctgcggagcgaggacaccgccgtgtactactgcgccagaggcggatactgtagcagtacatcttgctactactattacatggacgtgtggggcaagggcacaacagtgacagtcagcagcgcggccgcaattgaagttatgtatcctcctccttacctagacaatgagaagagcaatggaaccattatccatgtgaaagggaaacacctttgtccaagtcccctatttcccggaccttctaagcccttttgggtgctggtggtggttgggggagtcctggcttgctatagcttgctagtaacagtggcctttattattttctgggtgaggagtaagaggagcaggctcctgcacagtgactacatgaacatgactccccgccgccccgggcccacccgcaagcattaccagccctatgccccaccacgcgacttcgcagcctatcgctccagagtgaagttcagcaggagcgcagacgcccccgcgtaccagcagggccagaaccagctctataacgagctcaatctaggacgaagagaggagtacgatgttttggacaagagacgtggccgggaccctgagatggggggaaagccgagaaggaagaaccctcaggaaggcctgtacaatgaactgcagaaagataagatggcggaggcctacagtgagattgggatgaaaggcgagcgccggaggggcaaggggcacgatggcctttaccagggtctcagtacagccaccaaggacacctacgacgcccttcacatgcaggccctgccccctcgcggctctggcgagggaaggggttccctgcttacttgcggcgacgtcgaagagaatcccggtccgatggccctcccagtaactgccctccttttgcccctcgcactccttcttcatgccgctcgccccaactgggtcaacgtgattagcgatttgaagaaaatcgaggaccttatacagtctatgcatattgacgctacactgtatactgagagtgatgtacacccgtcctgtaaggtaacggccatgaaatgctttcttctggagctccaggtcatcagcttggagtctggggacgcaagcatccacgatacggttgaaaacctcatcatccttgcgaacaactctctctcatctaatggaaacgttacagagagtgggtgtaaggagtgcgaagagttggaagaaaaaaacatcaaagaatttcttcaatccttcgttcacatagtgcaaatgttcattaacacgtccactaccacacccgccccgaggccacctacgccggcaccgactatcgccagtcaacccctctctctgcgccccgaggcttgccggcctgcggctggtggggcggtccacacccggggcctggattttgcgtgcgatatatacatctgggcacctcttgccggcacctgcggagtgctgcttctctcactcgttattacgctgtactgctaa

SEQ ID NO: 2378 - DNA, 2157 bp, synthetic construct
  misc_feature 1..2157: note = Synthetic
  source 1..2157: mol_type = other DNA
atggccttaccagtgaccgccttgctcctgccgctggccttgctgctccacgccgccaggccggacatccagatgacacagagccctagcagcctgagcgcctctgtgggcgaccgggtgaccatcacctgcagagccagccagggcatcagcagctggctggcctggtaccagcagaagcccgagaaggcccctaagtccctgatctacgccgccagctccctccagggcggagtgccatctagattcagcggctctggatctggcacagacttcaccctgaccatcagctctctgcagcctgaggattttgccacatactactgccagcaatacgacagctacccctacacattcggccaaggcacaaagctggaaatcaagggcagcaccagcggcagcggcaagcccggctccggagagggcagcaccaagggccaagtgcagctggtgcagagcggcgccgaggtgaagaagcctggcgcttccgtgaaggtgtcctgtaaagcttctggatacaccttcacctcttatgatattaactgggtgcggcaggccaccggccagggcctggaatggatgggctggatgatccccaacagcggcgataccggctccgcccagaaattccagggaagagttaccatgacaagaaacaccagcatcagcaccgcctacatggaactgagcagcctgcggagcgaggacaccgctgtgtactactgcgccagaggcggctactgtaatagcacaagctgctactattactacatggacgtgtggggcaagggcaccacagtgacagtcagctccgcggccgcaattgaagttatgtatcctcctccttacctagacaatgagaagagcaatggaaccattatccatgtgaaagggaaacacctttgtccaagtcccctatttcccggaccttctaagcccttttgggtgctggtggtggttgggggagtcctggcttgctatagcttgctagtaacagtggcctttattattttctgggtgaggagtaagaggagcaggctcctgcacagtgactacatgaacatgactccccgccgccccgggcccacccgcaagcattaccagccctatgccccaccacgcgacttcgcagcctatcgctccagagtgaagttcagcaggagcgcagacgcccccgcgtaccagcagggccagaaccagctctataacgagctcaatctaggacgaagagaggagtacgatgttttggacaagagacgtggccgggaccctgagatggggggaaagccgagaaggaagaaccctcaggaaggcctgtacaatgaactgcagaaagataagatggcggaggcctacagtgagattgggatgaaaggcgagcgccggaggggcaaggggcacgatggcctttaccagggtctcagtacagccaccaaggacacctacgacgcccttcacatgcaggccctgccccctcgcggctctggcgagggaaggggttccctgcttacttgcggcgacgtcgaagagaatcccggtccgatggccctcccagtaactgccctccttttgcccctcgcactccttcttcatgccgctcgccccaactgggtcaacgtgattagcgatttgaagaaaatcgaggaccttatacagtctatgcatattgacgctacactgtatactgagagtgatgtacacccgtcctgtaaggtaacggccatgaaatgctttcttctggagctccaggtcatcagcttggagtctggggacgcaagcatccacgatacggttgaaaacctcatcatccttgcgaacaactctctctcatctaatggaaacgttacagagagtgggtgtaaggagtgcgaagagttggaagaaaaaaacatcaaagaatttcttcaatccttcgttcacatagtgcaaatgttcattaacacgtccactaccacacccgccccgaggccacctacgccggcaccgactatcgccagtcaacccctctctctgcgccccgaggcttgccggcctgcggctggtggggcggtccacacccggggcctggattttgcgtgcgatatatacatctgggcacctcttgccggcacctgcggagtgctgcttctctcactcgttattacgctgtactgctaa

SEQ ID NO: 2379 - DNA, 2160 bp, synthetic construct
  misc_feature 1..2160: note = Synthetic
  source 1..2160: mol_type = other DNA
atggccttaccagtgaccgccttgctcctgccgctggccttgctgctccacgccgccaggccggagatcgtgctgacccaaagccccggcaccctgagcctgagccctggcgagagagccaccctgtcttgtagagcctctcagagcgtttctagctcctacctggcctggtaccagcagaagcccggacaggcccctagactgctgatctacggcgccagcagcagagctacaggcatccccgatagattcagcgacagcggctcaggcacagacttcaccctgacaattagccggctggaacccgaggatttcgccgtgtactattgccagcactacggcagctctcctccaagaatcaccttcggccctggcaccaaggtggacatcaaaggcagcaccagcggcagcggcaagcccggctccggagagggcagcaccaagggcgaggtgcagctgctggaaagcggaggcggcctggtgcaacctggaggttctctgcggctgagctgcgccgctagcggcttcacatttagcagctacgtgatgaactgggtgcggcaggctcctggaaagggcctggaatgggtctccagcgtgtccggcagcggcaacaacagcttttacgccgatagcgtgaagggcagattcaccatcagccgggacaacagcaagaacaccctctacctgcagatgaattctctgagagccgaggacaccgccgtgtactactgcgccagcaggtcctcttcttacctgtactactactattacatggacgtgtggggcaaaggcacaacagtgaccgtctccagcgcggccgcaattgaagttatgtatcctcctccttacctagacaatgagaagagcaatggaaccattatccatgtgaaagggaaacacctttgtccaagtcccctatttcccggaccttctaagcccttttgggtgctggtggtggttgggggagtcctggcttgctatagcttgctagtaacagtggcctttattattttctgggtgaggagtaagaggagcaggctcctgcacagtgactacatgaacatgactccccgccgccccgggcccacccgcaagcattaccagccctatgccccaccacgcgacttcgcagcctatcgctccagagtgaagttcagcaggagcgcagacgcccccgcgtaccagcagggccagaaccagctctataacgagctcaatctaggacgaagagaggagtacgatgttttggacaagagacgtggccgggaccctgagatggggggaaagccgagaaggaagaaccctcaggaaggcctgtacaatgaactgcagaaagataagatggcggaggcctacagtgagattgggatgaaaggcgagcgccggaggggcaaggggcacgatggcctttaccagggtctcagtacagccaccaaggacacctacgacgcccttcacatgcaggccctgccccctcgcggctctggcgagggaaggggttccctgcttacttgcggcgacgtcgaagagaatcccggtccgatggccctcccagtaactgccctccttttgcccctcgcactccttcttcatgccgctcgccccaactgggtcaacgtgattagcgatttgaagaaaatcgaggaccttatacagtctatgcatattgacgctacactgtatactgagagtgatgtacacccgtcctgtaaggtaacggccatgaaatgctttcttctggagctccaggtcatcagcttggagtctggggacgcaagcatccacgatacggttgaaaacctcatcatccttgcgaacaactctctctcatctaatggaaacgttacagagagtgggtgtaaggagtgcgaagagttggaagaaaaaaacatcaaagaatttcttcaatccttcgttcacatagtgcaaatgttcattaacacgtccactaccacacccgccccgaggccacctacgccggcaccgactatcgccagtcaacccctctctctgcgccccgaggcttgccggcctgcggctggtggggcggtccacacccggggcctggattttgcgtgcgatatatacatctgggcacctcttgccggcacctgcggagtgctgcttctctcactcgttattacgctgtactgctaa

SEQ ID NO: 2380 - protein, 221 aa, synthetic construct
  REGION 1..221: note = Synthetic
AAATTTPAPRPPTPAPTIASQPLSLRPEACRPAAGGAVHTRGLDFACDIYIWAPLAGTCGVLLLSLVITLYCRRDQRLPPDAHKPPGGGSFRTPIQEEQADAHSTLAKIRVKFSRSADAPAYQQGQNQLYNELNLGRREEYDVLDKRRGRDPEMGGKPRRKNPQEGLYNELQKDKMAEAYSEIGMKGERRRGKGHDGLYQGLSTATKDTYDALHMQALPPR

SEQ ID NO: 2381 - DNA, 663 bp, synthetic construct
  misc_feature 1..663: note = Synthetic
  source 1..663: mol_type = other DNA
gcggccgcaaccacgacgccagcgccgcggccaccaacaccggcgcccaccatcgcgtcgcagcccctgtccctgcgcccagaggcgtgccggccagcggcggggggcgcagtgcacacgagggggctggacttcgcctgtgatatctacatctgggcgcccttggccgggacttgtggggtccttctcctgtcactggttatcaccctttactgccggagggaccagaggctgccccccgatgcccacaagccccctgggggaggcagtttccggacccccatccaagaggagcaggccgacgcccactccaccctggccaagatcagagtgaagttcagcaggagcgcagacgcccccgcgtaccagcagggccagaaccagctctataacgagctcaatctaggacgaagagaggagtacgatgttttggacaagagacgtggccgggaccctgagatggggggaaagccgagaaggaagaaccctcaggaaggcctgtacaatgaactgcagaaagataagatggcggaggcctacagtgagattgggatgaaaggcgagcgccggaggggcaaggggcacgatggcctttaccagggtctcagtacagccaccaaggacacctacgacgcccttcacatgcaggccctgccccctcgc

SEQ ID NO: 2382 - protein, 222 aa, synthetic construct
  REGION 1..222: note = Synthetic
AAAIEVMYPPPYLDNEKSNGTIIHVKGKHLCPSPLFPGPSKPFWVLVVVGGVLACYSLLVTVAFIIFWVRSKRSRLLHSDYMNMTPRRPGPTRKHYQPYAPPRDFAAYRSRVKFSRSADAPAYQQGQNQLYNELNLGRREEYDVLDKRRGRDPEMGGKPRRKNPQEGLYNELQKDKMAEAYSEIGMKGERRRGKGHDGLYQGLSTATKDTYDALHMQALPPR

SEQ ID NO: 2383 - DNA, 666 bp, synthetic construct
  misc_feature 1..666: note = Synthetic
  source 1..666: mol_type = other DNA
gcggccgcaattgaagttatgtatcctcctccttacctagacaatgagaagagcaatggaaccattatccatgtgaaagggaaacacctttgtccaagtcccctatttcccggaccttctaagcccttttgggtgctggtggtggttgggggagtcctggcttgctatagcttgctagtaacagtggcctttattattttctgggtgaggagtaagaggagcaggctcctgcacagtgactacatgaacatgactccccgccgccccgggcccacccgcaagcattaccagccctatgccccaccacgcgacttcgcagcctatcgctccagagtgaagttcagcaggagcgcagacgcccccgcgtaccagcagggccagaaccagctctataacgagctcaatctaggacgaagagaggagtacgatgttttggacaagagacgtggccgggaccctgagatggggggaaagccgagaaggaagaaccctcaggaaggcctgtacaatgaactgcagaaagataagatggcggaggcctacagtgagattgggatgaaaggcgagcgccggaggggcaaggggcacgatggcctttaccagggtctcagtacagccaccaaggacacctacgacgcccttcacatgcaggccctgccccctcgc

SEQ ID NO: 2384 - protein, 446 aa, synthetic construct
  REGION 1..446: note = Synthetic
AAATTTPAPRPPTPAPTIASQPLSLRPEACRPAAGGAVHTRGLDFACDIYIWAPLAGTCGVLLLSLVITLYCRRDQRLPPDAHKPPGGGSFRTPIQEEQADAHSTLAKIRVKFSRSADAPAYQQGQNQLYNELNLGRREEYDVLDKRRGRDPEMGGKPRRKNPQEGLYNELQKDKMAEAYSEIGMKGERRRGKGHDGLYQGLSTATKDTYDALHMQALPPRGSGEGRGSLLTCGDVEENPGPMALPVTALLLPLALLLHAARPNWVNVISDLKKIEDLIQSMHIDATLYTESDVHPSCKVTAMKCFLLELQVISLESGDASIHDTVENLIILANNSLSSNGNVTESGCKECEELEEKNIKEFLQSFVHIVQMFINTSTTTPAPRPPTPAPTIASQPLSLRPEACRPAAGGAVHTRGLDFACDIYIWAPLAGTCGVLLLSLVITLYC

SEQ ID NO: 2385 - DNA, 1341 bp, synthetic construct
  misc_feature 1..1341: note = Synthetic
  source 1..1341: mol_type = other DNA
gcggccgcaaccacgacgccagcgccgcggccaccaacaccggcgcccaccatcgcgtcgcagcccctgtccctgcgcccagaggcgtgccggccagcggcggggggcgcagtgcacacgagggggctggacttcgcctgtgatatctacatctgggcgcccttggccgggacttgtggggtccttctcctgtcactggttatcaccctttactgccggagggaccagaggctgccccccgatgcccacaagccccctgggggaggcagtttccggacccccatccaagaggagcaggccgacgcccactccaccctggccaagatcagagtgaagttcagcaggagcgcagacgcccccgcgtaccagcagggccagaaccagctctataacgagctcaatctaggacgaagagaggagtacgatgttttggacaagagacgtggccgggaccctgagatggggggaaagccgagaaggaagaaccctcaggaaggcctgtacaatgaactgcagaaagataagatggcggaggcctacagtgagattgggatgaaaggcgagcgccggaggggcaaggggcacgatggcctttaccagggtctcagtacagccaccaaggacacctacgacgcccttcacatgcaggccctgccccctcgcggctctggcgagggaaggggttccctgcttacttgcggcgacgtcgaagagaatcccggtccgatggccctcccagtaactgccctccttttgcccctcgcactccttcttcatgccgctcgccccaactgggtcaacgtgattagcgatttgaagaaaatcgaggaccttatacagtctatgcatattgacgctacactgtatactgagagtgatgtacacccgtcctgtaaggtaacggccatgaaatgctttcttctggagctccaggtcatcagcttggagtctggggacgcaagcatccacgatacggttgaaaacctcatcatccttgcgaacaactctctctcatctaatggaaacgttacagagagtgggtgtaaggagtgcgaagagttggaagaaaaaaacatcaaagaatttcttcaatccttcgttcacatagtgcaaatgttcattaacacgtccactaccacacccgccccgaggccacctacgccggcaccgactatcgccagtcaacccctctctctgcgccccgaggcttgccggcctgcggctggtggggcggtccacacccggggcctggattttgcgtgcgatatatacatctgggcacctcttgccggcacctgcggagtgctgcttctctcactcgttattacgctgtactgctaa

SEQ ID NO: 2386 - protein, 447 aa, synthetic construct
  REGION 1..447: note = Synthetic
AAAIEVMYPPPYLDNEKSNGTIIHVKGKHLCPSPLFPGPSKPFWVLVVVGGVLACYSLLVTVAFIIFWVRSKRSRLLHSDYMNMTPRRPGPTRKHYQPYAPPRDFAAYRSRVKFSRSADAPAYQQGQNQLYNELNLGRREEYDVLDKRRGRDPEMGGKPRRKNPQEGLYNELQKDKMAEAYSEIGMKGERRRGKGHDGLYQGLSTATKDTYDALHMQALPPRGSGEGRGSLLTCGDVEENPGPMALPVTALLLPLALLLHAARPNWVNVISDLKKIEDLIQSMHIDATLYTESDVHPSCKVTAMKCFLLELQVISLESGDASIHDTVENLIILANNSLSSNGNVTESGCKECEELEEKNIKEFLQSFVHIVQMFINTSTTTPAPRPPTPAPTIASQPLSLRPEACRPAAGGAVHTRGLDFACDIYIWAPLAGTCGVLLLSLVITLYC

SEQ ID NO: 2387 - DNA, 1344 bp, synthetic construct
  misc_feature 1..1344: note = Synthetic
  source 1..1344: mol_type = other DNA
gcggccgcaattgaagttatgtatcctcctccttacctagacaatgagaagagcaatggaaccattatccatgtgaaagggaaacacctttgtccaagtcccctatttcccggaccttctaagcccttttgggtgctggtggtggttgggggagtcctggcttgctatagcttgctagtaacagtggcctttattattttctgggtgaggagtaagaggagcaggctcctgcacagtgactacatgaacatgactccccgccgccccgggcccacccgcaagcattaccagccctatgccccaccacgcgacttcgcagcctatcgctccagagtgaagttcagcaggagcgcagacgcccccgcgtaccagcagggccagaaccagctctataacgagctcaatctaggacgaagagaggagtacgatgttttggacaagagacgtggccgggaccctgagatggggggaaagccgagaaggaagaaccctcaggaaggcctgtacaatgaactgcagaaagataagatggcggaggcctacagtgagattgggatgaaaggcgagcgccggaggggcaaggggcacgatggcctttaccagggtctcagtacagccaccaaggacacctacgacgcccttcacatgcaggccctgccccctcgcggctctggcgagggaaggggttccctgcttacttgcggcgacgtcgaagagaatcccggtccgatggccctcccagtaactgccctccttttgcccctcgcactccttcttcatgccgctcgccccaactgggtcaacgtgattagcgatttgaagaaaatcgaggaccttatacagtctatgcatattgacgctacactgtatactgagagtgatgtacacccgtcctgtaaggtaacggccatgaaatgctttcttctggagctccaggtcatcagcttggagtctggggacgcaagcatccacgatacggttgaaaacctcatcatccttgcgaacaactctctctcatctaatggaaacgttacagagagtgggtgtaaggagtgcgaagagttggaagaaaaaaacatcaaagaatttcttcaatccttcgttcacatagtgcaaatgttcattaacacgtccactaccacacccgccccgaggccacctacgccggcaccgactatcgccagtcaacccctctctctgcgccccgaggcttgccggcctgcggctggtggggcggtccacacccggggcctggattttgcgtgcgatatatacatctgggcacctcttgccggcacctgcggagtgctgcttctctcactcgttattacgctgtactgctaa

SEQ ID NO: 2388 - protein, 18 aa, synthetic construct
  REGION 1..18: note = Synthetic
GSTSGSGKPGSGEGSTKG

SEQ ID NO: 2389 - protein, 219 aa, synthetic construct
  REGION 1..219: note = Synthetic
IEVMYPPPYLDNEKSNGTIIHVKGKHLCPSPLFPGPSKPFWVLVVVGGVLACYSLLVTVAFIIFWVRSKRSRLLHSDYMNMTPRRPGPTRKHYQPYAPPRDFAAYRSRVKFSRSADAPAYQQGQNQLYNELNLGRREEYDVLDKRRGRDPEMGGKPRRKNPQEGLYNELQKDKMAEAYSEIGMKGERRRGKGHDGLYQGLSTATKDTYDALHMQALPPR

SEQ ID NO: 2390 - DNA, 54 bp, synthetic construct
  misc_feature 1..54: note = Synthetic
  source 1..54: mol_type = other DNA
ggcagcaccagcggcagcggcaagcccggctccggagagggcagcaccaagggc

SEQ ID NO: 2391 - DNA, 657 bp, synthetic construct
  misc_feature 1..657: note = Synthetic
  source 1..657: mol_type = other DNA
attgaagttatgtatcctcctccttacctagacaatgagaagagcaatggaaccattatccatgtgaaagggaaacacctttgtccaagtcccctatttcccggaccttctaagcccttttgggtgctggtggtggttgggggagtcctggcttgctatagcttgctagtaacagtggcctttattattttctgggtgaggagtaagaggagcaggctcctgcacagtgactacatgaacatgactccccgccgccccgggcccacccgcaagcattaccagccctatgccccaccacgcgacttcgcagcctatcgctccagagtgaagttcagcaggagcgcagacgcccccgcgtaccagcagggccagaaccagctctataacgagctcaatctaggacgaagagaggagtacgatgttttggacaagagacgtggccgggaccctgagatggggggaaagccgagaaggaagaaccctcaggaaggcctgtacaatgaactgcagaaagataagatggcggaggcctacagtgagattgggatgaaaggcgagcgccggaggggcaaggggcacgatggcctttaccagggtctcagtacagccaccaaggacacctacgacgcccttcacatgcaggccctgccccctcgc

SEQ ID NO: 2392 - protein, 8 aa, synthetic construct
  REGION 1..8: note = Synthetic
DYKDDDDK

SEQ ID NO: 2393 - protein, 494 aa, synthetic construct
  REGION 1..494: note = Synthetic
MALPVTALLLPLALLLHAARPQVQLVESGGGVVQPGRSLRLSCAASGFTFNNYDMYWVRQAPGKGLEWVAVTWYDGSNKYYADSVKGRFTISRDNSKNTLYLQMNSLRAEDTAVYYCARGDNWNDEHHYFYYMDVWGKGTTVTVSSGGGGSGGGGSGGGGSEIVLTQSPDFQSVTPKEKVTITCRASQSIGSSLHWYQQKPDQSPKLLIKFASQSFSGVPSRFSGSGSGTDFTLTIHSLEAEDAATYYCHQSSSLPWTFGQGTKVEIKAAATTTPAPRPPTPAPTIASQPLSLRPEACRPAAGGAVHTRGLDFACDIYIWAPLAGTCGVLLLSLVITLYCKRGRKKLLYIFKQPFMRPVQTTQEEDGCSCRFPEEEEGGCELRVKFSRSADAPAYQQGQNQLYNELNLGRREEYDVLDKRRGRDPEMGGKPRRKNPQEGLYNELQKDKMAEAYSEIGMKGERRRGKGHDGLYQGLSTATKDTYDALHMQALPPR

SEQ ID NO: 2394 - protein, 494 aa, synthetic construct
  REGION 1..494: note = Synthetic
MALPVTALLLPLALLLHAARPQVQLVESGGGVVQPGRSLRLSCAASGFTFSNYDMHWVRQAPGKGLEWVTIIWHDASNKYYLDSVKGRFTISRDNSKNTLYLQMNSLRAEDTAVYYCARGDNWNDEHHYFYYMDVWGKGTTVTVSSGGGGSGGGGSGGGGSEIVLTQSPDFQSVTPKEKVTITCRASQSIGSSLHWYQQKPDQSPKLLIKFASQSFSGVPSRFSGSGSGTDFTLTIHSLEAEDAATYYCHQSSSLPWTFGQGTKVEIKAAATTTPAPRPPTPAPTIASQPLSLRPEACRPAAGGAVHTRGLDFACDIYIWAPLAGTCGVLLLSLVITLYCKRGRKKLLYIFKQPFMRPVQTTQEEDGCSCRFPEEEEGGCELRVKFSRSADAPAYQQGQNQLYNELNLGRREEYDVLDKRRGRDPEMGGKPRRKNPQEGLYNELQKDKMAEAYSEIGMKGERRRGKGHDGLYQGLSTATKDTYDALHMQALPPR

SEQ ID NO: 2395 - protein, 494 aa, synthetic construct
  REGION 1..494: note = Synthetic
MALPVTALLLPLALLLHAARPQVQLVESGGGVVQPGRSLRLSCAASGFTFSNYDMHWVRQAPGKGLEWVTIIWHDGSNKYYLDSVKGRFTISRDNSKNTLYLQMNSLRAEDTAVYYCARGDNWNDEHHYFYYMDVWGKGTTVTVSSGGGGSGGGGSGGGGSEIVLTQSPDFQSVTPKEKVTITCRASQSIGSSLHWYQQKPDQSPKLLIKFASQSFSGVPSRFSGSGSGTDFTLTIHSLEAEDAATYYCHQSSSLPWTFGQGTKVEIKAAATTTPAPRPPTPAPTIASQPLSLRPEACRPAAGGAVHTRGLDFACDIYIWAPLAGTCGVLLLSLVITLYCKRGRKKLLYIFKQPFMRPVQTTQEEDGCSCRFPEEEEGGCELRVKFSRSADAPAYQQGQNQLYNELNLGRREEYDVLDKRRGRDPEMGGKPRRKNPQEGLYNELQKDKMAEAYSEIGMKGERRRGKGHDGLYQGLSTATKDTYDALHMQALPPR

SEQ ID NO: 2396 - protein, 488 aa, synthetic construct
  REGION 1..488: note = Synthetic
MALPVTALLLPLALLLHAARPEVQLLESGGGLVQPGGSLRLSCAASGFTFSIYAMSWVRQAPGKGLEWVSAISGGGDTTYYADSVKGRFTISRDNSKTTLDLQMNSLRAEDTAVYYCAKHTSYYMDVWGKGTTVTVSSGGGGSGGGGSGGGGSQTVVTQEPSLSVSPGGTVTLTCGLSSGSVSTSYYPSWYQQTPGQAPRTLIYSTNIRSSGVPDRFSGSILGNKAALTITGAQADDESDYYCKLYMGSGIIFGSGTKVTVLAAATTTPAPRPPTPAPTIASQPLSLRPEACRPAAGGAVHTRGLDFACDIYIWAPLAGTCGVLLLSLVITLYCKRGRKKLLYIFKQPFMRPVQTTQEEDGCSCRFPEEEEGGCELRVKFSRSADAPAYQQGQNQLYNELNLGRREEYDVLDKRRGRDPEMGGKPRRKNPQEGLYNELQKDKMAEAYSEIGMKGERRRGKGHDGLYQGLSTATKDTYDALHMQALPPR

SEQ ID NO: 2397 - protein, 494 aa, synthetic construct
  REGION 1..494: note = Synthetic
MALPVTALLLPLALLLHAARPQVQLVESGGGVVQPGRSLRLSCAASGFTFSNYDKHWVRQAPGKGLEWVAVIWYDGSNKYYADSVKGRFTISRDNSKNTLYLQMNSLRAEDTAMYYCARGDNWNDEHHYFYYMDVWGKGTTVTVSSGGGGSGGGGSGGGGSEIVLTQSPDFQSVTPKEKVTITCRASQSIGSSLHWYQQKPDQSPKLLIKFASQSFSGVPSRFSGSGSGTDFTLTIHSLEAEDAATYYCHQSSSLPWTFGQGTKVEIKAAATTTPAPRPPTPAPTIASQPLSLRPEACRPAAGGAVHTRGLDFACDIYIWAPLAGTCGVLLLSLVITLYCKRGRKKLLYIFKQPFMRPVQTTQEEDGCSCRFPEEEEGGCELRVKFSRSADAPAYQQGQNQLYNELNLGRREEYDVLDKRRGRDPEMGGKPRRKNPQEGLYNELQKDKMAEAYSEIGMKGERRRGKGHDGLYQGLSTATKDTYDALHMQALPPR

SEQ ID NO: 2398 - protein, 492 aa, synthetic construct
  REGION 1..492: note = Synthetic
MALPVTALLLPLALLLHAARPQVQLVQSGAEVKKPGASVKVSCKASGYTFTNYGFSWVRQAPGQGLDWMGWISAYNGYTNYTQKLQGRVTMTTDTSTTTAYMELRSLRSDDTAVYYCARRGLLYYYYSMDVWGKGTTVTVSSGGGGSGGGGSGGGGSEIVLTQSPATLSLSPGERATLSCGASQSVYNSYLAWYQQKPGLAPRLLIYDASLRATGVPDRFSGSGSGTDFTLTISTLEPEDFAVYYCQQYGGSPMYTFGQGTKLEIKAAATTTPAPRPPTPAPTIASQPLSLRPEACRPAAGGAVHTRGLDFACDIYIWAPLAGTCGVLLLSLVITLYCKRGRKKLLYIFKQPFMRPVQTTQEEDGCSCRFPEEEEGGCELRVKFSRSADAPAYQQGQNQLYNELNLGRREEYDVLDKRRGRDPEMGGKPRRKNPQEGLYNELQKDKMAEAYSEIGMKGERRRGKGHDGLYQGLSTATKDTYDALHMQALPPR

SEQ ID NO: 2399 - protein, 488 aa, synthetic construct
  REGION 1..488: note = Synthetic
MALPVTALLLPLALLLHAARPEVQLLESGGGLVQPGGSLRLSCTASGFTFSSFAMSWVRQAPGKGLEWVSAMSGSGDTTYYADSVKGRFTISRDNSKTTLYLQMNSLRAEDTAVYSCAKHTTYYMDVWGKGTTVTVSSGGGGSGGGGSGGGGSQTVVTQEPSLSVSPGGTVTLTCGLSSGSVSTSDYPSWYQQTPGQAPRTLIYRTNTRSSGVPDRFSGSILGNKAALTITGAQADDESDYYCVLYMDSGIIFGSGTKVTVLAAATTTPAPRPPTPAPTIASQPLSLRPEACRPAAGGAVHTRGLDFACDIYIWAPLAGTCGVLLLSLVITLYCKRGRKKLLYIFKQPFMRPVQTTQEEDGCSCRFPEEEEGGCELRVKFSRSADAPAYQQGQNQLYNELNLGRREEYDVLDKRRGRDPEMGGKPRRKNPQEGLYNELQKDKMAEAYSEIGMKGERRRGKGHDGLYQGLSTATKDTYDALHMQALPPR

SEQ ID NO: 2400 - protein, 488 aa, synthetic construct
  REGION 1..488: note = Synthetic
MALPVTALLLPLALLLHAARPEVQLLESGGGLVQPGGSLRLSCAASGFTFNTYAMSWVRQAPGKGLEWVSAMSGSGDTTYYADSVKGRFTISRDNSKTTLYLQMNSLRAEDTAVYSCAKHTSYYMDVWGKGTTVTVSSGGGGSGGGGSGGGGSQTVVTQEPSLSVSPGGTVTLTCGLSSGSVSTSDYPSWYQQTPGQAPRTLIYRTNTRSSGVPDRFSGSILGNKAALTITGAQADDESDYYCVLYMGSGIIFGSGTKVTVLAAATTTPAPRPPTPAPTIASQPLSLRPEACRPAAGGAVHTRGLDFACDIYIWAPLAGTCGVLLLSLVITLYCKRGRKKLLYIFKQPFMRPVQTTQEEDGCSCRFPEEEEGGCELRVKFSRSADAPAYQQGQNQLYNELNLGRREEYDVLDKRRGRDPEMGGKPRRKNPQEGLYNELQKDKMAEAYSEIGMKGERRRGKGHDGLYQGLSTATKDTYDALHMQALPPR

SEQ ID NO: 2401 - protein, 488 aa, synthetic construct
  REGION 1..488: note = Synthetic
MALPVTALLLPLALLLHAARPEVQLLESGGDLVQPGGSLRLSCAASGFTFSTYAMSWVRQAPGKGLEWVSAISGSGENIYYADSVKGRFTISRDNSKNTLFLQMNSLRAEDTAVYYCAKHTSYYMDVWGKGTTVTVSSGGGGSGGGGSGGGGSQTVVTQEPSFSVSPGGTVTLTCGLYSDSVSTSYYPSWYQQTPGQAPRTLIYNTNTRSSGVPDRFSGSILGNKAALTITGAQADDESDYYCVLYMVSGIVFGSGTKVTVLAAATTTPAPRPPTPAPTIASQPLSLRPEACRPAAGGAVHTRGLDFACDIYIWAPLAGTCGVLLLSLVITLYCKRGRKKLLYIFKQPFMRPVQTTQEEDGCSCRFPEEEEGGCELRVKFSRSADAPAYQQGQNQLYNELNLGRREEYDVLDKRRGRDPEMGGKPRRKNPQEGLYNELQKDKMAEAYSEIGMKGERRRGKGHDGLYQGLSTATKDTYDALHMQALPPR

SEQ ID NO: 2402 - protein, 494 aa, synthetic construct
  REGION 1..494: note = Synthetic
MALPVTALLLPLALLLHAARPQVQLVESGGGVVQPGRSLRLSCAASGFTFSSYGMHWVRQAPGKGLEWVAVIWYDGINKYYADSVKGRFTISRDNSKNTLYLQMNSLRAEDTAVYYCARERLERRYYYYMDVWGKGTTVTVSSGGGGSGGGGSGGGGSQTVVTQEPSFSVSPGGTVTLTCGLSSGSVSTSYYPGWYQQTPGQAPRTLIYSTNTRSSGVPDRFSGSILGNKAALTITGAQADDESDYYCVLYMGSGMFIFGSGTKVTVLAAATTTPAPRPPTPAPTIASQPLSLRPEACRPAAGGAVHTRGLDFACDIYIWAPLAGTCGVLLLSLVITLYCKRGRKKLLYIFKQPFMRPVQTTQEEDGCSCRFPEEEEGGCELRVKFSRSADAPAYQQGQNQLYNELNLGRREEYDVLDKRRGRDPEMGGKPRRKNPQEGLYNELQKDKMAEAYSEIGMKGERRRGKGHDGLYQGLSTATKDTYDALHMQALPPR

SEQ ID NO: 2403 - protein, 488 aa, synthetic construct
  REGION 1..488: note = Synthetic
MALPVTALLLPLALLLHAARPEVQLLESGGGLVQPGGSLRLSCAASGFTFSSFAMSWVRQAPGKGLEWVSAVSGSGDDTYYADSVKGRFTISRDNSKNTLYLQMNSLRAEDTAVYYCAKHTSYYLDVWGKGTTVTVSSGGGGSGGGGSGGGGSQTVVTQEPSFSVSPGGTVTLTCALSSDSVSTSYFPSWYRQTPGQAPRTLIYNTNTRSSGVPDRFSGSILGNKAALTITGAQADDESDYYCVLYMGSGIIFGSGTKVTVLAAATTTPAPRPPTPAPTIASQPLSLRPEACRPAAGGAVHTRGLDFACDIYIWAPLAGTCGVLLLSLVITLYCKRGRKKLLYIFKQPFMRPVQTTQEEDGCSCRFPEEEEGGCELRVKFSRSADAPAYQQGQNQLYNELNLGRREEYDVLDKRRGRDPEMGGKPRRKNPQEGLYNELQKDKMAEAYSEIGMKGERRRGKGHDGLYQGLSTATKDTYDALHMQALPPR

SEQ ID NO: 2404 - protein, 494 aa, synthetic construct
  REGION 1..494: note = Synthetic
MALPVTALLLPLALLLHAARPQVQLVESGGGVVQPGRSLRLSCAASGFNFSTFDIHWVRQAPGKGLEWVALIWYDGSYKYYADSVKGRFTISRDNSKNTLDLRMNSLRAEDTAVYYCARNDNWNDEHYYHYYMDVWGKGTTVTVSSGGGGSGGGGSGGGGSEIVLTQSPDFQSVTPKEKVTITCRASQSIGSSLHWYQQKPDQSPKLLIKFASQSFSGVPSRFSGSGSGTDFTLTINSLEAEDAATYFCHQSSSLPWTFGQGTKVEIKAAATTTPAPRPPTPAPTIASQPLSLRPEACRPAAGGAVHTRGLDFACDIYIWAPLAGTCGVLLLSLVITLYCKRGRKKLLYIFKQPFMRPVQTTQEEDGCSCRFPEEEEGGCELRVKFSRSADAPAYQQGQNQLYNELNLGRREEYDVLDKRRGRDPEMGGKPRRKNPQEGLYNELQKDKMAEAYSEIGMKGERRRGKGHDGLYQGLSTATKDTYDALHMQALPPR

SEQ ID NO: 2405 - protein, 499 aa, synthetic construct
  REGION 1..499: note = Synthetic
MALPVTALLLPLALLLHAARPEVHLLESGGGLVQPGGSLRLSCAASGFTFSSYAMNWVRQAPGKGLEWVSSISGSGSSSYYADSVKGRFTISRDNSKNTLYLQMNSLRAEDTAVYYCASRGFNSQYPPGYYYYYMDVWGKGTTVTVSSGGGGSGGGGSGGGGSQTVVTQEPSFSVSPGGTVTLTCGLSSGSVSTSYFPSWYQQTPGQAPRTLIYITNTRSSGVPDRFSGSIIGNKAALTITGAQADDESDYFCVLYMGSGTWVFGGGTKLTVLAAATTTPAPRPPTPAPTIASQPLSLRPEACRPAAGGAVHTRGLDFACDIYIWAPLAGTCGVLLLSLVITLYCKRGRKKLLYIFKQPFMRPVQTTQEEDGCSCRFPEEEEGGCELRVKFSRSADAPAYQQGQNQLYNELNLGRREEYDVLDKRRGRDPEMGGKPRRKNPQEGLYNELQKDKMAEAYSEIGMKGERRRGKGHDGLYQGLSTATKDTYDALHMQALPPR

SEQ ID NO: 2406 - protein, 486 aa, synthetic construct
  REGION 1..486: note = Synthetic
MALPVTALLLPLALLLHAARPEVQLLESGGGLVQPGGSLRLSCAASGFTFSNYAMTWVRQAPGKGLEWVSAISGSGIGTYYADSVQGRFTTSRDNSKNTLYLQMNSLRAEDTAVYYCAKGGYNWKDVWGKGTTVTVSSGGGGSGGGGSGGGGSEIVLTQSPDFQSVTPKEKVTITCRASQSIGSSLHWYQQKPDQSPKLLIKFASQSFSGVPSRFSGSGSGTDFTLTIHSLEAEDAATYYCHQSSSLPWTFGQGTKVEIKAAATTTPAPRPPTPAPTIASQPLSLRPEACRPAAGGAVHTRGLDFACDIYIWAPLAGTCGVLLLSLVITLYCKRGRKKLLYIFKQPFMRPVQTTQEEDGCSCRFPEEEEGGCELRVKFSRSADAPAYQQGQNQLYNELNLGRREEYDVLDKRRGRDPEMGGKPRRKNPQEGLYNELQKDKMAEAYSEIGMKGERRRGKGHDGLYQGLSTATKDTYDALHMQALPPR

SEQ ID NO: 2407 - protein, 494 aa, synthetic construct
  REGION 1..494: note = Synthetic
MALPVTALLLPLALLLHAARPQVQLVESGGGVVQPGRSLRLSCAASGFTFTNYDMHWVRQAPGKGLEWVTIIWHDGSNKYYLDSVRGRFTISRDNSKNTLYLQMNSLRAEDTAVYYCARGDNWNDEHHYFYYMDVWGKGTTVTVSSGGGGSGGGGSGGGGSEIVLTQSPDFQSVTPKEKVTITCRASQSIGSSLHWYQQKPDQSPKLLIKFASQSFSGVPSRFSGSGSGTDFTLTIHSLEAEDAATYYCHQSSSLPWTFGQGTKVEIKAAATTTPAPRPPTPAPTIASQPLSLRPEACRPAAGGAVHTRGLDFACDIYIWAPLAGTCGVLLLSLVITLYCKRGRKKLLYIFKQPFMRPVQTTQEEDGCSCRFPEEEEGGCELRVKFSRSADAPAYQQGQNQLYNELNLGRREEYDVLDKRRGRDPEMGGKPRRKNPQEGLYNELQKDKMAEAYSEIGMKGERRRGKGHDGLYQGLSTATKDTYDALHMQALPPR

SEQ ID NO: 2408 - protein, 494 aa, synthetic construct
  REGION 1..494: note = Synthetic
MALPVTALLLPLALLLHAARPQVQLVESGGGVVQPGRSLRLSCAASGFTFSNYDMHWVRQAPGKGLEWVTIIWHDGSNKYYLDSVKGRFTISRDNSKNTLYLQMNSLRAEDTAVYYCARGDNWNDEHHYFYYMDVWGKGTTVTVSSGGGGSGGGGSGGGGSEIVLTQSPATLSLSPGERATLSCRASQSVSSSLAWYQQKPGQAPRLLIYDASNRATGIPARFSGSGSGTDFTLTISSLEPEDFAVYYCQQRSNWPLTFGGGTKVEIKAAATTTPAPRPPTPAPTIASQPLSLRPEACRPAAGGAVHTRGLDFACDIYIWAPLAGTCGVLLLSLVITLYCKRGRKKLLYIFKQPFMRPVQTTQEEDGCSCRFPEEEEGGCELRVKFSRSADAPAYQQGQNQLYNELNLGRREEYDVLDKRRGRDPEMGGKPRRKNPQEGLYNELQKDKMAEAYSEIGMKGERRRGKGHDGLYQGLSTATKDTYDALHMQALPPR

SEQ ID NO: 2409 - protein, 490 aa, synthetic construct
  REGION 1..490: note = Synthetic
MALPVTALLLPLALLLHAARPEVQLVESGGGVVRPGGSLRLSCAASGFTFDDYGMSWVRQAPGKGLEWVSGINWNGGSTGYVDSVKGRFTISRDNAKNSLYLQMNSLRAEDTALYHCARPVTTDYYYYMDVWGKGTTVTVSSGGGGSGGGGSGGGGSEIVLTQSPGTLSLSPGERATLSCRASQSVSSSYLAWYQQKPGQAPRLLIYGASSRATGIPDRFSGSGSGTDFTLTISRLEPEDFAVYYCQQYGSSWTFGQGTKVEIKAAATTTPAPRPPTPAPTIASQPLSLRPEACRPAAGGAVHTRGLDFACDIYIWAPLAGTCGVLLLSLVITLYCKRGRKKLLYIFKQPFMRPVQTTQEEDGCSCRFPEEEEGGCELRVKFSRSADAPAYQQGQNQLYNELNLGRREEYDVLDKRRGRDPEMGGKPRRKNPQEGLYNELQKDKMAEAYSEIGMKGERRRGKGHDGLYQGLSTATKDTYDALHMQALPPR

SEQ ID NO: 2410 - protein, 498 aa, synthetic construct
  REGION 1..498: note = Synthetic
MALPVTALLLPLALLLHAARPEVQLLESGGGLVQPGGSLRLSCAASGFTFSSYAMSWVRQAPGKGLEWVSAISGSGGSTYYADSVKGRFTISRDNSKNTLYLQMNSLRAEDTAVYYCAKKGTSYNWNDVHYYYYYYMDVWGKGTTVTVSSGGGGSGGGGSGGGGSEIVLTQSPGTLSLSPGERATLSCRASQSVSSSYLAWYQQKPGQAPRLLIYGASSRATGIPDRFSGSGSGTDFTLTISRLEPEDFAVYYCQQYGSSWTFGQGTKVEIKAAATTTPAPRPPTPAPTIASQPLSLRPEACRPAAGGAVHTRGLDFACDIYIWAPLAGTCGVLLLSLVITLYCKRGRKKLLYIFKQPFMRPVQTTQEEDGCSCRFPEEEEGGCELRVKFSRSADAPAYQQGQNQLYNELNLGRREEYDVLDKRRGRDPEMGGKPRRKNPQEGLYNELQKDKMAEAYSEIGMKGERRRGKGHDGLYQGLSTATKDTYDALHMQALPPR

SEQ ID NO: 2411 - protein, 492 aa, synthetic construct
  REGION 1..492: note = Synthetic
MALPVTALLLPLALLLHAARPQLQLQESGPGLVKPSETLSLTCTVSGGSISSSSYYWGWIRQPPGKGLEWIGSIYYSGSTYYNPSLKSRVTISVDTSKNQFSLKLSSVTAADTAVYYCTTGTTAYYYYYYMDVWGKGTTVTVSSGGGGSGGGGSGGGGSEIVLTQSPGTLSLSPGERATLSCRASQSVSSSYLAWYQQKPGQAPRLLIYGASSRATGIPDRFSGSGSGTDFTLTISRLEPEDFAVYYCQQYGSSWTFGQGTKVEIKAAATTTPAPRPPTPAPTIASQPLSLRPEACRPAAGGAVHTRGLDFACDIYIWAPLAGTCGVLLLSLVITLYCKRGRKKLLYIFKQPFMRPVQTTQEEDGCSCRFPEEEEGGCELRVKFSRSADAPAYQQGQNQLYNELNLGRREEYDVLDKRRGRDPEMGGKPRRKNPQEGLYNELQKDKMAEAYSEIGMKGERRRGKGHDGLYQGLSTATKDTYDALHMQALPPR

SEQ ID NO: 2412 - protein, 491 aa, synthetic construct
  REGION 1..491: note = Synthetic
MALPVTALLLPLALLLHAARPEVQLLESGGGLVQPGGSLRLSCAASGFTFSSYAMTWVRQAPGKGLEWVSAISGSGGSTYYADSVKGRFTISRDNSKNTLYLQMNSLRAEDTAVYYCARGGYNWHYYYYMDVWGKGTTVTVSSGGGGSGGGGSGGGGSEIVLTQSPGTLSLSPGERATLSCRASQSVSSSYLAWYQQKPGQAPRLLIYGASSRATGIPDRFSGSGSGTDFTLTISRLEPEDFAVYYCQQYGSSWTFGQGTKVEIKAAATTTPAPRPPTPAPTIASQPLSLRPEACRPAAGGAVHTRGLDFACDIYIWAPLAGTCGVLLLSLVITLYCKRGRKKLLYIFKQPFMRPVQTTQEEDGCSCRFPEEEEGGCELRVKFSRSADAPAYQQGQNQLYNELNLGRREEYDVLDKRRGRDPEMGGKPRRKNPQEGLYNELQKDKMAEAYSEIGMKGERRRGKGHDGLYQGLSTATKDTYDALHMQALPPR

SEQ ID NO: 2413 - protein, 495 aa, synthetic construct
  REGION 1..495: note = Synthetic
MALPVTALLLPLALLLHAARPQVQLVESGGGVVQPGRSLRLSCAASGFTFSSYDMHWVRQAPGKGLEWVSVIWYDGSNKKYGDSAKGRFTISRDNSKNTLDLQMNSLRAEDTAVYYCARGDNWNDEGGYYYYYMDVWGKGTTVTVSSGGGGSGGGGSGGGGSEIVLTQSPDFQSVTPKEKVTITCRASQNIGSSLHWYQQKPDQSPKLLIKFASQSISGVPSRFSGSGSGTDFTLTINSLEAEDAAAYYCHQSSSLPWTFGQGTKVEIKAAATTTPAPRPPTPAPTIASQPLSLRPEACRPAAGGAVHTRGLDFACDIYIWAPLAGTCGVLLLSLVITLYCKRGRKKLLYIFKQPFMRPVQTTQEEDGCSCRFPEEEEGGCELRVKFSRSADAPAYQQGQNQLYNELNLGRREEYDVLDKRRGRDPEMGGKPRRKNPQEGLYNELQKDKMAEAYSEIGMKGERRRGKGHDGLYQGLSTATKDTYDALHMQALPPR

SEQ ID NO: 2414 - protein, 495 aa, synthetic construct
  REGION 1..495: note = Synthetic
MALPVTALLLPLALLLHAARPQVQLVESGGGVVQPGRSLRLSCAASGFTFSSYDMHWVRQAPGKGLEWVSVIWYDGSNKKYGDSAKGRFTISRDNSKNTLDLQMNSLRAEDTAVYYCARGDNWNDEGGYYYYYMDVWGKGTTVTVSSGGGGSGGGGSGGGGSDIQMTQSPSSLSTSVGDRVTITCRASQGISNYLAWFQQKPGKAPKSLIYAASSLQSGVPSKFSGSGSGTDFSLTISSLQPEDFATYYCQQYNSYPITFGQGTRLEIKAAATTTPAPRPPTPAPTIASQPLSLRPEACRPAAGGAVHTRGLDFACDIYIWAPLAGTCGVLLLSLVITLYCKRGRKKLLYIFKQPFMRPVQTTQEEDGCSCRFPEEEEGGCELRVKFSRSADAPAYQQGQNQLYNELNLGRREEYDVLDKRRGRDPEMGGKPRRKNPQEGLYNELQKDKMAEAYSEIGMKGERRRGKGHDGLYQGLSTATKDTYDALHMQALPPR

SEQ ID NO: 2415 - protein, 492 aa, synthetic construct
  REGION 1..492: note = Synthetic
MALPVTALLLPLALLLHAARPQVQLVQSGAEVKKSGASVKVSCKASGYTLTSYGISWVRQAPGQGLEWMGWISAYNGNINYAQKFQGRVTMTTDTSTSTAYMELRSLRSDDTAVYYCVRDGDRYNWNHSYMDVWGKGTTVTVSSGGGGSGGGGSGGGGSEIVLTQSPDFQSVTPKEKVTITCRASQNIGSSLHWYQQKPDQSPKLLIKFASQSISGVPSRFSGSGSGTDFTLTINSLEAEDAAAYYCHQSSSLPWTFGQGTKVEIKAAATTTPAPRPPTPAPTIASQPLSLRPEACRPAAGGAVHTRGLDFACDIYIWAPLAGTCGVLLLSLVITLYCKRGRKKLLYIFKQPFMRPVQTTQEEDGCSCRFPEEEEGGCELRVKFSRSADAPAYQQGQNQLYNELNLGRREEYDVLDKRRGRDPEMGGKPRRKNPQEGLYNELQKDKMAEAYSEIGMKGERRRGKGHDGLYQGLSTATKDTYDALHMQALPPR

SEQ ID NO: 2416 - protein, 492 aa, synthetic construct
  REGION 1..492: note = Synthetic
MALPVTALLLPLALLLHAARPQVQLVQSGAEVKKSGASVKVSCKASGYTLTSYGISWVRQAPGQGLEWMGWISAYNGNINYAQKFQGRVTMTTDTSTSTAYMELRSLRSDDTAVYYCVRDGDRYNWNHSYMDVWGKGTTVTVSSGGGGSGGGGSGGGGSDIQMTQSPSSLSTSVGDRVTITCRASQGISNYLAWFQQKPGKAPKSLIYAASSLQSGVPSKFSGSGSGTDFSLTISSLQPEDFATYYCQQYNSYPITFGQGTRLEIKAAATTTPAPRPPTPAPTIASQPLSLRPEACRPAAGGAVHTRGLDFACDIYIWAPLAGTCGVLLLSLVITLYCKRGRKKLLYIFKQPFMRPVQTTQEEDGCSCRFPEEEEGGCELRVKFSRSADAPAYQQGQNQLYNELNLGRREEYDVLDKRRGRDPEMGGKPRRKNPQEGLYNELQKDKMAEAYSEIGMKGERRRGKGHDGLYQGLSTATKDTYDALHMQALPPR

SEQ ID NO: 2417 - protein, 491 aa, synthetic construct
  REGION 1..491: note = Synthetic
MALPVTALLLPLALLLHAARPEVQLLESGGDLVQPGGSLRLSCAASGFTFSTYAMTWVRQAPGKGLEWVSAISGTSGSTYYADSVKGRFTISRDNSKSTLYLHMNSLRTEDTAVYYCARGGYNWHYYYYMDVWGKGTTVTVSSGGGGSGGGGSGGGGSEIVLTQSPDFQSVTPKEKVTITCRASQSIGSSLHWYQQKPDQSPKLLIKYVSQSISGVPSRFSGSGSGTDFTLTINSLEAEDAAAYYCHQSSSLPWTFGQGTKVEIKAAATTTPAPRPPTPAPTIASQPLSLRPEACRPAAGGAVHTRGLDFACDIYIWAPLAGTCGVLLLSLVITLYCKRGRKKLLYIFKQPFMRPVQTTQEEDGCSCRFPEEEEGGCELRVKFSRSADAPAYQQGQNQLYNELNLGRREEYDVLDKRRGRDPEMGGKPRRKNPQEGLYNELQKDKMAEAYSEIGMKGERRRGKGHDGLYQGLSTATKDTYDALHMQALPPR

SEQ ID NO: 2418 - protein, 492 aa, synthetic construct
  REGION 1..492: note = Synthetic
MALPVTALLLPLALLLHAARPEVQLLESGGDLVQPGGSLRLSCAASGFTFSTYAMTWVRQAPGKGLEWVSAISGTSGSTYYADSVKGRFTISRDNSKSTLYLHMNSLRTEDTAVYYCARGGYNWHYYYYMDVWGKGTTVTVSSGGGGSGGGGSGGGGSEIVMTQSPATLSLSPGERATLSCRASQSVSSSYLSWYQQKPGLAPRLLIYGASTRATGIPARFSGSGSGTDFTLTISSLQPEDFAVYYCQQDYNLPPTFGQGTKVEIKAAATTTPAPRPPTPAPTIASQPLSLRPEACRPAAGGAVHTRGLDFACDIYIWAPLAGTCGVLLLSLVITLYCKRGRKKLLYIFKQPFMRPVQTTQEEDGCSCRFPEEEEGGCELRVKFSRSADAPAYQQGQNQLYNELNLGRREEYDVLDKRRGRDPEMGGKPRRKNPQEGLYNELQKDKMAEAYSEIGMKGERRRGKGHDGLYQGLSTATKDTYDALHMQALPPR

SEQ ID NO: 2419 - DNA, 1482 bp, synthetic construct
  misc_feature 1..1482: note = Synthetic
  source 1..1482: mol_type = other DNA
atggccttaccagtgaccgccttgctcctgccgctggccttgctgctccacgccgccaggccgcaggtgcagctggtggagtctgggggaggcgtggtccagcctgggaggtccctgagactctcctgtgcagcgtctggattcaccttcaataattatgacatgtactgggtccgccaggccccaggcaaggggctggagtgggtggcagttacatggtatgatggaagtaataaatactatgcagactccgtgaagggccgattcaccatctccagagacaattccaagaacacgctgtatctgcaaatgaacagcctgagagccgaggacacggctgtgtattactgtgcgagaggtgacaactggaatgacgaacaccactatttttactacatggacgtctggggcaaagggaccacggtcaccgtctcctcaggtggaggcggttcaggcggaggtggctctggcggtggcggatcggaaattgtgctgactcagtctccagactttcagtctgtgactccaaaggagaaagtcaccatcacctgccgggccagtcagagcattggtagtagcttacactggtaccagcagaaaccagatcagtctccaaagctcctcatcaagtttgcttcccagtccttctcaggggtcccctcgaggttcagtggcagtggatctgggacagatttcaccctcaccatccatagcctggaagctgaagatgctgcaacgtattactgtcatcagagtagtagtttaccgtggacgttcggccaagggaccaaggtggaaatcaaagcggccgcaaccacgacgccagcgccgcggccaccaacaccggcgcccaccatcgcgtcgcagcccctgtccctgcgcccagaggcgtgccggccagcggcggggggcgcagtgcacacgagggggctggacttcgcctgtgatatctacatctgggcgcccttggccgggacttgtggggtccttctcctgtcactggttatcaccctttactgcaaacggggcagaaagaaactcctgtatatattcaaacaaccatttatgagaccagtacaaactactcaagaggaagatggctgtagctgccgatttccagaagaagaagaaggaggatgtgaactgagagtgaagttcagcaggagcgcagacgcccccgcgtaccagcagggccagaaccagctctataacgagctcaatctaggacgaagagaggagtacgatgttttggacaagagacgtggccgggaccctgagatggggggaaagccgagaaggaagaaccctcaggaaggcctgtacaatgaactgcagaaagataagatggcggaggcctacagtgagattgggatgaaaggcgagcgccggaggggcaaggggcacgatggcctttaccagggtctcagtacagccaccaaggacacctacgacgcccttcacatgcaggccctgccccctcgc

SEQ ID NO: 2420 - DNA, 1482 bp, synthetic construct
  misc_feature 1..1482: note = Synthetic
  source 1..1482: mol_type = other DNA
atggccttaccagtgaccgccttgctcctgccgctggccttgctgctccacgccgccaggccgcaggtgcagctggtggagtctgggggaggcgtggtccagcctgggaggtccctgagactctcctgtgcagcgtctgggttcaccttcagtaactatgacatgcactgggtccgccaggccccaggcaaggggctggagtgggtgacaattatatggcatgatgcaagtaataaatattatttagactccgtgaagggccgattcaccatctccagagacaattccaagaacacgctgtatctgcaaatgaacagcctgagagccgaggacacggctgtgtattactgtgcgagaggtgacaactggaacgacgaacaccactacttctactacatggacgtctggggcaaagggaccacggtcaccgtctcctcaggtggaggcggttcaggcggaggtggctctggcggtggcggatcggaaattgtgctgactcagtctccagactttcagtctgtgactccaaaggagaaagtcaccatcacctgccgggccagtcagagcattggtagtagcttacactggtaccagcagaaaccagatcagtctccaaagctcctcatcaagtttgcttcccagtccttctcaggggtcccctcgaggttcagtggcagtggatctgggacagatttcaccctcaccatccatagcctggaagctgaagatgctgcaacgtattactgtcatcagagtagtagtttaccgtggacgttcggccaagggaccaaggtggaaatcaaagcggccgcaaccacgacgccagcgccgcggccaccaacaccggcgcccaccatcgcgtcgcagcccctgtccctgcgcccagaggcgtgccggccagcggcggggggcgcagtgcacacgagggggctggacttcgcctgtgatatctacatctgggcgcccttggccgggacttgtggggtccttctcctgtcactggttatcaccctttactgcaaacggggcagaaagaaactcctgtatatattcaaacaaccatttatgagaccagtacaaactactcaagaggaagatggctgtagctgccgatttccagaagaagaagaaggaggatgtgaactgagagtgaagttcagcaggagcgcagacgcccccgcgtaccagcagggccagaaccagctctataacgagctcaatctaggacgaagagaggagtacgatgttttggacaagagacgtggccgggaccctgagatggggggaaagccgagaaggaagaaccctcaggaaggcctgtacaatgaactgcagaaagataagatggcggaggcctacagtgagattgggatgaaaggcgagcgccggaggggcaaggggcacgatggcctttaccagggtctcagtacagccaccaaggacacctacgacgcccttcacatgcaggccctgccccctcgc

SEQ ID NO: 2421 - DNA, 1482 bp, synthetic construct
  misc_feature 1..1482: note = Synthetic
  source 1..1482: mol_type = other DNA
atggccttaccagtgaccgccttgctcctgccgctggccttgctgctccacgccgccaggccgcaggtgcagctggtggagtctgggggaggcgtggtccagcctgggaggtccctgagactctcctgtgcagcgtctgggttcaccttcagtaactatgacatgcactgggtccgccaggccccaggcaaggggctggagtgggtgacaattatatggcatgatggaagtaataaatattatttagactccgtgaagggccgattcaccatctccagagacaattccaagaacacgctgtatctgcaaatgaacagcctgagagccgaggacacggctgtgtattactgtgcgagaggtgacaactggaacgacgaacaccactacttctactacatggacgtctggggcaaagggaccacggtcaccgtctcctcaggtggaggcggttcaggcggaggtggctctggcggtggcggatcggaaattgtgctgactcagtctccagactttcagtctgtgactccaaaggagaaagtcaccatcacctgccgggccagtcagagcattggtagtagcttacactggtaccagcagaaaccagatcagtctccaaagctcctcatcaagtttgcttcccagtccttctcaggggtcccctcgaggttcagtggcagtggatctgggacagatttcaccctcaccatccatagcctggaagctgaagatgctgcaacgtattactgtcatcagagtagtagtttaccgtggacgttcggccaagggaccaaggtggaaatcaaagcggccgcaaccacgacgccagcgccgcggccaccaacaccggcgcccaccatcgcgtcgcagcccctgtccctgcgcccagaggcgtgccggccagcggcggggggcgcagtgcacacgagggggctggacttcgcctgtgatatctacatctgggcgcccttggccgggacttgtggggtccttctcctgtcactggttatcaccctttactgcaaacggggcagaaagaaactcctgtatatattcaaacaaccatttatgagaccagtacaaactactcaagaggaagatggctgtagctgccgatttccagaagaagaagaaggaggatgtgaactgagagtgaagttcagcaggagcgcagacgcccccgcgtaccagcagggccagaaccagctctataacgagctcaatctaggacgaagagaggagtacgatgttttggacaagagacgtggccgggaccctgagatggggggaaagccgagaaggaagaaccctcaggaaggcctgtacaatgaactgcagaaagataagatggcggaggcctacagtgagattgggatgaaaggcgagcgccggaggggcaaggggcacgatggcctttaccagggtctcagtacagccaccaaggacacctacgacgcccttcacatgcaggccctgccccctcgc

SEQ ID NO: 2422 - DNA, 1464 bp, synthetic construct
  misc_feature 1..1464: note = Synthetic
  source 1..1464: mol_type = other DNA
atggccttaccagtgaccgccttgctcctgccgctggccttgctgctccacgccgccaggccggaggtgcagctgctggagtctgggggaggcttggtacagcctggggggtccctgagactctcctgtgcagcctctggattcacctttagcatctatgccatgagctgggtccgccaggctccagggaaggggctggagtgggtctcagctattagtggtggtggtgataccacatactacgcagactccgtgaagggccggttcaccatctccagagacaattccaagaccacgctggatctgcaaatgaacagcctgagagccgaggacacggccgtatattactgtgcgaaacacactagctactacatggacgtctggggcaaagggaccacggtcaccgtctcctcaggtggaggcggttcaggcggaggtggctctggcggtggcggatcgcagactgtggtgacccaggagccatcgctctcagtgtcccctggagggacagtcacactcacttgtggcttgagctctggctcagtctctactagttactaccccagctggtaccagcagaccccaggccaggctccacgcacgctcatctacagcacaaatattcggtcttctggggtccctgatcgcttctctggctccatccttgggaacaaagctgccctcaccatcacgggggcccaggcagatgatgaatctgattattattgtaagctgtatatgggaagtggcattattttcggcagtggaaccaaggtcactgtcctagcggccgcaaccacgacgccagcgccgcggccaccaacaccggcgcccaccatcgcgtcgcagcccctgtccctgcgcccagaggcgtgccggccagcggcggggggcgcagtgcacacgagggggctggacttcgcctgtgatatctacatctgggcgcccttggccgggacttgtggggtccttctcctgtcactggttatcaccctttactgcaaacggggcagaaagaaactcctgtatatattcaaacaaccatttatgagaccagtacaaactactcaagaggaagatggctgtagctgccgatttccagaagaagaagaaggaggatgtgaactgagagtgaagttcagcaggagcgcagacgcccccgcgtaccagcagggccagaaccagctctataacgagctcaatctaggacgaagagaggagtacgatgttttggacaagagacgtggccgggaccctgagatggggggaaagccgagaaggaagaaccctcaggaaggcctgtacaatgaactgcagaaagataagatggcggaggcctacagtgagattgggatgaaaggcgagcgccggaggggcaaggggcacgatggcctttaccagggtctcagtacagccaccaaggacacctacgacgcccttcacatgcaggccctgccccctcgc

SEQ ID NO: 2423 - DNA, 1482 bp, synthetic construct
  misc_feature 1..1482: note = Synthetic
  source 1..1482: mol_type = other DNA
atggccttaccagtgaccgccttgctcctgccgctggccttgctgctccacgccgccaggccgcaggtgcagctggtggagtctgggggaggcgtggtccagcctgggaggtccctgagactctcctgtgcagcgtctggattcaccttcagtaactatgacaagcactgggtccgccaggccccaggcaaggggctggagtgggtggcagttatatggtatgatggaagtaataagtactatgcagactccgtgaagggccgattcaccatttccagagacaattccaagaacacgctgtatctacaaatgaacagcctgagagccgaggacacggctatgtattactgtgcgagaggtgacaactggaacgacgaacaccactacttctactacatggacgtctggggcaaagggaccacggtcaccgtctcctcaggtggaggcggttcaggcggaggtggctctggcggtggcggatcggaaattgtgctgactcagtctccagactttcagtctgtgactccaaaggagaaagtcaccatcacctgccgggccagtcagagcattggtagtagcttacactggtaccagcagaaaccagatcagtctccaaagctcctcatcaagtttgcttcccagtccttctcaggggtcccctcgaggttcagtggcagtggatctgggacagatttcaccctcaccatccatagcctggaagctgaagatgctgcaacgtattactgtcatcagagtagtagtttaccgtggacgttcggccaagggaccaaggtggaaatcaaagcggccgcaaccacgacgccagcgccgcggccaccaacaccggcgcccaccatcgcgtcgcagcccctgtccctgcgcccagaggcgtgccggccagcggcggggggcgcagtgcacacgagggggctggacttcgcctgtgatatctacatctgggcgcccttggccgggacttgtggggtccttctcctgtcactggttatcaccctttactgcaaacggggcagaaagaaactcctgtatatattcaaacaaccatttatgagaccagtacaaactactcaagaggaagatggctgtagctgccgatttccagaagaagaagaaggaggatgtgaactgagagtgaagttcagcaggagcgcagacgcccccgcgtaccagcagggccagaaccagctctataacgagctcaatctaggacgaagagaggagtacgatgttttggacaagagacgtggccgggaccctgagatggggggaaagccgagaaggaagaaccctcaggaaggcctgtacaatgaactgcagaaagataagatggcggaggcctacagtgagattgggatgaaaggcgagcgccggaggggcaaggggcacgatggcctttaccagggtctcagtacagccaccaaggacacctacgacgcccttcacatgcaggccctgccccctcgc

SEQ ID NO: 2424 - DNA, 1476 bp, synthetic construct
  misc_feature 1..1476: note = Synthetic
  source 1..1476: mol_type = other DNA
atggccttaccagtgaccgccttgctcctgccgctggccttgctgctccacgccgccaggccgcaggttcagttggtacagtctggagctgaggtgaagaagcctggggcctcagtgaaggtctcctgtaaggcttctggttacacctttaccaactatggtttcagctgggtgcgacaggcccctggacaagggcttgactggatgggatggatcagcgcttacaatggttacacaaattatacacagaaactccagggcagagtcaccatgaccactgacacatccacgaccacagcctacatggagctgaggagcctgagatctgacgacacggccgtctattactgtgcgagaagaggactactctactactactactccatggacgtctggggcaaagggaccacggtcaccgtctcctcaggtggaggcggttcaggcggaggtggctctggcggtggcggatcggaaattgtgttgacgcagtctccagccaccctgtctttgtctccaggggaaagagccaccctctcctgcggggccagtcagagtgtttacaacagttacttagcctggtaccagcagaaacctggcctggcgcccaggctcctcatctatgatgcatccctcagggccactggcgtcccagacaggttcagtggcagtgggtctgggacagacttcactctcaccatcagcacactggagcctgaagattttgcagtgtattactgtcagcagtatggtggctcacccatgtacacttttggccaggggaccaagctggagatcaaagcggccgcaaccacgacgccagcgccgcggccaccaacaccggcgcccaccatcgcgtcgcagcccctgtccctgcgcccagaggcgtgccggccagcggcggggggcgcagtgcacacgagggggctggacttcgcctgtgatatctacatctgggcgcccttggccgggacttgtggggtccttctcctgtcactggttatcaccctttactgcaaacggggcagaaagaaactcctgtatatattcaaacaaccatttatgagaccagtacaaactactcaagaggaagatggctgtagctgccgatttccagaagaagaagaaggaggatgtgaactgagagtgaagttcagcaggagcgcagacgcccccgcgtaccagcagggccagaaccagctctataacgagctcaatctaggacgaagagaggagtacgatgttttggacaagagacgtggccgggaccctgagatggggggaaagccgagaaggaagaaccctcaggaaggcctgtacaatgaactgcagaaagataagatggcggaggcctacagtgagattgggatgaaaggcgagcgccggaggggcaaggggcacgatggcctttaccagggtctcagtacagccaccaaggacacctacgacgcccttcacatgcaggccctgccccctcgc

SEQ ID NO: 2425 - DNA, 1464 bp, synthetic construct
  misc_feature 1..1464: note = Synthetic
  source 1..1464: mol_type = other DNA
atggccttaccagtgaccgccttgctcctgccgctggccttgctgctccacgccgccaggccggaggtgcagctgctggagtctgggggaggcctggtacagcctggggggtccctgagactctcctgtacagcctctggattcacctttagcagctttgccatgagctgggtccgccaggctccagggaaggggctggagtgggtctcagctatgagtggtagtggtgataccacatactacgcagactccgtgaagggccggttcaccatctcccgagacaattccaagaccacgctgtatctgcaaatgaacagcctgagagccgaggacacggccgtatattcctgtgcgaagcacactacctactacatggacgtctggggcaaagggaccacggtcaccgtctcctcaggtggaggcggttcaggcggaggtggctctggcggtggcggatcgcagactgtggtgacccaggagccatcgctctcagtgtcccctggagggacagtcacactcacttgtggcttgagctctggctcagtctctactagtgactaccccagctggtaccagcagaccccaggccaggctccacgcacgctcatctacagaacaaacactcgctcttctggggtccctgatcgcttctctggctccatccttgggaacaaagctgccctcaccatcacgggggcccaggcagatgatgaatctgattattactgtgtgctgtatatggatagtggcattattttcggcagtggaaccaaggtcactgtcctagcggccgcaaccacgacgccagcgccgcggccaccaacaccggcgcccaccatcgcgtcgcagcccctgtccctgcgcccagaggcgtgccggccagcggcggggggcgcagtgcacacgagggggctggacttcgcctgtgatatctacatctgggcgcccttggccgggacttgtggggtccttctcctgtcactggttatcaccctttactgcaaacggggcagaaagaaactcctgtatatattcaaacaaccatttatgagaccagtacaaactactcaagaggaagatggctgtagctgccgatttccagaagaagaagaaggaggatgtgaactgagagtgaagttcagcaggagcgcagacgcccccgcgtaccagcagggccagaaccagctctataacgagctcaatctaggacgaagagaggagtacgatgttttggacaagagacgtggccgggaccctgagatggggggaaagccgagaaggaagaaccctcaggaaggcctgtacaatgaactgcagaaagataagatggcggaggcctacagtgagattgggatgaaaggcgagcgccggaggggcaaggggcacgatggcctttaccagggtctcagtacagccaccaaggacacctacgacgcccttcacatgcaggccctgccccctcgc

SEQ ID NO: 2426 - DNA, 1464 bp, synthetic construct
  misc_feature 1..1464: note = Synthetic
  source 1..1464: mol_type = other DNA
atggccttaccagtgaccgccttgctcctgccgctggccttgctgctccacgccgccaggccggaggtgcagctgctggagtctgggggaggcttggtacagcctggggggtccctgagactctcctgtgcagcctctggattcacctttaacacctatgccatgagctgggtccgccaggctccagggaaggggctggagtgggtctcagctatgagtggtagtggtgataccacatactacgcagactccgtgaagggccggttcaccatctccagagacaattccaagaccactctgtatctgcaaatgaacagcctgagagccgaggacacggccgtatattcctgtgcgaaacacacttcctactacatggacgtctggggcaaagggaccacggtcaccgtctcctcaggtggaggcggttcaggcggaggtggctctggcggtggcggatcgcagactgtggtgacccaggagccatcgctctcagtgtcccctggagggacagtcacactcacttgtggcttgagctctggctcagtctctactagtgactaccccagttggtaccagcagaccccaggccaggctccacgcacgctcatctacagaacaaacactcgctcttctggggtccctgatcgcttctctggctccatccttgggaacaaagctgccctcaccatcacgggggcccaggcagatgatgaatctgattattactgtgtgctgtatatgggtagtggcattattttcggcagtggaaccaaggtcactgtcctagcggccgcaaccacgacgccagcgccgcggccaccaacaccggcgcccaccatcgcgtcgcagcccctgtccctgcgcccagaggcgtgccggccagcggcggggggcgcagtgcacacgagggggctggacttcgcctgtgatatctacatctgggcgcccttggccgggacttgtggggtccttctcctgtcactggttatcaccctttactgcaaacggggcagaaagaaactcctgtatatattcaaacaaccatttatgagaccagtacaaactactcaagaggaagatggctgtagctgccgatttccagaagaagaagaaggaggatgtgaactgagagtgaagttcagcaggagcgcagacgcccccgcgtaccagcagggccagaaccagctctataacgagctcaatctaggacgaagagaggagtacgatgttttggacaagagacgtggccgggaccctgagatggggggaaagccgagaaggaagaaccctcaggaaggcctgtacaatgaactgcagaaagataagatggcggaggcctacagtgagattgggatgaaaggcgagcgccggaggggcaaggggcacgatggcctttaccagggtctcagtacagccaccaaggacacctacgacgcccttcacatgcaggccctgccccctcgc

SEQ ID NO: 2427 - DNA, 1464 bp, synthetic construct
  misc_feature 1..1464: note = Synthetic
  source 1..1464: mol_type = other DNA
atggccttaccagtgaccgccttgctcctgccgctggccttgctgctccacgccgccaggccggaggtccaattattggagtctgggggagacttggtacagcctggggggtccctgagactctcctgtgcagcctctggattcacctttagcacctatgccatgagctgggtccgccaggctccagggaaggggctggaatgggtctcagctattagtggtagtggtgaaaacatatactacgcagactccgtgaagggccggttcaccatctccagagacaattccaagaacacgctatttctacaaatgaacagcctgagagccgaggacacggccgtatattactgtgcgaaacacactagctattacatggacgtctggggcaaagggaccacggtcaccgtctcctcaggtggaggcggttcaggcggaggtggctctggcggtggcggatcgcagactgtggtgacccaggagccatcgttctcagtgtcccctggagggacagtcacactcacttgtggcttatactctgactcagtctctactagttactaccccagctggtaccagcagaccccaggccaggctccacgcacgctcatctacaacacaaacactcgctcttctggggtccctgatcgcttctctggctccatccttgggaacaaagctgccctcaccatcacgggggcccaggcagatgatgaatctgattattactgtgtactatatatggttagtggcattgttttcggcagtggaaccaaggtcactgtcctggcggccgcaaccacgacgccagcgccgcggccaccaacaccggcgcccaccatcgcgtcgcagcccctgtccctgcgcccagaggcgtgccggccagcggcggggggcgcagtgcacacgagggggctggacttcgcctgtgatatctacatctgggcgcccttggccgggacttgtggggtccttctcctgtcactggttatcaccctttactgcaaacggggcagaaagaaactcctgtatatattcaaacaaccatttatgagaccagtacaaactactcaagaggaagatggctgtagctgccgatttccagaagaagaagaaggaggatgtgaactgagagtgaagttcagcaggagcgcagacgcccccgcgtaccagcagggccagaaccagctctataacgagctcaatctaggacgaagagaggagtacgatgttttggacaagagacgtggccgggaccctgagatggggggaaagccgagaaggaagaaccctcaggaaggcctgtacaatgaactgcagaaagataagatggcggaggcctacagtgagattgggatgaaaggcgagcgccggaggggcaaggggcacgatggcctttaccagggtctcagtacagccaccaaggacacctacgacgcccttcacatgcaggccctgccccctcgc

SEQ ID NO: 2428 - DNA, 1482 bp, synthetic construct
  misc_feature 1..1482: note = Synthetic
  source 1..1482: mol_type = other DNA
atggccttaccagtgaccgccttgctcctgccgctggccttgctgctccacgccgccaggccgcaggtgcagctggtggagtctgggggaggcgtggtccagcctgggaggtccctgagactctcctgtgcagcgtctggattcaccttcagtagttatggcatgcactgggtccgccaggctccaggcaaggggctggagtgggtggcagttatatggtatgatggaattaataaatactatgcagactccgtgaagggccgattcaccatctccagagacaattccaagaacacgctgtatctgcaaatgaacagcctgagagccgaagacacggctgtgtattactgtgcgagagaacggctggaacgaaggtactactactacatggacgtctggggcaaagggaccacggtcaccgtctcctcaggtggaggcggttcaggcggaggtggctctggcggtggcggatcgcagactgtggtgacccaggagccatcgttctcagtgtcccctggagggacagtcacactcacttgtggcttgagctctggctcagtctctactagttactaccccggctggtaccagcagaccccaggccaggctccacgcacgctcatctacagcacaaacactcgctcttctggggtccctgatcgcttctctggctccatccttgggaacaaagctgccctcaccatcacgggggcccaggcagatgatgaatctgattattactgtgtgctatatatgggtagtggcatgtttattttcggcagtggaaccaaggtcactgtcctagcggccgcaaccacgacgccagcgccgcggccaccaacaccggcgcccaccatcgcgtcgcagcccctgtccctgcgcccagaggcgtgccggccagcggcggggggcgcagtgcacacgagggggctggacttcgcctgtgatatctacatctgggcgcccttggccgggacttgtggggtccttctcctgtcactggttatcaccctttactgcaaacggggcagaaagaaactcctgtatatattcaaacaaccatttatgagaccagtacaaactactcaagaggaagatggctgtagctgccgatttccagaagaagaagaaggaggatgtgaactgagagtgaagttcagcaggagcgcagacgcccccgcgtaccagcagggccagaaccagctctataacgagctcaatctaggacgaagagaggagtacgatgttttggacaagagacgtggccgggaccctgagatggggggaaagccgagaaggaagaaccctcaggaaggcctgtacaatgaactgcagaaagataagatggcggaggcctacagtgagattgggatgaaaggcgagcgccggaggggcaaggggcacgatggcctttaccagggtctcagtacagccaccaaggacacctacgacgcccttcacatgcaggccctgccccctcgc

SEQ ID NO: 2429 - DNA, 1464 bp, synthetic construct
  misc_feature 1..1464: note = Synthetic
  source 1..1464: mol_type = other DNA
atggccttaccagtgaccgccttgctcctgccgctggccttgctgctccacgccgccaggccggaggtgcagttgttggagtctgggggaggcttggtacagcctggggggtccctgagactctcctgtgcagcctctggattcacctttagcagctttgccatgagctgggtccgccaggctccagggaaggggctggaatgggtctcagctgttagtggtagtggtgatgacacatactacgcagactccgtgaagggccggttcaccatctccagagacaattccaagaacacgctgtatctgcaaatgaacagcctgagagccgaggacacggccgtatattactgtgcgaaacacactagctactacctggacgtctggggcaaagggaccacggtcaccgtctcctcaggtggaggcggttcaggcggaggtggctctggcggtggcggatcgcagactgtggtgacccaggagccatcgttctcagtgtcccctggagggacagtcacactcacttgtgccttgagctctgactcagtctctactagttactttcccagctggtaccggcagaccccaggccaggctccacgcacgctcatctacaacacaaacactcgctcttctggggtccctgatcgcttctctggctccatccttgggaacaaagctgccctcaccatcacgggggcccaggcagatgatgaatctgattattactgtgtgctatatatgggtagtggcattattttcggcagtggaaccaaggtcactgtcctagcggccgcaaccacgacgccagcgccgcggccaccaacaccggcgcccaccatcgcgtcgcagcccctgtccctgcgcccagaggcgtgccggccagcggcggggggcgcagtgcacacgagggggctggacttcgcctgtgatatctacatctgggcgcccttggccgggacttgtggggtccttctcctgtcactggttatcaccctttactgcaaacggggcagaaagaaactcctgtatatattcaaacaaccatttatgagaccagtacaaactactcaagaggaagatggctgtagctgccgatttccagaagaagaagaaggaggatgtgaactgagagtgaagttcagcaggagcgcagacgcccccgcgtaccagcagggccagaaccagctctataacgagctcaatctaggacgaagagaggagtacgatgttttggacaagagacgtggccgggaccctgagatggggggaaagccgagaaggaagaaccctcaggaaggcctgtacaatgaactgcagaaagataagatggcggaggcctacagtgagattgggatgaaaggcgagcgccggaggggcaaggggcacgatggcctttaccagggtctcagtacagccaccaaggacacctacgacgcccttcacatgcaggccctgccccctcgc

SEQ ID NO: 2430 - DNA, 1482 bp, synthetic construct
  misc_feature 1..1482: note = Synthetic
  source 1..1482: mol_type = other DNA
atggccttaccagtgaccgccttgctcctgccgctggccttgctgctccacgccgccaggccgcaggtgcagctggtggagtctgggggaggcgtggtccagcctgggaggtccctgagactctcctgtgcagcgtctggattcaacttcagtacctttgacatacactgggtccgccaggctccaggcaaggggctggagtgggtggcacttatatggtatgatggaagttataaatactatgcagactccgtgaagggccgattcaccatttccagagacaattccaagaacacgctggatctgcgaatgaacagcctgagagccgaggacacggctgtgtattactgtgcgcgaaatgacaactggaacgacgaacactactaccactattacatggacgtctggggcaaagggaccacggtcaccgtctcctcaggtggaggcggttcaggcggaggtggctctggcggtggcggatcggaaattgtcctgactcagtctccagactttcagtctgtgactccaaaggagaaagtcaccatcacctgccgggccagtcagagtattggtagtagcttacactggtaccagcagaaaccagatcagtctccaaagctcctcatcaagtttgcttcccagtccttctcaggggtcccctcgaggttcagtggcagtggatctgggacagatttcaccctcaccatcaatagcctggaagctgaagatgctgcaacgtatttctgtcatcagagtagtagtttaccgtggacgttcggccaagggaccaaggtggaaatcaaagcggccgcaaccacgacgccagcgccgcggccaccaacaccggcgcccaccatcgcgtcgcagcccctgtccctgcgcccagaggcgtgccggccagcggcggggggcgcagtgcacacgagggggctggacttcgcctgtgatatctacatctgggcgcccttggccgggacttgtggggtccttctcctgtcactggttatcaccctttactgcaaacggggcagaaagaaactcctgtatatattcaaacaaccatttatgagaccagtacaaactactcaagaggaagatggctgtagctgccgatttccagaagaagaagaaggaggatgtgaactgagagtgaagttcagcaggagcgcagacgcccccgcgtaccagcagggccagaaccagctctataacgagctcaatctaggacgaagagaggagtacgatgttttggacaagagacgtggccgggaccctgagatggggggaaagccgagaaggaagaaccctcaggaaggcctgtacaatgaactgcagaaagataagatggcggaggcctacagtgagattgggatgaaaggcgagcgccggaggggcaaggggcacgatggcctttaccagggtctcagtacagccaccaaggacacctacgacgcccttcacatgcaggccctgccccctcgc

SEQ ID NO: 2431 - DNA, 1497 bp, synthetic construct
  misc_feature 1..1497: note = Synthetic
  source 1..1497: mol_type = other DNA
atggccttaccagtgaccgccttgctcctgccgctggccttgctgctccacgccgccaggccggaagtgcacctgttggagtctgggggaggcttggtccagcctggggggtccctgagactctcctgtgcggcctctggattcacctttagcagctatgccatgaactgggtccgccaggctccagggaaggggctggagtgggtctcttctattagtggtagtggtagtagctcatactacgcagactccgtgaagggccggttcaccatctccagagacaattccaagaacacgctgtatctgcaaatgaacagcctgagagccgaggacacggccgtatattactgtgcgtctcgtggattcaactcccagtatcctcccggatactactactactacatggacgtctggggcaaagggaccacggtcaccgtctcctcaggtggaggcggttcaggcggaggtggctctggcggtggcggatcgcagactgtggtgacccaggagccatcgttctcagtgtcccctggagggacagtcacactcacttgtggcttgagctctggctcagtctccactagttacttccccagctggtaccagcagacccccggccaggctccacgcacgctcatctacatcacaaacactcgctcttcaggggtccctgatcgcttctctggctccattattgggaacaaagctgccctcaccatcacgggggcccaggcagatgatgaatctgattatttctgtgtactatatatgggtagtggcacttgggtgttcggtggaggaaccaagctgactgtcctagcggccgcaaccacgacgccagcgccgcggccaccaacaccggcgcccaccatcgcgtcgcagcccctgtccctgcgcccagaggcgtgccggccagcggcggggggcgcagtgcacacgagggggctggacttcgcctgtgatatctacatctgggcgcccttggccgggacttgtggggtccttctcctgtcactggttatcaccctttactgcaaacggggcagaaagaaactcctgtatatattcaaacaaccatttatgagaccagtacaaactactcaagaggaagatggctgtagctgccgatttccagaagaagaagaaggaggatgtgaactgagagtgaagttcagcaggagcgcagacgcccccgcgtaccagcagggccagaaccagctctataacgagctcaatctaggacgaagagaggagtacgatgttttggacaagagacgtggccgggaccctgagatggggggaaagccgagaaggaagaaccctcaggaaggcctgtacaatgaactgcagaaagataagatggcggaggcctacagtgagattgggatgaaaggcgagcgccggaggggcaaggggcacgatggcctttaccagggtctcagtacagccaccaaggacacctacgacgcccttcacatgcaggccctgccccctcgc

SEQ ID NO: 2432 - DNA, 1458 bp, synthetic construct
  misc_feature 1..1458: note = Synthetic
  source 1..1458: mol_type = other DNA
atggccttaccagtgaccgccttgctcctgccgctggccttgctgctccacgccgccaggccggaggtgcagctgttggagtctgggggaggcttggtacagcctggggggtccctgagactctcctgtgcagcctctggattcaccttcagcaactatgccatgacctgggtccgccaggctccagggaaggggctggagtgggtctcagctattagtggtagtggtattggcacatactacgcagactccgtgcagggccggttcaccacctccagagacaattccaagaacacgctgtatctgcaaatgaacagcctgagagccgaggacacggccgtttattactgtgcgaaaggggggtacaactggaaggacgtctggggcaaagggaccacggtcaccgtctcctcaggtggaggcggttcaggcggaggtggctctggcggtggcggatcggaaattgtgctgactcagtctccagactttcagtctgtgactccaaaggagaaagtcaccatcacctgccgggccagtcagagcattggtagtagcttacactggtaccagcagaaaccagatcagtctccaaagctcctcatcaagtttgcttcccagtccttctcaggggtcccctcgaggttcagtggcagtggatctgggacagatttcaccctcaccatccatagcctggaagctgaagatgctgcaacgtattactgtcatcagagtagtagtttaccgtggacgttcggccaagggaccaaggtggaaatcaaagcggccgcaaccacgacgccagcgccgcggccaccaacaccggcgcccaccatcgcgtcgcagcccctgtccctgcgcccagaggcgtgccggccagcggcggggggcgcagtgcacacgagggggctggacttcgcctgtgatatctacatctgggcgcccttggccgggacttgtggggtccttctcctgtcactggttatcaccctttactgcaaacggggcagaaagaaactcctgtatatattcaaacaaccatttatgagaccagtacaaactactcaagaggaagatggctgtagctgccgatttccagaagaagaagaaggaggatgtgaactgagagtgaagttcagcaggagcgcagacgcccccgcgtaccagcagggccagaaccagctctataacgagctcaatctaggacgaagagaggagtacgatgttttggacaagagacgtggccgggaccctgagatggggggaaagccgagaaggaagaaccctcaggaaggcctgtacaatgaactgcagaaagataagatggcggaggcctacagtgagattgggatgaaaggcgagcgccggaggggcaaggggcacgatggcctttaccagggtctcagtacagccaccaaggacacctacgacgcccttcacatgcaggccctgccccctcgc

SEQ ID NO: 2433 - DNA, 1482 bp, synthetic construct
  misc_feature 1..1482: note = Synthetic
  source 1..1482: mol_type = other DNA
atggccttaccagtgaccgccttgctcctgccgctggccttgctgctccacgccgccaggccgcaggtgcagctggtggagtctgggggaggcgtggtccagcctgggaggtccctgagactctcctgtgcagcgtctgggttcaccttcactaactatgacatgcactgggtccgccaggccccaggcaaggggctggagtgggtgacaattatatggcatgatggaagtaataaatattatttagactccgtgaggggccgattcaccatctccagagacaattccaagaacacgctgtatctgcaaatgaacagcctgagagccgaggacacggctgtgtattactgtgcgagaggtgacaactggaacgacgaacaccactacttctactacatggacgtctggggcaaagggaccacggtcaccgtctcctcaggtggaggcggttcaggcggaggtggctctggcggtggcggatcggaaattgtgctgactcagtctccagactttcagtctgtgactccaaaggagaaagtcaccatcacctgccgggccagtcagagcattggtagtagcttacactggtaccagcagaaaccagatcagtctccaaagctcctcatcaagtttgcttcccagtccttctcaggggtcccctcgaggttcagtggcagtggatctgggacagatttcaccctcaccatccatagcctggaagctgaagatgctgcaacgtattactgtcatcagagtagtagtttaccgtggacgttcggccaagggaccaaggtggaaatcaaagcggccgcaaccacgacgccagcgccgcggccaccaacaccggcgcccaccatcgcgtcgcagcccctgtccctgcgcccagaggcgtgccggccagcggcggggggcgcagtgcacacgagggggctggacttcgcctgtgatatctacatctgggcgcccttggccgggacttgtggggtccttctcctgtcactggttatcaccctttactgcaaacggggcagaaagaaactcctgtatatattcaaacaaccatttatgagaccagtacaaactactcaagaggaagatggctgtagctgccgatttccagaagaagaagaaggaggatgtgaactgagagtgaagttcagcaggagcgcagacgcccccgcgtaccagcagggccagaaccagctctataacgagctcaatctaggacgaagagaggagtacgatgttttggacaagagacgtggccgggaccctgagatggggggaaagccgagaaggaagaaccctcaggaaggcctgtacaatgaactgcagaaagataagatggcggaggcctacagtgagattgggatgaaaggcgagcgccggaggggcaaggggcacgatggcctttaccagggtctcagtacagccaccaaggacacctacgacgcccttcacatgcaggccctgccccctcgc

SEQ ID NO: 2434 - DNA, 1482 bp, synthetic construct
  misc_feature 1..1482: note = Synthetic
  source 1..1482: mol_type = other DNA
atggccttaccagtgaccgccttgctcctgccgctggccttgctgctccacgccgccaggccgcaggtgcagctggtggagtctgggggaggcgtggtccagcctgggaggtccctgagactctcctgtgcagcgtctgggttcaccttcagtaactatgacatgcactgggtccgccaggccccaggcaaggggctggagtgggtgacaattatatggcatgatggaagtaataaatattatttagactccgtgaagggccgattcaccatctccagagacaattccaagaacacgctgtatctgcaaatgaacagcctgagagccgaggacacggctgtgtattactgtgcgagaggtgacaactggaacgacgaacaccactacttctactacatggacgtctggggcaaagggaccacggtcaccgtctcctcaggtggaggcggttcaggcggaggtggctctggcggtggcggatcggaaattgtgttgacacagtctccagccaccctgtctttgtctccaggggaaagagccaccctctcctgcagggccagtcagagtgttagcagctccttagcctggtaccaacagaaacctggccaggctccccggctcctcatctatgatgcatccaacagggccactggcatcccagccaggttcagtggcagtgggtctgggacagacttcactctcaccatcagcagcctagagcctgaagattttgcagtttattactgtcagcagcgtagcaactggcctctcactttcggcggagggaccaaggtggagatcaaagcggccgcaaccacgacgccagcgccgcggccaccaacaccggcgcccaccatcgcgtcgcagcccctgtccctgcgcccagaggcgtgccggccagcggcggggggcgcagtgcacacgagggggctggacttcgcctgtgatatctacatctgggcgcccttggccgggacttgtggggtccttctcctgtcactggttatcaccctttactgcaaacggggcagaaagaaactcctgtatatattcaaacaaccatttatgagaccagtacaaactactcaagaggaagatggctgtagctgccgatttccagaagaagaagaaggaggatgtgaactgagagtgaagttcagcaggagcgcagacgcccccgcgtaccagcagggccagaaccagctctataacgagctcaatctaggacgaagagaggagtacgatgttttggacaagagacgtggccgggaccctgagatggggggaaagccgagaaggaagaaccctcaggaaggcctgtacaatgaactgcagaaagataagatggcggaggcctacagtgagattgggatgaaaggcgagcgccggaggggcaaggggcacgatggcctttaccagggtctcagtacagccaccaaggacacctacgacgcccttcacatgcaggccctgccccctcgc

SEQ ID NO: 2435 - DNA, 1470 bp, synthetic construct
  misc_feature 1..1470: note = Synthetic
  source 1..1470: mol_type = other DNA
atggccttaccagtgaccgccttgctcctgccgctggccttgctgctccacgccgccaggccggaggtgcagctggtggagtctgggggaggtgtggtacggcctggggggtccctgagactctcctgtgcagcctctggattcacctttgatgattatggcatgagctgggtccgccaagctccagggaaggggctggagtgggtctctggtattaattggaatggtggtagcacaggttatgtagactctgtgaagggccgattcaccatctccagagacaacgccaagaactccctgtatctgcaaatgaacagtctgagagccgaggacacggccttgtatcactgtgcgagaccagtaactacggactactactactacatggacgtctggggcaaagggaccacggtcaccgtctcctcaggtggaggcggttcaggcggaggtggctctggcggtggcggatcggaaattgtgttgacgcagtctccaggcaccctgtctttgtctccaggggaaagagccaccctctcctgcagggccagtcagagtgttagcagcagctacttagcctggtaccagcagaaacctggccaggctcccaggctcctcatctatggtgcatccagcagggccactggcatcccagacaggttcagtggcagtgggtctgggacagacttcactctcaccatcagcagactggagcctgaagattttgcagtgtattactgtcagcagtatggtagctcgtggacgttcggccaagggaccaaggtggaaatcaaagcggccgcaaccacgacgccagcgccgcggccaccaacaccggcgcccaccatcgcgtcgcagcccctgtccctgcgcccagaggcgtgccggccagcggcggggggcgcagtgcacacgagggggctggacttcgcctgtgatatctacatctgggcgcccttggccgggacttgtggggtccttctcctgtcactggttatcaccctttactgcaaacggggcagaaagaaactcctgtatatattcaaacaaccatttatgagaccagtacaaactactcaagaggaagatggctgtagctgccgatttccagaagaagaagaaggaggatgtgaactgagagtgaagttcagcaggagcgcagacgcccccgcgtaccagcagggccagaaccagctctataacgagctcaatctaggacgaagagaggagtacgatgttttggacaagagacgtggccgggaccctgagatggggggaaagccgagaaggaagaaccctcaggaaggcctgtacaatgaactgcagaaagataagatggcggaggcctacagtgagattgggatgaaaggcgagcgccggaggggcaaggggcacgatggcctttaccagggtctcagtacagccaccaaggacacctacgacgcccttcacatgcaggccctgccccctcgc

SEQ ID NO: 2436 - DNA, 1494 bp, synthetic construct
  misc_feature 1..1494: note = Synthetic
  source 1..1494: mol_type = other DNA
atggccttaccagtgaccgccttgctcctgccgctggccttgctgctccacgccgccaggccggaggtgcagctgttggagtctgggggaggcttggtacagcctggggggtccctgagactctcctgtgcagcctctggattcacctttagcagctatgccatgagctgggtccgccaggctccagggaaggggctggagtgggtctcagctattagtggtagtggtggtagcacatactacgcagactccgtgaagggccggttcaccatctccagagacaattccaagaacacgctgtatctgcaaatgaacagcctgagagccgaggacacggccgtatattactgtgcgaaaaaggggacgtcgtacaactggaacgacgtccattactactactactactacatggacgtctggggcaaagggaccacggtcaccgtctcctcaggtggaggcggttcaggcggaggtggctctggcggtggcggatcggaaattgtgttgacgcagtctccaggcaccctgtctttgtctccaggggaaagagccaccctctcctgcagggccagtcagagtgttagcagcagctacttagcctggtaccagcagaaacctggccaggctcccaggctcctcatctatggtgcatccagcagggccactggcatcccagacaggttcagtggcagtgggtctgggacagacttcactctcaccatcagcagactggagcctgaagattttgcagtgtattactgtcagcagtatggtagctcgtggacgttcggccaagggaccaaggtggaaatcaaagcggccgcaaccacgacgccagcgccgcggccaccaacaccggcgcccaccatcgcgtcgcagcccctgtccctgcgcccagaggcgtgccggccagcggcggggggcgcagtgcacacgagggggctggacttcgcctgtgatatctacatctgggcgcccttggccgggacttgtggggtccttctcctgtcactggttatcaccctttactgcaaacggggcagaaagaaactcctgtatatattcaaacaaccatttatgagaccagtacaaactactcaagaggaagatggctgtagctgccgatttccagaagaagaagaaggaggatgtgaactgagagtgaagttcagcaggagcgcagacgcccccgcgtaccagcagggccagaaccagctctataacgagctcaatctaggacgaagagaggagtacgatgttttggacaagagacgtggccgggaccctgagatggggggaaagccgagaaggaagaaccctcaggaaggcctgtacaatgaactgcagaaagataagatggcggaggcctacagtgagattgggatgaaaggcgagcgccggaggggcaaggggcacgatggcctttaccagggtctcagtacagccaccaaggacacctacgacgcccttcacatgcaggccctgccccctcgc

SEQ ID NO: 2437 - DNA, 1476 bp, synthetic construct
  misc_feature 1..1476: note = Synthetic
  source 1..1476: mol_type = other DNA
atggccttaccagtgaccgccttgctcctgccgctggccttgctgctccacgccgccaggccgcagctgcagctgcaggagtcgggcccaggactggtgaagccttcggagaccctgtccctcacctgcactgtctctggtggctccatcagcagtagtagttactactggggctggatccgccagcccccagggaaggggctggagtggattgggagtatctattatagtgggagcacctactacaacccgtccctcaagagtcgagtcaccatatccgtagacacgtccaagaaccagttctccctgaagctgagctctgtgaccgccgcagacacggctgtgtattactgcacaactggaacgacggcttactactactactactacatggacgtctggggcaaagggaccacggtcaccgtctcctcaggtggaggcggttcaggcggaggtggctctggcggtggcggatcggaaattgtgttgacgcagtctccaggcaccctgtctttgtctccaggggaaagagccaccctctcctgcagggccagtcagagtgttagcagcagctacttagcctggtaccagcagaaacctggccaggctcccaggctcctcatctatggtgcatccagcagggccactggcatcccagacaggttcagtggcagtgggtctgggacagacttcactctcaccatcagcagactggagcctgaagattttgcagtgtattactgtcagcagtatggtagctcgtggacgttcggccaagggaccaaggtggaaatcaaagcggccgcaaccacgacgccagcgccgcggccaccaacaccggcgcccaccatcgcgtcgcagcccctgtccctgcgcccagaggcgtgccggccagcggcggggggcgcagtgcacacgagggggctggacttcgcctgtgatatctacatctgggcgcccttggccgggacttgtggggtccttctcctgtcactggttatcaccctttactgcaaacggggcagaaagaaactcctgtatatattcaaacaaccatttatgagaccagtacaaactactcaagaggaagatggctgtagctgccgatttccagaagaagaagaaggaggatgtgaactgagagtgaagttcagcaggagcgcagacgcccccgcgtaccagcagggccagaaccagctctataacgagctcaatctaggacgaagagaggagtacgatgttttggacaagagacgtggccgggaccctgagatggggggaaagccgagaaggaagaaccctcaggaaggcctgtacaatgaactgcagaaagataagatggcggaggcctacagtgagattgggatgaaaggcgagcgccggaggggcaaggggcacgatggcctttaccagggtctcagtacagccaccaaggacacctacgacgcccttcacatgcaggccctgccccctcgc

SEQ ID NO: 2438 - DNA, 1473 bp, synthetic construct
  misc_feature 1..1473: note = Synthetic
  source 1..1473: mol_type = other DNA
atggccttaccagtgaccgccttgctcctgccgctggccttgctgctccacgccgccaggccggaggtgcagctgttggagtctgggggaggcttggtgcagcctggggggtccctgagactctcctgtgcagcctctggattcacctttagcagctatgccatgacctgggtccgccaggctccagggaaggggctggagtgggtctcagctattagtggtagtggtggtagcacatactacgcagactccgtgaagggccggttcaccatctccagagacaattccaagaacacgctgtatctgcaaatgaacagcctgagagccgaggacacggccgtatattactgtgcgagaggcgggtataactggcactactactactacatggacgtctggggcaaagggaccacggtcaccgtctcctcaggtggaggcggttcaggcggaggtggctctggcggtggcggatcggaaattgtgttgacgcagtctccaggcaccctgtctttgtctccaggggaaagagccaccctctcctgcagggccagtcagagtgttagcagcagctacttagcctggtaccagcagaaacctggccaggctcccaggctcctcatctatggtgcatccagcagggccactggcatcccagacaggttcagtggcagtgggtctgggacagacttcactctcaccatcagcagactggagcctgaagattttgcagtgtattactgtcagcagtatggtagctcgtggacgttcggccaagggaccaaggtggaaatcaaagcggccgcaaccacgacgccagcgccgcggccaccaacaccggcgcccaccatcgcgtcgcagcccctgtccctgcgcccagaggcgtgccggccagcggcggggggcgcagtgcacacgagggggctggacttcgcctgtgatatctacatctgggcgcccttggccgggacttgtggggtccttctcctgtcactggttatcaccctttactgcaaacggggcagaaagaaactcctgtatatattcaaacaaccatttatgagaccagtacaaactactcaagaggaagatggctgtagctgccgatttccagaagaagaagaaggaggatgtgaactgagagtgaagttcagcaggagcgcagacgcccccgcgtaccagcagggccagaaccagctctataacgagctcaatctaggacgaagagaggagtacgatgttttggacaagagacgtggccgggaccctgagatggggggaaagccgagaaggaagaaccctcaggaaggcctgtacaatgaactgcagaaagataagatggcggaggcctacagtgagattgggatgaaaggcgagcgccggaggggcaaggggcacgatggcctttaccagggtctcagtacagccaccaaggacacctacgacgcccttcacatgcaggccctgccccctcgc

SEQ ID NO: 2439 - DNA, 1485 bp, synthetic construct
  misc_feature 1..1485: note = Synthetic
  source 1..1485: mol_type = other DNA
atggccttaccagtgaccgccttgctcctgccgctggccttgctgctccacgccgccaggccgcaggtgcagctggtggagtctgggggaggcgtggtccagcctgggaggtccctgagactctcctgtgcagcgtctggattcaccttcagtagctatgacatgcactgggtccgccaggctccaggcaaggggctggagtgggtgtcagttatatggtatgatggaagtaataaaaagtatggagactccgcgaagggccgattcaccatctccagagacaattccaagaacacgctggatctgcaaatgaacagcctgagagccgaggacacggctgtgtattactgtgcgagaggcgacaactggaacgacgaaggtggctactactactactacatggacgtctggggcaaagggaccacggtcaccgtctcctcaggtggaggcggttcaggcggaggtggctctggcggtggcggatcggaaattgtgctgactcagtctccagactttcagtctgtgactccaaaggagaaagtcaccatcacctgccgggccagtcagaacattggtagtagcttacactggtaccagcagaaaccagatcagtctccaaagctcctcatcaagtttgcttcccagtccatctcaggggtcccctcgaggttcagtggcagtggatctgggacagatttcaccctcaccatcaatagcctggaagctgaagatgctgcagcgtattactgtcatcagagtagtagtttaccgtggacgttcggccaagggaccaaggtggaaatcaaagcggccgcaaccacgacgccagcgccgcggccaccaacaccggcgcccaccatcgcgtcgcagcccctgtccctgcgcccagaggcgtgccggccagcggcggggggcgcagtgcacacgagggggctggacttcgcctgtgatatctacatctgggcgcccttggccgggacttgtggggtccttctcctgtcactggttatcaccctttactgcaaacggggcagaaagaaactcctgtatatattcaaacaaccatttatgagaccagtacaaactactcaagaggaagatggctgtagctgccgatttccagaagaagaagaaggaggatgtgaactgagagtgaagttcagcaggagcgcagacgcccccgcgtaccagcagggccagaaccagctctataacgagctcaatctaggacgaagagaggagtacgatgttttggacaagagacgtggccgggaccctgagatggggggaaagccgagaaggaagaaccctcaggaaggcctgtacaatgaactgcagaaagataagatggcggaggcctacagtgagattgggatgaaaggcgagcgccggaggggcaaggggcacgatggcctttaccagggtctcagtacagccaccaaggacacctacgacgcccttcacatgcaggccctgccccctcgc

SEQ ID NO: 2440 - DNA, 1485 bp, synthetic construct
  misc_feature 1..1485: note = Synthetic
  source 1..1485: mol_type = other DNA
atggccttaccagtgaccgccttgctcctgccgctggccttgctgctccacgccgccaggccgcaggtgcagctggtggagtctgggggaggcgtggtccagcctgggaggtccctgagactctcctgtgcagcgtctggattcaccttcagtagctatgacatgcactgggtccgccaggctccaggcaaggggctggagtgggtgtcagttatatggtatgatggaagtaataaaaagtatggagactccgcgaagggccgattcaccatctccagagacaattccaagaacacgctggatctgcaaatgaacagcctgagagccgaggacacggctgtgtattactgtgcgagaggcgacaactggaacgacgaaggtggctactactactactacatggacgtctggggcaaagggaccacggtcaccgtctcctcaggtggaggcggttcaggcggaggtggctctggcggtggcggatcggacatccagatgacccagtctccatcctcactgtctacatctgtaggagacagagtcaccatcacttgtcgggcgagtcagggcattagcaattatttagcctggtttcagcagaaaccagggaaagcccctaagtccctgatctatgctgcatccagtttgcaaagtggggtcccatcaaagttcagcggcagtggatctgggacagatttctctctcaccattagcagcctgcagcctgaagattttgcaacttattactgccaacagtataatagttacccgatcaccttcggccaagggacacgactggagattaaagcggccgcaaccacgacgccagcgccgcggccaccaacaccggcgcccaccatcgcgtcgcagcccctgtccctgcgcccagaggcgtgccggccagcggcggggggcgcagtgcacacgagggggctggacttcgcctgtgatatctacatctgggcgcccttggccgggacttgtggggtccttctcctgtcactggttatcaccctttactgcaaacggggcagaaagaaactcctgtatatattcaaacaaccatttatgagaccagtacaaactactcaagaggaagatggctgtagctgccgatttccagaagaagaagaaggaggatgtgaactgagagtgaagttcagcaggagcgcagacgcccccgcgtaccagcagggccagaaccagctctataacgagctcaatctaggacgaagagaggagtacgatgttttggacaagagacgtggccgggaccctgagatggggggaaagccgagaaggaagaaccctcaggaaggcctgtacaatgaactgcagaaagataagatggcggaggcctacagtgagattgggatgaaaggcgagcgccggaggggcaaggggcacgatggcctttaccagggtctcagtacagccaccaaggacacctacgacgcccttcacatgcaggccctgccccctcgc

SEQ ID NO: 2441 - DNA, 1476 bp, synthetic construct
  misc_feature 1..1476: note = Synthetic
  source 1..1476: mol_type = other DNA
atggccttaccagtgaccgccttgctcctgccgctggccttgctgctccacgccgccaggccgcaggttcagctggtacagtctggagctgaggtgaagaagtctggggcctcagtgaaggtctcctgcaaggcttctggttacaccttaaccagctatggcatcagctgggtgcgacaggcccctggacaagggcttgagtggatgggatggatcagcgcttacaatggtaacataaactatgcacagaagttccagggcagagtcaccatgaccacagacacatccacgagcacagcctacatggagctgaggagcctgagatctgacgacacggccgtgtattactgtgtgagagatggggaccggtacaactggaaccacagctacatggacgtctggggcaaagggaccacggtcaccgtctcctcaggtggaggcggttcaggcggaggtggctctggcggtggcggatcggaaattgtgctgactcagtctccagactttcagtctgtgactccaaaggagaaagtcaccatcacctgccgggccagtcagaacattggtagtagcttacactggtaccagcagaaaccagatcagtctccaaagctcctcatcaagtttgcttcccagtccatctcaggggtcccctcgaggttcagtggcagtggatctgggacagatttcaccctcaccatcaatagcctggaagctgaagatgctgcagcgtattactgtcatcagagtagtagtttaccgtggacgttcggccaagggaccaaggtggaaatcaaagcggccgcaaccacgacgccagcgccgcggccaccaacaccggcgcccaccatcgcgtcgcagcccctgtccctgcgcccagaggcgtgccggccagcggcggggggcgcagtgcacacgagggggctggacttcgcctgtgatatctacatctgggcgcccttggccgggacttgtggggtccttctcctgtcactggttatcaccctttactgcaaacggggcagaaagaaactcctgtatatattcaaacaaccatttatgagaccagtacaaactactcaagaggaagatggctgtagctgccgatttccagaagaagaagaaggaggatgtgaactgagagtgaagttcagcaggagcgcagacgcccccgcgtaccagcagggccagaaccagctctataacgagctcaatctaggacgaagagaggagtacgatgttttggacaagagacgtggccgggaccctgagatggggggaaagccgagaaggaagaaccctcaggaaggcctgtacaatgaactgcagaaagataagatggcggaggcctacagtgagattgggatgaaaggcgagcgccggaggggcaaggggcacgatggcctttaccagggtctcagtacagccaccaaggacacctacgacgcccttcacatgcaggccctgccccctcgc

SEQ ID NO: 2442 - DNA, 1476 bp, synthetic construct
  misc_feature 1..1476: note = Synthetic
  source 1..1476: mol_type = other DNA
atggccttaccagtgaccgccttgctcctgccgctggccttgctgctccacgccgccaggccgcaggttcagctggtacagtctggagctgaggtgaagaagtctggggcctcagtgaaggtctcctgcaaggcttctggttacaccttaaccagctatggcatcagctgggtgcgacaggcccctggacaagggcttgagtggatgggatggatcagcgcttacaatggtaacataaactatgcacagaagttccagggcagagtcaccatgaccacagacacatccacgagcacagcctacatggagctgaggagcctgagatctgacgacacggccgtgtattactgtgtgagagatggggaccggtacaactggaaccacagctacatggacgtctggggcaaagggaccacggtcaccgtctcctcaggtggaggcggttcaggcggaggtggctctggcggtggcggatcggacatccagatgacccagtctccatcctcactgtctacatctgtaggagacagagtcaccatcacttgtcgggcgagtcagggcattagcaattatttagcctggtttcagcagaaaccagggaaagcccctaagtccctgatctatgctgcatccagtttgcaaagtggggtcccatcaaagttcagcggcagtggatctgggacagatttctctctcaccattagcagcctgcagcctgaagattttgcaacttattactgccaacagtataatagttacccgatcaccttcggccaagggacacgactggagattaaagcggccgcaaccacgacgccagcgccgcggccaccaacaccggcgcccaccatcgcgtcgcagcccctgtccctgcgcccagaggcgtgccggccagcggcggggggcgcagtgcacacgagggggctggacttcgcctgtgatatctacatctgggcgcccttggccgggacttgtggggtccttctcctgtcactggttatcaccctttactgcaaacggggcagaaagaaactcctgtatatattcaaacaaccatttatgagaccagtacaaactactcaagaggaagatggctgtagctgccgatttccagaagaagaagaaggaggatgtgaactgagagtgaagttcagcaggagcgcagacgcccccgcgtaccagcagggccagaaccagctctataacgagctcaatctaggacgaagagaggagtacgatgttttggacaagagacgtggccgggaccctgagatggggggaaagccgagaaggaagaaccctcaggaaggcctgtacaatgaactgcagaaagataagatggcggaggcctacagtgagattgggatgaaaggcgagcgccggaggggcaaggggcacgatggcctttaccagggtctcagtacagccaccaaggacacctacgacgcccttcacatgcaggccctgccccctcgc

SEQ ID NO: 2443 - DNA, 1473 bp, synthetic construct
  misc_feature 1..1473: note = Synthetic
  source 1..1473: mol_type = other DNA
atggccttaccagtgaccgccttgctcctgccgctggccttgctgctccacgccgccaggccggaggtgcagctgttggagtctgggggagacttggtacagcctggggggtccctgcgactctcctgtgcagcctctggattcacctttagcacctatgccatgacctgggtccgccaggctccagggaaggggctggagtgggtctcagctattagtggtactagtggtagcacatactacgcagactccgtgaagggccggttcaccatctccagagacaattccaagagcacgctgtatctgcacatgaacagcctgagaaccgaggacacggccgtatattactgtgcgagaggcggatataactggcactactactactacatggacgtctggggcaaagggaccacggtcaccgtctcctcaggtggaggcggttcaggcggaggtggctctggcggtggcggatcggaaattgtgctgactcagtctccagactttcagtctgtgactccaaaggagaaagtcaccatcacctgccgggccagtcagagcattggaagtagcttacactggtaccagcagaaaccagatcagtctccaaagctcctcatcaagtatgtttcccagtccatctcaggggtcccctcgaggttcagtggcagtggatctgggacagatttcaccctcaccatcaatagcctggaagctgaagatgctgcagcgtattactgtcatcagagtagtagtttaccgtggacgttcggccaagggaccaaggtggaaatcaaagcggccgcaaccacgacgccagcgccgcggccaccaacaccggcgcccaccatcgcgtcgcagcccctgtccctgcgcccagaggcgtgccggccagcggcggggggcgcagtgcacacgagggggctggacttcgcctgtgatatctacatctgggcgcccttggccgggacttgtggggtccttctcctgtcactggttatcaccctttactgcaaacggggcagaaagaaactcctgtatatattcaaacaaccatttatgagaccagtacaaactactcaagaggaagatggctgtagctgccgatttccagaagaagaagaaggaggatgtgaactgagagtgaagttcagcaggagcgcagacgcccccgcgtaccagcagggccagaaccagctctataacgagctcaatctaggacgaagagaggagtacgatgttttggacaagagacgtggccgggaccctgagatggggggaaagccgagaaggaagaaccctcaggaaggcctgtacaatgaactgcagaaagataagatggcggaggcctacagtgagattgggatgaaaggcgagcgccggaggggcaaggggcacgatggcctttaccagggtctcagtacagccaccaaggacacctacgacgcccttcacatgcaggccctgccccctcgc

SEQ ID NO: 2444 - DNA, 1476 bp, synthetic construct
  misc_feature 1..1476: note = Synthetic
  source 1..1476: mol_type = other DNA
atggccttaccagtgaccgccttgctcctgccgctggccttgctgctccacgccgccaggccggaggtgcagctgttggagtctgggggagacttggtacagcctggggggtccctgcgactctcctgtgcagcctctggattcacctttagcacctatgccatgacctgggtccgccaggctccagggaaggggctggagtgggtctcagctattagtggtactagtggtagcacatactacgcagactccgtgaagggccggttcaccatctccagagacaattccaagagcacgctgtatctgcacatgaacagcctgagaaccgaggacacggccgtatattactgtgcgagaggcggatataactggcactactactactacatggacgtctggggcaaagggaccacggtcaccgtctcctcaggtggaggcggttcaggcggaggtggctctggcggtggcggatcggaaattgtaatgacacagtctccagccaccctgtctttgtctccaggggaaagagccaccctctcctgcagggccagtcagagtgttagcagcagctacttatcctggtaccagcagaaacctgggctggctcccaggctcctcatctatggtgcatccaccagggccactggcatcccagccaggttcagtggcagtgggtctgggacagacttcactctcaccatcagcagcctgcagcctgaagattttgcagtttattactgtcagcaggattataacttacctccgacgttcggccaagggaccaaggtggaaatcaaagcggccgcaaccacgacgccagcgccgcggccaccaacaccggcgcccaccatcgcgtcgcagcccctgtccctgcgcccagaggcgtgccggccagcggcggggggcgcagtgcacacgagggggctggacttcgcctgtgatatctacatctgggcgcccttggccgggacttgtggggtccttctcctgtcactggttatcaccctttactgcaaacggggcagaaagaaactcctgtatatattcaaacaaccatttatgagaccagtacaaactactcaagaggaagatggctgtagctgccgatttccagaagaagaagaaggaggatgtgaactgagagtgaagttcagcaggagcgcagacgcccccgcgtaccagcagggccagaaccagctctataacgagctcaatctaggacgaagagaggagtacgatgttttggacaagagacgtggccgggaccctgagatggggggaaagccgagaaggaagaaccctcaggaaggcctgtacaatgaactgcagaaagataagatggcggaggcctacagtgagattgggatgaaaggcgagcgccggaggggcaaggggcacgatggcctttaccagggtctcagtacagccaccaaggacacctacgacgcccttcacatgcaggccctgccccctcgc

SEQ ID NO: 2445 - DNA, 1482 bp, synthetic construct
  misc_feature 1..1482: note = Synthetic
  source 1..1482: mol_type = other DNA
atggccttaccagtgaccgccttgctcctgccgctggccttgctgctccacgccgccaggccgcaagtgcagctggtggagagcggcggaggagtggtgcaacctggccggagcctgagactgagctgcgctgccagcggcttcaccttcaacaactacgacatgtactgggtgcggcaggcccctggcaagggcctggaatgggtcgccgtgacatggtatgacggctccaacaagtactacgccgacagcgtgaagggcagattcaccatcagcagagataatagcaagaacaccctgtacctgcagatgaacagcctgcgggccgaggacaccgccgtgtactactgcgctagaggcgacaattggaacgacgagcaccattacttctactacatggacgtgtggggcaaaggcaccaccgtgaccgtgtccagcggcggcggtggatctggaggcggaggctctggaggcggcggctccgagatcgtgctgacacagtctccagatttccagtctgtgacccctaaggaaaaggttacaattacatgcagagcctctcagagcatcggaagctctctgcactggtatcagcagaaacctgatcagagccccaagctgctgatcaaattcgccagccagtccttcagcggcgtccccagccgcttcagcggcagcggcagcggcactgattttacactgaccatccacagcctggaggccgaggacgccgccacctactattgtcaccagagcagctccctgccttggacctttggccagggcacaaaggtggaaatcaaggcggccgcaaccacgacgccagcgccgcggccaccaacaccggcgcccaccatcgcgtcgcagcccctgtccctgcgcccagaggcgtgccggccagcggcggggggcgcagtgcacacgagggggctggacttcgcctgtgatatctacatctgggcgcccttggccgggacttgtggggtccttctcctgtcactggttatcaccctttactgcaaacggggcagaaagaaactcctgtatatattcaaacaaccatttatgagaccagtacaaactactcaagaggaagatggctgtagctgccgatttccagaagaagaagaaggaggatgtgaactgagagtgaagttcagcaggagcgcagacgcccccgcgtaccagcagggccagaaccagctctataacgagctcaatctaggacgaagagaggagtacgatgttttggacaagagacgtggccgggaccctgagatggggggaaagccgagaaggaagaaccctcaggaaggcctgtacaatgaactgcagaaagataagatggcggaggcctacagtgagattgggatgaaaggcgagcgccggaggggcaaggggcacgatggcctttaccagggtctcagtacagccaccaaggacacctacgacgcccttcacatgcaggccctgccccctcgc

SEQ ID NO: 2446 - DNA, 1482 bp, synthetic construct
  misc_feature 1..1482: note = Synthetic
  source 1..1482: mol_type = other DNA
atggccttaccagtgaccgccttgctcctgccgctggccttgctgctccacgccgccaggccgcaagtgcagctggtggagtctggcggcggagtggtgcaacctggaaggagcctgcggctgagctgcgctgccagcggcttcaccttcagcaattacgacatgcactgggtgcggcaggcccctggcaaaggcctggaatgggtcacaatcatctggcatgatgccagcaacaagtactacctggacagcgtcaagggcagattcacaatcagccgggacaacagcaagaacaccctgtacctgcagatgaacagcctgagagccgaggacaccgctgtgtactattgtgccagaggagataattggaacgacgagcaccactacttctactacatggacgtgtggggcaagggcaccaccgtgaccgtttctagcggcggaggcggctccggcggtggaggctccggaggcggcggctctgagatcgtgctgacacagagccctgattttcagagcgtgacacctaaagagaaggtgaccatcacctgcagagccagccagagcatcggctccagcctgcactggtatcagcagaagcccgaccagagcccaaagctgctgatcaagttcgcctcccagtctttttccggcgtgcccagcagattcagcgggagcggctctggcaccgacttcacactgaccatccactctctggaagccgaggatgccgccacctactattgccaccagagcagctctctcccttggaccttcggccagggcacaaaagtggaaattaaggcggccgcaaccacgacgccagcgccgcggccaccaacaccggcgcccaccatcgcgtcgcagcccctgtccctgcgcccagaggcgtgccggccagcggcggggggcgcagtgcacacgagggggctggacttcgcctgtgatatctacatctgggcgcccttggccgggacttgtggggtccttctcctgtcactggttatcaccctttactgcaaacggggcagaaagaaactcctgtatatattcaaacaaccatttatgagaccagtacaaactactcaagaggaagatggctgtagctgccgatttccagaagaagaagaaggaggatgtgaactgagagtgaagttcagcaggagcgcagacgcccccgcgtaccagcagggccagaaccagctctataacgagctcaatctaggacgaagagaggagtacgatgttttggacaagagacgtggccgggaccctgagatggggggaaagccgagaaggaagaaccctcaggaaggcctgtacaatgaactgcagaaagataagatggcggaggcctacagtgagattgggatgaaaggcgagcgccggaggggcaaggggcacgatggcctttaccagggtctcagtacagccaccaaggacacctacgacgcccttcacatgcaggccctgccccctcgc

SEQ ID NO: 2447 - DNA, 1482 bp, synthetic construct
  misc_feature 1..1482: note = Synthetic
  source 1..1482: mol_type = other DNA
atggccttaccagtgaccgccttgctcctgccgctggccttgctgctccacgccgccaggccgcaagtgcagctggtcgaaagcggcggaggcgtggtgcaacctggaagaagcctgagactgagctgcgccgcctctggcttcaccttttctaattacgacatgcactgggtgcggcaggcccctggcaagggtcttgagtgggttaccatcatctggcacgacggcagcaacaagtactacctggacagcgtgaagggcagatttacaatcagcagagataatagcaagaacaccctgtacctgcagatgaacagcctgcgggccgaggacaccgccgtgtactattgtgccagaggcgacaactggaacgacgagcaccactacttctactacatggacgtgtggggcaaaggcaccacagtgaccgtgtccagcggcggcggcggcagcggcggaggaggctctggcggaggcggcagcgagatcgtgctgacccagagccctgacttccagagcgtgacccctaaggaaaaggtgacaattacatgcagggccagccagtccatcggctcttctctgcattggtatcagcagaagcccgatcagtctccaaagctgctgatcaaattcgccagccagagcttcagcggagtccccagccggttcagcggatctggctccggcactgatttcaccctgaccatccacagcctggaggccgaagatgccgctacatactattgccaccagtcctccagcctgccttggacattcggccagggcaccaaggtggagatcaaagcggccgcaaccacgacgccagcgccgcggccaccaacaccggcgcccaccatcgcgtcgcagcccctgtccctgcgcccagaggcgtgccggccagcggcggggggcgcagtgcacacgagggggctggacttcgcctgtgatatctacatctgggcgcccttggccgggacttgtggggtccttctcctgtcactggttatcaccctttactgcaaacggggcagaaagaaactcctgtatatattcaaacaaccatttatgagaccagtacaaactactcaagaggaagatggctgtagctgccgatttccagaagaagaagaaggaggatgtgaactgagagtgaagttcagcaggagcgcagacgcccccgcgtaccagcagggccagaaccagctctataacgagctcaatctaggacgaagagaggagtacgatgttttggacaagagacgtggccgggaccctgagatggggggaaagccgagaaggaagaaccctcaggaaggcctgtacaatgaactgcagaaagataagatggcggaggcctacagtgagattgggatgaaaggcgagcgccggaggggcaaggggcacgatggcctttaccagggtctcagtacagccaccaaggacacctacgacgcccttcacatgcaggccctgccccctcgc

SEQ ID NO: 2448 - DNA, 1464 bp, synthetic construct
  misc_feature 1..1464: note = Synthetic
  source 1..1464: mol_type = other DNA
atggccttaccagtgaccgccttgctcctgccgctggccttgctgctccacgccgccaggccggaggtgcagctgctggaaagcggcggcggactcgtgcaacctggcggctccctgcggctgtcttgcgccgcttctggcttcacattcagcatctacgccatgagctgggtcagacaggcccccggcaaaggcctggaatgggtgtccgccatcagcggcggcggagataccacctactacgccgacagcgtgaagggcagattcaccattagcagagataatagcaagaccacactggacctgcaaatgaacagcctgcgggccgaggacaccgccgtgtactactgtgctaagcacacctcttattacatggacgtgtggggaaaaggcacaaccgtgaccgtgtccagcggcggaggcggctctggcggcggcggcagcggcggtggcggaagccagaccgtggtgacacaggagccttctctgagcgtgagccccggcggcaccgtgaccctgacatgcggcctgagcagcggctccgtctccaccagctactatcctagctggtatcagcagacccctggccaggcccctagaaccctgatctacagcacaaacatccggagctctggagtgccagacagatttagcggaagcatcctgggcaacaaggccgccctgaccatcaccggcgcccaggctgacgacgagagtgattactactgcaagctgtacatgggctctggcatcatcttcggcagcggaacaaaggtgacagttctggcggccgcaaccacgacgccagcgccgcggccaccaacaccggcgcccaccatcgcgtcgcagcccctgtccctgcgcccagaggcgtgccggccagcggcggggggcgcagtgcacacgagggggctggacttcgcctgtgatatctacatctgggcgcccttggccgggacttgtggggtccttctcctgtcactggttatcaccctttactgcaaacggggcagaaagaaactcctgtatatattcaaacaaccatttatgagaccagtacaaactactcaagaggaagatggctgtagctgccgatttccagaagaagaagaaggaggatgtgaactgagagtgaagttcagcaggagcgcagacgcccccgcgtaccagcagggccagaaccagctctataacgagctcaatctaggacgaagagaggagtacgatgttttggacaagagacgtggccgggaccctgagatggggggaaagccgagaaggaagaaccctcaggaaggcctgtacaatgaactgcagaaagataagatggcggaggcctacagtgagattgggatgaaaggcgagcgccggaggggcaaggggcacgatggcctttaccagggtctcagtacagccaccaaggacacctacgacgcccttcacatgcaggccctgccccctcgc

SEQ ID NO: 2449 - DNA, 1482 bp, synthetic construct
  misc_feature 1..1482: note = Synthetic
  source 1..1482: mol_type = other DNA
atggccttaccagtgaccgccttgctcctgccgctggccttgctgctccacgccgccaggccgcaagtgcagctggtggaaagcggcggtggagtggtgcaacctggcagaagcctgcggctgagctgcgccgcttctggcttcacattttctaattacgacaagcactgggtgcggcaggcccctggcaaaggcctggagtgggtcgctgtgatctggtatgacggcagcaacaagtactacgccgacagcgtgaagggcagattcaccatcagcagagacaacagcaagaacaccctgtacctgcagatgaacagcctgcgggctgaagataccgccatgtactattgtgccaggggcgataattggaacgacgagcaccactacttctactacatggacgtgtggggaaagggcaccacagtgaccgtgtccagcggcggcggcggcagcggcggcggcggcagcggcggcggcggcagcgagatcgtgctgacacagtcccctgactttcagagcgtgacccctaaggaaaaggtcacaattacatgcagagcctctcagagcatcggcagctctctgcactggtatcagcagaaacctgatcagagccccaagctgctgatcaaattcgccagccagagcttctccggcgtgccaagcagattcagcggcagcggcagcggaaccgatttcaccctgaccatccattctctggaggccgaggacgccgccacctactactgccaccagtctagcagcctgccctggaccttcggccagggcacaaaggttgagatcaaggcggccgcaaccacgacgccagcgccgcggccaccaacaccggcgcccaccatcgcgtcgcagcccctgtccctgcgcccagaggcgtgccggccagcggcggggggcgcagtgcacacgagggggctggacttcgcctgtgatatctacatctgggcgcccttggccgggacttgtggggtccttctcctgtcactggttatcaccctttactgcaaacggggcagaaagaaactcctgtatatattcaaacaaccatttatgagaccagtacaaactactcaagaggaagatggctgtagctgccgatttccagaagaagaagaaggaggatgtgaactgagagtgaagttcagcaggagcgcagacgcccccgcgtaccagcagggccagaaccagctctataacgagctcaatctaggacgaagagaggagtacgatgttttggacaagagacgtggccgggaccctgagatggggggaaagccgagaaggaagaaccctcaggaaggcctgtacaatgaactgcagaaagataagatggcggaggcctacagtgagattgggatgaaaggcgagcgccggaggggcaaggggcacgatggcctttaccagggtctcagtacagccaccaaggacacctacgacgcccttcacatgcaggccctgccccctcgc

SEQ ID NO: 2450 - DNA, 1476 bp, synthetic construct
  misc_feature 1..1476: note = Synthetic
  source 1..1476: mol_type = other DNA
atggccttaccagtgaccgccttgctcctgccgctggccttgctgctccacgccgccaggccgcaagtgcagctggtccagtctggagctgaggtgaagaagcccggcgccagcgtgaaggtgtcctgtaaagcctctggttatacattcacaaactatggcttcagctgggttagacaggcccctggacagggcctggactggatgggatggatcagcgcctacaacggctacaccaactacacccagaagctgcagggcagagtgacaatgaccacagataccagcaccaccacagcttacatggaactgaggtccctgcggagcgacgacaccgccgtgtactactgcgccagacggggcctgctgtactactactacagcatggacgtgtggggcaagggcaccaccgtgaccgtgtcttctggcggcggcggaagcggcggcggaggaagcggcggcggcggcagcgagatcgtgctgacccaatctcctgccacactgagcctctccccaggcgagcgggccaccctgagctgcggcgcttctcagagcgtgtacaatagctacctggcctggtatcagcagaaacccggcctggctcctagactgctgatctacgacgccagcctgagagccaccggcgtgcctgatagattcagcggcagcggcagcggaaccgacttcaccctgacaatcagcacactggaacccgaggattttgccgtgtactattgccagcagtacggcggcagccctatgtacacattcggccagggcaccaagctggaaatcaaggcggccgcaaccacgacgccagcgccgcggccaccaacaccggcgcccaccatcgcgtcgcagcccctgtccctgcgcccagaggcgtgccggccagcggcggggggcgcagtgcacacgagggggctggacttcgcctgtgatatctacatctgggcgcccttggccgggacttgtggggtccttctcctgtcactggttatcaccctttactgcaaacggggcagaaagaaactcctgtatatattcaaacaaccatttatgagaccagtacaaactactcaagaggaagatggctgtagctgccgatttccagaagaagaagaaggaggatgtgaactgagagtgaagttcagcaggagcgcagacgcccccgcgtaccagcagggccagaaccagctctataacgagctcaatctaggacgaagagaggagtacgatgttttggacaagagacgtggccgggaccctgagatggggggaaagccgagaaggaagaaccctcaggaaggcctgtacaatgaactgcagaaagataagatggcggaggcctacagtgagattgggatgaaaggcgagcgccggaggggcaaggggcacgatggcctttaccagggtctcagtacagccaccaaggacacctacgacgcccttcacatgcaggccctgccccctcgc

SEQ ID NO: 2451 - DNA, 1464 bp, synthetic construct
  misc_feature 1..1464: note = Synthetic
  source 1..1464: mol_type = other DNA
atggccttaccagtgaccgccttgctcctgccgctggccttgctgctccacgccgccaggccggaggtgcagctgctggaaagcggcggcggactggtgcaacctggcggctctctgcggctgtcctgtaccgccagcggcttcaccttcagcagcttcgccatgagctgggtcagacaggctccaggaaaaggcctggaatgggtgtctgccatgagcggatctggcgacaccacatactacgccgattccgtgaagggcagatttaccatcagcagagataatagcaagacaacactgtatctgcagatgaacagcctgagggccgaggacacagccgtgtacagctgcgccaagcacaccacctactacatggacgtgtggggcaaaggcaccaccgtcacagtgtccagcggcggaggcggcagcggaggcggcggcagcggcggaggaggctctcagaccgtggtgacccaggagcctagcctgtccgtgtcccctggcggcaccgtgaccctcacatgcggcctgagcagcggctcagtttccacgagcgactaccccagctggtatcagcaaacccctggacaggctcctcggaccctgatctacagaaccaacacccggagcagcggcgtgcccgatagattctctggctctatcctgggcaacaaggccgctctgaccattacaggcgcccaggccgacgacgagagcgattattactgcgtgctgtacatggacagcggcatcatcttcggctctggaacaaaggtgacagtgctggcggccgcaaccacgacgccagcgccgcggccaccaacaccggcgcccaccatcgcgtcgcagcccctgtccctgcgcccagaggcgtgccggccagcggcggggggcgcagtgcacacgagggggctggacttcgcctgtgatatctacatctgggcgcccttggccgggacttgtggggtccttctcctgtcactggttatcaccctttactgcaaacggggcagaaagaaactcctgtatatattcaaacaaccatttatgagaccagtacaaactactcaagaggaagatggctgtagctgccgatttccagaagaagaagaaggaggatgtgaactgagagtgaagttcagcaggagcgcagacgcccccgcgtaccagcagggccagaaccagctctataacgagctcaatctaggacgaagagaggagtacgatgttttggacaagagacgtggccgggaccctgagatggggggaaagccgagaaggaagaaccctcaggaaggcctgtacaatgaactgcagaaagataagatggcggaggcctacagtgagattgggatgaaaggcgagcgccggaggggcaaggggcacgatggcctttaccagggtctcagtacagccaccaaggacacctacgacgcccttcacatgcaggccctgccccctcgc

SEQ ID NO: 2452 - DNA, 1464 bp, synthetic construct
  misc_feature 1..1464: note = Synthetic
  source 1..1464: mol_type = other DNA
atggccttaccagtgaccgccttgctcctgccgctggccttgctgctccacgccgccaggccggaggtgcagctgctggaaagcggcggcggcctggtgcaacctggcggaagtctgcggctgtcttgtgccgcttctggattcaccttcaacacctacgccatgagctgggtgcggcaggcccctggcaaaggcctggaatgggtctccgccatgagcggctctggcgacacaacctactatgccgacagcgtgaagggcagatttacaatcagcagggataacagcaagaccaccctgtacctgcagatgaacagcctccgggccgaggacaccgccgtgtacagctgcgccaagcacaccagctactacatggacgtgtggggcaaaggcaccaccgtgaccgtgtccagcggaggtggcggcagcggcggcggaggctccggcggcggaggctcacagaccgtcgtgacccaggagccttctctgagcgtgtctccaggaggcacagttactctgacatgcggcctgtctagcggcagcgtgtccaccagcgactaccccagctggtatcagcaaacacctggccaggctcctagaaccctgatctatagaacaaataccagaagcagcggcgtgcccgatagattcagcggaagcatcctgggcaacaaggccgccctgaccatcaccggcgcccaggctgacgacgagtctgattactactgcgtgctgtacatgggcagcggcatcattttcggcagcggaacaaaggtgacagtgctggcggccgcaaccacgacgccagcgccgcggccaccaacaccggcgcccaccatcgcgtcgcagcccctgtccctgcgcccagaggcgtgccggccagcggcggggggcgcagtgcacacgagggggctggacttcgcctgtgatatctacatctgggcgcccttggccgggacttgtggggtccttctcctgtcactggttatcaccctttactgcaaacggggcagaaagaaactcctgtatatattcaaacaaccatttatgagaccagtacaaactactcaagaggaagatggctgtagctgccgatttccagaagaagaagaaggaggatgtgaactgagagtgaagttcagcaggagcgcagacgcccccgcgtaccagcagggccagaaccagctctataacgagctcaatctaggacgaagagaggagtacgatgttttggacaagagacgtggccgggaccctgagatggggggaaagccgagaaggaagaaccctcaggaaggcctgtacaatgaactgcagaaagataagatggcggaggcctacagtgagattgggatgaaaggcgagcgccggaggggcaaggggcacgatggcctttaccagggtctcagtacagccaccaaggacacctacgacgcccttcacatgcaggccctgccccctcgc

SEQ ID NO: 2453 - DNA, 1464 bp, synthetic construct
  misc_feature 1..1464: note = Synthetic
  source 1..1464: mol_type = other DNA
atggccttaccagtgaccgccttgctcctgccgctggccttgctgctccacgccgccaggccggaagtgcagctgctggaaagcggcggcgacctggtgcaacctggcggctccctgagactgagctgcgccgcttctggctttaccttcagcacctacgccatgagctgggtgcggcaggcccctggcaaaggactggagtgggtctccgccatcagcggcagcggcgagaatatctactacgctgatagcgtgaagggcagattcaccattagcagagataattctaagaacaccctgttcctgcagatgaacagcctgcgggccgaagataccgccgtgtactactgcgccaagcacacatcttactacatggacgtgtggggcaaaggcaccaccgtcacagtgtccagcggaggcggcggcagcggcggaggcggcagcggaggaggcggctcacagaccgtggtgacccaagagcccagcttctctgtgtccccaggtggcaccgtgacactgacatgcggcctgtacagcgacagcgtgtctacaagctactatcctagctggtatcagcagacacctggccaggctcctagaaccctgatctacaacaccaacacaagaagcagcggcgtgcccgaccggtttagcggaagcatcctgggcaacaaggccgccctgaccatcaccggcgcccaggccgacgacgagagcgactactattgtgtgctgtacatggtgtccggcatcgtgttcggctctggaacaaaggtgaccgttctggcggccgcaaccacgacgccagcgccgcggccaccaacaccggcgcccaccatcgcgtcgcagcccctgtccctgcgcccagaggcgtgccggccagcggcggggggcgcagtgcacacgagggggctggacttcgcctgtgatatctacatctgggcgcccttggccgggacttgtggggtccttctcctgtcactggttatcaccctttactgcaaacggggcagaaagaaactcctgtatatattcaaacaaccatttatgagaccagtacaaactactcaagaggaagatggctgtagctgccgatttccagaagaagaagaaggaggatgtgaactgagagtgaagttcagcaggagcgcagacgcccccgcgtaccagcagggccagaaccagctctataacgagctcaatctaggacgaagagaggagtacgatgttttggacaagagacgtggccgggaccctgagatggggggaaagccgagaaggaagaaccctcaggaaggcctgtacaatgaactgcagaaagataagatggcggaggcctacagtgagattgggatgaaaggcgagcgccggaggggcaaggggcacgatggcctttaccagggtctcagtacagccaccaaggacacctacgacgcccttcacatgcaggccctgccccctcgc

SEQ ID NO: 2454 - DNA, 1482 bp, synthetic construct
  misc_feature 1..1482: note = Synthetic
  source 1..1482: mol_type = other DNA
atggccttaccagtgaccgccttgctcctgccgctggccttgctgctccacgccgccaggccgcaagtgcagctggtggaaagcggaggcggagttgtgcaacctggcagatctctgcgcctgtcatgcgccgccagcggctttacattctccagctacggcatgcactgggtgcggcaggcccctggcaaaggcctggaatgggtcgctgtgatctggtacgacggcatcaacaaatactacgccgacagcgtgaagggcagattcaccatcagcagagataatagcaagaacaccctgtacctgcagatgaacagcctgcgggccgaggacactgccgtgtactactgcgccagagagcggctggaacggagatactactactacatggacgtgtggggcaagggcaccaccgtgaccgtgtccagtggtggcggaggatctggcggaggcggctctggcggcggcggcagccagaccgtggtgacccaggagcctagcttcagcgtgtcccccggaggcacagtgaccctgacatgcggcctcagctctggctccgtcagcacctcttactatcctggatggtatcagcagacacctggccaggccccaagaaccctgatctacagcacaaacaccagaagcagcggcgtgcccgatagatttagcggcagcatcctgggcaacaaggccgccctgaccattacaggcgcccaggctgatgacgagagcgactactactgtgtgctgtacatgggcagcggcatgttcatcttcggctctggaaccaaggtgacagtgctggcggccgcaaccacgacgccagcgccgcggccaccaacaccggcgcccaccatcgcgtcgcagcccctgtccctgcgcccagaggcgtgccggccagcggcggggggcgcagtgcacacgagggggctggacttcgcctgtgatatctacatctgggcgcccttggccgggacttgtggggtccttctcctgtcactggttatcaccctttactgcaaacggggcagaaagaaactcctgtatatattcaaacaaccatttatgagaccagtacaaactactcaagaggaagatggctgtagctgccgatttccagaagaagaagaaggaggatgtgaactgagagtgaagttcagcaggagcgcagacgcccccgcgtaccagcagggccagaaccagctctataacgagctcaatctaggacgaagagaggagtacgatgttttggacaagagacgtggccgggaccctgagatggggggaaagccgagaaggaagaaccctcaggaaggcctgtacaatgaactgcagaaagataagatggcggaggcctacagtgagattgggatgaaaggcgagcgccggaggggcaaggggcacgatggcctttaccagggtctcagtacagccaccaaggacacctacgacgcccttcacatgcaggccctgccccctcgc

SEQ ID NO: 2455 - DNA, 1464 bp, synthetic construct
  misc_feature 1..1464: note = Synthetic
  source 1..1464: mol_type = other DNA
atggccttaccagtgaccgccttgctcctgccgctggccttgctgctccacgccgccaggccggaggtgcagctgctggaatctggaggcggcctcgtgcagcctggaggcagcctgaggctgagctgcgctgcttctggcttcaccttcagcagcttcgccatgagctgggtcagacaagctcccggcaaaggcctggaatgggtgtccgccgtgtctggcagcggcgacgatacctactacgccgatagcgtgaaaggaagatttacaatcagccgggacaacagcaagaataccctgtacctgcagatgaactctctgcgggccgaggacaccgccgtgtactattgcgccaagcacaccagctactacctggacgtgtggggcaagggcaccaccgtgaccgtttccagcggcggcggcggcagcggcggaggtggaagcggcggaggcggatctcagacagtggtgacacaggagcctagcttttctgtgtcccctggcggcaccgtgacactgacatgcgccctgagctccgatagcgtgtcaacatcttacttccccagctggtatcggcagacccctggacaggcccctagaaccctgatctacaacaccaacaccagaagcagcggcgtgccagatagattcagcggctccatcctgggcaacaaggccgccctgaccattacaggcgcccaggccgacgacgagagcgactactactgtgtgctgtacatgggcagcggcatcatcttcggctctggcacaaaggtgaccgtcctggcggccgcaaccacgacgccagcgccgcggccaccaacaccggcgcccaccatcgcgtcgcagcccctgtccctgcgcccagaggcgtgccggccagcggcggggggcgcagtgcacacgagggggctggacttcgcctgtgatatctacatctgggcgcccttggccgggacttgtggggtccttctcctgtcactggttatcaccctttactgcaaacggggcagaaagaaactcctgtatatattcaaacaaccatttatgagaccagtacaaactactcaagaggaagatggctgtagctgccgatttccagaagaagaagaaggaggatgtgaactgagagtgaagttcagcaggagcgcagacgcccccgcgtaccagcagggccagaaccagctctataacgagctcaatctaggacgaagagaggagtacgatgttttggacaagagacgtggccgggaccctgagatggggggaaagccgagaaggaagaaccctcaggaaggcctgtacaatgaactgcagaaagataagatggcggaggcctacagtgagattgggatgaaaggcgagcgccggaggggcaaggggcacgatggcctttaccagggtctcagtacagccaccaaggacacctacgacgcccttcacatgcaggccctgccccctcgc

SEQ ID NO: 2456 - DNA, 1482 bp, synthetic construct
  misc_feature 1..1482: note = Synthetic
  source 1..1482: mol_type = other DNA
atggccttaccagtgaccgccttgctcctgccgctggccttgctgctccacgccgccaggccgcaagtgcagctggtggaaagcggaggcggcgtcgtgcaacctggcagaagcctgagactgagctgcgccgccagcggctttaacttcagcaccttcgacatccactgggtgcggcaggcccctggaaaaggcctggagtgggtcgccctgatctggtatgacggcagctacaagtactacgccgatagcgttaagggcaggttcaccatcagcagagataattctaagaacaccctggacctgagaatgaacagcctccgggctgaggacaccgccgtgtactactgcgccagaaatgacaactggaacgacgagcattactatcactactacatggacgtgtggggcaagggcaccaccgtgacagtgtcctctggcggcggcggcagcggcggcggcggcagcggtggaggcggaagcgagatcgtgctgacccagtctcctgatttccagtccgtgacccctaaggaaaaggtgaccatcacctgtagagcttctcagagcatcggcagctctctgcactggtatcagcagaaacctgaccagagcccaaagctgctgatcaaattcgccagccagtccttcagcggcgtgccctcccggtttagcggctccggcagcggaacagacttcaccctgacaattaacagcctggaagccgaggatgccgccacatacttctgccaccagtcttctagcctgccctggacattcggccagggcacaaaggtggagatcaaggcggccgcaaccacgacgccagcgccgcggccaccaacaccggcgcccaccatcgcgtcgcagcccctgtccctgcgcccagaggcgtgccggccagcggcggggggcgcagtgcacacgagggggctggacttcgcctgtgatatctacatctgggcgcccttggccgggacttgtggggtccttctcctgtcactggttatcaccctttactgcaaacggggcagaaagaaactcctgtatatattcaaacaaccatttatgagaccagtacaaactactcaagaggaagatggctgtagctgccgatttccagaagaagaagaaggaggatgtgaactgagagtgaagttcagcaggagcgcagacgcccccgcgtaccagcagggccagaaccagctctataacgagctcaatctaggacgaagagaggagtacgatgttttggacaagagacgtggccgggaccctgagatggggggaaagccgagaaggaagaaccctcaggaaggcctgtacaatgaactgcagaaagataagatggcggaggcctacagtgagattgggatgaaaggcgagcgccggaggggcaaggggcacgatggcctttaccagggtctcagtacagccaccaaggacacctacgacgcccttcacatgcaggccctgccccctcgc

SEQ ID NO: 2457 - DNA, 1497 bp, synthetic construct
  misc_feature 1..1497: note = Synthetic
  source 1..1497: mol_type = other DNA
atggccttaccagtgaccgccttgctcctgccgctggccttgctgctccacgccgccaggccggaggtgcacctgctggaaagcggcggcggcctggtgcagcctggaggctctctgcggctgagctgtgccgcctctggttttaccttcagcagctacgccatgaattgggttagacaggcccctggcaagggcctggaatgggtcagcagcatcagcggctccggcagcagctcttactatgctgatagcgtgaagggcagattcaccattagcagagacaatagcaagaacaccctgtacctgcagatgaacagcctgcgggccgaggacaccgccgtgtactactgcgccagccggggcttcaactcccaataccctcctggctactactactactacatggacgtgtggggaaaaggcacgaccgtgaccgtgtcctccggcggcggcggaagcggcggcggcggctctggcggaggcggcagccagaccgtggtgacacaggagcctagcttcagcgtgtctccaggaggaacagtgaccctgacatgcggcctcagcagcggctctgtgtccaccagctatttccccagctggtatcagcagacccctggccaggctcccaggaccctgatctacatcaccaacacaagaagcagcggcgtgcccgacagattttctggcagcatcatcggcaacaaggccgctctgaccatcacaggcgcccaggccgacgacgagagtgattacttctgcgtgctgtacatgggcagcggaacatgggtgttcggcggaggcacaaagctgaccgtcctggcggccgcaaccacgacgccagcgccgcggccaccaacaccggcgcccaccatcgcgtcgcagcccctgtccctgcgcccagaggcgtgccggccagcggcggggggcgcagtgcacacgagggggctggacttcgcctgtgatatctacatctgggcgcccttggccgggacttgtggggtccttctcctgtcactggttatcaccctttactgcaaacggggcagaaagaaactcctgtatatattcaaacaaccatttatgagaccagtacaaactactcaagaggaagatggctgtagctgccgatttccagaagaagaagaaggaggatgtgaactgagagtgaagttcagcaggagcgcagacgcccccgcgtaccagcagggccagaaccagctctataacgagctcaatctaggacgaagagaggagtacgatgttttggacaagagacgtggccgggaccctgagatggggggaaagccgagaaggaagaaccctcaggaaggcctgtacaatgaactgcagaaagataagatggcggaggcctacagtgagattgggatgaaaggcgagcgccggaggggcaaggggcacgatggcctttaccagggtctcagtacagccaccaaggacacctacgacgcccttcacatgcaggccctgccccctcgc

SEQ ID NO: 2458 - DNA, 1458 bp, synthetic construct
  misc_feature 1..1458: note = Synthetic
  source 1..1458: mol_type = other DNA
atggccttaccagtgaccgccttgctcctgccgctggccttgctgctccacgccgccaggccggaggtgcagctgctggaaagcggcggcggcctggtgcaacctggcggctccctgaggctgagctgcgccgccagcggcttcacctttagcaactacgctatgacctgggtcagacaggcccctggaaagggcctggagtgggtgtccgccatcagcggatctggtattggaacatactacgccgacagcgtgcaaggcagattcacaacaagcagagataattctaagaacaccctgtacctgcagatgaacagcctgcgggccgaggacaccgccgtgtactattgtgccaagggcggctacaactggaaggacgtgtggggcaagggaaccaccgtgaccgtttcttctggcggcggaggcagcggcggcggaggctccggaggcggaggcagcgagatcgtgctgacacagtctcccgactttcagagcgtgacccctaaagagaaggtgacaatcacctgcagagccagccagtcaatcggctctagcctgcactggtatcagcagaaacctgatcagagccctaagctgctgatcaagttcgcctctcagagcttcagcggcgtgccaagccggttcagcggctccggcagcggcaccgacttcaccctgaccatccacagcctggaggccgaagatgccgctacatactactgccaccagtccagcagcctcccctggaccttcggccagggcacaaaggtggaaatcaaagcggccgcaaccacgacgccagcgccgcggccaccaacaccggcgcccaccatcgcgtcgcagcccctgtccctgcgcccagaggcgtgccggccagcggcggggggcgcagtgcacacgagggggctggacttcgcctgtgatatctacatctgggcgcccttggccgggacttgtggggtccttctcctgtcactggttatcaccctttactgcaaacggggcagaaagaaactcctgtatatattcaaacaaccatttatgagaccagtacaaactactcaagaggaagatggctgtagctgccgatttccagaagaagaagaaggaggatgtgaactgagagtgaagttcagcaggagcgcagacgcccccgcgtaccagcagggccagaaccagctctataacgagctcaatctaggacgaagagaggagtacgatgttttggacaagagacgtggccgggaccctgagatggggggaaagccgagaaggaagaaccctcaggaaggcctgtacaatgaactgcagaaagataagatggcggaggcctacagtgagattgggatgaaaggcgagcgccggaggggcaaggggcacgatggcctttaccagggtctcagtacagccaccaaggacacctacgacgcccttcacatgcaggccctgccccctcgc

SEQ ID NO: 2459 - DNA, 1482 bp, synthetic construct
  misc_feature 1..1482: note = Synthetic
  source 1..1482: mol_type = other DNA
atggccttaccagtgaccgccttgctcctgccgctggccttgctgctccacgccgccaggccgcaagtgcagctggtggagagcggcggcggcgtcgtgcagcccggcagaagcctgcggctgtcttgcgctgccagcggcttcacctttacaaactacgacatgcactgggtcagacaggcccctggcaaaggcctggaatgggtgaccatcatctggcacgacggctccaataagtactacctggacagcgtgcggggcagattcacgatcagcagagataattccaagaacaccctgtacctgcagatgaacagcctgagagccgaggacaccgccgtgtactattgcgccagaggcgacaactggaacgacgagcaccactacttctactacatggacgtgtggggcaagggcaccaccgtgaccgtgtccagcggcggaggcggctccggaggaggcggctctggtggcggcggcagcgagatcgtgctgacccagagccctgacttccagtctgtgacacctaaggaaaaggtgacaatcacctgtagggccagccaaagcatcggcagcagcctgcattggtatcagcagaagcccgatcagtctccaaagctgctgatcaaattcgccagccagagcttcagcggagttcctagccggttcagcggctctggcagcggaacagatttcaccctgacaattcactctctggaggccgaggatgccgccacatattactgccaccagtctagcagcctgccttggacctttggacagggcaccaaggtggaaatcaaggcggccgcaaccacgacgccagcgccgcggccaccaacaccggcgcccaccatcgcgtcgcagcccctgtccctgcgcccagaggcgtgccggccagcggcggggggcgcagtgcacacgagggggctggacttcgcctgtgatatctacatctgggcgcccttggccgggacttgtggggtccttctcctgtcactggttatcaccctttactgcaaacggggcagaaagaaactcctgtatatattcaaacaaccatttatgagaccagtacaaactactcaagaggaagatggctgtagctgccgatttccagaagaagaagaaggaggatgtgaactgagagtgaagttcagcaggagcgcagacgcccccgcgtaccagcagggccagaaccagctctataacgagctcaatctaggacgaagagaggagtacgatgttttggacaagagacgtggccgggaccctgagatggggggaaagccgagaaggaagaaccctcaggaaggcctgtacaatgaactgcagaaagataagatggcggaggcctacagtgagattgggatgaaaggcgagcgccggaggggcaaggggcacgatggcctttaccagggtctcagtacagccaccaaggacacctacgacgcccttcacatgcaggccctgccccctcgc

SEQ ID NO: 2460 - DNA, 1482 bp, synthetic construct
  misc_feature 1..1482: note = Synthetic
  source 1..1482: mol_type = other DNA
atggccttaccagtgaccgccttgctcctgccgctggccttgctgctccacgccgccaggccgcaggtgcagctggttgagagcggcggaggcgtggtgcaacctggaagatctctgcgcctgagctgcgccgccagcggcttcaccttcagcaactacgatatgcactgggtgcggcaggcccctggcaagggcctggaatgggtcaccattatctggcatgacggcagcaacaagtactacctggacagcgtgaaaggcagattcaccatcagcagagacaatagcaagaacaccctgtacctgcagatgaacagcctgcgggccgaggacaccgccgtgtactattgcgccagaggcgacaactggaacgacgagcaccactacttctactatatggacgtgtggggcaaaggcacaaccgtgaccgtcagcagcggcggcggaggcagcggaggcggaggctctggcggcggtggcagtgaaatcgtgctgacccagagccccgctacactgagcctctcccctggcgagcgggccacactgtcttgtagagcctctcagtccgtgtccagcagcctggcctggtatcagcagaagcccggccaggctccaagactgctgatctacgacgccagcaatagagccaccggcatccccgcccggttttccggcagcggatctggaacagattttaccctgaccatcagcagcctggaacctgaggatttcgccgtgtactactgccagcaaagaagcaactggcctctgacattcggcggcggcacaaaggtggaaatcaaggcggccgcaaccacgacgccagcgccgcggccaccaacaccggcgcccaccatcgcgtcgcagcccctgtccctgcgcccagaggcgtgccggccagcggcggggggcgcagtgcacacgagggggctggacttcgcctgtgatatctacatctgggcgcccttggccgggacttgtggggtccttctcctgtcactggttatcaccctttactgcaaacggggcagaaagaaactcctgtatatattcaaacaaccatttatgagaccagtacaaactactcaagaggaagatggctgtagctgccgatttccagaagaagaagaaggaggatgtgaactgagagtgaagttcagcaggagcgcagacgcccccgcgtaccagcagggccagaaccagctctataacgagctcaatctaggacgaagagaggagtacgatgttttggacaagagacgtggccgggaccctgagatggggggaaagccgagaaggaagaaccctcaggaaggcctgtacaatgaactgcagaaagataagatggcggaggcctacagtgagattgggatgaaaggcgagcgccggaggggcaaggggcacgatggcctttaccagggtctcagtacagccaccaaggacacctacgacgcccttcacatgcaggccctgccccctcgc

SEQ ID NO: 2461 - DNA, 1470 bp, synthetic construct
  misc_feature 1..1470: note = Synthetic
  source 1..1470: mol_type = other DNA
atggccttaccagtgaccgccttgctcctgccgctggccttgctgctccacgccgccaggccggaagtgcagctggtcgagagcggcggcggcgtggtgcggcctggcgggtccctgagactgagctgcgccgcctctggcttcaccttcgacgactatggcatgagctgggtcagacaggcccctggaaaaggcctggaatgggtgtccggaatcaactggaatggcggcagtacaggctacgtggacagcgtgaagggcagattcaccatcagccgggacaacgccaagaacagcctgtatctgcagatgaacagcctgcgggccgaggacaccgccctgtaccactgtgccagacctgtgacaaccgactactactactacatggacgtgtggggcaagggcaccaccgtgaccgtgtcttccggcggaggaggcagcggcggcggcggcagcggcggaggcggcagcgagatcgtgctgacacagagccccggaacactgagcctgagccctggcgagcgggctacactgtcttgcagagcttctcagagcgtttcctccagctacctggcctggtatcagcaaaagcccggccaagctccaagactgctgatctacggcgccagctctagggccaccggcattcctgatagattcagcggctctggcagcggaacagattttaccctgaccatcagcagactggagcctgaggatttcgccgtgtactactgccagcagtacggatctagctggacctttggccagggcaccaaggtggaaatcaaagcggccgcaaccacgacgccagcgccgcggccaccaacaccggcgcccaccatcgcgtcgcagcccctgtccctgcgcccagaggcgtgccggccagcggcggggggcgcagtgcacacgagggggctggacttcgcctgtgatatctacatctgggcgcccttggccgggacttgtggggtccttctcctgtcactggttatcaccctttactgcaaacggggcagaaagaaactcctgtatatattcaaacaaccatttatgagaccagtacaaactactcaagaggaagatggctgtagctgccgatttccagaagaagaagaaggaggatgtgaactgagagtgaagttcagcaggagcgcagacgcccccgcgtaccagcagggccagaaccagctctataacgagctcaatctaggacgaagagaggagtacgatgttttggacaagagacgtggccgggaccctgagatggggggaaagccgagaaggaagaaccctcaggaaggcctgtacaatgaactgcagaaagataagatggcggaggcctacagtgagattgggatgaaaggcgagcgccggaggggcaaggggcacgatggcctttaccagggtctcagtacagccaccaaggacacctacgacgcccttcacatgcaggccctgccccctcgc

SEQ ID NO: 2462 - DNA, 1494 bp, synthetic construct
  misc_feature 1..1494: note = Synthetic
  source 1..1494: mol_type = other DNA
atggccttaccagtgaccgccttgctcctgccgctggccttgctgctccacgccgccaggccggaggtgcagctgctggagagcggaggaggcctggtgcaacctggcggcagcctgcggctgagctgcgccgcttccggcttcaccttcagcagctacgccatgagctgggtgcggcaggctcctggaaaaggcctggagtgggtcagcgccatcagcggcagcggaggctcaacatactacgccgacagcgtgaagggcagattcaccatcagccgcgacaactctaagaacaccctgtacctgcagatgaactctctgagagccgaggacaccgccgtgtactattgtgccaagaagggcacaagctacaactggaatgatgtgcactactactactactattatatggacgtgtggggcaaaggcacaaccgtgaccgtgtccagcggcggtggaggcagcggaggcggcggaagcggcggcggcggcagtgaaattgtgctgacccagagccccggcaccctgagcctgtctccaggcgagcgggctaccctgtcctgcagagccagccagtctgtttccagctcttacctggcctggtatcagcaaaagcctggacaggcccctagactgctgatctacggcgcctctagcagggctacaggcatccctgatagatttagcggcagcggctctggcaccgacttcaccctgaccatctccagactggaacccgaggatttcgccgtgtactactgccagcagtacggcagcagctggacatttggccagggcacaaaggtggaaatcaaggcggccgcaaccacgacgccagcgccgcggccaccaacaccggcgcccaccatcgcgtcgcagcccctgtccctgcgcccagaggcgtgccggccagcggcggggggcgcagtgcacacgagggggctggacttcgcctgtgatatctacatctgggcgcccttggccgggacttgtggggtccttctcctgtcactggttatcaccctttactgcaaacggggcagaaagaaactcctgtatatattcaaacaaccatttatgagaccagtacaaactactcaagaggaagatggctgtagctgccgatttccagaagaagaagaaggaggatgtgaactgagagtgaagttcagcaggagcgcagacgcccccgcgtaccagcagggccagaaccagctctataacgagctcaatctaggacgaagagaggagtacgatgttttggacaagagacgtggccgggaccctgagatggggggaaagccgagaaggaagaaccctcaggaaggcctgtacaatgaactgcagaaagataagatggcggaggcctacagtgagattgggatgaaaggcgagcgccggaggggcaaggggcacgatggcctttaccagggtctcagtacagccaccaaggacacctacgacgcccttcacatgcaggccctgccccctcgc

SEQ ID NO: 2463 - DNA, 1476 bp, synthetic construct
  misc_feature 1..1476: note = Synthetic
  source 1..1476: mol_type = other DNA
atggccttaccagtgaccgccttgctcctgccgctggccttgctgctccacgccgccaggccgcagctgcaactgcaggagagcggtcctggactggtgaagccttctgagacactgagcctgacctgcaccgtgtccggcggctctatcagctcctccagctactactggggctggatcagacagccacctggcaagggcctggaatggatcggcagcatttactattctggctcaacatactacaaccccagccttaaaagcagagtgacaatcagcgtggacaccagcaagaaccagttcagcctgaagctgtcctctgtgaccgccgctgatactgccgtttactactgcaccaccggaacaacagcttattactactactactacatggacgtgtggggaaagggcaccacagtgaccgtgtccagcggcggaggcggcagcggcggaggaggatctggcggcggcggcagcgagatcgtgctgacccagtctccaggcaccctgagcctgagccccggcgagcgggccacactgagctgcagagcctctcagagcgtcagctctagctacctggcctggtatcagcaaaaacctggccaggcccctagactgctgatctacggcgccagcagccgggccaccggcatccctgatagattcagcggatctggcagcggcaccgactttaccctcaccatcagcagactggaacccgaggacttcgccgtgtactattgtcagcagtacggcagcagctggacattcggccagggcaccaaggtggaaatcaaggcggccgcaaccacgacgccagcgccgcggccaccaacaccggcgcccaccatcgcgtcgcagcccctgtccctgcgcccagaggcgtgccggccagcggcggggggcgcagtgcacacgagggggctggacttcgcctgtgatatctacatctgggcgcccttggccgggacttgtggggtccttctcctgtcactggttatcaccctttactgcaaacggggcagaaagaaactcctgtatatattcaaacaaccatttatgagaccagtacaaactactcaagaggaagatggctgtagctgccgatttccagaagaagaagaaggaggatgtgaactgagagtgaagttcagcaggagcgcagacgcccccgcgtaccagcagggccagaaccagctctataacgagctcaatctaggacgaagagaggagtacgatgttttggacaagagacgtggccgggaccctgagatggggggaaagccgagaaggaagaaccctcaggaaggcctgtacaatgaactgcagaaagataagatggcggaggcctacagtgagattgggatgaaaggcgagcgccggaggggcaaggggcacgatggcctttaccagggtctcagtacagccaccaaggacacctacgacgcccttcacatgcaggccctgccccctcgc

SEQ ID NO: 2464 - DNA, 1473 bp, synthetic construct
  misc_feature 1..1473: note = Synthetic
  source 1..1473: mol_type = other DNA
atggccttaccagtgaccgccttgctcctgccgctggccttgctgctccacgccgccaggccggaggtgcagctgctggagagcggtggaggcctggtgcaacctggcggctccctgcggctgagctgcgccgccagcggcttcacctttagctcttacgccatgacctgggtcagacaggcccctggcaagggactggaatgggtgtctgccatcagcggcagcggaggatctacatactacgctgatagcgtgaagggcagatttacaatcagccgcgacaatagcaagaacaccctgtacctgcagatgaacagcctgagagccgaggacaccgccgtgtactactgcgctagaggcggctacaactggcactactactactacatggacgtgtggggcaaaggaaccaccgtgaccgtgtccagcggcggcggcggctctggcggaggcggctctggcggcggcggaagcgagatcgtgctgacccagtctcccggaacactctccctgtccccaggcgagcgggctacactgagctgccgggccagccagagcgtgtcctcgtcttatctggcctggtatcagcagaaacctggccaagcccctagactgctgatctacggcgccagcagccgggccacaggcatccccgatagattcagcggcagcggaagcggcaccgacttcaccctgacaatcagcagactggaacctgaggacttcgccgtgtactattgtcagcagtacggcagcagctggaccttcggccagggcaccaaggttgaaattaaggcggccgcaaccacgacgccagcgccgcggccaccaacaccggcgcccaccatcgcgtcgcagcccctgtccctgcgcccagaggcgtgccggccagcggcggggggcgcagtgcacacgagggggctggacttcgcctgtgatatctacatctgggcgcccttggccgggacttgtggggtccttctcctgtcactggttatcaccctttactgcaaacggggcagaaagaaactcctgtatatattcaaacaaccatttatgagaccagtacaaactactcaagaggaagatggctgtagctgccgatttccagaagaagaagaaggaggatgtgaactgagagtgaagttcagcaggagcgcagacgcccccgcgtaccagcagggccagaaccagctctataacgagctcaatctaggacgaagagaggagtacgatgttttggacaagagacgtggccgggaccctgagatggggggaaagccgagaaggaagaaccctcaggaaggcctgtacaatgaactgcagaaagataagatggcggaggcctacagtgagattgggatgaaaggcgagcgccggaggggcaaggggcacgatggcctttaccagggtctcagtacagccaccaaggacacctacgacgcccttcacatgcaggccctgccccctcgc

SEQ ID NO: 2465 - DNA, 1485 bp, synthetic construct
  misc_feature 1..1485: note = Synthetic
  source 1..1485: mol_type = other DNA
atggccttaccagtgaccgccttgctcctgccgctggccttgctgctccacgccgccaggccgcaagtgcagctggtggagagcggaggcggagtcgtgcaacctggcagaagcctgagactgagctgcgccgcttctggcttcaccttttctagctacgacatgcactgggtgcggcaggcccctggaaaaggcctggaatgggtcagcgtgatctggtatgacggctccaacaagaagtacggcgacagcgccaagggcaggttcaccattagccgggacaattctaagaacaccctggacctgcagatgaacagcctgcgggctgaggacaccgccgtgtactattgtgccagaggcgataattggaacgacgagggcggctactactactactacatggacgtgtggggcaagggaacaaccgtgacagtgtccagcggcggcggcggaagcggcggcggcggatctggcggaggcggcagcgagatcgtgctgacccagagccccgacttccagtccgtgacccctaaggaaaaggtgaccatcacatgcagagccagccagaacatcggcagcagcctgcactggtatcagcagaaacctgatcagtctccaaagctgctgatcaaattcgcctctcagagcatcagcggtgttcctagcagattcagcggctccggcagcggcactgattttacactgaccatcaacagcctggaggccgaggatgccgctgcctactactgccaccagagctctagcctgccctggaccttcggccagggcacaaaggtggaaatcaaggcggccgcaaccacgacgccagcgccgcggccaccaacaccggcgcccaccatcgcgtcgcagcccctgtccctgcgcccagaggcgtgccggccagcggcggggggcgcagtgcacacgagggggctggacttcgcctgtgatatctacatctgggcgcccttggccgggacttgtggggtccttctcctgtcactggttatcaccctttactgcaaacggggcagaaagaaactcctgtatatattcaaacaaccatttatgagaccagtacaaactactcaagaggaagatggctgtagctgccgatttccagaagaagaagaaggaggatgtgaactgagagtgaagttcagcaggagcgcagacgcccccgcgtaccagcagggccagaaccagctctataacgagctcaatctaggacgaagagaggagtacgatgttttggacaagagacgtggccgggaccctgagatggggggaaagccgagaaggaagaaccctcaggaaggcctgtacaatgaactgcagaaagataagatggcggaggcctacagtgagattgggatgaaaggcgagcgccggaggggcaaggggcacgatggcctttaccagggtctcagtacagccaccaaggacacctacgacgcccttcacatgcaggccctgccccctcgc

SEQ ID NO: 2466 - DNA, 1485 bp, synthetic construct
  misc_feature 1..1485: note = Synthetic
  source 1..1485: mol_type = other DNA
atggccttaccagtgaccgccttgctcctgccgctggccttgctgctccacgccgccaggccgcaagtgcagctggtggagagcggcggcggcgtggtgcagcccggacgctccctgcggctgagctgcgccgccagcggctttaccttctctagctacgatatgcactgggtcagacaggctcctggcaaaggcctggaatgggtgtccgtgatctggtacgacggctccaacaagaagtacggcgacagcgccaagggcagattcaccatctctcgggacaatagcaagaacacactggacctgcagatgaactctctgagagccgaggacaccgccgtgtactactgcgccagaggcgataattggaacgacgagggcggttattactactactatatggacgtgtggggaaaaggcacaaccgtgaccgtttccagcggcggaggcggcagcggcggcggcggatctggcggaggcggcagcgacattcagatgacacagagccccagcagcctctccacctctgtgggcgatagagtgaccatcacatgccgggccagccagggcatcagcaactacctggcctggttccagcagaagcctggaaaggcccctaagagcctgatctacgccgccagcagcctgcagagcggagtgccatctaagttcagcggcagcggatctggcaccgacttcagcctgaccatcagctctctgcagcctgaggattttgccacatactactgtcagcagtacaacagctaccctatcacattcggccagggcaccagactggaaatcaaggcggccgcaaccacgacgccagcgccgcggccaccaacaccggcgcccaccatcgcgtcgcagcccctgtccctgcgcccagaggcgtgccggccagcggcggggggcgcagtgcacacgagggggctggacttcgcctgtgatatctacatctgggcgcccttggccgggacttgtggggtccttctcctgtcactggttatcaccctttactgcaaacggggcagaaagaaactcctgtatatattcaaacaaccatttatgagaccagtacaaactactcaagaggaagatggctgtagctgccgatttccagaagaagaagaaggaggatgtgaactgagagtgaagttcagcaggagcgcagacgcccccgcgtaccagcagggccagaaccagctctataacgagctcaatctaggacgaagagaggagtacgatgttttggacaagagacgtggccgggaccctgagatggggggaaagccgagaaggaagaaccctcaggaaggcctgtacaatgaactgcagaaagataagatggcggaggcctacagtgagattgggatgaaaggcgagcgccggaggggcaaggggcacgatggcctttaccagggtctcagtacagccaccaaggacacctacgacgcccttcacatgcaggccctgccccctcgc

SEQ ID NO: 2467 - DNA, 1476 bp, synthetic construct
  misc_feature 1..1476: note = Synthetic
  source 1..1476: mol_type = other DNA
atggccttaccagtgaccgccttgctcctgccgctggccttgctgctccacgccgccaggccgcaagtgcagctggtgcagtctggagccgaggtgaaaaagagcggcgcctcagtgaaggtgtcctgcaaggccagcggctacacactgaccagctacggcatctcttgggttagacaggcccctggacaaggcctggaatggatgggctggatcagcgcctacaacggcaacatcaactacgcccagaaattccagggcagagtgacaatgaccacagacaccagcacctccaccgcttacatggaactgcggagcctgagaagcgacgacaccgccgtgtactactgtgtgcgggacggcgatagatacaattggaaccacagctatatggacgtgtggggcaagggcacaacagtcaccgtgtcttctggaggcggaggcagcggaggcggcggcagcggcggcggcggcagcgagatcgtgctgacacagagccctgatttccaaagcgtgacccctaaggaaaaggtgaccatcacatgcagagcctctcagaacattggaagtagcctgcactggtatcagcagaaacccgatcagtccccaaagctgctgatcaagttcgccagccagagcatcagcggagtgcccagccggttcagcggctctggctctggcaccgacttcaccctgaccatcaatagcctggaggccgaggacgccgctgcttattactgccaccagagcagctccctgccttggacctttggccagggcaccaaggtcgagatcaaggcggccgcaaccacgacgccagcgccgcggccaccaacaccggcgcccaccatcgcgtcgcagcccctgtccctgcgcccagaggcgtgccggccagcggcggggggcgcagtgcacacgagggggctggacttcgcctgtgatatctacatctgggcgcccttggccgggacttgtggggtccttctcctgtcactggttatcaccctttactgcaaacggggcagaaagaaactcctgtatatattcaaacaaccatttatgagaccagtacaaactactcaagaggaagatggctgtagctgccgatttccagaagaagaagaaggaggatgtgaactgagagtgaagttcagcaggagcgcagacgcccccgcgtaccagcagggccagaaccagctctataacgagctcaatctaggacgaagagaggagtacgatgttttggacaagagacgtggccgggaccctgagatggggggaaagccgagaaggaagaaccctcaggaaggcctgtacaatgaactgcagaaagataagatggcggaggcctacagtgagattgggatgaaaggcgagcgccggaggggcaaggggcacgatggcctttaccagggtctcagtacagccaccaaggacacctacgacgcccttcacatgcaggccctgccccctcgc

SEQ ID NO: 2468 - DNA, 1476 bp, synthetic construct
  misc_feature 1..1476: note = Synthetic
  source 1..1476: mol_type = other DNA
atggccttaccagtgaccgccttgctcctgccgctggccttgctgctccacgccgccaggccgcaagtgcagctggttcagagcggagccgaggtgaaaaagtccggcgccagcgtgaaggtgtcatgcaaggcctctggctacaccctgacctcctacggcatcagctgggtccggcaggcccctggccagggcctggagtggatgggctggatcagcgcttataatggcaacatcaattacgcccagaagttccaaggcagagtgacaatgaccacagataccagcaccagcacagcttacatggaactgagatccctgcggagcgacgacaccgccgtgtactattgtgtgcgggacggcgacagatacaactggaaccacagctacatggacgtgtggggcaagggcaccaccgtgaccgtgtccagcggcggcggcggctctggaggcggcggatctggcggaggaggttccgacatccagatgacacagagccccagcagcctgagcacctctgtgggcgatagagtgaccatcacctgcagagccagccagggcatcagcaactacctggcctggttccagcagaaacctggaaaggcccctaagagcctgatctacgccgcttcttctctgcaaagcggcgtgccaagcaagttcagcggcagcggcagcggaacagacttcagcctgacaatttctagcctccagcctgaggattttgccacatactactgccagcagtacaacagctaccccatcaccttcggccagggcacaagactggaaatcaaggcggccgcaaccacgacgccagcgccgcggccaccaacaccggcgcccaccatcgcgtcgcagcccctgtccctgcgcccagaggcgtgccggccagcggcggggggcgcagtgcacacgagggggctggacttcgcctgtgatatctacatctgggcgcccttggccgggacttgtggggtccttctcctgtcactggttatcaccctttactgcaaacggggcagaaagaaactcctgtatatattcaaacaaccatttatgagaccagtacaaactactcaagaggaagatggctgtagctgccgatttccagaagaagaagaaggaggatgtgaactgagagtgaagttcagcaggagcgcagacgcccccgcgtaccagcagggccagaaccagctctataacgagctcaatctaggacgaagagaggagtacgatgttttggacaagagacgtggccgggaccctgagatggggggaaagccgagaaggaagaaccctcaggaaggcctgtacaatgaactgcagaaagataagatggcggaggcctacagtgagattgggatgaaaggcgagcgccggaggggcaaggggcacgatggcctttaccagggtctcagtacagccaccaaggacacctacgacgcccttcacatgcaggccctgccccctcgc

SEQ ID NO: 2469 - DNA, 1473 bp, synthetic construct
  misc_feature 1..1473: note = Synthetic
  source 1..1473: mol_type = other DNA
atggccttaccagtgaccgccttgctcctgccgctggccttgctgctccacgccgccaggccggaggtgcagctgctggaaagcggaggcgacctggtgcaacctggaggcagcctgcggctgagctgcgccgcttctggcttcacctttagcacctacgccatgacatgggttagacaggcccctggcaagggcctggagtgggtcagcgccatcagcggcaccagcggctctacctactacgccgacagcgtgaagggcagattcaccatctccagagataattcaaagagcaccctgtacctgcacatgaacagcctgagaaccgaggacaccgccgtgtactattgcgctagaggcggctacaactggcactactactactacatggacgtgtggggaaaaggcacaacagtgaccgtgtcttctggcggaggaggcagcggcggtggcggcagtggcggaggcggcagcgagatcgtgctgacacagtcccctgacttccagagcgtgacccctaaggaaaaggtgacaatcacctgccgggcctctcagagcatcggcagcagcctgcactggtatcagcagaagcccgatcagtccccaaagctgctgatcaaatacgtgtcccaatctatcagcggcgtgcccagccggttttctggcagcggcagcggaacagacttcaccctgaccattaactccctggaggccgaggatgccgctgcctactattgtcaccagagcagcagcctgccttggacattcggccagggcaccaaggtggaaatcaaggcggccgcaaccacgacgccagcgccgcggccaccaacaccggcgcccaccatcgcgtcgcagcccctgtccctgcgcccagaggcgtgccggccagcggcggggggcgcagtgcacacgagggggctggacttcgcctgtgatatctacatctgggcgcccttggccgggacttgtggggtccttctcctgtcactggttatcaccctttactgcaaacggggcagaaagaaactcctgtatatattcaaacaaccatttatgagaccagtacaaactactcaagaggaagatggctgtagctgccgatttccagaagaagaagaaggaggatgtgaactgagagtgaagttcagcaggagcgcagacgcccccgcgtaccagcagggccagaaccagctctataacgagctcaatctaggacgaagagaggagtacgatgttttggacaagagacgtggccgggaccctgagatggggggaaagccgagaaggaagaaccctcaggaaggcctgtacaatgaactgcagaaagataagatggcggaggcctacagtgagattgggatgaaaggcgagcgccggaggggcaaggggcacgatggcctttaccagggtctcagtacagccaccaaggacacctacgacgcccttcacatgcaggccctgccccctcgc

SEQ ID NO: 2470 - DNA, 1476 bp, synthetic construct
  misc_feature 1..1476: note = Synthetic
  source 1..1476: mol_type = other DNA
atggccttaccagtgaccgccttgctcctgccgctggccttgctgctccacgccgccaggccggaggtgcaactgctggaaagcggaggagatctggtgcagcccggcggctccctgcgcctgtcttgcgccgccagcggctttacattcagcacctacgccatgacatgggttagacaggcccctggaaaaggcctggaatgggtgtccgccatcagcggaaccagcggcagcacatactacgccgacagcgtgaagggcagattcaccatcagccgggacaacagcaagtccaccctgtacctgcacatgaacagcctgcggaccgaggacaccgccgtgtactattgcgctagaggcggttataattggcactactactactacatggacgtgtggggcaagggcacgaccgtgacagtgtccagcggcggcggaggcagcggcggaggaggctctggcggcggcggcagcgagatcgtgatgacccagtctcctgctacactgagcctgagccccggcgagcgggccaccctgagttgtagagccagccagagcgtgtcttctagctacctgagctggtatcagcaaaaacctggccttgctccaagactgctgatctacggcgcctctacaagagccaccggcatccccgccagatttagcggctctggcagcggcaccgacttcaccctgaccatctccagcctccagcctgaggatttcgccgtctactactgccagcaggattacaacctgcctcctaccttcggccagggcacaaaggtggaaattaaggcggccgcaaccacgacgccagcgccgcggccaccaacaccggcgcccaccatcgcgtcgcagcccctgtccctgcgcccagaggcgtgccggccagcggcggggggcgcagtgcacacgagggggctggacttcgcctgtgatatctacatctgggcgcccttggccgggacttgtggggtccttctcctgtcactggttatcaccctttactgcaaacggggcagaaagaaactcctgtatatattcaaacaaccatttatgagaccagtacaaactactcaagaggaagatggctgtagctgccgatttccagaagaagaagaaggaggatgtgaactgagagtgaagttcagcaggagcgcagacgcccccgcgtaccagcagggccagaaccagctctataacgagctcaatctaggacgaagagaggagtacgatgttttggacaagagacgtggccgggaccctgagatggggggaaagccgagaaggaagaaccctcaggaaggcctgtacaatgaactgcagaaagataagatggcggaggcctacagtgagattgggatgaaaggcgagcgccggaggggcaaggggcacgatggcctttaccagggtctcagtacagccaccaaggacacctacgacgcccttcacatgcaggccctgccccctcgc

SEQ ID NO: 2471 - protein, 719 aa, synthetic construct
  REGION 1..719: note = Synthetic
MALPVTALLLPLALLLHAARPQVQLVESGGGVVQPGRSLRLSCAASGFTFNNYDMYWVRQAPGKGLEWVAVTWYDGSNKYYADSVKGRFTISRDNSKNTLYLQMNSLRAEDTAVYYCARGDNWNDEHHYFYYMDVWGKGTTVTVSSGGGGSGGGGSGGGGSEIVLTQSPDFQSVTPKEKVTITCRASQSIGSSLHWYQQKPDQSPKLLIKFASQSFSGVPSRFSGSGSGTDFTLTIHSLEAEDAATYYCHQSSSLPWTFGQGTKVEIKAAATTTPAPRPPTPAPTIASQPLSLRPEACRPAAGGAVHTRGLDFACDIYIWAPLAGTCGVLLLSLVITLYCKRGRKKLLYIFKQPFMRPVQTTQEEDGCSCRFPEEEEGGCELRVKFSRSADAPAYQQGQNQLYNELNLGRREEYDVLDKRRGRDPEMGGKPRRKNPQEGLYNELQKDKMAEAYSEIGMKGERRRGKGHDGLYQGLSTATKDTYDALHMQALPPRGSGEGRGSLLTCGDVEENPGPMALPVTALLLPLALLLHAARPNWVNVISDLKKIEDLIQSMHIDATLYTESDVHPSCKVTAMKCFLLELQVISLESGDASIHDTVENLIILANNSLSSNGNVTESGCKECEELEEKNIKEFLQSFVHIVQMFINTSTTTPAPRPPTPAPTIASQPLSLRPEACRPAAGGAVHTRGLDFACDIYIWAPLAGTCGVLLLSLVITLYC

SEQ ID NO: 2472 - protein, 719 aa, synthetic construct
  REGION 1..719: note = Synthetic
MALPVTALLLPLALLLHAARPQVQLVESGGGVVQPGRSLRLSCAASGFTFSNYDMHWVRQAPGKGLEWVTIIWHDASNKYYLDSVKGRFTISRDNSKNTLYLQMNSLRAEDTAVYYCARGDNWNDEHHYFYYMDVWGKGTTVTVSSGGGGSGGGGSGGGGSEIVLTQSPDFQSVTPKEKVTITCRASQSIGSSLHWYQQKPDQSPKLLIKFASQSFSGVPSRFSGSGSGTDFTLTIHSLEAEDAATYYCHQSSSLPWTFGQGTKVEIKAAATTTPAPRPPTPAPTIASQPLSLRPEACRPAAGGAVHTRGLDFACDIYIWAPLAGTCGVLLLSLVITLYCKRGRKKLLYIFKQPFMRPVQTTQEEDGCSCRFPEEEEGGCELRVKFSRSADAPAYQQGQNQLYNELNLGRREEYDVLDKRRGRDPEMGGKPRRKNPQEGLYNELQKDKMAEAYSEIGMKGERRRGKGHDGLYQGLSTATKDTYDALHMQALPPRGSGEGRGSLLTCGDVEENPGPMALPVTALLLPLALLLHAARPNWVNVISDLKKIEDLIQSMHIDATLYTESDVHPSCKVTAMKCFLLELQVISLESGDASIHDTVENLIILANNSLSSNGNVTESGCKECEELEEKNIKEFLQSFVHIVQMFINTSTTTPAPRPPTPAPTIASQPLSLRPEACRPAAGGAVHTRGLDFACDIYIWAPLAGTCGVLLLSLVITLYC

SEQ ID NO: 2473 - protein, 719 aa, synthetic construct
  REGION 1..719: note = Synthetic
MALPVTALLLPLALLLHAARPQVQLVESGGGVVQPGRSLRLSCAASGFTFSNYDMHWVRQAPGKGLEWVTIIWHDGSNKYYLDSVKGRFTISRDNSKNTLYLQMNSLRAEDTAVYYCARGDNWNDEHHYFYYMDVWGKGTTVTVSSGGGGSGGGGSGGGGSEIVLTQSPDFQSVTPKEKVTITCRASQSIGSSLHWYQQKPDQSPKLLIKFASQSFSGVPSRFSGSGSGTDFTLTIHSLEAEDAATYYCHQSSSLPWTFGQGTKVEIKAAATTTPAPRPPTPAPTIASQPLSLRPEACRPAAGGAVHTRGLDFACDIYIWAPLAGTCGVLLLSLVITLYCKRGRKKLLYIFKQPFMRPVQTTQEEDGCSCRFPEEEEGGCELRVKFSRSADAPAYQQGQNQLYNELNLGRREEYDVLDKRRGRDPEMGGKPRRKNPQEGLYNELQKDKMAEAYSEIGMKGERRRGKGHDGLYQGLSTATKDTYDALHMQALPPRGSGEGRGSLLTCGDVEENPGPMALPVTALLLPLALLLHAARPNWVNVISDLKKIEDLIQSMHIDATLYTESDVHPSCKVTAMKCFLLELQVISLESGDASIHDTVENLIILANNSLSSNGNVTESGCKECEELEEKNIKEFLQSFVHIVQMFINTSTTTPAPRPPTPAPTIASQPLSLRPEACRPAAGGAVHTRGLDFACDIYIWAPLAGTCGVLLLSLVITLYC

SEQ ID NO: 2474 - protein, 713 aa, synthetic construct
  REGION 1..713: note = Synthetic
MALPVTALLLPLALLLHAARPEVQLLESGGGLVQPGGSLRLSCAASGFTFSIYAMSWVRQAPGKGLEWVSAISGGGDTTYYADSVKGRFTISRDNSKTTLDLQMNSLRAEDTAVYYCAKHTSYYMDVWGKGTTVTVSSGGGGSGGGGSGGGGSQTVVTQEPSLSVSPGGTVTLTCGLSSGSVSTSYYPSWYQQTPGQAPRTLIYSTNIRSSGVPDRFSGSILGNKAALTITGAQADDESDYYCKLYMGSGIIFGSGTKVTVLAAATTTPAPRPPTPAPTIASQPLSLRPEACRPAAGGAVHTRGLDFACDIYIWAPLAGTCGVLLLSLVITLYCKRGRKKLLYIFKQPFMRPVQTTQEEDGCSCRFPEEEEGGCELRVKFSRSADAPAYQQGQNQLYNELNLGRREEYDVLDKRRGRDPEMGGKPRRKNPQEGLYNELQKDKMAEAYSEIGMKGERRRGKGHDGLYQGLSTATKDTYDALHMQALPPRGSGEGRGSLLTCGDVEENPGPMALPVTALLLPLALLLHAARPNWVNVISDLKKIEDLIQSMHIDATLYTESDVHPSCKVTAMKCFLLELQVISLESGDASIHDTVENLIILANNSLSSNGNVTESGCKECEELEEKNIKEFLQSFVHIVQMFINTSTTTPAPRPPTPAPTIASQPLSLRPEACRPAAGGAVHTRGLDFACDIYIWAPLAGTCGVLLLSLVITLYC

SEQ ID NO: 2475 - protein, 719 aa, synthetic construct
  REGION 1..719: note = Synthetic
MALPVTALLLPLALLLHAARPQVQLVESGGGVVQPGRSLRLSCAASGFTFSNYDKHWVRQAPGKGLEWVAVIWYDGSNKYYADSVKGRFTISRDNSKNTLYLQMNSLRAEDTAMYYCARGDNWNDEHHYFYYMDVWGKGTTVTVSSGGGGSGGGGSGGGGSEIVLTQSPDFQSVTPKEKVTITCRASQSIGSSLHWYQQKPDQSPKLLIKFASQSFSGVPSRFSGSGSGTDFTLTIHSLEAEDAATYYCHQSSSLPWTFGQGTKVEIKAAATTTPAPRPPTPAPTIASQPLSLRPEACRPAAGGAVHTRGLDFACDIYIWAPLAGTCGVLLLSLVITLYCKRGRKKLLYIFKQPFMRPVQTTQEEDGCSCRFPEEEEGGCELRVKFSRSADAPAYQQGQNQLYNELNLGRREEYDVLDKRRGRDPEMGGKPRRKNPQEGLYNELQKDKMAEAYSEIGMKGERRRGKGHDGLYQGLSTATKDTYDALHMQALPPRGSGEGRGSLLTCGDVEENPGPMALPVTALLLPLALLLHAARPNWVNVISDLKKIEDLIQSMHIDATLYTESDVHPSCKVTAMKCFLLELQVISLESGDASIHDTVENLIILANNSLSSNGNVTESGCKECEELEEKNIKEFLQSFVHIVQMFINTSTTTPAPRPPTPAPTIASQPLSLRPEACRPAAGGAVHTRGLDFACDIYIWAPLAGTCGVLLLSLVITLYC

SEQ ID NO: 2476 - protein, 717 aa, synthetic construct
  REGION 1..717: note = Synthetic
MALPVTALLLPLALLLHAARPQVQLVQSGAEVKKPGASVKVSCKASGYTFTNYGFSWVRQAPGQGLDWMGWISAYNGYTNYTQKLQGRVTMTTDTSTTTAYMELRSLRSDDTAVYYCARRGLLYYYYSMDVWGKGTTVTVSSGGGGSGGGGSGGGGSEIVLTQSPATLSLSPGERATLSCGASQSVYNSYLAWYQQKPGLAPRLLIYDASLRATGVPDRFSGSGSGTDFTLTISTLEPEDFAVYYCQQYGGSPMYTFGQGTKLEIKAAATTTPAPRPPTPAPTIASQPLSLRPEACRPAAGGAVHTRGLDFACDIYIWAPLAGTCGVLLLSLVITLYCKRGRKKLLYIFKQPFMRPVQTTQEEDGCSCRFPEEEEGGCELRVKFSRSADAPAYQQGQNQLYNELNLGRREEYDVLDKRRGRDPEMGGKPRRKNPQEGLYNELQKDKMAEAYSEIGMKGERRRGKGHDGLYQGLSTATKDTYDALHMQALPPRGSGEGRGSLLTCGDVEENPGPMALPVTALLLPLALLLHAARPNWVNVISDLKKIEDLIQSMHIDATLYTESDVHPSCKVTAMKCFLLELQVISLESGDASIHDTVENLIILANNSLSSNGNVTESGCKECEELEEKNIKEFLQSFVHIVQMFINTSTTTPAPRPPTPAPTIASQPLSLRPEACRPAAGGAVHTRGLDFACDIYIWAPLAGTCGVLLLSLVITLYC

SEQ ID NO: 2477 - protein, 713 aa, synthetic construct
  REGION 1..713: note = Synthetic
MALPVTALLLPLALLLHAARPEVQLLESGGGLVQPGGSLRLSCTASGFTFSSFAMSWVRQAPGKGLEWVSAMSGSGDTTYYADSVKGRFTISRDNSKTTLYLQMNSLRAEDTAVYSCAKHTTYYMDVWGKGTTVTVSSGGGGSGGGGSGGGGSQTVVTQEPSLSVSPGGTVTLTCGLSSGSVSTSDYPSWYQQTPGQAPRTLIYRTNTRSSGVPDRFSGSILGNKAALTITGAQADDESDYYCVLYMDSGIIFGSGTKVTVLAAATTTPAPRPPTPAPTIASQPLSLRPEACRPAAGGAVHTRGLDFACDIYIWAPLAGTCGVLLLSLVITLYCKRGRKKLLYIFKQPFMRPVQTTQEEDGCSCRFPEEEEGGCELRVKFSRSADAPAYQQGQNQLYNELNLGRREEYDVLDKRRGRDPEMGGKPRRKNPQEGLYNELQKDKMAEAYSEIGMKGERRRGKGHDGLYQGLSTATKDTYDALHMQALPPRGSGEGRGSLLTCGDVEENPGPMALPVTALLLPLALLLHAARPNWVNVISDLKKIEDLIQSMHIDATLYTESDVHPSCKVTAMKCFLLELQVISLESGDASIHDTVENLIILANNSLSSNGNVTESGCKECEELEEKNIKEFLQSFVHIVQMFINTSTTTPAPRPPTPAPTIASQPLSLRPEACRPAAGGAVHTRGLDFACDIYIWAPLAGTCGVLLLSLVITLYC

SEQ ID NO: 2478 - protein, 713 aa, synthetic construct
  REGION 1..713: note = Synthetic
MALPVTALLLPLALLLHAARPEVQLLESGGGLVQPGGSLRLSCAASGFTFNTYAMSWVRQAPGKGLEWVSAMSGSGDTTYYADSVKGRFTISRDNSKTTLYLQMNSLRAEDTAVYSCAKHTSYYMDVWGKGTTVTVSSGGGGSGGGGSGGGGSQTVVTQEPSLSVSPGGTVTLTCGLSSGSVSTSDYPSWYQQTPGQAPRTLIYRTNTRSSGVPDRFSGSILGNKAALTITGAQADDESDYYCVLYMGSGIIFGSGTKVTVLAAATTTPAPRPPTPAPTIASQPLSLRPEACRPAAGGAVHTRGLDFACDIYIWAPLAGTCGVLLLSLVITLYCKRGRKKLLYIFKQPFMRPVQTTQEEDGCSCRFPEEEEGGCELRVKFSRSADAPAYQQGQNQLYNELNLGRREEYDVLDKRRGRDPEMGGKPRRKNPQEGLYNELQKDKMAEAYSEIGMKGERRRGKGHDGLYQGLSTATKDTYDALHMQALPPRGSGEGRGSLLTCGDVEENPGPMALPVTALLLPLALLLHAARPNWVNVISDLKKIEDLIQSMHIDATLYTESDVHPSCKVTAMKCFLLELQVISLESGDASIHDTVENLIILANNSLSSNGNVTESGCKECEELEEKNIKEFLQSFVHIVQMFINTSTTTPAPRPPTPAPTIASQPLSLRPEACRPAAGGAVHTRGLDFACDIYIWAPLAGTCGVLLLSLVITLYC

SEQ ID NO: 2479 - protein, 713 aa, synthetic construct
  REGION 1..713: note = Synthetic
MALPVTALLLPLALLLHAARPEVQLLESGGDLVQPGGSLRLSCAASGFTFSTYAMSWVRQAPGKGLEWVSAISGSGENIYYADSVKGRFTISRDNSKNTLFLQMNSLRAEDTAVYYCAKHTSYYMDVWGKGTTVTVSSGGGGSGGGGSGGGGSQTVVTQEPSFSVSPGGTVTLTCGLYSDSVSTSYYPSWYQQTPGQAPRTLIYNTNTRSSGVPDRFSGSILGNKAALTITGAQADDESDYYCVLYMVSGIVFGSGTKVTVLAAATTTPAPRPPTPAPTIASQPLSLRPEACRPAAGGAVHTRGLDFACDIYIWAPLAGTCGVLLLSLVITLYCKRGRKKLLYIFKQPFMRPVQTTQEEDGCSCRFPEEEEGGCELRVKFSRSADAPAYQQGQNQLYNELNLGRREEYDVLDKRRGRDPEMGGKPRRKNPQEGLYNELQKDKMAEAYSEIGMKGERRRGKGHDGLYQGLSTATKDTYDALHMQALPPRGSGEGRGSLLTCGDVEENPGPMALPVTALLLPLALLLHAARPNWVNVISDLKKIEDLIQSMHIDATLYTESDVHPSCKVTAMKCFLLELQVISLESGDASIHDTVENLIILANNSLSSNGNVTESGCKECEELEEKNIKEFLQSFVHIVQMFINTSTTTPAPRPPTPAPTIASQPLSLRPEACRPAAGGAVHTRGLDFACDIYIWAPLAGTCGVLLLSLVITLYC

SEQ ID NO: 2480 - protein, 719 aa, synthetic construct
  REGION 1..719: note = Synthetic
MALPVTALLLPLALLLHAARPQVQLVESGGGVVQPGRSLRLSCAASGFTFSSYGMHWVRQAPGKGLEWVAVIWYDGINKYYADSVKGRFTISRDNSKNTLYLQMNSLRAEDTAVYYCARERLERRYYYYMDVWGKGTTVTVSSGGGGSGGGGSGGGGSQTVVTQEPSFSVSPGGTVTLTCGLSSGSVSTSYYPGWYQQTPGQAPRTLIYSTNTRSSGVPDRFSGSILGNKAALTITGAQADDESDYYCVLYMGSGMFIFGSGTKVTVLAAATTTPAPRPPTPAPTIASQPLSLRPEACRPAAGGAVHTRGLDFACDIYIWAPLAGTCGVLLLSLVITLYCKRGRKKLLYIFKQPFMRPVQTTQEEDGCSCRFPEEEEGGCELRVKFSRSADAPAYQQGQNQLYNELNLGRREEYDVLDKRRGRDPEMGGKPRRKNPQEGLYNELQKDKMAEAYSEIGMKGERRRGKGHDGLYQGLSTATKDTYDALHMQALPPRGSGEGRGSLLTCGDVEENPGPMALPVTALLLPLALLLHAARPNWVNVISDLKKIEDLIQSMHIDATLYTESDVHPSCKVTAMKCFLLELQVISLESGDASIHDTVENLIILANNSLSSNGNVTESGCKECEELEEKNIKEFLQSFVHIVQMFINTSTTTPAPRPPTPAPTIASQPLSLRPEACRPAAGGAVHTRGLDFACDIYIWAPLAGTCGVLLLSLVITLYC

SEQ ID NO: 2481 - protein, 713 aa, synthetic construct
  REGION 1..713: note = Synthetic
MALPVTALLLPLALLLHAARPEVQLLESGGGLVQPGGSLRLSCAASGFTFSSFAMSWVRQAPGKGLEWVSAVSGSGDDTYYADSVKGRFTISRDNSKNTLYLQMNSLRAEDTAVYYCAKHTSYYLDVWGKGTTVTVSSGGGGSGGGGSGGGGSQTVVTQEPSFSVSPGGTVTLTCALSSDSVSTSYFPSWYRQTPGQAPRTLIYNTNTRSSGVPDRFSGSILGNKAALTITGAQADDESDYYCVLYMGSGIIFGSGTKVTVLAAATTTPAPRPPTPAPTIASQPLSLRPEACRPAAGGAVHTRGLDFACDIYIWAPLAGTCGVLLLSLVITLYCKRGRKKLLYIFKQPFMRPVQTTQEEDGCSCRFPEEEEGGCELRVKFSRSADAPAYQQGQNQLYNELNLGRREEYDVLDKRRGRDPEMGGKPRRKNPQEGLYNELQKDKMAEAYSEIGMKGERRRGKGHDGLYQGLSTATKDTYDALHMQALPPRGSGEGRGSLLTCGDVEENPGPMALPVTALLLPLALLLHAARPNWVNVISDLKKIEDLIQSMHIDATLYTESDVHPSCKVTAMKCFLLELQVISLESGDASIHDTVENLIILANNSLSSNGNVTESGCKECEELEEKNIKEFLQSFVHIVQMFINTSTTTPAPRPPTPAPTIASQPLSLRPEACRPAAGGAVHTRGLDFACDIYIWAPLAGTCGVLLLSLVITLYC

SEQ ID NO: 2482 - protein, 719 aa, synthetic construct
  REGION 1..719: note = Synthetic
MALPVTALLLPLALLLHAARPQVQLVESGGGVVQPGRSLRLSCAASGFNFSTFDIHWVRQAPGKGLEWVALIWYDGSYKYYADSVKGRFTISRDNSKNTLDLRMNSLRAEDTAVYYCARNDNWNDEHYYHYYMDVWGKGTTVTVSSGGGGSGGGGSGGGGSEIVLTQSPDFQSVTPKEKVTITCRASQSIGSSLHWYQQKPDQSPKLLIKFASQSFSGVPSRFSGSGSGTDFTLTINSLEAEDAATYFCHQSSSLPWTFGQGTKVEIKAAATTTPAPRPPTPAPTIASQPLSLRPEACRPAAGGAVHTRGLDFACDIYIWAPLAGTCGVLLLSLVITLYCKRGRKKLLYIFKQPFMRPVQTTQEEDGCSCRFPEEEEGGCELRVKFSRSADAPAYQQGQNQLYNELNLGRREEYDVLDKRRGRDPEMGGKPRRKNPQEGLYNELQKDKMAEAYSEIGMKGERRRGKGHDGLYQGLSTATKDTYDALHMQALPPRGSGEGRGSLLTCGDVEENPGPMALPVTALLLPLALLLHAARPNWVNVISDLKKIEDLIQSMHIDATLYTESDVHPSCKVTAMKCFLLELQVISLESGDASIHDTVENLIILANNSLSSNGNVTESGCKECEELEEKNIKEFLQSFVHIVQMFINTSTTTPAPRPPTPAPTIASQPLSLRPEACRPAAGGAVHTRGLDFACDIYIWAPLAGTCGVLLLSLVITLYC

SEQ ID NO: 2483 - protein, 724 aa, synthetic construct
  REGION 1..724: note = Synthetic
MALPVTALLLPLALLLHAARPEVHLLESGGGLVQPGGSLRLSCAASGFTFSSYAMNWVRQAPGKGLEWVSSISGSGSSSYYADSVKGRFTISRDNSKNTLYLQMNSLRAEDTAVYYCASRGFNSQYPPGYYYYYMDVWGKGTTVTVSSGGGGSGGGGSGGGGSQTVVTQEPSFSVSPGGTVTLTCGLSSGSVSTSYFPSWYQQTPGQAPRTLIYITNTRSSGVPDRFSGSIIGNKAALTITGAQADDESDYFCVLYMGSGTWVFGGGTKLTVLAAATTTPAPRPPTPAPTIASQPLSLRPEACRPAAGGAVHTRGLDFACDIYIWAPLAGTCGVLLLSLVITLYCKRGRKKLLYIFKQPFMRPVQTTQEEDGCSCRFPEEEEGGCELRVKFSRSADAPAYQQGQNQLYNELNLGRREEYDVLDKRRGRDPEMGGKPRRKNPQEGLYNELQKDKMAEAYSEIGMKGERRRGKGHDGLYQGLSTATKDTYDALHMQALPPRGSGEGRGSLLTCGDVEENPGPMALPVTALLLPLALLLHAARPNWVNVISDLKKIEDLIQSMHIDATLYTESDVHPSCKVTAMKCFLLELQVISLESGDASIHDTVENLIILANNSLSSNGNVTESGCKECEELEEKNIKEFLQSFVHIVQMFINTSTTTPAPRPPTPAPTIASQPLSLRPEACRPAAGGAVHTRGLDFACDIYIWAPLAGTCGVLLLSLVITLYC

SEQ ID NO: 2484 - protein, 711 aa, synthetic construct
  REGION 1..711: note = Synthetic
MALPVTALLLPLALLLHAARPEVQLLESGGGLVQPGGSLRLSCAASGFTFSNYAMTWVRQAPGKGLEWVSAISGSGIGTYYADSVQGRFTTSRDNSKNTLYLQMNSLRAEDTAVYYCAKGGYNWKDVWGKGTTVTVSSGGGGSGGGGSGGGGSEIVLTQSPDFQSVTPKEKVTITCRASQSIGSSLHWYQQKPDQSPKLLIKFASQSFSGVPSRFSGSGSGTDFTLTIHSLEAEDAATYYCHQSSSLPWTFGQGTKVEIKAAATTTPAPRPPTPAPTIASQPLSLRPEACRPAAGGAVHTRGLDFACDIYIWAPLAGTCGVLLLSLVITLYCKRGRKKLLYIFKQPFMRPVQTTQEEDGCSCRFPEEEEGGCELRVKFSRSADAPAYQQGQNQLYNELNLGRREEYDVLDKRRGRDPEMGGKPRRKNPQEGLYNELQKDKMAEAYSEIGMKGERRRGKGHDGLYQGLSTATKDTYDALHMQALPPRGSGEGRGSLLTCGDVEENPGPMALPVTALLLPLALLLHAARPNWVNVISDLKKIEDLIQSMHIDATLYTESDVHPSCKVTAMKCFLLELQVISLESGDASIHDTVENLIILANNSLSSNGNVTESGCKECEELEEKNIKEFLQSFVHIVQMFINTSTTTPAPRPPTPAPTIASQPLSLRPEACRPAAGGAVHTRGLDFACDIYIWAPLAGTCGVLLLSLVITLYC

SEQ ID NO: 2485 - protein, 719 aa, synthetic construct
  REGION 1..719: note = Synthetic
MALPVTALLLPLALLLHAARPQVQLVESGGGVVQPGRSLRLSCAASGFTFTNYDMHWVRQAPGKGLEWVTIIWHDGSNKYYLDSVRGRFTISRDNSKNTLYLQMNSLRAEDTAVYYCARGDNWNDEHHYFYYMDVWGKGTTVTVSSGGGGSGGGGSGGGGSEIVLTQSPDFQSVTPKEKVTITCRASQSIGSSLHWYQQKPDQSPKLLIKFASQSFSGVPSRFSGSGSGTDFTLTIHSLEAEDAATYYCHQSSSLPWTFGQGTKVEIKAAATTTPAPRPPTPAPTIASQPLSLRPEACRPAAGGAVHTRGLDFACDIYIWAPLAGTCGVLLLSLVITLYCKRGRKKLLYIFKQPFMRPVQTTQEEDGCSCRFPEEEEGGCELRVKFSRSADAPAYQQGQNQLYNELNLGRREEYDVLDKRRGRDPEMGGKPRRKNPQEGLYNELQKDKMAEAYSEIGMKGERRRGKGHDGLYQGLSTATKDTYDALHMQALPPRGSGEGRGSLLTCGDVEENPGPMALPVTALLLPLALLLHAARPNWVNVISDLKKIEDLIQSMHIDATLYTESDVHPSCKVTAMKCFLLELQVISLESGDASIHDTVENLIILANNSLSSNGNVTESGCKECEELEEKNIKEFLQSFVHIVQMFINTSTTTPAPRPPTPAPTIASQPLSLRPEACRPAAGGAVHTRGLDFACDIYIWAPLAGTCGVLLLSLVITLYC

SEQ ID NO: 2486 - protein, 719 aa, synthetic construct
  REGION 1..719: note = Synthetic
MALPVTALLLPLALLLHAARPQVQLVESGGGVVQPGRSLRLSCAASGFTFSNYDMHWVRQAPGKGLEWVTIIWHDGSNKYYLDSVKGRFTISRDNSKNTLYLQMNSLRAEDTAVYYCARGDNWNDEHHYFYYMDVWGKGTTVTVSSGGGGSGGGGSGGGGSEIVLTQSPATLSLSPGERATLSCRASQSVSSSLAWYQQKPGQAPRLLIYDASNRATGIPARFSGSGSGTDFTLTISSLEPEDFAVYYCQQRSNWPLTFGGGTKVEIKAAATTTPAPRPPTPAPTIASQPLSLRPEACRPAAGGAVHTRGLDFACDIYIWAPLAGTCGVLLLSLVITLYCKRGRKKLLYIFKQPFMRPVQTTQEEDGCSCRFPEEEEGGCELRVKFSRSADAPAYQQGQNQLYNELNLGRREEYDVLDKRRGRDPEMGGKPRRKNPQEGLYNELQKDKMAEAYSEIGMKGERRRGKGHDGLYQGLSTATKDTYDALHMQALPPRGSGEGRGSLLTCGDVEENPGPMALPVTALLLPLALLLHAARPNWVNVISDLKKIEDLIQSMHIDATLYTESDVHPSCKVTAMKCFLLELQVISLESGDASIHDTVENLIILANNSLSSNGNVTESGCKECEELEEKNIKEFLQSFVHIVQMFINTSTTTPAPRPPTPAPTIASQPLSLRPEACRPAAGGAVHTRGLDFACDIYIWAPLAGTCGVLLLSLVITLYC

SEQ ID NO: 2487 - protein, 715 aa, synthetic construct
  REGION 1..715: note = Synthetic
MALPVTALLLPLALLLHAARPEVQLVESGGGVVRPGGSLRLSCAASGFTFDDYGMSWVRQAPGKGLEWVSGINWNGGSTGYVDSVKGRFTISRDNAKNSLYLQMNSLRAEDTALYHCARPVTTDYYYYMDVWGKGTTVTVSSGGGGSGGGGSGGGGSEIVLTQSPGTLSLSPGERATLSCRASQSVSSSYLAWYQQKPGQAPRLLIYGASSRATGIPDRFSGSGSGTDFTLTISRLEPEDFAVYYCQQYGSSWTFGQGTKVEIKAAATTTPAPRPPTPAPTIASQPLSLRPEACRPAAGGAVHTRGLDFACDIYIWAPLAGTCGVLLLSLVITLYCKRGRKKLLYIFKQPFMRPVQTTQEEDGCSCRFPEEEEGGCELRVKFSRSADAPAYQQGQNQLYNELNLGRREEYDVLDKRRGRDPEMGGKPRRKNPQEGLYNELQKDKMAEAYSEIGMKGERRRGKGHDGLYQGLSTATKDTYDALHMQALPPRGSGEGRGSLLTCGDVEENPGPMALPVTALLLPLALLLHAARPNWVNVISDLKKIEDLIQSMHIDATLYTESDVHPSCKVTAMKCFLLELQVISLESGDASIHDTVENLIILANNSLSSNGNVTESGCKECEELEEKNIKEFLQSFVHIVQMFINTSTTTPAPRPPTPAPTIASQPLSLRPEACRPAAGGAVHTRGLDFACDIYIWAPLAGTCGVLLLSLVITLYC

SEQ ID NO: 2488 - protein, 723 aa, synthetic construct
  REGION 1..723: note = Synthetic
MALPVTALLLPLALLLHAARPEVQLLESGGGLVQPGGSLRLSCAASGFTFSSYAMSWVRQAPGKGLEWVSAISGSGGSTYYADSVKGRFTISRDNSKNTLYLQMNSLRAEDTAVYYCAKKGTSYNWNDVHYYYYYYMDVWGKGTTVTVSSGGGGSGGGGSGGGGSEIVLTQSPGTLSLSPGERATLSCRASQSVSSSYLAWYQQKPGQAPRLLIYGASSRATGIPDRFSGSGSGTDFTLTISRLEPEDFAVYYCQQYGSSWTFGQGTKVEIKAAATTTPAPRPPTPAPTIASQPLSLRPEACRPAAGGAVHTRGLDFACDIYIWAPLAGTCGVLLLSLVITLYCKRGRKKLLYIFKQPFMRPVQTTQEEDGCSCRFPEEEEGGCELRVKFSRSADAPAYQQGQNQLYNELNLGRREEYDVLDKRRGRDPEMGGKPRRKNPQEGLYNELQKDKMAEAYSEIGMKGERRRGKGHDGLYQGLSTATKDTYDALHMQALPPRGSGEGRGSLLTCGDVEENPGPMALPVTALLLPLALLLHAARPNWVNVISDLKKIEDLIQSMHIDATLYTESDVHPSCKVTAMKCFLLELQVISLESGDASIHDTVENLIILANNSLSSNGNVTESGCKECEELEEKNIKEFLQSFVHIVQMFINTSTTTPAPRPPTPAPTIASQPLSLRPEACRPAAGGAVHTRGLDFACDIYIWAPLAGTCGVLLLSLVITLYC

SEQ ID NO: 2489 - protein, 717 aa, synthetic construct
  REGION 1..717: note = Synthetic
MALPVTALLLPLALLLHAARPQLQLQESGPGLVKPSETLSLTCTVSGGSISSSSYYWGWIRQPPGKGLEWIGSIYYSGSTYYNPSLKSRVTISVDTSKNQFSLKLSSVTAADTAVYYCTTGTTAYYYYYYMDVWGKGTTVTVSSGGGGSGGGGSGGGGSEIVLTQSPGTLSLSPGERATLSCRASQSVSSSYLAWYQQKPGQAPRLLIYGASSRATGIPDRFSGSGSGTDFTLTISRLEPEDFAVYYCQQYGSSWTFGQGTKVEIKAAATTTPAPRPPTPAPTIASQPLSLRPEACRPAAGGAVHTRGLDFACDIYIWAPLAGTCGVLLLSLVITLYCKRGRKKLLYIFKQPFMRPVQTTQEEDGCSCRFPEEEEGGCELRVKFSRSADAPAYQQGQNQLYNELNLGRREEYDVLDKRRGRDPEMGGKPRRKNPQEGLYNELQKDKMAEAYSEIGMKGERRRGKGHDGLYQGLSTATKDTYDALHMQALPPRGSGEGRGSLLTCGDVEENPGPMALPVTALLLPLALLLHAARPNWVNVISDLKKIEDLIQSMHIDATLYTESDVHPSCKVTAMKCFLLELQVISLESGDASIHDTVENLIILANNSLSSNGNVTESGCKECEELEEKNIKEFLQSFVHIVQMFINTSTTTPAPRPPTPAPTIASQPLSLRPEACRPAAGGAVHTRGLDFACDIYIWAPLAGTCGVLLLSLVITLYC

SEQ ID NO: 2490 - protein, 716 aa, synthetic construct
  REGION 1..716: note = Synthetic
MALPVTALLLPLALLLHAARPEVQLLESGGGLVQPGGSLRLSCAASGFTFSSYAMTWVRQAPGKGLEWVSAISGSGGSTYYADSVKGRFTISRDNSKNTLYLQMNSLRAEDTAVYYCARGGYNWHYYYYMDVWGKGTTVTVSSGGGGSGGGGSGGGGSEIVLTQSPGTLSLSPGERATLSCRASQSVSSSYLAWYQQKPGQAPRLLIYGASSRATGIPDRFSGSGSGTDFTLTISRLEPEDFAVYYCQQYGSSWTFGQGTKVEIKAAATTTPAPRPPTPAPTIASQPLSLRPEACRPAAGGAVHTRGLDFACDIYIWAPLAGTCGVLLLSLVITLYCKRGRKKLLYIFKQPFMRPVQTTQEEDGCSCRFPEEEEGGCELRVKFSRSADAPAYQQGQNQLYNELNLGRREEYDVLDKRRGRDPEMGGKPRRKNPQEGLYNELQKDKMAEAYSEIGMKGERRRGKGHDGLYQGLSTATKDTYDALHMQALPPRGSGEGRGSLLTCGDVEENPGPMALPVTALLLPLALLLHAARPNWVNVISDLKKIEDLIQSMHIDATLYTESDVHPSCKVTAMKCFLLELQVISLESGDASIHDTVENLIILANNSLSSNGNVTESGCKECEELEEKNIKEFLQSFVHIVQMFINTSTTTPAPRPPTPAPTIASQPLSLRPEACRPAAGGAVHTRGLDFACDIYIWAPLAGTCGVLLLSLVITLYC

SEQ ID NO: 2491 - protein, 720 aa, synthetic construct
  REGION 1..720: note = Synthetic
MALPVTALLLPLALLLHAARPQVQLVESGGGVVQPGRSLRLSCAASGFTFSSYDMHWVRQAPGKGLEWVSVIWYDGSNKKYGDSAKGRFTISRDNSKNTLDLQMNSLRAEDTAVYYCARGDNWNDEGGYYYYYMDVWGKGTTVTVSSGGGGSGGGGSGGGGSEIVLTQSPDFQSVTPKEKVTITCRASQNIGSSLHWYQQKPDQSPKLLIKFASQSISGVPSRFSGSGSGTDFTLTINSLEAEDAAAYYCHQSSSLPWTFGQGTKVEIKAAATTTPAPRPPTPAPTIASQPLSLRPEACRPAAGGAVHTRGLDFACDIYIWAPLAGTCGVLLLSLVITLYCKRGRKKLLYIFKQPFMRPVQTTQEEDGCSCRFPEEEEGGCELRVKFSRSADAPAYQQGQNQLYNELNLGRREEYDVLDKRRGRDPEMGGKPRRKNPQEGLYNELQKDKMAEAYSEIGMKGERRRGKGHDGLYQGLSTATKDTYDALHMQALPPRGSGEGRGSLLTCGDVEENPGPMALPVTALLLPLALLLHAARPNWVNVISDLKKIEDLIQSMHIDATLYTESDVHPSCKVTAMKCFLLELQVISLESGDASIHDTVENLIILANNSLSSNGNVTESGCKECEELEEKNIKEFLQSFVHIVQMFINTSTTTPAPRPPTPAPTIASQPLSLRPEACRPAAGGAVHTRGLDFACDIYIWAPLAGTCGVLLLSLVITLYC

SEQ ID NO: 2492 - protein, 720 aa, synthetic construct
  REGION 1..720: note = Synthetic
MALPVTALLLPLALLLHAARPQVQLVESGGGVVQPGRSLRLSCAASGFTFSSYDMHWVRQAPGKGLEWVSVIWYDGSNKKYGDSAKGRFTISRDNSKNTLDLQMNSLRAEDTAVYYCARGDNWNDEGGYYYYYMDVWGKGTTVTVSSGGGGSGGGGSGGGGSDIQMTQSPSSLSTSVGDRVTITCRASQGISNYLAWFQQKPGKAPKSLIYAASSLQSGVPSKFSGSGSGTDFSLTISSLQPEDFATYYCQQYNSYPITFGQGTRLEIKAAATTTPAPRPPTPAPTIASQPLSLRPEACRPAAGGAVHTRGLDFACDIYIWAPLAGTCGVLLLSLVITLYCKRGRKKLLYIFKQPFMRPVQTTQEEDGCSCRFPEEEEGGCELRVKFSRSADAPAYQQGQNQLYNELNLGRREEYDVLDKRRGRDPEMGGKPRRKNPQEGLYNELQKDKMAEAYSEIGMKGERRRGKGHDGLYQGLSTATKDTYDALHMQALPPRGSGEGRGSLLTCGDVEENPGPMALPVTALLLPLALLLHAARPNWVNVISDLKKIEDLIQSMHIDATLYTESDVHPSCKVTAMKCFLLELQVISLESGDASIHDTVENLIILANNSLSSNGNVTESGCKECEELEEKNIKEFLQSFVHIVQMFINTSTTTPAPRPPTPAPTIASQPLSLRPEACRPAAGGAVHTRGLDFACDIYIWAPLAGTCGVLLLSLVITLYC

SEQ ID NO: 2493 - protein, 717 aa, synthetic construct
  REGION 1..717: note = Synthetic
MALPVTALLLPLALLLHAARPQVQLVQSGAEVKKSGASVKVSCKASGYTLTSYGISWVRQAPGQGLEWMGWISAYNGNINYAQKFQGRVTMTTDTSTSTAYMELRSLRSDDTAVYYCVRDGDRYNWNHSYMDVWGKGTTVTVSSGGGGSGGGGSGGGGSEIVLTQSPDFQSVTPKEKVTITCRASQNIGSSLHWYQQKPDQSPKLLIKFASQSISGVPSRFSGSGSGTDFTLTINSLEAEDAAAYYCHQSSSLPWTFGQGTKVEIKAAATTTPAPRPPTPAPTIASQPLSLRPEACRPAAGGAVHTRGLDFACDIYIWAPLAGTCGVLLLSLVITLYCKRGRKKLLYIFKQPFMRPVQTTQEEDGCSCRFPEEEEGGCELRVKFSRSADAPAYQQGQNQLYNELNLGRREEYDVLDKRRGRDPEMGGKPRRKNPQEGLYNELQKDKMAEAYSEIGMKGERRRGKGHDGLYQGLSTATKDTYDALHMQALPPRGSGEGRGSLLTCGDVEENPGPMALPVTALLLPLALLLHAARPNWVNVISDLKKIEDLIQSMHIDATLYTESDVHPSCKVTAMKCFLLELQVISLESGDASIHDTVENLIILANNSLSSNGNVTESGCKECEELEEKNIKEFLQSFVHIVQMFINTSTTTPAPRPPTPAPTIASQPLSLRPEACRPAAGGAVHTRGLDFACDIYIWAPLAGTCGVLLLSLVITLYC

SEQ ID NO: 2494 - protein, 717 aa, synthetic construct
  REGION 1..717: note = Synthetic
MALPVTALLLPLALLLHAARPQVQLVQSGAEVKKSGASVKVSCKASGYTLTSYGISWVRQAPGQGLEWMGWISAYNGNINYAQKFQGRVTMTTDTSTSTAYMELRSLRSDDTAVYYCVRDGDRYNWNHSYMDVWGKGTTVTVSSGGGGSGGGGSGGGGSDIQMTQSPSSLSTSVGDRVTITCRASQGISNYLAWFQQKPGKAPKSLIYAASSLQSGVPSKFSGSGSGTDFSLTISSLQPEDFATYYCQQYNSYPITFGQGTRLEIKAAATTTPAPRPPTPAPTIASQPLSLRPEACRPAAGGAVHTRGLDFACDIYIWAPLAGTCGVLLLSLVITLYCKRGRKKLLYIFKQPFMRPVQTTQEEDGCSCRFPEEEEGGCELRVKFSRSADAPAYQQGQNQLYNELNLGRREEYDVLDKRRGRDPEMGGKPRRKNPQEGLYNELQKDKMAEAYSEIGMKGERRRGKGHDGLYQGLSTATKDTYDALHMQALPPRGSGEGRGSLLTCGDVEENPGPMALPVTALLLPLALLLHAARPNWVNVISDLKKIEDLIQSMHIDATLYTESDVHPSCKVTAMKCFLLELQVISLESGDASIHDTVENLIILANNSLSSNGNVTESGCKECEELEEKNIKEFLQSFVHIVQMFINTSTTTPAPRPPTPAPTIASQPLSLRPEACRPAAGGAVHTRGLDFACDIYIWAPLAGTCGVLLLSLVITLYC

SEQ ID NO: 2495 - protein, 716 aa, synthetic construct
  REGION 1..716: note = Synthetic
MALPVTALLLPLALLLHAARPEVQLLESGGDLVQPGGSLRLSCAASGFTFSTYAMTWVRQAPGKGLEWVSAISGTSGSTYYADSVKGRFTISRDNSKSTLYLHMNSLRTEDTAVYYCARGGYNWHYYYYMDVWGKGTTVTVSSGGGGSGGGGSGGGGSEIVLTQSPDFQSVTPKEKVTITCRASQSIGSSLHWYQQKPDQSPKLLIKYVSQSISGVPSRFSGSGSGTDFTLTINSLEAEDAAAYYCHQSSSLPWTFGQGTKVEIKAAATTTPAPRPPTPAPTIASQPLSLRPEACRPAAGGAVHTRGLDFACDIYIWAPLAGTCGVLLLSLVITLYCKRGRKKLLYIFKQPFMRPVQTTQEEDGCSCRFPEEEEGGCELRVKFSRSADAPAYQQGQNQLYNELNLGRREEYDVLDKRRGRDPEMGGKPRRKNPQEGLYNELQKDKMAEAYSEIGMKGERRRGKGHDGLYQGLSTATKDTYDALHMQALPPRGSGEGRGSLLTCGDVEENPGPMALPVTALLLPLALLLHAARPNWVNVISDLKKIEDLIQSMHIDATLYTESDVHPSCKVTAMKCFLLELQVISLESGDASIHDTVENLIILANNSLSSNGNVTESGCKECEELEEKNIKEFLQSFVHIVQMFINTSTTTPAPRPPTPAPTIASQPLSLRPEACRPAAGGAVHTRGLDFACDIYIWAPLAGTCGVLLLSLVITLYC

SEQ ID NO: 2496 - protein, 717 aa, synthetic construct
  REGION 1..717: note = Synthetic
MALPVTALLLPLALLLHAARPEVQLLESGGDLVQPGGSLRLSCAASGFTFSTYAMTWVRQAPGKGLEWVSAISGTSGSTYYADSVKGRFTISRDNSKSTLYLHMNSLRTEDTAVYYCARGGYNWHYYYYMDVWGKGTTVTVSSGGGGSGGGGSGGGGSEIVMTQSPATLSLSPGERATLSCRASQSVSSSYLSWYQQKPGLAPRLLIYGASTRATGIPARFSGSGSGTDFTLTISSLQPEDFAVYYCQQDYNLPPTFGQGTKVEIKAAATTTPAPRPPTPAPTIASQPLSLRPEACRPAAGGAVHTRGLDFACDIYIWAPLAGTCGVLLLSLVITLYCKRGRKKLLYIFKQPFMRPVQTTQEEDGCSCRFPEEEEGGCELRVKFSRSADAPAYQQGQNQLYNELNLGRREEYDVLDKRRGRDPEMGGKPRRKNPQEGLYNELQKDKMAEAYSEIGMKGERRRGKGHDGLYQGLSTATKDTYDALHMQALPPRGSGEGRGSLLTCGDVEENPGPMALPVTALLLPLALLLHAARPNWVNVISDLKKIEDLIQSMHIDATLYTESDVHPSCKVTAMKCFLLELQVISLESGDASIHDTVENLIILANNSLSSNGNVTESGCKECEELEEKNIKEFLQSFVHIVQMFINTSTTTPAPRPPTPAPTIASQPLSLRPEACRPAAGGAVHTRGLDFACDIYIWAPLAGTCGVLLLSLVITLYC

SEQ ID NO: 2497 - DNA, 2157 bp, synthetic construct
  misc_feature 1..2157: note = Synthetic
  source 1..2157: mol_type = other DNA
atggccttaccagtgaccgccttgctcctgccgctggccttgctgctccacgccgccaggccgcaggtgcagctggtggagtctgggggaggcgtggtccagcctgggaggtccctgagactctcctgtgcagcgtctggattcaccttcaataattatgacatgtactgggtccgccaggccccaggcaaggggctggagtgggtggcagttacatggtatgatggaagtaataaatactatgcagactccgtgaagggccgattcaccatctccagagacaattccaagaacacgctgtatctgcaaatgaacagcctgagagccgaggacacggctgtgtattactgtgcgagaggtgacaactggaatgacgaacaccactatttttactacatggacgtctggggcaaagggaccacggtcaccgtctcctcaggtggaggcggttcaggcggaggtggctctggcggtggcggatcggaaattgtgctgactcagtctccagactttcagtctgtgactccaaaggagaaagtcaccatcacctgccgggccagtcagagcattggtagtagcttacactggtaccagcagaaaccagatcagtctccaaagctcctcatcaagtttgcttcccagtccttctcaggggtcccctcgaggttcagtggcagtggatctgggacagatttcaccctcaccatccatagcctggaagctgaagatgctgcaacgtattactgtcatcagagtagtagtttaccgtggacgttcggccaagggaccaaggtggaaatcaaagcggccgcaaccacgacgccagcgccgcggccaccaacaccggcgcccaccatcgcgtcgcagcccctgtccctgcgcccagaggcgtgccggccagcggcggggggcgcagtgcacacgagggggctggacttcgcctgtgatatctacatctgggcgcccttggccgggacttgtggggtccttctcctgtcactggttatcaccctttactgcaaacggggcagaaagaaactcctgtatatattcaaacaaccatttatgagaccagtacaaactactcaagaggaagatggctgtagctgccgatttccagaagaagaagaaggaggatgtgaactgagagtgaagttcagcaggagcgcagacgcccccgcgtaccagcagggccagaaccagctctataacgagctcaatctaggacgaagagaggagtacgatgttttggacaagagacgtggccgggaccctgagatggggggaaagccgagaaggaagaaccctcaggaaggcctgtacaatgaactgcagaaagataagatggcggaggcctacagtgagattgggatgaaaggcgagcgccggaggggcaaggggcacgatggcctttaccagggtctcagtacagccaccaaggacacctacgacgcccttcacatgcaggccctgccccctcgcggctctggcgagggaaggggttccctgcttacttgcggcgacgtcgaagagaatcccggtccgatggccctcccagtaactgccctccttttgcccctcgcactccttcttcatgccgctcgccccaactgggtcaacgtgattagcgatttgaagaaaatcgaggaccttatacagtctatgcatattgacgctacactgtatactgagagtgatgtacacccgtcctgtaaggtaacggccatgaaatgctttcttctggagctccaggtcatcagcttggagtctggggacgcaagcatccacgatacggttgaaaacctcatcatccttgcgaacaactctctctcatctaatggaaacgttacagagagtgggtgtaaggagtgcgaagagttggaagaaaaaaacatcaaagaatttcttcaatccttcgttcacatagtgcaaatgttcattaacacgtccactaccacacccgccccgaggccacctacgccggcaccgactatcgccagtcaacccctctctctgcgccccgaggcttgccggcctgcggctggtggggcggtccacacccggggcctggattttgcgtgcgatatatacatctgggcacctcttgccggcacctgcggagtgctgcttctctcactcgttattacgctgtactgc

SEQ ID NO: 2498 - DNA, 2157 bp, synthetic construct
  misc_feature 1..2157: note = Synthetic
  source 1..2157: mol_type = other DNA
atggccttaccagtgaccgccttgctcctgccgctggccttgctgctccacgccgccaggccgcaggtgcagctggtggagtctgggggaggcgtggtccagcctgggaggtccctgagactctcctgtgcagcgtctgggttcaccttcagtaactatgacatgcactgggtccgccaggccccaggcaaggggctggagtgggtgacaattatatggcatgatgcaagtaataaatattatttagactccgtgaagggccgattcaccatctccagagacaattccaagaacacgctgtatctgcaaatgaacagcctgagagccgaggacacggctgtgtattactgtgcgagaggtgacaactggaacgacgaacaccactacttctactacatggacgtctggggcaaagggaccacggtcaccgtctcctcaggtggaggcggttcaggcggaggtggctctggcggtggcggatcggaaattgtgctgactcagtctccagactttcagtctgtgactccaaaggagaaagtcaccatcacctgccgggccagtcagagcattggtagtagcttacactggtaccagcagaaaccagatcagtctccaaagctcctcatcaagtttgcttcccagtccttctcaggggtcccctcgaggttcagtggcagtggatctgggacagatttcaccctcaccatccatagcctggaagctgaagatgctgcaacgtattactgtcatcagagtagtagtttaccgtggacgttcggccaagggaccaaggtggaaatcaaagcggccgcaaccacgacgccagcgccgcggccaccaacaccggcgcccaccatcgcgtcgcagcccctgtccctgcgcccagaggcgtgccggccagcggcggggggcgcagtgcacacgagggggctggacttcgcctgtgatatctacatctgggcgcccttggccgggacttgtggggtccttctcctgtcactggttatcaccctttactgcaaacggggcagaaagaaactcctgtatatattcaaacaaccatttatgagaccagtacaaactactcaagaggaagatggctgtagctgccgatttccagaagaagaagaaggaggatgtgaactgagagtgaagttcagcaggagcgcagacgcccccgcgtaccagcagggccagaaccagctctataacgagctcaatctaggacgaagagaggagtacgatgttttggacaagagacgtggccgggaccctgagatggggggaaagccgagaaggaagaaccctcaggaaggcctgtacaatgaactgcagaaagataagatggcggaggcctacagtgagattgggatgaaaggcgagcgccggaggggcaaggggcacgatggcctttaccagggtctcagtacagccaccaaggacacctacgacgcccttcacatgcaggccctgccccctcgcggctctggcgagggaaggggttccctgcttacttgcggcgacgtcgaagagaatcccggtccgatggccctcccagtaactgccctccttttgcccctcgcactccttcttcatgccgctcgccccaactgggtcaacgtgattagcgatttgaagaaaatcgaggaccttatacagtctatgcatattgacgctacactgtatactgagagtgatgtacacccgtcctgtaaggtaacggccatgaaatgctttcttctggagctccaggtcatcagcttggagtctggggacgcaagcatccacgatacggttgaaaacctcatcatccttgcgaacaactctctctcatctaatggaaacgttacagagagtgggtgtaaggagtgcgaagagttggaagaaaaaaacatcaaagaatttcttcaatccttcgttcacatagtgcaaatgttcattaacacgtccactaccacacccgccccgaggccacctacgccggcaccgactatcgccagtcaacccctctctctgcgccccgaggcttgccggcctgcggctggtggggcggtccacacccggggcctggattttgcgtgcgatatatacatctgggcacctcttgccggcacctgcggagtgctgcttctctcactcgttattacgctgtactgc

SEQ ID NO: 2499 - DNA, 2157 bp, synthetic construct
  misc_feature 1..2157: note = Synthetic
  source 1..2157: mol_type = other DNA
atggccttaccagtgaccgccttgctcctgccgctggccttgctgctccacgccgccaggccgcaggtgcagctggtggagtctgggggaggcgtggtccagcctgggaggtccctgagactctcctgtgcagcgtctgggttcaccttcagtaactatgacatgcactgggtccgccaggccccaggcaaggggctggagtgggtgacaattatatggcatgatggaagtaataaatattatttagactccgtgaagggccgattcaccatctccagagacaattccaagaacacgctgtatctgcaaatgaacagcctgagagccgaggacacggctgtgtattactgtgcgagaggtgacaactggaacgacgaacaccactacttctactacatggacgtctggggcaaagggaccacggtcaccgtctcctcaggtggaggcggttcaggcggaggtggctctggcggtggcggatcggaaattgtgctgactcagtctccagactttcagtctgtgactccaaaggagaaagtcaccatcacctgccgggccagtcagagcattggtagtagcttacactggtaccagcagaaaccagatcagtctccaaagctcctcatcaagtttgcttcccagtccttctcaggggtcccctcgaggttcagtggcagtggatctgggacagatttcaccctcaccatccatagcctggaagctgaagatgctgcaacgtattactgtcatcagagtagtagtttaccgtggacgttcggccaagggaccaaggtggaaatcaaagcggccgcaaccacgacgccagcgccgcggccaccaacaccggcgcccaccatcgcgtcgcagcccctgtccctgcgcccagaggcgtgccggccagcggcggggggcgcagtgcacacgagggggctggacttcgcctgtgatatctacatctgggcgcccttggccgggacttgtggggtccttctcctgtcactggttatcaccctttactgcaaacggggcagaaagaaactcctgtatatattcaaacaaccatttatgagaccagtacaaactactcaagaggaagatggctgtagctgccgatttccagaagaagaagaaggaggatgtgaactgagagtgaagttcagcaggagcgcagacgcccccgcgtaccagcagggccagaaccagctctataacgagctcaatctaggacgaagagaggagtacgatgttttggacaagagacgtggccgggaccctgagatggggggaaagccgagaaggaagaaccctcaggaaggcctgtacaatgaactgcagaaagataagatggcggaggcctacagtgagattgggatgaaaggcgagcgccggaggggcaaggggcacgatggcctttaccagggtctcagtacagccaccaaggacacctacgacgcccttcacatgcaggccctgccccctcgcggctctggcgagggaaggggttccctgcttacttgcggcgacgtcgaagagaatcccggtccgatggccctcccagtaactgccctccttttgcccctcgcactccttcttcatgccgctcgccccaactgggtcaacgtgattagcgatttgaagaaaatcgaggaccttatacagtctatgcatattgacgctacactgtatactgagagtgatgtacacccgtcctgtaaggtaacggccatgaaatgctttcttctggagctccaggtcatcagcttggagtctggggacgcaagcatccacgatacggttgaaaacctcatcatccttgcgaacaactctctctcatctaatggaaacgttacagagagtgggtgtaaggagtgcgaagagttggaagaaaaaaacatcaaagaatttcttcaatccttcgttcacatagtgcaaatgttcattaacacgtccactaccacacccgccccgaggccacctacgccggcaccgactatcgccagtcaacccctctctctgcgccccgaggcttgccggcctgcggctggtggggcggtccacacccggggcctggattttgcgtgcgatatatacatctgggcacctcttgccggcacctgcggagtgctgcttctctcactcgttattacgctgtactgc

SEQ ID NO: 2500 - DNA, 2139 bp, synthetic construct
  misc_feature 1..2139: note = Synthetic
  source 1..2139: mol_type = other DNA
atggccttaccagtgaccgccttgctcctgccgctggccttgctgctccacgccgccaggccggaggtgcagctgctggagtctgggggaggcttggtacagcctggggggtccctgagactctcctgtgcagcctctggattcacctttagcatctatgccatgagctgggtccgccaggctccagggaaggggctggagtgggtctcagctattagtggtggtggtgataccacatactacgcagactccgtgaagggccggttcaccatctccagagacaattccaagaccacgctggatctgcaaatgaacagcctgagagccgaggacacggccgtatattactgtgcgaaacacactagctactacatggacgtctggggcaaagggaccacggtcaccgtctcctcaggtggaggcggttcaggcggaggtggctctggcggtggcggatcgcagactgtggtgacccaggagccatcgctctcagtgtcccctggagggacagtcacactcacttgtggcttgagctctggctcagtctctactagttactaccccagctggtaccagcagaccccaggccaggctccacgcacgctcatctacagcacaaatattcggtcttctggggtccctgatcgcttctctggctccatccttgggaacaaagctgccctcaccatcacgggggcccaggcagatgatgaatctgattattattgtaagctgtatatgggaagtggcattattttcggcagtggaaccaaggtcactgtcctagcggccgcaaccacgacgccagcgccgcggccaccaacaccggcgcccaccatcgcgtcgcagcccctgtccctgcgcccagaggcgtgccggccagcggcggggggcgcagtgcacacgagggggctggacttcgcctgtgatatctacatctgggcgcccttggccgggacttgtggggtccttctcctgtcactggttatcaccctttactgcaaacggggcagaaagaaactcctgtatatattcaaacaaccatttatgagaccagtacaaactactcaagaggaagatggctgtagctgccgatttccagaagaagaagaaggaggatgtgaactgagagtgaagttcagcaggagcgcagacgcccccgcgtaccagcagggccagaaccagctctataacgagctcaatctaggacgaagagaggagtacgatgttttggacaagagacgtggccgggaccctgagatggggggaaagccgagaaggaagaaccctcaggaaggcctgtacaatgaactgcagaaagataagatggcggaggcctacagtgagattgggatgaaaggcgagcgccggaggggcaaggggcacgatggcctttaccagggtctcagtacagccaccaaggacacctacgacgcccttcacatgcaggccctgccccctcgcggctctggcgagggaaggggttccctgcttacttgcggcgacgtcgaagagaatcccggtccgatggccctcccagtaactgccctccttttgcccctcgcactccttcttcatgccgctcgccccaactgggtcaacgtgattagcgatttgaagaaaatcgaggaccttatacagtctatgcatattgacgctacactgtatactgagagtgatgtacacccgtcctgtaaggtaacggccatgaaatgctttcttctggagctccaggtcatcagcttggagtctggggacgcaagcatccacgatacggttgaaaacctcatcatccttgcgaacaactctctctcatctaatggaaacgttacagagagtgggtgtaaggagtgcgaagagttggaagaaaaaaacatcaaagaatttcttcaatccttcgttcacatagtgcaaatgttcattaacacgtccactaccacacccgccccgaggccacctacgccggcaccgactatcgccagtcaacccctctctctgcgccccgaggcttgccggcctgcggctggtggggcggtccacacccggggcctggattttgcgtgcgatatatacatctgggcacctcttgccggcacctgcggagtgctgcttctctcactcgttattacgctgtactgc

SEQ ID NO: 2501 - DNA, 2157 bp, synthetic construct
  misc_feature 1..2157: note = Synthetic
  source 1..2157: mol_type = other DNA
atggccttaccagtgaccgccttgctcctgccgctggccttgctgctccacgccgccaggccgcaggtgcagctggtggagtctgggggaggcgtggtccagcctgggaggtccctgagactctcctgtgcagcgtctggattcaccttcagtaactatgacaagcactgggtccgccaggccccaggcaaggggctggagtgggtggcagttatatggtatgatggaagtaataagtactatgcagactccgtgaagggccgattcaccatttccagagacaattccaagaacacgctgtatctacaaatgaacagcctgagagccgaggacacggctatgtattactgtgcgagaggtgacaactggaacgacgaacaccactacttctactacatggacgtctggggcaaagggaccacggtcaccgtctcctcaggtggaggcggttcaggcggaggtggctctggcggtggcggatcggaaattgtgctgactcagtctccagactttcagtctgtgactccaaaggagaaagtcaccatcacctgccgggccagtcagagcattggtagtagcttacactggtaccagcagaaaccagatcagtctccaaagctcctcatcaagtttgcttcccagtccttctcaggggtcccctcgaggttcagtggcagtggatctgggacagatttcaccctcaccatccatagcctggaagctgaagatgctgcaacgtattactgtcatcagagtagtagtttaccgtggacgttcggccaagggaccaaggtggaaatcaaagcggccgcaaccacgacgccagcgccgcggccaccaacaccggcgcccaccatcgcgtcgcagcccctgtccctgcgcccagaggcgtgccggccagcggcggggggcgcagtgcacacgagggggctggacttcgcctgtgatatctacatctgggcgcccttggccgggacttgtggggtccttctcctgtcactggttatcaccctttactgcaaacggggcagaaagaaactcctgtatatattcaaacaaccatttatgagaccagtacaaactactcaagaggaagatggctgtagctgccgatttccagaagaagaagaaggaggatgtgaactgagagtgaagttcagcaggagcgcagacgcccccgcgtaccagcagggccagaaccagctctataacgagctcaatctaggacgaagagaggagtacgatgttttggacaagagacgtggccgggaccctgagatggggggaaagccgagaaggaagaaccctcaggaaggcctgtacaatgaactgcagaaagataagatggcggaggcctacagtgagattgggatgaaaggcgagcgccggaggggcaaggggcacgatggcctttaccagggtctcagtacagccaccaaggacacctacgacgcccttcacatgcaggccctgccccctcgcggctctggcgagggaaggggttccctgcttacttgcggcgacgtcgaagagaatcccggtccgatggccctcccagtaactgccctccttttgcccctcgcactccttcttcatgccgctcgccccaactgggtcaacgtgattagcgatttgaagaaaatcgaggaccttatacagtctatgcatattgacgctacactgtatactgagagtgatgtacacccgtcctgtaaggtaacggccatgaaatgctttcttctggagctccaggtcatcagcttggagtctggggacgcaagcatccacgatacggttgaaaacctcatcatccttgcgaacaactctctctcatctaatggaaacgttacagagagtgggtgtaaggagtgcgaagagttggaagaaaaaaacatcaaagaatttcttcaatccttcgttcacatagtgcaaatgttcattaacacgtccactaccacacccgccccgaggccacctacgccggcaccgactatcgccagtcaacccctctctctgcgccccgaggcttgccggcctgcggctggtggggcggtccacacccggggcctggattttgcgtgcgatatatacatctgggcacctcttgccggcacctgcggagtgctgcttctctcactcgttattacgctgtactgc

SEQ ID NO: 2502 - DNA, 2151 bp, synthetic construct
  misc_feature 1..2151: note = Synthetic
  source 1..2151: mol_type = other DNA
atggccttaccagtgaccgccttgctcctgccgctggccttgctgctccacgccgccaggccgcaggttcagttggtacagtctggagctgaggtgaagaagcctggggcctcagtgaaggtctcctgtaaggcttctggttacacctttaccaactatggtttcagctgggtgcgacaggcccctggacaagggcttgactggatgggatggatcagcgcttacaatggttacacaaattatacacagaaactccagggcagagtcaccatgaccactgacacatccacgaccacagcctacatggagctgaggagcctgagatctgacgacacggccgtctattactgtgcgagaagaggactactctactactactactccatggacgtctggggcaaagggaccacggtcaccgtctcctcaggtggaggcggttcaggcggaggtggctctggcggtggcggatcggaaattgtgttgacgcagtctccagccaccctgtctttgtctccaggggaaagagccaccctctcctgcggggccagtcagagtgtttacaacagttacttagcctggtaccagcagaaacctggcctggcgcccaggctcctcatctatgatgcatccctcagggccactggcgtcccagacaggttcagtggcagtgggtctgggacagacttcactctcaccatcagcacactggagcctgaagattttgcagtgtattactgtcagcagtatggtggctcacccatgtacacttttggccaggggaccaagctggagatcaaagcggccgcaaccacgacgccagcgccgcggccaccaacaccggcgcccaccatcgcgtcgcagcccctgtccctgcgcccagaggcgtgccggccagcggcggggggcgcagtgcacacgagggggctggacttcgcctgtgatatctacatctgggcgcccttggccgggacttgtggggtccttctcctgtcactggttatcaccctttactgcaaacggggcagaaagaaactcctgtatatattcaaacaaccatttatgagaccagtacaaactactcaagaggaagatggctgtagctgccgatttccagaagaagaagaaggaggatgtgaactgagagtgaagttcagcaggagcgcagacgcccccgcgtaccagcagggccagaaccagctctataacgagctcaatctaggacgaagagaggagtacgatgttttggacaagagacgtggccgggaccctgagatggggggaaagccgagaaggaagaaccctcaggaaggcctgtacaatgaactgcagaaagataagatggcggaggcctacagtgagattgggatgaaaggcgagcgccggaggggcaaggggcacgatggcctttaccagggtctcagtacagccaccaaggacacctacgacgcccttcacatgcaggccctgccccctcgcggctctggcgagggaaggggttccctgcttacttgcggcgacgtcgaagagaatcccggtccgatggccctcccagtaactgccctccttttgcccctcgcactccttcttcatgccgctcgccccaactgggtcaacgtgattagcgatttgaagaaaatcgaggaccttatacagtctatgcatattgacgctacactgtatactgagagtgatgtacacccgtcctgtaaggtaacggccatgaaatgctttcttctggagctccaggtcatcagcttggagtctggggacgcaagcatccacgatacggttgaaaacctcatcatccttgcgaacaactctctctcatctaatggaaacgttacagagagtgggtgtaaggagtgcgaagagttggaagaaaaaaacatcaaagaatttcttcaatccttcgttcacatagtgcaaatgttcattaacacgtccactaccacacccgccccgaggccacctacgccggcaccgactatcgccagtcaacccctctctctgcgccccgaggcttgccggcctgcggctggtggggcggtccacacccggggcctggattttgcgtgcgatatatacatctgggcacctcttgccggcacctgcggagtgctgcttctctcactcgttattacgctgtactgc

SEQ ID NO: 2503 - DNA, 2139 bp, synthetic construct
  misc_feature 1..2139: note = Synthetic
  source 1..2139: mol_type = other DNA
atggccttaccagtgaccgccttgctcctgccgctggccttgctgctccacgccgccaggccggaggtgcagctgctggagtctgggggaggcctggtacagcctggggggtccctgagactctcctgtacagcctctggattcacctttagcagctttgccatgagctgggtccgccaggctccagggaaggggctggagtgggtctcagctatgagtggtagtggtgataccacatactacgcagactccgtgaagggccggttcaccatctcccgagacaattccaagaccacgctgtatctgcaaatgaacagcctgagagccgaggacacggccgtatattcctgtgcgaagcacactacctactacatggacgtctggggcaaagggaccacggtcaccgtctcctcaggtggaggcggttcaggcggaggtggctctggcggtggcggatcgcagactgtggtgacccaggagccatcgctctcagtgtcccctggagggacagtcacactcacttgtggcttgagctctggctcagtctctactagtgactaccccagctggtaccagcagaccccaggccaggctccacgcacgctcatctacagaacaaacactcgctcttctggggtccctgatcgcttctctggctccatccttgggaacaaagctgccctcaccatcacgggggcccaggcagatgatgaatctgattattactgtgtgctgtatatggatagtggcattattttcggcagtggaaccaaggtcactgtcctagcggccgcaaccacgacgccagcgccgcggccaccaacaccggcgcccaccatcgcgtcgcagcccctgtccctgcgcccagaggcgtgccggccagcggcggggggcgcagtgcacacgagggggctggacttcgcctgtgatatctacatctgggcgcccttggccgggacttgtggggtccttctcctgtcactggttatcaccctttactgcaaacggggcagaaagaaactcctgtatatattcaaacaaccatttatgagaccagtacaaactactcaagaggaagatggctgtagctgccgatttccagaagaagaagaaggaggatgtgaactgagagtgaagttcagcaggagcgcagacgcccccgcgtaccagcagggccagaaccagctctataacgagctcaatctaggacgaagagaggagtacgatgttttggacaagagacgtggccgggaccctgagatggggggaaagccgagaaggaagaaccctcaggaaggcctgtacaatgaactgcagaaagataagatggcggaggcctacagtgagattgggatgaaaggcgagcgccggaggggcaaggggcacgatggcctttaccagggtctcagtacagccaccaaggacacctacgacgcccttcacatgcaggccctgccccctcgcggctctggcgagggaaggggttccctgcttacttgcggcgacgtcgaagagaatcccggtccgatggccctcccagtaactgccctccttttgcccctcgcactccttcttcatgccgctcgccccaactgggtcaacgtgattagcgatttgaagaaaatcgaggaccttatacagtctatgcatattgacgctacactgtatactgagagtgatgtacacccgtcctgtaaggtaacggccatgaaatgctttcttctggagctccaggtcatcagcttggagtctggggacgcaagcatccacgatacggttgaaaacctcatcatccttgcgaacaactctctctcatctaatggaaacgttacagagagtgggtgtaaggagtgcgaagagttggaagaaaaaaacatcaaagaatttcttcaatccttcgttcacatagtgcaaatgttcattaacacgtccactaccacacccgccccgaggccacctacgccggcaccgactatcgccagtcaacccctctctctgcgccccgaggcttgccggcctgcggctggtggggcggtccacacccggggcctggattttgcgtgcgatatatacatctgggcacctcttgccggcacctgcggagtgctgcttctctcactcgttattacgctgtactgc

SEQ ID NO: 2504 - DNA, 2139 bp, synthetic construct
  misc_feature 1..2139: note = Synthetic
  source 1..2139: mol_type = other DNA
atggccttaccagtgaccgccttgctcctgccgctggccttgctgctccacgccgccaggccggaggtgcagctgctggagtctgggggaggcttggtacagcctggggggtccctgagactctcctgtgcagcctctggattcacctttaacacctatgccatgagctgggtccgccaggctccagggaaggggctggagtgggtctcagctatgagtggtagtggtgataccacatactacgcagactccgtgaagggccggttcaccatctccagagacaattccaagaccactctgtatctgcaaatgaacagcctgagagccgaggacacggccgtatattcctgtgcgaaacacacttcctactacatggacgtctggggcaaagggaccacggtcaccgtctcctcaggtggaggcggttcaggcggaggtggctctggcggtggcggatcgcagactgtggtgacccaggagccatcgctctcagtgtcccctggagggacagtcacactcacttgtggcttgagctctggctcagtctctactagtgactaccccagttggtaccagcagaccccaggccaggctccacgcacgctcatctacagaacaaacactcgctcttctggggtccctgatcgcttctctggctccatccttgggaacaaagctgccctcaccatcacgggggcccaggcagatgatgaatctgattattactgtgtgctgtatatgggtagtggcattattttcggcagtggaaccaaggtcactgtcctagcggccgcaaccacgacgccagcgccgcggccaccaacaccggcgcccaccatcgcgtcgcagcccctgtccctgcgcccagaggcgtgccggccagcggcggggggcgcagtgcacacgagggggctggacttcgcctgtgatatctacatctgggcgcccttggccgggacttgtggggtccttctcctgtcactggttatcaccctttactgcaaacggggcagaaagaaactcctgtatatattcaaacaaccatttatgagaccagtacaaactactcaagaggaagatggctgtagctgccgatttccagaagaagaagaaggaggatgtgaactgagagtgaagttcagcaggagcgcagacgcccccgcgtaccagcagggccagaaccagctctataacgagctcaatctaggacgaagagaggagtacgatgttttggacaagagacgtggccgggaccctgagatggggggaaagccgagaaggaagaaccctcaggaaggcctgtacaatgaactgcagaaagataagatggcggaggcctacagtgagattgggatgaaaggcgagcgccggaggggcaaggggcacgatggcctttaccagggtctcagtacagccaccaaggacacctacgacgcccttcacatgcaggccctgccccctcgcggctctggcgagggaaggggttccctgcttacttgcggcgacgtcgaagagaatcccggtccgatggccctcccagtaactgccctccttttgcccctcgcactccttcttcatgccgctcgccccaactgggtcaacgtgattagcgatttgaagaaaatcgaggaccttatacagtctatgcatattgacgctacactgtatactgagagtgatgtacacccgtcctgtaaggtaacggccatgaaatgctttcttctggagctccaggtcatcagcttggagtctggggacgcaagcatccacgatacggttgaaaacctcatcatccttgcgaacaactctctctcatctaatggaaacgttacagagagtgggtgtaaggagtgcgaagagttggaagaaaaaaacatcaaagaatttcttcaatccttcgttcacatagtgcaaatgttcattaacacgtccactaccacacccgccccgaggccacctacgccggcaccgactatcgccagtcaacccctctctctgcgccccgaggcttgccggcctgcggctggtggggcggtccacacccggggcctggattttgcgtgcgatatatacatctgggcacctcttgccggcacctgcggagtgctgcttctctcactcgttattacgctgtactgc

SEQ ID NO: 2505 - DNA, 2139 bp, synthetic construct
  misc_feature 1..2139: note = Synthetic
  source 1..2139: mol_type = other DNA
atggccttaccagtgaccgccttgctcctgccgctggccttgctgctccacgccgccaggccggaggtccaattattggagtctgggggagacttggtacagcctggggggtccctgagactctcctgtgcagcctctggattcacctttagcacctatgccatgagctgggtccgccaggctccagggaaggggctggaatgggtctcagctattagtggtagtggtgaaaacatatactacgcagactccgtgaagggccggttcaccatctccagagacaattccaagaacacgctatttctacaaatgaacagcctgagagccgaggacacggccgtatattactgtgcgaaacacactagctattacatggacgtctggggcaaagggaccacggtcaccgtctcctcaggtggaggcggttcaggcggaggtggctctggcggtggcggatcgcagactgtggtgacccaggagccatcgttctcagtgtcccctggagggacagtcacactcacttgtggcttatactctgactcagtctctactagttactaccccagctggtaccagcagaccccaggccaggctccacgcacgctcatctacaacacaaacactcgctcttctggggtccctgatcgcttctctggctccatccttgggaacaaagctgccctcaccatcacgggggcccaggcagatgatgaatctgattattactgtgtactatatatggttagtggcattgttttcggcagtggaaccaaggtcactgtcctggcggccgcaaccacgacgccagcgccgcggccaccaacaccggcgcccaccatcgcgtcgcagcccctgtccctgcgcccagaggcgtgccggccagcggcggggggcgcagtgcacacgagggggctggacttcgcctgtgatatctacatctgggcgcccttggccgggacttgtggggtccttctcctgtcactggttatcaccctttactgcaaacggggcagaaagaaactcctgtatatattcaaacaaccatttatgagaccagtacaaactactcaagaggaagatggctgtagctgccgatttccagaagaagaagaaggaggatgtgaactgagagtgaagttcagcaggagcgcagacgcccccgcgtaccagcagggccagaaccagctctataacgagctcaatctaggacgaagagaggagtacgatgttttggacaagagacgtggccgggaccctgagatggggggaaagccgagaaggaagaaccctcaggaaggcctgtacaatgaactgcagaaagataagatggcggaggcctacagtgagattgggatgaaaggcgagcgccggaggggcaaggggcacgatggcctttaccagggtctcagtacagccaccaaggacacctacgacgcccttcacatgcaggccctgccccctcgcggctctggcgagggaaggggttccctgcttacttgcggcgacgtcgaagagaatcccggtccgatggccctcccagtaactgccctccttttgcccctcgcactccttcttcatgccgctcgccccaactgggtcaacgtgattagcgatttgaagaaaatcgaggaccttatacagtctatgcatattgacgctacactgtatactgagagtgatgtacacccgtcctgtaaggtaacggccatgaaatgctttcttctggagctccaggtcatcagcttggagtctggggacgcaagcatccacgatacggttgaaaacctcatcatccttgcgaacaactctctctcatctaatggaaacgttacagagagtgggtgtaaggagtgcgaagagttggaagaaaaaaacatcaaagaatttcttcaatccttcgttcacatagtgcaaatgttcattaacacgtccactaccacacccgccccgaggccacctacgccggcaccgactatcgccagtcaacccctctctctgcgccccgaggcttgccggcctgcggctggtggggcggtccacacccggggcctggattttgcgtgcgatatatacatctgggcacctcttgccggcacctgcggagtgctgcttctctcactcgttattacgctgtactgc

SEQ ID NO: 2506 - DNA, 2157 bp, synthetic construct
  misc_feature 1..2157: note = Synthetic
  source 1..2157: mol_type = other DNA
atggccttaccagtgaccgccttgctcctgccgctggccttgctgctccacgccgccaggccgcaggtgcagctggtggagtctgggggaggcgtggtccagcctgggaggtccctgagactctcctgtgcagcgtctggattcaccttcagtagttatggcatgcactgggtccgccaggctccaggcaaggggctggagtgggtggcagttatatggtatgatggaattaataaatactatgcagactccgtgaagggccgattcaccatctccagagacaattccaagaacacgctgtatctgcaaatgaacagcctgagagccgaagacacggctgtgtattactgtgcgagagaacggctggaacgaaggtactactactacatggacgtctggggcaaagggaccacggtcaccgtctcctcaggtggaggcggttcaggcggaggtggctctggcggtggcggatcgcagactgtggtgacccaggagccatcgttctcagtgtcccctggagggacagtcacactcacttgtggcttgagctctggctcagtctctactagttactaccccggctggtaccagcagaccccaggccaggctccacgcacgctcatctacagcacaaacactcgctcttctggggtccctgatcgcttctctggctccatccttgggaacaaagctgccctcaccatcacgggggcccaggcagatgatgaatctgattattactgtgtgctatatatgggtagtggcatgtttattttcggcagtggaaccaaggtcactgtcctagcggccgcaaccacgacgccagcgccgcggccaccaacaccggcgcccaccatcgcgtcgcagcccctgtccctgcgcccagaggcgtgccggccagcggcggggggcgcagtgcacacgagggggctggacttcgcctgtgatatctacatctgggcgcccttggccgggacttgtggggtccttctcctgtcactggttatcaccctttactgcaaacggggcagaaagaaactcctgtatatattcaaacaaccatttatgagaccagtacaaactactcaagaggaagatggctgtagctgccgatttccagaagaagaagaaggaggatgtgaactgagagtgaagttcagcaggagcgcagacgcccccgcgtaccagcagggccagaaccagctctataacgagctcaatctaggacgaagagaggagtacgatgttttggacaagagacgtggccgggaccctgagatggggggaaagccgagaaggaagaaccctcaggaaggcctgtacaatgaactgcagaaagataagatggcggaggcctacagtgagattgggatgaaaggcgagcgccggaggggcaaggggcacgatggcctttaccagggtctcagtacagccaccaaggacacctacgacgcccttcacatgcaggccctgccccctcgcggctctggcgagggaaggggttccctgcttacttgcggcgacgtcgaagagaatcccggtccgatggccctcccagtaactgccctccttttgcccctcgcactccttcttcatgccgctcgccccaactgggtcaacgtgattagcgatttgaagaaaatcgaggaccttatacagtctatgcatattgacgctacactgtatactgagagtgatgtacacccgtcctgtaaggtaacggccatgaaatgctttcttctggagctccaggtcatcagcttggagtctggggacgcaagcatccacgatacggttgaaaacctcatcatccttgcgaacaactctctctcatctaatggaaacgttacagagagtgggtgtaaggagtgcgaagagttggaagaaaaaaacatcaaagaatttcttcaatccttcgttcacatagtgcaaatgttcattaacacgtccactaccacacccgccccgaggccacctacgccggcaccgactatcgccagtcaacccctctctctgcgccccgaggcttgccggcctgcggctggtggggcggtccacacccggggcctggattttgcgtgcgatatatacatctgggcacctcttgccggcacctgcggagtgctgcttctctcactcgttattacgctgtactgc

SEQ ID NO: 2507 - DNA, 2139 bp, synthetic construct
  misc_feature 1..2139: note = Synthetic
  source 1..2139: mol_type = other DNA
atggccttaccagtgaccgccttgctcctgccgctggccttgctgctccacgccgccaggccggaggtgcagttgttggagtctgggggaggcttggtacagcctggggggtccctgagactctcctgtgcagcctctggattcacctttagcagctttgccatgagctgggtccgccaggctccagggaaggggctggaatgggtctcagctgttagtggtagtggtgatgacacatactacgcagactccgtgaagggccggttcaccatctccagagacaattccaagaacacgctgtatctgcaaatgaacagcctgagagccgaggacacggccgtatattactgtgcgaaacacactagctactacctggacgtctggggcaaagggaccacggtcaccgtctcctcaggtggaggcggttcaggcggaggtggctctggcggtggcggatcgcagactgtggtgacccaggagccatcgttctcagtgtcccctggagggacagtcacactcacttgtgccttgagctctgactcagtctctactagttactttcccagctggtaccggcagaccccaggccaggctccacgcacgctcatctacaacacaaacactcgctcttctggggtccctgatcgcttctctggctccatccttgggaacaaagctgccctcaccatcacgggggcccaggcagatgatgaatctgattattactgtgtgctatatatgggtagtggcattattttcggcagtggaaccaaggtcactgtcctagcggccgcaaccacgacgccagcgccgcggccaccaacaccggcgcccaccatcgcgtcgcagcccctgtccctgcgcccagaggcgtgccggccagcggcggggggcgcagtgcacacgagggggctggacttcgcctgtgatatctacatctgggcgcccttggccgggacttgtggggtccttctcctgtcactggttatcaccctttactgcaaacggggcagaaagaaactcctgtatatattcaaacaaccatttatgagaccagtacaaactactcaagaggaagatggctgtagctgccgatttccagaagaagaagaaggaggatgtgaactgagagtgaagttcagcaggagcgcagacgcccccgcgtaccagcagggccagaaccagctctataacgagctcaatctaggacgaagagaggagtacgatgttttggacaagagacgtggccgggaccctgagatggggggaaagccgagaaggaagaaccctcaggaaggcctgtacaatgaactgcagaaagataagatggcggaggcctacagtgagattgggatgaaaggcgagcgccggaggggcaaggggcacgatggcctttaccagggtctcagtacagccaccaaggacacctacgacgcccttcacatgcaggccctgccccctcgcggctctggcgagggaaggggttccctgcttacttgcggcgacgtcgaagagaatcccggtccgatggccctcccagtaactgccctccttttgcccctcgcactccttcttcatgccgctcgccccaactgggtcaacgtgattagcgatttgaagaaaatcgaggaccttatacagtctatgcatattgacgctacactgtatactgagagtgatgtacacccgtcctgtaaggtaacggccatgaaatgctttcttctggagctccaggtcatcagcttggagtctggggacgcaagcatccacgatacggttgaaaacctcatcatccttgcgaacaactctctctcatctaatggaaacgttacagagagtgggtgtaaggagtgcgaagagttggaagaaaaaaacatcaaagaatttcttcaatccttcgttcacatagtgcaaatgttcattaacacgtccactaccacacccgccccgaggccacctacgccggcaccgactatcgccagtcaacccctctctctgcgccccgaggcttgccggcctgcggctggtggggcggtccacacccggggcctggattttgcgtgcgatatatacatctgggcacctcttgccggcacctgcggagtgctgcttctctcactcgttattacgctgtactgc

SEQ ID NO: 2508 - DNA, 2157 bp, synthetic construct
  misc_feature 1..2157: note = Synthetic
  source 1..2157: mol_type = other DNA
atggccttaccagtgaccgccttgctcctgccgctggccttgctgctccacgccgccaggccgcaggtgcagctggtggagtctgggggaggcgtggtccagcctgggaggtccctgagactctcctgtgcagcgtctggattcaacttcagtacctttgacatacactgggtccgccaggctccaggcaaggggctggagtgggtggcacttatatggtatgatggaagttataaatactatgcagactccgtgaagggccgattcaccatttccagagacaattccaagaacacgctggatctgcgaatgaacagcctgagagccgaggacacggctgtgtattactgtgcgcgaaatgacaactggaacgacgaacactactaccactattacatggacgtctggggcaaagggaccacggtcaccgtctcctcaggtggaggcggttcaggcggaggtggctctggcggtggcggatcggaaattgtcctgactcagtctccagactttcagtctgtgactccaaaggagaaagtcaccatcacctgccgggccagtcagagtattggtagtagcttacactggtaccagcagaaaccagatcagtctccaaagctcctcatcaagtttgcttcccagtccttctcaggggtcccctcgaggttcagtggcagtggatctgggacagatttcaccctcaccatcaatagcctggaagctgaagatgctgcaacgtatttctgtcatcagagtagtagtttaccgtggacgttcggccaagggaccaaggtggaaatcaaagcggccgcaaccacgacgccagcgccgcggccaccaacaccggcgcccaccatcgcgtcgcagcccctgtccctgcgcccagaggcgtgccggccagcggcggggggcgcagtgcacacgagggggctggacttcgcctgtgatatctacatctgggcgcccttggccgggacttgtggggtccttctcctgtcactggttatcaccctttactgcaaacggggcagaaagaaactcctgtatatattcaaacaaccatttatgagaccagtacaaactactcaagaggaagatggctgtagctgccgatttccagaagaagaagaaggaggatgtgaactgagagtgaagttcagcaggagcgcagacgcccccgcgtaccagcagggccagaaccagctctataacgagctcaatctaggacgaagagaggagtacgatgttttggacaagagacgtggccgggaccctgagatggggggaaagccgagaaggaagaaccctcaggaaggcctgtacaatgaactgcagaaagataagatggcggaggcctacagtgagattgggatgaaaggcgagcgccggaggggcaaggggcacgatggcctttaccagggtctcagtacagccaccaaggacacctacgacgcccttcacatgcaggccctgccccctcgcggctctggcgagggaaggggttccctgcttacttgcggcgacgtcgaagagaatcccggtccgatggccctcccagtaactgccctccttttgcccctcgcactccttcttcatgccgctcgccccaactgggtcaacgtgattagcgatttgaagaaaatcgaggaccttatacagtctatgcatattgacgctacactgtatactgagagtgatgtacacccgtcctgtaaggtaacggccatgaaatgctttcttctggagctccaggtcatcagcttggagtctggggacgcaagcatccacgatacggttgaaaacctcatcatccttgcgaacaactctctctcatctaatggaaacgttacagagagtgggtgtaaggagtgcgaagagttggaagaaaaaaacatcaaagaatttcttcaatccttcgttcacatagtgcaaatgttcattaacacgtccactaccacacccgccccgaggccacctacgccggcaccgactatcgccagtcaacccctctctctgcgccccgaggcttgccggcctgcggctggtggggcggtccacacccggggcctggattttgcgtgcgatatatacatctgggcacctcttgccggcacctgcggagtgctgcttctctcactcgttattacgctgtactgc

SEQ ID NO: 2509 - DNA, 2172 bp, synthetic construct
  misc_feature 1..2172: note = Synthetic
  source 1..2172: mol_type = other DNA
atggccttaccagtgaccgccttgctcctgccgctggccttgctgctccacgccgccaggccggaagtgcacctgttggagtctgggggaggcttggtccagcctggggggtccctgagactctcctgtgcggcctctggattcacctttagcagctatgccatgaactgggtccgccaggctccagggaaggggctggagtgggtctcttctattagtggtagtggtagtagctcatactacgcagactccgtgaagggccggttcaccatctccagagacaattccaagaacacgctgtatctgcaaatgaacagcctgagagccgaggacacggccgtatattactgtgcgtctcgtggattcaactcccagtatcctcccggatactactactactacatggacgtctggggcaaagggaccacggtcaccgtctcctcaggtggaggcggttcaggcggaggtggctctggcggtggcggatcgcagactgtggtgacccaggagccatcgttctcagtgtcccctggagggacagtcacactcacttgtggcttgagctctggctcagtctccactagttacttccccagctggtaccagcagacccccggccaggctccacgcacgctcatctacatcacaaacactcgctcttcaggggtccctgatcgcttctctggctccattattgggaacaaagctgccctcaccatcacgggggcccaggcagatgatgaatctgattatttctgtgtactatatatgggtagtggcacttgggtgttcggtggaggaaccaagctgactgtcctagcggccgcaaccacgacgccagcgccgcggccaccaacaccggcgcccaccatcgcgtcgcagcccctgtccctgcgcccagaggcgtgccggccagcggcggggggcgcagtgcacacgagggggctggacttcgcctgtgatatctacatctgggcgcccttggccgggacttgtggggtccttctcctgtcactggttatcaccctttactgcaaacggggcagaaagaaactcctgtatatattcaaacaaccatttatgagaccagtacaaactactcaagaggaagatggctgtagctgccgatttccagaagaagaagaaggaggatgtgaactgagagtgaagttcagcaggagcgcagacgcccccgcgtaccagcagggccagaaccagctctataacgagctcaatctaggacgaagagaggagtacgatgttttggacaagagacgtggccgggaccctgagatggggggaaagccgagaaggaagaaccctcaggaaggcctgtacaatgaactgcagaaagataagatggcggaggcctacagtgagattgggatgaaaggcgagcgccggaggggcaaggggcacgatggcctttaccagggtctcagtacagccaccaaggacacctacgacgcccttcacatgcaggccctgccccctcgcggctctggcgagggaaggggttccctgcttacttgcggcgacgtcgaagagaatcccggtccgatggccctcccagtaactgccctccttttgcccctcgcactccttcttcatgccgctcgccccaactgggtcaacgtgattagcgatttgaagaaaatcgaggaccttatacagtctatgcatattgacgctacactgtatactgagagtgatgtacacccgtcctgtaaggtaacggccatgaaatgctttcttctggagctccaggtcatcagcttggagtctggggacgcaagcatccacgatacggttgaaaacctcatcatccttgcgaacaactctctctcatctaatggaaacgttacagagagtgggtgtaaggagtgcgaagagttggaagaaaaaaacatcaaagaatttcttcaatccttcgttcacatagtgcaaatgttcattaacacgtccactaccacacccgccccgaggccacctacgccggcaccgactatcgccagtcaacccctctctctgcgccccgaggcttgccggcctgcggctggtggggcggtccacacccggggcctggattttgcgtgcgatatatacatctgggcacctcttgccggcacctgcggagtgctgcttctctcactcgttattacgctgtactgc

SEQ ID NO: 2510 - DNA, 2133 bp, synthetic construct
  misc_feature 1..2133: note = Synthetic
  source 1..2133: mol_type = other DNA
atggccttaccagtgaccgccttgctcctgccgctggccttgctgctccacgccgccaggccggaggtgcagctgttggagtctgggggaggcttggtacagcctggggggtccctgagactctcctgtgcagcctctggattcaccttcagcaactatgccatgacctgggtccgccaggctccagggaaggggctggagtgggtctcagctattagtggtagtggtattggcacatactacgcagactccgtgcagggccggttcaccacctccagagacaattccaagaacacgctgtatctgcaaatgaacagcctgagagccgaggacacggccgtttattactgtgcgaaaggggggtacaactggaaggacgtctggggcaaagggaccacggtcaccgtctcctcaggtggaggcggttcaggcggaggtggctctggcggtggcggatcggaaattgtgctgactcagtctccagactttcagtctgtgactccaaaggagaaagtcaccatcacctgccgggccagtcagagcattggtagtagcttacactggtaccagcagaaaccagatcagtctccaaagctcctcatcaagtttgcttcccagtccttctcaggggtcccctcgaggttcagtggcagtggatctgggacagatttcaccctcaccatccatagcctggaagctgaagatgctgcaacgtattactgtcatcagagtagtagtttaccgtggacgttcggccaagggaccaaggtggaaatcaaagcggccgcaaccacgacgccagcgccgcggccaccaacaccggcgcccaccatcgcgtcgcagcccctgtccctgcgcccagaggcgtgccggccagcggcggggggcgcagtgcacacgagggggctggacttcgcctgtgatatctacatctgggcgcccttggccgggacttgtggggtccttctcctgtcactggttatcaccctttactgcaaacggggcagaaagaaactcctgtatatattcaaacaaccatttatgagaccagtacaaactactcaagaggaagatggctgtagctgccgatttccagaagaagaagaaggaggatgtgaactgagagtgaagttcagcaggagcgcagacgcccccgcgtaccagcagggccagaaccagctctataacgagctcaatctaggacgaagagaggagtacgatgttttggacaagagacgtggccgggaccctgagatggggggaaagccgagaaggaagaaccctcaggaaggcctgtacaatgaactgcagaaagataagatggcggaggcctacagtgagattgggatgaaaggcgagcgccggaggggcaaggggcacgatggcctttaccagggtctcagtacagccaccaaggacacctacgacgcccttcacatgcaggccctgccccctcgcggctctggcgagggaaggggttccctgcttacttgcggcgacgtcgaagagaatcccggtccgatggccctcccagtaactgccctccttttgcccctcgcactccttcttcatgccgctcgccccaactgggtcaacgtgattagcgatttgaagaaaatcgaggaccttatacagtctatgcatattgacgctacactgtatactgagagtgatgtacacccgtcctgtaaggtaacggccatgaaatgctttcttctggagctccaggtcatcagcttggagtctggggacgcaagcatccacgatacggttgaaaacctcatcatccttgcgaacaactctctctcatctaatggaaacgttacagagagtgggtgtaaggagtgcgaagagttggaagaaaaaaacatcaaagaatttcttcaatccttcgttcacatagtgcaaatgttcattaacacgtccactaccacacccgccccgaggccacctacgccggcaccgactatcgccagtcaacccctctctctgcgccccgaggcttgccggcctgcggctggtggggcggtccacacccggggcctggattttgcgtgcgatatatacatctgggcacctcttgccggcacctgcggagtgctgcttctctcactcgttattacgctgtactgc

SEQ ID NO: 2511 - DNA, 2157 bp, synthetic construct
  misc_feature 1..2157: note = Synthetic
  source 1..2157: mol_type = other DNA
atggccttaccagtgaccgccttgctcctgccgctggccttgctgctccacgccgccaggccgcaggtgcagctggtggagtctgggggaggcgtggtccagcctgggaggtccctgagactctcctgtgcagcgtctgggttcaccttcactaactatgacatgcactgggtccgccaggccccaggcaaggggctggagtgggtgacaattatatggcatgatggaagtaataaatattatttagactccgtgaggggccgattcaccatctccagagacaattccaagaacacgctgtatctgcaaatgaacagcctgagagccgaggacacggctgtgtattactgtgcgagaggtgacaactggaacgacgaacaccactacttctactacatggacgtctggggcaaagggaccacggtcaccgtctcctcaggtggaggcggttcaggcggaggtggctctggcggtggcggatcggaaattgtgctgactcagtctccagactttcagtctgtgactccaaaggagaaagtcaccatcacctgccgggccagtcagagcattggtagtagcttacactggtaccagcagaaaccagatcagtctccaaagctcctcatcaagtttgcttcccagtccttctcaggggtcccctcgaggttcagtggcagtggatctgggacagatttcaccctcaccatccatagcctggaagctgaagatgctgcaacgtattactgtcatcagagtagtagtttaccgtggacgttcggccaagggaccaaggtggaaatcaaagcggccgcaaccacgacgccagcgccgcggccaccaacaccggcgcccaccatcgcgtcgcagcccctgtccctgcgcccagaggcgtgccggccagcggcggggggcgcagtgcacacgagggggctggacttcgcctgtgatatctacatctgggcgcccttggccgggacttgtggggtccttctcctgtcactggttatcaccctttactgcaaacggggcagaaagaaactcctgtatatattcaaacaaccatttatgagaccagtacaaactactcaagaggaagatggctgtagctgccgatttccagaagaagaagaaggaggatgtgaactgagagtgaagttcagcaggagcgcagacgcccccgcgtaccagcagggccagaaccagctctataacgagctcaatctaggacgaagagaggagtacgatgttttggacaagagacgtggccgggaccctgagatggggggaaagccgagaaggaagaaccctcaggaaggcctgtacaatgaactgcagaaagataagatggcggaggcctacagtgagattgggatgaaaggcgagcgccggaggggcaaggggcacgatggcctttaccagggtctcagtacagccaccaaggacacctacgacgcccttcacatgcaggccctgccccctcgcggctctggcgagggaaggggttccctgcttacttgcggcgacgtcgaagagaatcccggtccgatggccctcccagtaactgccctccttttgcccctcgcactccttcttcatgccgctcgccccaactgggtcaacgtgattagcgatttgaagaaaatcgaggaccttatacagtctatgcatattgacgctacactgtatactgagagtgatgtacacccgtcctgtaaggtaacggccatgaaatgctttcttctggagctccaggtcatcagcttggagtctggggacgcaagcatccacgatacggttgaaaacctcatcatccttgcgaacaactctctctcatctaatggaaacgttacagagagtgggtgtaaggagtgcgaagagttggaagaaaaaaacatcaaagaatttcttcaatccttcgttcacatagtgcaaatgttcattaacacgtccactaccacacccgccccgaggccacctacgccggcaccgactatcgccagtcaacccctctctctgcgccccgaggcttgccggcctgcggctggtggggcggtccacacccggggcctggattttgcgtgcgatatatacatctgggcacctcttgccggcacctgcggagtgctgcttctctcactcgttattacgctgtactgc

SEQ ID NO: 2512 - DNA, 2157 bp, synthetic construct
  misc_feature 1..2157: note = Synthetic
  source 1..2157: mol_type = other DNA
atggccttaccagtgaccgccttgctcctgccgctggccttgctgctccacgccgccaggccgcaggtgcagctggtggagtctgggggaggcgtggtccagcctgggaggtccctgagactctcctgtgcagcgtctgggttcaccttcagtaactatgacatgcactgggtccgccaggccccaggcaaggggctggagtgggtgacaattatatggcatgatggaagtaataaatattatttagactccgtgaagggccgattcaccatctccagagacaattccaagaacacgctgtatctgcaaatgaacagcctgagagccgaggacacggctgtgtattactgtgcgagaggtgacaactggaacgacgaacaccactacttctactacatggacgtctggggcaaagggaccacggtcaccgtctcctcaggtggaggcggttcaggcggaggtggctctggcggtggcggatcggaaattgtgttgacacagtctccagccaccctgtctttgtctccaggggaaagagccaccctctcctgcagggccagtcagagtgttagcagctccttagcctggtaccaacagaaacctggccaggctccccggctcctcatctatgatgcatccaacagggccactggcatcccagccaggttcagtggcagtgggtctgggacagacttcactctcaccatcagcagcctagagcctgaagattttgcagtttattactgtcagcagcgtagcaactggcctctcactttcggcggagggaccaaggtggagatcaaagcggccgcaaccacgacgccagcgccgcggccaccaacaccggcgcccaccatcgcgtcgcagcccctgtccctgcgcccagaggcgtgccggccagcggcggggggcgcagtgcacacgagggggctggacttcgcctgtgatatctacatctgggcgcccttggccgggacttgtggggtccttctcctgtcactggttatcaccctttactgcaaacggggcagaaagaaactcctgtatatattcaaacaaccatttatgagaccagtacaaactactcaagaggaagatggctgtagctgccgatttccagaagaagaagaaggaggatgtgaactgagagtgaagttcagcaggagcgcagacgcccccgcgtaccagcagggccagaaccagctctataacgagctcaatctaggacgaagagaggagtacgatgttttggacaagagacgtggccgggaccctgagatggggggaaagccgagaaggaagaaccctcaggaaggcctgtacaatgaactgcagaaagataagatggcggaggcctacagtgagattgggatgaaaggcgagcgccggaggggcaaggggcacgatggcctttaccagggtctcagtacagccaccaaggacacctacgacgcccttcacatgcaggccctgccccctcgcggctctggcgagggaaggggttccctgcttacttgcggcgacgtcgaagagaatcccggtccgatggccctcccagtaactgccctccttttgcccctcgcactccttcttcatgccgctcgccccaactgggtcaacgtgattagcgatttgaagaaaatcgaggaccttatacagtctatgcatattgacgctacactgtatactgagagtgatgtacacccgtcctgtaaggtaacggccatgaaatgctttcttctggagctccaggtcatcagcttggagtctggggacgcaagcatccacgatacggttgaaaacctcatcatccttgcgaacaactctctctcatctaatggaaacgttacagagagtgggtgtaaggagtgcgaagagttggaagaaaaaaacatcaaagaatttcttcaatccttcgttcacatagtgcaaatgttcattaacacgtccactaccacacccgccccgaggccacctacgccggcaccgactatcgccagtcaacccctctctctgcgccccgaggcttgccggcctgcggctggtggggcggtccacacccggggcctggattttgcgtgcgatatatacatctgggcacctcttgccggcacctgcggagtgctgcttctctcactcgttattacgctgtactgc

SEQ ID NO: 2513 - DNA, 2145 bp, synthetic construct
  misc_feature 1..2145: note = Synthetic
  source 1..2145: mol_type = other DNA
atggccttaccagtgaccgccttgctcctgccgctggccttgctgctccacgccgccaggccggaggtgcagctggtggagtctgggggaggtgtggtacggcctggggggtccctgagactctcctgtgcagcctctggattcacctttgatgattatggcatgagctgggtccgccaagctccagggaaggggctggagtgggtctctggtattaattggaatggtggtagcacaggttatgtagactctgtgaagggccgattcaccatctccagagacaacgccaagaactccctgtatctgcaaatgaacagtctgagagccgaggacacggccttgtatcactgtgcgagaccagtaactacggactactactactacatggacgtctggggcaaagggaccacggtcaccgtctcctcaggtggaggcggttcaggcggaggtggctctggcggtggcggatcggaaattgtgttgacgcagtctccaggcaccctgtctttgtctccaggggaaagagccaccctctcctgcagggccagtcagagtgttagcagcagctacttagcctggtaccagcagaaacctggccaggctcccaggctcctcatctatggtgcatccagcagggccactggcatcccagacaggttcagtggcagtgggtctgggacagacttcactctcaccatcagcagactggagcctgaagattttgcagtgtattactgtcagcagtatggtagctcgtggacgttcggccaagggaccaaggtggaaatcaaagcggccgcaaccacgacgccagcgccgcggccaccaacaccggcgcccaccatcgcgtcgcagcccctgtccctgcgcccagaggcgtgccggccagcggcggggggcgcagtgcacacgagggggctggacttcgcctgtgatatctacatctgggcgcccttggccgggacttgtggggtccttctcctgtcactggttatcaccctttactgcaaacggggcagaaagaaactcctgtatatattcaaacaaccatttatgagaccagtacaaactactcaagaggaagatggctgtagctgccgatttccagaagaagaagaaggaggatgtgaactgagagtgaagttcagcaggagcgcagacgcccccgcgtaccagcagggccagaaccagctctataacgagctcaatctaggacgaagagaggagtacgatgttttggacaagagacgtggccgggaccctgagatggggggaaagccgagaaggaagaaccctcaggaaggcctgtacaatgaactgcagaaagataagatggcggaggcctacagtgagattgggatgaaaggcgagcgccggaggggcaaggggcacgatggcctttaccagggtctcagtacagccaccaaggacacctacgacgcccttcacatgcaggccctgccccctcgcggctctggcgagggaaggggttccctgcttacttgcggcgacgtcgaagagaatcccggtccgatggccctcccagtaactgccctccttttgcccctcgcactccttcttcatgccgctcgccccaactgggtcaacgtgattagcgatttgaagaaaatcgaggaccttatacagtctatgcatattgacgctacactgtatactgagagtgatgtacacccgtcctgtaaggtaacggccatgaaatgctttcttctggagctccaggtcatcagcttggagtctggggacgcaagcatccacgatacggttgaaaacctcatcatccttgcgaacaactctctctcatctaatggaaacgttacagagagtgggtgtaaggagtgcgaagagttggaagaaaaaaacatcaaagaatttcttcaatccttcgttcacatagtgcaaatgttcattaacacgtccactaccacacccgccccgaggccacctacgccggcaccgactatcgccagtcaacccctctctctgcgccccgaggcttgccggcctgcggctggtggggcggtccacacccggggcctggattttgcgtgcgatatatacatctgggcacctcttgccggcacctgcggagtgctgcttctctcactcgttattacgctgtactgc

SEQ ID NO: 2514 - DNA, 2169 bp, synthetic construct
  misc_feature 1..2169: note = Synthetic
  source 1..2169: mol_type = other DNA
atggccttaccagtgaccgccttgctcctgccgctggccttgctgctccacgccgccaggccggaggtgcagctgttggagtctgggggaggcttggtacagcctggggggtccctgagactctcctgtgcagcctctggattcacctttagcagctatgccatgagctgggtccgccaggctccagggaaggggctggagtgggtctcagctattagtggtagtggtggtagcacatactacgcagactccgtgaagggccggttcaccatctccagagacaattccaagaacacgctgtatctgcaaatgaacagcctgagagccgaggacacggccgtatattactgtgcgaaaaaggggacgtcgtacaactggaacgacgtccattactactactactactacatggacgtctggggcaaagggaccacggtcaccgtctcctcaggtggaggcggttcaggcggaggtggctctggcggtggcggatcggaaattgtgttgacgcagtctccaggcaccctgtctttgtctccaggggaaagagccaccctctcctgcagggccagtcagagtgttagcagcagctacttagcctggtaccagcagaaacctggccaggctcccaggctcctcatctatggtgcatccagcagggccactggcatcccagacaggttcagtggcagtgggtctgggacagacttcactctcaccatcagcagactggagcctgaagattttgcagtgtattactgtcagcagtatggtagctcgtggacgttcggccaagggaccaaggtggaaatcaaagcggccgcaaccacgacgccagcgccgcggccaccaacaccggcgcccaccatcgcgtcgcagcccctgtccctgcgcccagaggcgtgccggccagcggcggggggcgcagtgcacacgagggggctggacttcgcctgtgatatctacatctgggcgcccttggccgggacttgtggggtccttctcctgtcactggttatcaccctttactgcaaacggggcagaaagaaactcctgtatatattcaaacaaccatttatgagaccagtacaaactactcaagaggaagatggctgtagctgccgatttccagaagaagaagaaggaggatgtgaactgagagtgaagttcagcaggagcgcagacgcccccgcgtaccagcagggccagaaccagctctataacgagctcaatctaggacgaagagaggagtacgatgttttggacaagagacgtggccgggaccctgagatggggggaaagccgagaaggaagaaccctcaggaaggcctgtacaatgaactgcagaaagataagatggcggaggcctacagtgagattgggatgaaaggcgagcgccggaggggcaaggggcacgatggcctttaccagggtctcagtacagccaccaaggacacctacgacgcccttcacatgcaggccctgccccctcgcggctctggcgagggaaggggttccctgcttacttgcggcgacgtcgaagagaatcccggtccgatggccctcccagtaactgccctccttttgcccctcgcactccttcttcatgccgctcgccccaactgggtcaacgtgattagcgatttgaagaaaatcgaggaccttatacagtctatgcatattgacgctacactgtatactgagagtgatgtacacccgtcctgtaaggtaacggccatgaaatgctttcttctggagctccaggtcatcagcttggagtctggggacgcaagcatccacgatacggttgaaaacctcatcatccttgcgaacaactctctctcatctaatggaaacgttacagagagtgggtgtaaggagtgcgaagagttggaagaaaaaaacatcaaagaatttcttcaatccttcgttcacatagtgcaaatgttcattaacacgtccactaccacacccgccccgaggccacctacgccggcaccgactatcgccagtcaacccctctctctgcgccccgaggcttgccggcctgcggctggtggggcggtccacacccggggcctggattttgcgtgcgatatatacatctgggcacctcttgccggcacctgcggagtgctgcttctctcactcgttattacgctgtactgc

SEQ ID NO: 2515 - DNA, 2151 bp, synthetic construct
  misc_feature 1..2151: note = Synthetic
  source 1..2151: mol_type = other DNA
atggccttaccagtgaccgccttgctcctgccgctggccttgctgctccacgccgccaggccgcagctgcagctgcaggagtcgggcccaggactggtgaagccttcggagaccctgtccctcacctgcactgtctctggtggctccatcagcagtagtagttactactggggctggatccgccagcccccagggaaggggctggagtggattgggagtatctattatagtgggagcacctactacaacccgtccctcaagagtcgagtcaccatatccgtagacacgtccaagaaccagttctccctgaagctgagctctgtgaccgccgcagacacggctgtgtattactgcacaactggaacgacggcttactactactactactacatggacgtctggggcaaagggaccacggtcaccgtctcctcaggtggaggcggttcaggcggaggtggctctggcggtggcggatcggaaattgtgttgacgcagtctccaggcaccctgtctttgtctccaggggaaagagccaccctctcctgcagggccagtcagagtgttagcagcagctacttagcctggtaccagcagaaacctggccaggctcccaggctcctcatctatggtgcatccagcagggccactggcatcccagacaggttcagtggcagtgggtctgggacagacttcactctcaccatcagcagactggagcctgaagattttgcagtgtattactgtcagcagtatggtagctcgtggacgttcggccaagggaccaaggtggaaatcaaagcggccgcaaccacgacgccagcgccgcggccaccaacaccggcgcccaccatcgcgtcgcagcccctgtccctgcgcccagaggcgtgccggccagcggcggggggcgcagtgcacacgagggggctggacttcgcctgtgatatctacatctgggcgcccttggccgggacttgtggggtccttctcctgtcactggttatcaccctttactgcaaacggggcagaaagaaactcctgtatatattcaaacaaccatttatgagaccagtacaaactactcaagaggaagatggctgtagctgccgatttccagaagaagaagaaggaggatgtgaactgagagtgaagttcagcaggagcgcagacgcccccgcgtaccagcagggccagaaccagctctataacgagctcaatctaggacgaagagaggagtacgatgttttggacaagagacgtggccgggaccctgagatggggggaaagccgagaaggaagaaccctcaggaaggcctgtacaatgaactgcagaaagataagatggcggaggcctacagtgagattgggatgaaaggcgagcgccggaggggcaaggggcacgatggcctttaccagggtctcagtacagccaccaaggacacctacgacgcccttcacatgcaggccctgccccctcgcggctctggcgagggaaggggttccctgcttacttgcggcgacgtcgaagagaatcccggtccgatggccctcccagtaactgccctccttttgcccctcgcactccttcttcatgccgctcgccccaactgggtcaacgtgattagcgatttgaagaaaatcgaggaccttatacagtctatgcatattgacgctacactgtatactgagagtgatgtacacccgtcctgtaaggtaacggccatgaaatgctttcttctggagctccaggtcatcagcttggagtctggggacgcaagcatccacgatacggttgaaaacctcatcatccttgcgaacaactctctctcatctaatggaaacgttacagagagtgggtgtaaggagtgcgaagagttggaagaaaaaaacatcaaagaatttcttcaatccttcgttcacatagtgcaaatgttcattaacacgtccactaccacacccgccccgaggccacctacgccggcaccgactatcgccagtcaacccctctctctgcgccccgaggcttgccggcctgcggctggtggggcggtccacacccggggcctggattttgcgtgcgatatatacatctgggcacctcttgccggcacctgcggagtgctgcttctctcactcgttattacgctgtactgc

SEQ ID NO: 2516 - DNA, 2148 bp, synthetic construct
  misc_feature 1..2148: note = Synthetic
  source 1..2148: mol_type = other DNA
atggccttaccagtgaccgccttgctcctgccgctggccttgctgctccacgccgccaggccggaggtgcagctgttggagtctgggggaggcttggtgcagcctggggggtccctgagactctcctgtgcagcctctggattcacctttagcagctatgccatgacctgggtccgccaggctccagggaaggggctggagtgggtctcagctattagtggtagtggtggtagcacatactacgcagactccgtgaagggccggttcaccatctccagagacaattccaagaacacgctgtatctgcaaatgaacagcctgagagccgaggacacggccgtatattactgtgcgagaggcgggtataactggcactactactactacatggacgtctggggcaaagggaccacggtcaccgtctcctcaggtggaggcggttcaggcggaggtggctctggcggtggcggatcggaaattgtgttgacgcagtctccaggcaccctgtctttgtctccaggggaaagagccaccctctcctgcagggccagtcagagtgttagcagcagctacttagcctggtaccagcagaaacctggccaggctcccaggctcctcatctatggtgcatccagcagggccactggcatcccagacaggttcagtggcagtgggtctgggacagacttcactctcaccatcagcagactggagcctgaagattttgcagtgtattactgtcagcagtatggtagctcgtggacgttcggccaagggaccaaggtggaaatcaaagcggccgcaaccacgacgccagcgccgcggccaccaacaccggcgcccaccatcgcgtcgcagcccctgtccctgcgcccagaggcgtgccggccagcggcggggggcgcagtgcacacgagggggctggacttcgcctgtgatatctacatctgggcgcccttggccgggacttgtggggtccttctcctgtcactggttatcaccctttactgcaaacggggcagaaagaaactcctgtatatattcaaacaaccatttatgagaccagtacaaactactcaagaggaagatggctgtagctgccgatttccagaagaagaagaaggaggatgtgaactgagagtgaagttcagcaggagcgcagacgcccccgcgtaccagcagggccagaaccagctctataacgagctcaatctaggacgaagagaggagtacgatgttttggacaagagacgtggccgggaccctgagatggggggaaagccgagaaggaagaaccctcaggaaggcctgtacaatgaactgcagaaagataagatggcggaggcctacagtgagattgggatgaaaggcgagcgccggaggggcaaggggcacgatggcctttaccagggtctcagtacagccaccaaggacacctacgacgcccttcacatgcaggccctgccccctcgcggctctggcgagggaaggggttccctgcttacttgcggcgacgtcgaagagaatcccggtccgatggccctcccagtaactgccctccttttgcccctcgcactccttcttcatgccgctcgccccaactgggtcaacgtgattagcgatttgaagaaaatcgaggaccttatacagtctatgcatattgacgctacactgtatactgagagtgatgtacacccgtcctgtaaggtaacggccatgaaatgctttcttctggagctccaggtcatcagcttggagtctggggacgcaagcatccacgatacggttgaaaacctcatcatccttgcgaacaactctctctcatctaatggaaacgttacagagagtgggtgtaaggagtgcgaagagttggaagaaaaaaacatcaaagaatttcttcaatccttcgttcacatagtgcaaatgttcattaacacgtccactaccacacccgccccgaggccacctacgccggcaccgactatcgccagtcaacccctctctctgcgccccgaggcttgccggcctgcggctggtggggcggtccacacccggggcctggattttgcgtgcgatatatacatctgggcacctcttgccggcacctgcggagtgctgcttctctcactcgttattacgctgtactgc

SEQ ID NO: 2517 - DNA, 2160 bp, synthetic construct
  misc_feature 1..2160: note = Synthetic
  source 1..2160: mol_type = other DNA
atggccttaccagtgaccgccttgctcctgccgctggccttgctgctccacgccgccaggccgcaggtgcagctggtggagtctgggggaggcgtggtccagcctgggaggtccctgagactctcctgtgcagcgtctggattcaccttcagtagctatgacatgcactgggtccgccaggctccaggcaaggggctggagtgggtgtcagttatatggtatgatggaagtaataaaaagtatggagactccgcgaagggccgattcaccatctccagagacaattccaagaacacgctggatctgcaaatgaacagcctgagagccgaggacacggctgtgtattactgtgcgagaggcgacaactggaacgacgaaggtggctactactactactacatggacgtctggggcaaagggaccacggtcaccgtctcctcaggtggaggcggttcaggcggaggtggctctggcggtggcggatcggaaattgtgctgactcagtctccagactttcagtctgtgactccaaaggagaaagtcaccatcacctgccgggccagtcagaacattggtagtagcttacactggtaccagcagaaaccagatcagtctccaaagctcctcatcaagtttgcttcccagtccatctcaggggtcccctcgaggttcagtggcagtggatctgggacagatttcaccctcaccatcaatagcctggaagctgaagatgctgcagcgtattactgtcatcagagtagtagtttaccgtggacgttcggccaagggaccaaggtggaaatcaaagcggccgcaaccacgacgccagcgccgcggccaccaacaccggcgcccaccatcgcgtcgcagcccctgtccctgcgcccagaggcgtgccggccagcggcggggggcgcagtgcacacgagggggctggacttcgcctgtgatatctacatctgggcgcccttggccgggacttgtggggtccttctcctgtcactggttatcaccctttactgcaaacggggcagaaagaaactcctgtatatattcaaacaaccatttatgagaccagtacaaactactcaagaggaagatggctgtagctgccgatttccagaagaagaagaaggaggatgtgaactgagagtgaagttcagcaggagcgcagacgcccccgcgtaccagcagggccagaaccagctctataacgagctcaatctaggacgaagagaggagtacgatgttttggacaagagacgtggccgggaccctgagatggggggaaagccgagaaggaagaaccctcaggaaggcctgtacaatgaactgcagaaagataagatggcggaggcctacagtgagattgggatgaaaggcgagcgccggaggggcaaggggcacgatggcctttaccagggtctcagtacagccaccaaggacacctacgacgcccttcacatgcaggccctgccccctcgcggctctggcgagggaaggggttccctgcttacttgcggcgacgtcgaagagaatcccggtccgatggccctcccagtaactgccctccttttgcccctcgcactccttcttcatgccgctcgccccaactgggtcaacgtgattagcgatttgaagaaaatcgaggaccttatacagtctatgcatattgacgctacactgtatactgagagtgatgtacacccgtcctgtaaggtaacggccatgaaatgctttcttctggagctccaggtcatcagcttggagtctggggacgcaagcatccacgatacggttgaaaacctcatcatccttgcgaacaactctctctcatctaatggaaacgttacagagagtgggtgtaaggagtgcgaagagttggaagaaaaaaacatcaaagaatttcttcaatccttcgttcacatagtgcaaatgttcattaacacgtccactaccacacccgccccgaggccacctacgccggcaccgactatcgccagtcaacccctctctctgcgccccgaggcttgccggcctgcggctggtggggcggtccacacccggggcctggattttgcgtgcgatatatacatctgggcacctcttgccggcacctgcggagtgctgcttctctcactcgttattacgctgtactgc

SEQ ID NO: 2518 - DNA, 2160 bp, synthetic construct
  misc_feature 1..2160: note = Synthetic
  source 1..2160: mol_type = other DNA
atggccttaccagtgaccgccttgctcctgccgctggccttgctgctccacgccgccaggccgcaggtgcagctggtggagtctgggggaggcgtggtccagcctgggaggtccctgagactctcctgtgcagcgtctggattcaccttcagtagctatgacatgcactgggtccgccaggctccaggcaaggggctggagtgggtgtcagttatatggtatgatggaagtaataaaaagtatggagactccgcgaagggccgattcaccatctccagagacaattccaagaacacgctggatctgcaaatgaacagcctgagagccgaggacacggctgtgtattactgtgcgagaggcgacaactggaacgacgaaggtggctactactactactacatggacgtctggggcaaagggaccacggtcaccgtctcctcaggtggaggcggttcaggcggaggtggctctggcggtggcggatcggacatccagatgacccagtctccatcctcactgtctacatctgtaggagacagagtcaccatcacttgtcgggcgagtcagggcattagcaattatttagcctggtttcagcagaaaccagggaaagcccctaagtccctgatctatgctgcatccagtttgcaaagtggggtcccatcaaagttcagcggcagtggatctgggacagatttctctctcaccattagcagcctgcagcctgaagattttgcaacttattactgccaacagtataatagttacccgatcaccttcggccaagggacacgactggagattaaagcggccgcaaccacgacgccagcgccgcggccaccaacaccggcgcccaccatcgcgtcgcagcccctgtccctgcgcccagaggcgtgccggccagcggcggggggcgcagtgcacacgagggggctggacttcgcctgtgatatctacatctgggcgcccttggccgggacttgtggggtccttctcctgtcactggttatcaccctttactgcaaacggggcagaaagaaactcctgtatatattcaaacaaccatttatgagaccagtacaaactactcaagaggaagatggctgtagctgccgatttccagaagaagaagaaggaggatgtgaactgagagtgaagttcagcaggagcgcagacgcccccgcgtaccagcagggccagaaccagctctataacgagctcaatctaggacgaagagaggagtacgatgttttggacaagagacgtggccgggaccctgagatggggggaaagccgagaaggaagaaccctcaggaaggcctgtacaatgaactgcagaaagataagatggcggaggcctacagtgagattgggatgaaaggcgagcgccggaggggcaaggggcacgatggcctttaccagggtctcagtacagccaccaaggacacctacgacgcccttcacatgcaggccctgccccctcgcggctctggcgagggaaggggttccctgcttacttgcggcgacgtcgaagagaatcccggtccgatggccctcccagtaactgccctccttttgcccctcgcactccttcttcatgccgctcgccccaactgggtcaacgtgattagcgatttgaagaaaatcgaggaccttatacagtctatgcatattgacgctacactgtatactgagagtgatgtacacccgtcctgtaaggtaacggccatgaaatgctttcttctggagctccaggtcatcagcttggagtctggggacgcaagcatccacgatacggttgaaaacctcatcatccttgcgaacaactctctctcatctaatggaaacgttacagagagtgggtgtaaggagtgcgaagagttggaagaaaaaaacatcaaagaatttcttcaatccttcgttcacatagtgcaaatgttcattaacacgtccactaccacacccgccccgaggccacctacgccggcaccgactatcgccagtcaacccctctctctgcgccccgaggcttgccggcctgcggctggtggggcggtccacacccggggcctggattttgcgtgcgatatatacatctgggcacctcttgccggcacctgcggagtgctgcttctctcactcgttattacgctgtactgc

SEQ ID NO: 2519 - DNA, 2151 bp, synthetic construct
  misc_feature 1..2151: note = Synthetic
  source 1..2151: mol_type = other DNA
atggccttaccagtgaccgccttgctcctgccgctggccttgctgctccacgccgccaggccgcaggttcagctggtacagtctggagctgaggtgaagaagtctggggcctcagtgaaggtctcctgcaaggcttctggttacaccttaaccagctatggcatcagctgggtgcgacaggcccctggacaagggcttgagtggatgggatggatcagcgcttacaatggtaacataaactatgcacagaagttccagggcagagtcaccatgaccacagacacatccacgagcacagcctacatggagctgaggagcctgagatctgacgacacggccgtgtattactgtgtgagagatggggaccggtacaactggaaccacagctacatggacgtctggggcaaagggaccacggtcaccgtctcctcaggtggaggcggttcaggcggaggtggctctggcggtggcggatcggaaattgtgctgactcagtctccagactttcagtctgtgactccaaaggagaaagtcaccatcacctgccgggccagtcagaacattggtagtagcttacactggtaccagcagaaaccagatcagtctccaaagctcctcatcaagtttgcttcccagtccatctcaggggtcccctcgaggttcagtggcagtggatctgggacagatttcaccctcaccatcaatagcctggaagctgaagatgctgcagcgtattactgtcatcagagtagtagtttaccgtggacgttcggccaagggaccaaggtggaaatcaaagcggccgcaaccacgacgccagcgccgcggccaccaacaccggcgcccaccatcgcgtcgcagcccctgtccctgcgcccagaggcgtgccggccagcggcggggggcgcagtgcacacgagggggctggacttcgcctgtgatatctacatctgggcgcccttggccgggacttgtggggtccttctcctgtcactggttatcaccctttactgcaaacggggcagaaagaaactcctgtatatattcaaacaaccatttatgagaccagtacaaactactcaagaggaagatggctgtagctgccgatttccagaagaagaagaaggaggatgtgaactgagagtgaagttcagcaggagcgcagacgcccccgcgtaccagcagggccagaaccagctctataacgagctcaatctaggacgaagagaggagtacgatgttttggacaagagacgtggccgggaccctgagatggggggaaagccgagaaggaagaaccctcaggaaggcctgtacaatgaactgcagaaagataagatggcggaggcctacagtgagattgggatgaaaggcgagcgccggaggggcaaggggcacgatggcctttaccagggtctcagtacagccaccaaggacacctacgacgcccttcacatgcaggccctgccccctcgcggctctggcgagggaaggggttccctgcttacttgcggcgacgtcgaagagaatcccggtccgatggccctcccagtaactgccctccttttgcccctcgcactccttcttcatgccgctcgccccaactgggtcaacgtgattagcgatttgaagaaaatcgaggaccttatacagtctatgcatattgacgctacactgtatactgagagtgatgtacacccgtcctgtaaggtaacggccatgaaatgctttcttctggagctccaggtcatcagcttggagtctggggacgcaagcatccacgatacggttgaaaacctcatcatccttgcgaacaactctctctcatctaatggaaacgttacagagagtgggtgtaaggagtgcgaagagttggaagaaaaaaacatcaaagaatttcttcaatccttcgttcacatagtgcaaatgttcattaacacgtccactaccacacccgccccgaggccacctacgccggcaccgactatcgccagtcaacccctctctctgcgccccgaggcttgccggcctgcggctggtggggcggtccacacccggggcctggattttgcgtgcgatatatacatctgggcacctcttgccggcacctgcggagtgctgcttctctcactcgttattacgctgtactgc

SEQ ID NO: 2520 - DNA, 2151 bp, synthetic construct
  misc_feature 1..2151: note = Synthetic
  source 1..2151: mol_type = other DNA
atggccttaccagtgaccgccttgctcctgccgctggccttgctgctccacgccgccaggccgcaggttcagctggtacagtctggagctgaggtgaagaagtctggggcctcagtgaaggtctcctgcaaggcttctggttacaccttaaccagctatggcatcagctgggtgcgacaggcccctggacaagggcttgagtggatgggatggatcagcgcttacaatggtaacataaactatgcacagaagttccagggcagagtcaccatgaccacagacacatccacgagcacagcctacatggagctgaggagcctgagatctgacgacacggccgtgtattactgtgtgagagatggggaccggtacaactggaaccacagctacatggacgtctggggcaaagggaccacggtcaccgtctcctcaggtggaggcggttcaggcggaggtggctctggcggtggcggatcggacatccagatgacccagtctccatcctcactgtctacatctgtaggagacagagtcaccatcacttgtcgggcgagtcagggcattagcaattatttagcctggtttcagcagaaaccagggaaagcccctaagtccctgatctatgctgcatccagtttgcaaagtggggtcccatcaaagttcagcggcagtggatctgggacagatttctctctcaccattagcagcctgcagcctgaagattttgcaacttattactgccaacagtataatagttacccgatcaccttcggccaagggacacgactggagattaaagcggccgcaaccacgacgccagcgccgcggccaccaacaccggcgcccaccatcgcgtcgcagcccctgtccctgcgcccagaggcgtgccggccagcggcggggggcgcagtgcacacgagggggctggacttcgcctgtgatatctacatctgggcgcccttggccgggacttgtggggtccttctcctgtcactggttatcaccctttactgcaaacggggcagaaagaaactcctgtatatattcaaacaaccatttatgagaccagtacaaactactcaagaggaagatggctgtagctgccgatttccagaagaagaagaaggaggatgtgaactgagagtgaagttcagcaggagcgcagacgcccccgcgtaccagcagggccagaaccagctctataacgagctcaatctaggacgaagagaggagtacgatgttttggacaagagacgtggccgggaccctgagatggggggaaagccgagaaggaagaaccctcaggaaggcctgtacaatgaactgcagaaagataagatggcggaggcctacagtgagattgggatgaaaggcgagcgccggaggggcaaggggcacgatggcctttaccagggtctcagtacagccaccaaggacacctacgacgcccttcacatgcaggccctgccccctcgcggctctggcgagggaaggggttccctgcttacttgcggcgacgtcgaagagaatcccggtccgatggccctcccagtaactgccctccttttgcccctcgcactccttcttcatgccgctcgccccaactgggtcaacgtgattagcgatttgaagaaaatcgaggaccttatacagtctatgcatattgacgctacactgtatactgagagtgatgtacacccgtcctgtaaggtaacggccatgaaatgctttcttctggagctccaggtcatcagcttggagtctggggacgcaagcatccacgatacggttgaaaacctcatcatccttgcgaacaactctctctcatctaatggaaacgttacagagagtgggtgtaaggagtgcgaagagttggaagaaaaaaacatcaaagaatttcttcaatccttcgttcacatagtgcaaatgttcattaacacgtccactaccacacccgccccgaggccacctacgccggcaccgactatcgccagtcaacccctctctctgcgccccgaggcttgccggcctgcggctggtggggcggtccacacccggggcctggattttgcgtgcgatatatacatctgggcacctcttgccggcacctgcggagtgctgcttctctcactcgttattacgctgtactgc

SEQ ID NO: 2521 - DNA, 2148 bp, synthetic construct
  misc_feature 1..2148: note = Synthetic
  source 1..2148: mol_type = other DNA
atggccttaccagtgaccgccttgctcctgccgctggccttgctgctccacgccgccaggccggaggtgcagctgttggagtctgggggagacttggtacagcctggggggtccctgcgactctcctgtgcagcctctggattcacctttagcacctatgccatgacctgggtccgccaggctccagggaaggggctggagtgggtctcagctattagtggtactagtggtagcacatactacgcagactccgtgaagggccggttcaccatctccagagacaattccaagagcacgctgtatctgcacatgaacagcctgagaaccgaggacacggccgtatattactgtgcgagaggcggatataactggcactactactactacatggacgtctggggcaaagggaccacggtcaccgtctcctcaggtggaggcggttcaggcggaggtggctctggcggtggcggatcggaaattgtgctgactcagtctccagactttcagtctgtgactccaaaggagaaagtcaccatcacctgccgggccagtcagagcattggaagtagcttacactggtaccagcagaaaccagatcagtctccaaagctcctcatcaagtatgtttcccagtccatctcaggggtcccctcgaggttcagtggcagtggatctgggacagatttcaccctcaccatcaatagcctggaagctgaagatgctgcagcgtattactgtcatcagagtagtagtttaccgtggacgttcggccaagggaccaaggtggaaatcaaagcggccgcaaccacgacgccagcgccgcggccaccaacaccggcgcccaccatcgcgtcgcagcccctgtccctgcgcccagaggcgtgccggccagcggcggggggcgcagtgcacacgagggggctggacttcgcctgtgatatctacatctgggcgcccttggccgggacttgtggggtccttctcctgtcactggttatcaccctttactgcaaacggggcagaaagaaactcctgtatatattcaaacaaccatttatgagaccagtacaaactactcaagaggaagatggctgtagctgccgatttccagaagaagaagaaggaggatgtgaactgagagtgaagttcagcaggagcgcagacgcccccgcgtaccagcagggccagaaccagctctataacgagctcaatctaggacgaagagaggagtacgatgttttggacaagagacgtggccgggaccctgagatggggggaaagccgagaaggaagaaccctcaggaaggcctgtacaatgaactgcagaaagataagatggcggaggcctacagtgagattgggatgaaaggcgagcgccggaggggcaaggggcacgatggcctttaccagggtctcagtacagccaccaaggacacctacgacgcccttcacatgcaggccctgccccctcgcggctctggcgagggaaggggttccctgcttacttgcggcgacgtcgaagagaatcccggtccgatggccctcccagtaactgccctccttttgcccctcgcactccttcttcatgccgctcgccccaactgggtcaacgtgattagcgatttgaagaaaatcgaggaccttatacagtctatgcatattgacgctacactgtatactgagagtgatgtacacccgtcctgtaaggtaacggccatgaaatgctttcttctggagctccaggtcatcagcttggagtctggggacgcaagcatccacgatacggttgaaaacctcatcatccttgcgaacaactctctctcatctaatggaaacgttacagagagtgggtgtaaggagtgcgaagagttggaagaaaaaaacatcaaagaatttcttcaatccttcgttcacatagtgcaaatgttcattaacacgtccactaccacacccgccccgaggccacctacgccggcaccgactatcgccagtcaacccctctctctgcgccccgaggcttgccggcctgcggctggtggggcggtccacacccggggcctggattttgcgtgcgatatatacatctgggcacctcttgccggcacctgcggagtgctgcttctctcactcgttattacgctgtactgc

SEQ ID NO: 2522 - DNA, 2151 bp, synthetic construct
  misc_feature 1..2151: note = Synthetic
  source 1..2151: mol_type = other DNA
atggccttaccagtgaccgccttgctcctgccgctggccttgctgctccacgccgccaggccggaggtgcagctgttggagtctgggggagacttggtacagcctggggggtccctgcgactctcctgtgcagcctctggattcacctttagcacctatgccatgacctgggtccgccaggctccagggaaggggctggagtgggtctcagctattagtggtactagtggtagcacatactacgcagactccgtgaagggccggttcaccatctccagagacaattccaagagcacgctgtatctgcacatgaacagcctgagaaccgaggacacggccgtatattactgtgcgagaggcggatataactggcactactactactacatggacgtctggggcaaagggaccacggtcaccgtctcctcaggtggaggcggttcaggcggaggtggctctggcggtggcggatcggaaattgtaatgacacagtctccagccaccctgtctttgtctccaggggaaagagccaccctctcctgcagggccagtcagagtgttagcagcagctacttatcctggtaccagcagaaacctgggctggctcccaggctcctcatctatggtgcatccaccagggccactggcatcccagccaggttcagtggcagtgggtctgggacagacttcactctcaccatcagcagcctgcagcctgaagattttgcagtttattactgtcagcaggattataacttacctccgacgttcggccaagggaccaaggtggaaatcaaagcggccgcaaccacgacgccagcgccgcggccaccaacaccggcgcccaccatcgcgtcgcagcccctgtccctgcgcccagaggcgtgccggccagcggcggggggcgcagtgcacacgagggggctggacttcgcctgtgatatctacatctgggcgcccttggccgggacttgtggggtccttctcctgtcactggttatcaccctttactgcaaacggggcagaaagaaactcctgtatatattcaaacaaccatttatgagaccagtacaaactactcaagaggaagatggctgtagctgccgatttccagaagaagaagaaggaggatgtgaactgagagtgaagttcagcaggagcgcagacgcccccgcgtaccagcagggccagaaccagctctataacgagctcaatctaggacgaagagaggagtacgatgttttggacaagagacgtggccgggaccctgagatggggggaaagccgagaaggaagaaccctcaggaaggcctgtacaatgaactgcagaaagataagatggcggaggcctacagtgagattgggatgaaaggcgagcgccggaggggcaaggggcacgatggcctttaccagggtctcagtacagccaccaaggacacctacgacgcccttcacatgcaggccctgccccctcgcggctctggcgagggaaggggttccctgcttacttgcggcgacgtcgaagagaatcccggtccgatggccctcccagtaactgccctccttttgcccctcgcactccttcttcatgccgctcgccccaactgggtcaacgtgattagcgatttgaagaaaatcgaggaccttatacagtctatgcatattgacgctacactgtatactgagagtgatgtacacccgtcctgtaaggtaacggccatgaaatgctttcttctggagctccaggtcatcagcttggagtctggggacgcaagcatccacgatacggttgaaaacctcatcatccttgcgaacaactctctctcatctaatggaaacgttacagagagtgggtgtaaggagtgcgaagagttggaagaaaaaaacatcaaagaatttcttcaatccttcgttcacatagtgcaaatgttcattaacacgtccactaccacacccgccccgaggccacctacgccggcaccgactatcgccagtcaacccctctctctgcgccccgaggcttgccggcctgcggctggtggggcggtccacacccggggcctggattttgcgtgcgatatatacatctgggcacctcttgccggcacctgcggagtgctgcttctctcactcgttattacgctgtactgc

SEQ ID NO: 2523 - DNA, 2157 bp, synthetic construct
  misc_feature 1..2157: note = Synthetic
  source 1..2157: mol_type = other DNA
atggccttaccagtgaccgccttgctcctgccgctggccttgctgctccacgccgccaggccgcaagtgcagctggtggagagcggcggaggagtggtgcaacctggccggagcctgagactgagctgcgctgccagcggcttcaccttcaacaactacgacatgtactgggtgcggcaggcccctggcaagggcctggaatgggtcgccgtgacatggtatgacggctccaacaagtactacgccgacagcgtgaagggcagattcaccatcagcagagataatagcaagaacaccctgtacctgcagatgaacagcctgcgggccgaggacaccgccgtgtactactgcgctagaggcgacaattggaacgacgagcaccattacttctactacatggacgtgtggggcaaaggcaccaccgtgaccgtgtccagcggcggcggtggatctggaggcggaggctctggaggcggcggctccgagatcgtgctgacacagtctccagatttccagtctgtgacccctaaggaaaaggttacaattacatgcagagcctctcagagcatcggaagctctctgcactggtatcagcagaaacctgatcagagccccaagctgctgatcaaattcgccagccagtccttcagcggcgtccccagccgcttcagcggcagcggcagcggcactgattttacactgaccatccacagcctggaggccgaggacgccgccacctactattgtcaccagagcagctccctgccttggacctttggccagggcacaaaggtggaaatcaaggcggccgcaaccacgacgccagcgccgcggccaccaacaccggcgcccaccatcgcgtcgcagcccctgtccctgcgcccagaggcgtgccggccagcggcggggggcgcagtgcacacgagggggctggacttcgcctgtgatatctacatctgggcgcccttggccgggacttgtggggtccttctcctgtcactggttatcaccctttactgcaaacggggcagaaagaaactcctgtatatattcaaacaaccatttatgagaccagtacaaactactcaagaggaagatggctgtagctgccgatttccagaagaagaagaaggaggatgtgaactgagagtgaagttcagcaggagcgcagacgcccccgcgtaccagcagggccagaaccagctctataacgagctcaatctaggacgaagagaggagtacgatgttttggacaagagacgtggccgggaccctgagatggggggaaagccgagaaggaagaaccctcaggaaggcctgtacaatgaactgcagaaagataagatggcggaggcctacagtgagattgggatgaaaggcgagcgccggaggggcaaggggcacgatggcctttaccagggtctcagtacagccaccaaggacacctacgacgcccttcacatgcaggccctgccccctcgcggctctggcgagggaaggggttccctgcttacttgcggcgacgtcgaagagaatcccggtccgatggccctcccagtaactgccctccttttgcccctcgcactccttcttcatgccgctcgccccaactgggtcaacgtgattagcgatttgaagaaaatcgaggaccttatacagtctatgcatattgacgctacactgtatactgagagtgatgtacacccgtcctgtaaggtaacggccatgaaatgctttcttctggagctccaggtcatcagcttggagtctggggacgcaagcatccacgatacggttgaaaacctcatcatccttgcgaacaactctctctcatctaatggaaacgttacagagagtgggtgtaaggagtgcgaagagttggaagaaaaaaacatcaaagaatttcttcaatccttcgttcacatagtgcaaatgttcattaacacgtccactaccacacccgccccgaggccacctacgccggcaccgactatcgccagtcaacccctctctctgcgccccgaggcttgccggcctgcggctggtggggcggtccacacccggggcctggattttgcgtgcgatatatacatctgggcacctcttgccggcacctgcggagtgctgcttctctcactcgttattacgctgtactgc

SEQ ID NO: 2524 - DNA, 2157 bp, synthetic construct
  misc_feature 1..2157: note = Synthetic
  source 1..2157: mol_type = other DNA
atggccttaccagtgaccgccttgctcctgccgctggccttgctgctccacgccgccaggccgcaagtgcagctggtggagtctggcggcggagtggtgcaacctggaaggagcctgcggctgagctgcgctgccagcggcttcaccttcagcaattacgacatgcactgggtgcggcaggcccctggcaaaggcctggaatgggtcacaatcatctggcatgatgccagcaacaagtactacctggacagcgtcaagggcagattcacaatcagccgggacaacagcaagaacaccctgtacctgcagatgaacagcctgagagccgaggacaccgctgtgtactattgtgccagaggagataattggaacgacgagcaccactacttctactacatggacgtgtggggcaagggcaccaccgtgaccgtttctagcggcggaggcggctccggcggtggaggctccggaggcggcggctctgagatcgtgctgacacagagccctgattttcagagcgtgacacctaaagagaaggtgaccatcacctgcagagccagccagagcatcggctccagcctgcactggtatcagcagaagcccgaccagagcccaaagctgctgatcaagttcgcctcccagtctttttccggcgtgcccagcagattcagcgggagcggctctggcaccgacttcacactgaccatccactctctggaagccgaggatgccgccacctactattgccaccagagcagctctctcccttggaccttcggccagggcacaaaagtggaaattaaggcggccgcaaccacgacgccagcgccgcggccaccaacaccggcgcccaccatcgcgtcgcagcccctgtccctgcgcccagaggcgtgccggccagcggcggggggcgcagtgcacacgagggggctggacttcgcctgtgatatctacatctgggcgcccttggccgggacttgtggggtccttctcctgtcactggttatcaccctttactgcaaacggggcagaaagaaactcctgtatatattcaaacaaccatttatgagaccagtacaaactactcaagaggaagatggctgtagctgccgatttccagaagaagaagaaggaggatgtgaactgagagtgaagttcagcaggagcgcagacgcccccgcgtaccagcagggccagaaccagctctataacgagctcaatctaggacgaagagaggagtacgatgttttggacaagagacgtggccgggaccctgagatggggggaaagccgagaaggaagaaccctcaggaaggcctgtacaatgaactgcagaaagataagatggcggaggcctacagtgagattgggatgaaaggcgagcgccggaggggcaaggggcacgatggcctttaccagggtctcagtacagccaccaaggacacctacgacgcccttcacatgcaggccctgccccctcgcggctctggcgagggaaggggttccctgcttacttgcggcgacgtcgaagagaatcccggtccgatggccctcccagtaactgccctccttttgcccctcgcactccttcttcatgccgctcgccccaactgggtcaacgtgattagcgatttgaagaaaatcgaggaccttatacagtctatgcatattgacgctacactgtatactgagagtgatgtacacccgtcctgtaaggtaacggccatgaaatgctttcttctggagctccaggtcatcagcttggagtctggggacgcaagcatccacgatacggttgaaaacctcatcatccttgcgaacaactctctctcatctaatggaaacgttacagagagtgggtgtaaggagtgcgaagagttggaagaaaaaaacatcaaagaatttcttcaatccttcgttcacatagtgcaaatgttcattaacacgtccactaccacacccgccccgaggccacctacgccggcaccgactatcgccagtcaacccctctctctgcgccccgaggcttgccggcctgcggctggtggggcggtccacacccggggcctggattttgcgtgcgatatatacatctgggcacctcttgccggcacctgcggagtgctgcttctctcactcgttattacgctgtactgc

SEQ ID NO: 2525 - DNA, 2157 bp, synthetic construct
  misc_feature 1..2157: note = Synthetic
  source 1..2157: mol_type = other DNA
atggccttaccagtgaccgccttgctcctgccgctggccttgctgctccacgccgccaggccgcaagtgcagctggtcgaaagcggcggaggcgtggtgcaacctggaagaagcctgagactgagctgcgccgcctctggcttcaccttttctaattacgacatgcactgggtgcggcaggcccctggcaagggtcttgagtgggttaccatcatctggcacgacggcagcaacaagtactacctggacagcgtgaagggcagatttacaatcagcagagataatagcaagaacaccctgtacctgcagatgaacagcctgcgggccgaggacaccgccgtgtactattgtgccagaggcgacaactggaacgacgagcaccactacttctactacatggacgtgtggggcaaaggcaccacagtgaccgtgtccagcggcggcggcggcagcggcggaggaggctctggcggaggcggcagcgagatcgtgctgacccagagccctgacttccagagcgtgacccctaaggaaaaggtgacaattacatgcagggccagccagtccatcggctcttctctgcattggtatcagcagaagcccgatcagtctccaaagctgctgatcaaattcgccagccagagcttcagcggagtccccagccggttcagcggatctggctccggcactgatttcaccctgaccatccacagcctggaggccgaagatgccgctacatactattgccaccagtcctccagcctgccttggacattcggccagggcaccaaggtggagatcaaagcggccgcaaccacgacgccagcgccgcggccaccaacaccggcgcccaccatcgcgtcgcagcccctgtccctgcgcccagaggcgtgccggccagcggcggggggcgcagtgcacacgagggggctggacttcgcctgtgatatctacatctgggcgcccttggccgggacttgtggggtccttctcctgtcactggttatcaccctttactgcaaacggggcagaaagaaactcctgtatatattcaaacaaccatttatgagaccagtacaaactactcaagaggaagatggctgtagctgccgatttccagaagaagaagaaggaggatgtgaactgagagtgaagttcagcaggagcgcagacgcccccgcgtaccagcagggccagaaccagctctataacgagctcaatctaggacgaagagaggagtacgatgttttggacaagagacgtggccgggaccctgagatggggggaaagccgagaaggaagaaccctcaggaaggcctgtacaatgaactgcagaaagataagatggcggaggcctacagtgagattgggatgaaaggcgagcgccggaggggcaaggggcacgatggcctttaccagggtctcagtacagccaccaaggacacctacgacgcccttcacatgcaggccctgccccctcgcggctctggcgagggaaggggttccctgcttacttgcggcgacgtcgaagagaatcccggtccgatggccctcccagtaactgccctccttttgcccctcgcactccttcttcatgccgctcgccccaactgggtcaacgtgattagcgatttgaagaaaatcgaggaccttatacagtctatgcatattgacgctacactgtatactgagagtgatgtacacccgtcctgtaaggtaacggccatgaaatgctttcttctggagctccaggtcatcagcttggagtctggggacgcaagcatccacgatacggttgaaaacctcatcatccttgcgaacaactctctctcatctaatggaaacgttacagagagtgggtgtaaggagtgcgaagagttggaagaaaaaaacatcaaagaatttcttcaatccttcgttcacatagtgcaaatgttcattaacacgtccactaccacacccgccccgaggccacctacgccggcaccgactatcgccagtcaacccctctctctgcgccccgaggcttgccggcctgcggctggtggggcggtccacacccggggcctggattttgcgtgcgatatatacatctgggcacctcttgccggcacctgcggagtgctgcttctctcactcgttattacgctgtactgc

SEQ ID NO: 2526 - DNA, 2139 bp, synthetic construct
  misc_feature 1..2139: note = Synthetic
  source 1..2139: mol_type = other DNA
atggccttaccagtgaccgccttgctcctgccgctggccttgctgctccacgccgccaggccggaggtgcagctgctggaaagcggcggcggactcgtgcaacctggcggctccctgcggctgtcttgcgccgcttctggcttcacattcagcatctacgccatgagctgggtcagacaggcccccggcaaaggcctggaatgggtgtccgccatcagcggcggcggagataccacctactacgccgacagcgtgaagggcagattcaccattagcagagataatagcaagaccacactggacctgcaaatgaacagcctgcgggccgaggacaccgccgtgtactactgtgctaagcacacctcttattacatggacgtgtggggaaaaggcacaaccgtgaccgtgtccagcggcggaggcggctctggcggcggcggcagcggcggtggcggaagccagaccgtggtgacacaggagccttctctgagcgtgagccccggcggcaccgtgaccctgacatgcggcctgagcagcggctccgtctccaccagctactatcctagctggtatcagcagacccctggccaggcccctagaaccctgatctacagcacaaacatccggagctctggagtgccagacagatttagcggaagcatcctgggcaacaaggccgccctgaccatcaccggcgcccaggctgacgacgagagtgattactactgcaagctgtacatgggctctggcatcatcttcggcagcggaacaaaggtgacagttctggcggccgcaaccacgacgccagcgccgcggccaccaacaccggcgcccaccatcgcgtcgcagcccctgtccctgcgcccagaggcgtgccggccagcggcggggggcgcagtgcacacgagggggctggacttcgcctgtgatatctacatctgggcgcccttggccgggacttgtggggtccttctcctgtcactggttatcaccctttactgcaaacggggcagaaagaaactcctgtatatattcaaacaaccatttatgagaccagtacaaactactcaagaggaagatggctgtagctgccgatttccagaagaagaagaaggaggatgtgaactgagagtgaagttcagcaggagcgcagacgcccccgcgtaccagcagggccagaaccagctctataacgagctcaatctaggacgaagagaggagtacgatgttttggacaagagacgtggccgggaccctgagatggggggaaagccgagaaggaagaaccctcaggaaggcctgtacaatgaactgcagaaagataagatggcggaggcctacagtgagattgggatgaaaggcgagcgccggaggggcaaggggcacgatggcctttaccagggtctcagtacagccaccaaggacacctacgacgcccttcacatgcaggccctgccccctcgcggctctggcgagggaaggggttccctgcttacttgcggcgacgtcgaagagaatcccggtccgatggccctcccagtaactgccctccttttgcccctcgcactccttcttcatgccgctcgccccaactgggtcaacgtgattagcgatttgaagaaaatcgaggaccttatacagtctatgcatattgacgctacactgtatactgagagtgatgtacacccgtcctgtaaggtaacggccatgaaatgctttcttctggagctccaggtcatcagcttggagtctggggacgcaagcatccacgatacggttgaaaacctcatcatccttgcgaacaactctctctcatctaatggaaacgttacagagagtgggtgtaaggagtgcgaagagttggaagaaaaaaacatcaaagaatttcttcaatccttcgttcacatagtgcaaatgttcattaacacgtccactaccacacccgccccgaggccacctacgccggcaccgactatcgccagtcaacccctctctctgcgccccgaggcttgccggcctgcggctggtggggcggtccacacccggggcctggattttgcgtgcgatatatacatctgggcacctcttgccggcacctgcggagtgctgcttctctcactcgttattacgctgtactgc

SEQ ID NO: 2527 - DNA, 2157 bp, synthetic construct
  misc_feature 1..2157: note = Synthetic
  source 1..2157: mol_type = other DNA
atggccttaccagtgaccgccttgctcctgccgctggccttgctgctccacgccgccaggccgcaagtgcagctggtggaaagcggcggtggagtggtgcaacctggcagaagcctgcggctgagctgcgccgcttctggcttcacattttctaattacgacaagcactgggtgcggcaggcccctggcaaaggcctggagtgggtcgctgtgatctggtatgacggcagcaacaagtactacgccgacagcgtgaagggcagattcaccatcagcagagacaacagcaagaacaccctgtacctgcagatgaacagcctgcgggctgaagataccgccatgtactattgtgccaggggcgataattggaacgacgagcaccactacttctactacatggacgtgtggggaaagggcaccacagtgaccgtgtccagcggcggcggcggcagcggcggcggcggcagcggcggcggcggcagcgagatcgtgctgacacagtcccctgactttcagagcgtgacccctaaggaaaaggtcacaattacatgcagagcctctcagagcatcggcagctctctgcactggtatcagcagaaacctgatcagagccccaagctgctgatcaaattcgccagccagagcttctccggcgtgccaagcagattcagcggcagcggcagcggaaccgatttcaccctgaccatccattctctggaggccgaggacgccgccacctactactgccaccagtctagcagcctgccctggaccttcggccagggcacaaaggttgagatcaaggcggccgcaaccacgacgccagcgccgcggccaccaacaccggcgcccaccatcgcgtcgcagcccctgtccctgcgcccagaggcgtgccggccagcggcggggggcgcagtgcacacgagggggctggacttcgcctgtgatatctacatctgggcgcccttggccgggacttgtggggtccttctcctgtcactggttatcaccctttactgcaaacggggcagaaagaaactcctgtatatattcaaacaaccatttatgagaccagtacaaactactcaagaggaagatggctgtagctgccgatttccagaagaagaagaaggaggatgtgaactgagagtgaagttcagcaggagcgcagacgcccccgcgtaccagcagggccagaaccagctctataacgagctcaatctaggacgaagagaggagtacgatgttttggacaagagacgtggccgggaccctgagatggggggaaagccgagaaggaagaaccctcaggaaggcctgtacaatgaactgcagaaagataagatggcggaggcctacagtgagattgggatgaaaggcgagcgccggaggggcaaggggcacgatggcctttaccagggtctcagtacagccaccaaggacacctacgacgcccttcacatgcaggccctgccccctcgcggctctggcgagggaaggggttccctgcttacttgcggcgacgtcgaagagaatcccggtccgatggccctcccagtaactgccctccttttgcccctcgcactccttcttcatgccgctcgccccaactgggtcaacgtgattagcgatttgaagaaaatcgaggaccttatacagtctatgcatattgacgctacactgtatactgagagtgatgtacacccgtcctgtaaggtaacggccatgaaatgctttcttctggagctccaggtcatcagcttggagtctggggacgcaagcatccacgatacggttgaaaacctcatcatccttgcgaacaactctctctcatctaatggaaacgttacagagagtgggtgtaaggagtgcgaagagttggaagaaaaaaacatcaaagaatttcttcaatccttcgttcacatagtgcaaatgttcattaacacgtccactaccacacccgccccgaggccacctacgccggcaccgactatcgccagtcaacccctctctctgcgccccgaggcttgccggcctgcggctggtggggcggtccacacccggggcctggattttgcgtgcgatatatacatctgggcacctcttgccggcacctgcggagtgctgcttctctcactcgttattacgctgtactgc

SEQ ID NO: 2528 - DNA, 2151 bp, synthetic construct
  misc_feature 1..2151: note = Synthetic
  source 1..2151: mol_type = other DNA
atggccttaccagtgaccgccttgctcctgccgctggccttgctgctccacgccgccaggccgcaagtgcagctggtccagtctggagctgaggtgaagaagcccggcgccagcgtgaaggtgtcctgtaaagcctctggttatacattcacaaactatggcttcagctgggttagacaggcccctggacagggcctggactggatgggatggatcagcgcctacaacggctacaccaactacacccagaagctgcagggcagagtgacaatgaccacagataccagcaccaccacagcttacatggaactgaggtccctgcggagcgacgacaccgccgtgtactactgcgccagacggggcctgctgtactactactacagcatggacgtgtggggcaagggcaccaccgtgaccgtgtcttctggcggcggcggaagcggcggcggaggaagcggcggcggcggcagcgagatcgtgctgacccaatctcctgccacactgagcctctccccaggcgagcgggccaccctgagctgcggcgcttctcagagcgtgtacaatagctacctggcctggtatcagcagaaacccggcctggctcctagactgctgatctacgacgccagcctgagagccaccggcgtgcctgatagattcagcggcagcggcagcggaaccgacttcaccctgacaatcagcacactggaacccgaggattttgccgtgtactattgccagcagtacggcggcagccctatgtacacattcggccagggcaccaagctggaaatcaaggcggccgcaaccacgacgccagcgccgcggccaccaacaccggcgcccaccatcgcgtcgcagcccctgtccctgcgcccagaggcgtgccggccagcggcggggggcgcagtgcacacgagggggctggacttcgcctgtgatatctacatctgggcgcccttggccgggacttgtggggtccttctcctgtcactggttatcaccctttactgcaaacggggcagaaagaaactcctgtatatattcaaacaaccatttatgagaccagtacaaactactcaagaggaagatggctgtagctgccgatttccagaagaagaagaaggaggatgtgaactgagagtgaagttcagcaggagcgcagacgcccccgcgtaccagcagggccagaaccagctctataacgagctcaatctaggacgaagagaggagtacgatgttttggacaagagacgtggccgggaccctgagatggggggaaagccgagaaggaagaaccctcaggaaggcctgtacaatgaactgcagaaagataagatggcggaggcctacagtgagattgggatgaaaggcgagcgccggaggggcaaggggcacgatggcctttaccagggtctcagtacagccaccaaggacacctacgacgcccttcacatgcaggccctgccccctcgcggctctggcgagggaaggggttccctgcttacttgcggcgacgtcgaagagaatcccggtccgatggccctcccagtaactgccctccttttgcccctcgcactccttcttcatgccgctcgccccaactgggtcaacgtgattagcgatttgaagaaaatcgaggaccttatacagtctatgcatattgacgctacactgtatactgagagtgatgtacacccgtcctgtaaggtaacggccatgaaatgctttcttctggagctccaggtcatcagcttggagtctggggacgcaagcatccacgatacggttgaaaacctcatcatccttgcgaacaactctctctcatctaatggaaacgttacagagagtgggtgtaaggagtgcgaagagttggaagaaaaaaacatcaaagaatttcttcaatccttcgttcacatagtgcaaatgttcattaacacgtccactaccacacccgccccgaggccacctacgccggcaccgactatcgccagtcaacccctctctctgcgccccgaggcttgccggcctgcggctggtggggcggtccacacccggggcctggattttgcgtgcgatatatacatctgggcacctcttgccggcacctgcggagtgctgcttctctcactcgttattacgctgtactgc

SEQ ID NO: 2529 - DNA, 2139 bp, synthetic construct
  misc_feature 1..2139: note = Synthetic
  source 1..2139: mol_type = other DNA
atggccttaccagtgaccgccttgctcctgccgctggccttgctgctccacgccgccaggccggaggtgcagctgctggaaagcggcggcggactggtgcaacctggcggctctctgcggctgtcctgtaccgccagcggcttcaccttcagcagcttcgccatgagctgggtcagacaggctccaggaaaaggcctggaatgggtgtctgccatgagcggatctggcgacaccacatactacgccgattccgtgaagggcagatttaccatcagcagagataatagcaagacaacactgtatctgcagatgaacagcctgagggccgaggacacagccgtgtacagctgcgccaagcacaccacctactacatggacgtgtggggcaaaggcaccaccgtcacagtgtccagcggcggaggcggcagcggaggcggcggcagcggcggaggaggctctcagaccgtggtgacccaggagcctagcctgtccgtgtcccctggcggcaccgtgaccctcacatgcggcctgagcagcggctcagtttccacgagcgactaccccagctggtatcagcaaacccctggacaggctcctcggaccctgatctacagaaccaacacccggagcagcggcgtgcccgatagattctctggctctatcctgggcaacaaggccgctctgaccattacaggcgcccaggccgacgacgagagcgattattactgcgtgctgtacatggacagcggcatcatcttcggctctggaacaaaggtgacagtgctggcggccgcaaccacgacgccagcgccgcggccaccaacaccggcgcccaccatcgcgtcgcagcccctgtccctgcgcccagaggcgtgccggccagcggcggggggcgcagtgcacacgagggggctggacttcgcctgtgatatctacatctgggcgcccttggccgggacttgtggggtccttctcctgtcactggttatcaccctttactgcaaacggggcagaaagaaactcctgtatatattcaaacaaccatttatgagaccagtacaaactactcaagaggaagatggctgtagctgccgatttccagaagaagaagaaggaggatgtgaactgagagtgaagttcagcaggagcgcagacgcccccgcgtaccagcagggccagaaccagctctataacgagctcaatctaggacgaagagaggagtacgatgttttggacaagagacgtggccgggaccctgagatggggggaaagccgagaaggaagaaccctcaggaaggcctgtacaatgaactgcagaaagataagatggcggaggcctacagtgagattgggatgaaaggcgagcgccggaggggcaaggggcacgatggcctttaccagggtctcagtacagccaccaaggacacctacgacgcccttcacatgcaggccctgccccctcgcggctctggcgagggaaggggttccctgcttacttgcggcgacgtcgaagagaatcccggtccgatggccctcccagtaactgccctccttttgcccctcgcactccttcttcatgccgctcgccccaactgggtcaacgtgattagcgatttgaagaaaatcgaggaccttatacagtctatgcatattgacgctacactgtatactgagagtgatgtacacccgtcctgtaaggtaacggccatgaaatgctttcttctggagctccaggtcatcagcttggagtctggggacgcaagcatccacgatacggttgaaaacctcatcatccttgcgaacaactctctctcatctaatggaaacgttacagagagtgggtgtaaggagtgcgaagagttggaagaaaaaaacatcaaagaatttcttcaatccttcgttcacatagtgcaaatgttcattaacacgtccactaccacacccgccccgaggccacctacgccggcaccgactatcgccagtcaacccctctctctgcgccccgaggcttgccggcctgcggctggtggggcggtccacacccggggcctggattttgcgtgcgatatatacatctgggcacctcttgccggcacctgcggagtgctgcttctctcactcgttattacgctgtactgc

SEQ ID NO: 2530 - DNA, 2139 bp, synthetic construct
  misc_feature 1..2139: note = Synthetic
  source 1..2139: mol_type = other DNA
atggccttaccagtgaccgccttgctcctgccgctggccttgctgctccacgccgccaggccggaggtgcagctgctggaaagcggcggcggcctggtgcaacctggcggaagtctgcggctgtcttgtgccgcttctggattcaccttcaacacctacgccatgagctgggtgcggcaggcccctggcaaaggcctggaatgggtctccgccatgagcggctctggcgacacaacctactatgccgacagcgtgaagggcagatttacaatcagcagggataacagcaagaccaccctgtacctgcagatgaacagcctccgggccgaggacaccgccgtgtacagctgcgccaagcacaccagctactacatggacgtgtggggcaaaggcaccaccgtgaccgtgtccagcggaggtggcggcagcggcggcggaggctccggcggcggaggctcacagaccgtcgtgacccaggagccttctctgagcgtgtctccaggaggcacagttactctgacatgcggcctgtctagcggcagcgtgtccaccagcgactaccccagctggtatcagcaaacacctggccaggctcctagaaccctgatctatagaacaaataccagaagcagcggcgtgcccgatagattcagcggaagcatcctgggcaacaaggccgccctgaccatcaccggcgcccaggctgacgacgagtctgattactactgcgtgctgtacatgggcagcggcatcattttcggcagcggaacaaaggtgacagtgctggcggccgcaaccacgacgccagcgccgcggccaccaacaccggcgcccaccatcgcgtcgcagcccctgtccctgcgcccagaggcgtgccggccagcggcggggggcgcagtgcacacgagggggctggacttcgcctgtgatatctacatctgggcgcccttggccgggacttgtggggtccttctcctgtcactggttatcaccctttactgcaaacggggcagaaagaaactcctgtatatattcaaacaaccatttatgagaccagtacaaactactcaagaggaagatggctgtagctgccgatttccagaagaagaagaaggaggatgtgaactgagagtgaagttcagcaggagcgcagacgcccccgcgtaccagcagggccagaaccagctctataacgagctcaatctaggacgaagagaggagtacgatgttttggacaagagacgtggccgggaccctgagatggggggaaagccgagaaggaagaaccctcaggaaggcctgtacaatgaactgcagaaagataagatggcggaggcctacagtgagattgggatgaaaggcgagcgccggaggggcaaggggcacgatggcctttaccagggtctcagtacagccaccaaggacacctacgacgcccttcacatgcaggccctgccccctcgcggctctggcgagggaaggggttccctgcttacttgcggcgacgtcgaagagaatcccggtccgatggccctcccagtaactgccctccttttgcccctcgcactccttcttcatgccgctcgccccaactgggtcaacgtgattagcgatttgaagaaaatcgaggaccttatacagtctatgcatattgacgctacactgtatactgagagtgatgtacacccgtcctgtaaggtaacggccatgaaatgctttcttctggagctccaggtcatcagcttggagtctggggacgcaagcatccacgatacggttgaaaacctcatcatccttgcgaacaactctctctcatctaatggaaacgttacagagagtgggtgtaaggagtgcgaagagttggaagaaaaaaacatcaaagaatttcttcaatccttcgttcacatagtgcaaatgttcattaacacgtccactaccacacccgccccgaggccacctacgccggcaccgactatcgccagtcaacccctctctctgcgccccgaggcttgccggcctgcggctggtggggcggtccacacccggggcctggattttgcgtgcgatatatacatctgggcacctcttgccggcacctgcggagtgctgcttctctcactcgttattacgctgtactgc

SEQ ID NO: 2531 - DNA, 2139 bp, synthetic construct
  misc_feature 1..2139: note = Synthetic
  source 1..2139: mol_type = other DNA
atggccttaccagtgaccgccttgctcctgccgctggccttgctgctccacgccgccaggccggaagtgcagctgctggaaagcggcggcgacctggtgcaacctggcggctccctgagactgagctgcgccgcttctggctttaccttcagcacctacgccatgagctgggtgcggcaggcccctggcaaaggactggagtgggtctccgccatcagcggcagcggcgagaatatctactacgctgatagcgtgaagggcagattcaccattagcagagataattctaagaacaccctgttcctgcagatgaacagcctgcgggccgaagataccgccgtgtactactgcgccaagcacacatcttactacatggacgtgtggggcaaaggcaccaccgtcacagtgtccagcggaggcggcggcagcggcggaggcggcagcggaggaggcggctcacagaccgtggtgacccaagagcccagcttctctgtgtccccaggtggcaccgtgacactgacatgcggcctgtacagcgacagcgtgtctacaagctactatcctagctggtatcagcagacacctggccaggctcctagaaccctgatctacaacaccaacacaagaagcagcggcgtgcccgaccggtttagcggaagcatcctgggcaacaaggccgccctgaccatcaccggcgcccaggccgacgacgagagcgactactattgtgtgctgtacatggtgtccggcatcgtgttcggctctggaacaaaggtgaccgttctggcggccgcaaccacgacgccagcgccgcggccaccaacaccggcgcccaccatcgcgtcgcagcccctgtccctgcgcccagaggcgtgccggccagcggcggggggcgcagtgcacacgagggggctggacttcgcctgtgatatctacatctgggcgcccttggccgggacttgtggggtccttctcctgtcactggttatcaccctttactgcaaacggggcagaaagaaactcctgtatatattcaaacaaccatttatgagaccagtacaaactactcaagaggaagatggctgtagctgccgatttccagaagaagaagaaggaggatgtgaactgagagtgaagttcagcaggagcgcagacgcccccgcgtaccagcagggccagaaccagctctataacgagctcaatctaggacgaagagaggagtacgatgttttggacaagagacgtggccgggaccctgagatggggggaaagccgagaaggaagaaccctcaggaaggcctgtacaatgaactgcagaaagataagatggcggaggcctacagtgagattgggatgaaaggcgagcgccggaggggcaaggggcacgatggcctttaccagggtctcagtacagccaccaaggacacctacgacgcccttcacatgcaggccctgccccctcgcggctctggcgagggaaggggttccctgcttacttgcggcgacgtcgaagagaatcccggtccgatggccctcccagtaactgccctccttttgcccctcgcactccttcttcatgccgctcgccccaactgggtcaacgtgattagcgatttgaagaaaatcgaggaccttatacagtctatgcatattgacgctacactgtatactgagagtgatgtacacccgtcctgtaaggtaacggccatgaaatgctttcttctggagctccaggtcatcagcttggagtctggggacgcaagcatccacgatacggttgaaaacctcatcatccttgcgaacaactctctctcatctaatggaaacgttacagagagtgggtgtaaggagtgcgaagagttggaagaaaaaaacatcaaagaatttcttcaatccttcgttcacatagtgcaaatgttcattaacacgtccactaccacacccgccccgaggccacctacgccggcaccgactatcgccagtcaacccctctctctgcgccccgaggcttgccggcctgcggctggtggggcggtccacacccggggcctggattttgcgtgcgatatatacatctgggcacctcttgccggcacctgcggagtgctgcttctctcactcgttattacgctgtactgc

SEQ ID NO: 2532 - DNA, 2157 bp, synthetic construct
  misc_feature 1..2157: note = Synthetic
  source 1..2157: mol_type = other DNA
atggccttaccagtgaccgccttgctcctgccgctggccttgctgctccacgccgccaggccgcaagtgcagctggtggaaagcggaggcggagttgtgcaacctggcagatctctgcgcctgtcatgcgccgccagcggctttacattctccagctacggcatgcactgggtgcggcaggcccctggcaaaggcctggaatgggtcgctgtgatctggtacgacggcatcaacaaatactacgccgacagcgtgaagggcagattcaccatcagcagagataatagcaagaacaccctgtacctgcagatgaacagcctgcgggccgaggacactgccgtgtactactgcgccagagagcggctggaacggagatactactactacatggacgtgtggggcaagggcaccaccgtgaccgtgtccagtggtggcggaggatctggcggaggcggctctggcggcggcggcagccagaccgtggtgacccaggagcctagcttcagcgtgtcccccggaggcacagtgaccctgacatgcggcctcagctctggctccgtcagcacctcttactatcctggatggtatcagcagacacctggccaggccccaagaaccctgatctacagcacaaacaccagaagcagcggcgtgcccgatagatttagcggcagcatcctgggcaacaaggccgccctgaccattacaggcgcccaggctgatgacgagagcgactactactgtgtgctgtacatgggcagcggcatgttcatcttcggctctggaaccaaggtgacagtgctggcggccgcaaccacgacgccagcgccgcggccaccaacaccggcgcccaccatcgcgtcgcagcccctgtccctgcgcccagaggcgtgccggccagcggcggggggcgcagtgcacacgagggggctggacttcgcctgtgatatctacatctgggcgcccttggccgggacttgtggggtccttctcctgtcactggttatcaccctttactgcaaacggggcagaaagaaactcctgtatatattcaaacaaccatttatgagaccagtacaaactactcaagaggaagatggctgtagctgccgatttccagaagaagaagaaggaggatgtgaactgagagtgaagttcagcaggagcgcagacgcccccgcgtaccagcagggccagaaccagctctataacgagctcaatctaggacgaagagaggagtacgatgttttggacaagagacgtggccgggaccctgagatggggggaaagccgagaaggaagaaccctcaggaaggcctgtacaatgaactgcagaaagataagatggcggaggcctacagtgagattgggatgaaaggcgagcgccggaggggcaaggggcacgatggcctttaccagggtctcagtacagccaccaaggacacctacgacgcccttcacatgcaggccctgccccctcgcggctctggcgagggaaggggttccctgcttacttgcggcgacgtcgaagagaatcccggtccgatggccctcccagtaactgccctccttttgcccctcgcactccttcttcatgccgctcgccccaactgggtcaacgtgattagcgatttgaagaaaatcgaggaccttatacagtctatgcatattgacgctacactgtatactgagagtgatgtacacccgtcctgtaaggtaacggccatgaaatgctttcttctggagctccaggtcatcagcttggagtctggggacgcaagcatccacgatacggttgaaaacctcatcatccttgcgaacaactctctctcatctaatggaaacgttacagagagtgggtgtaaggagtgcgaagagttggaagaaaaaaacatcaaagaatttcttcaatccttcgttcacatagtgcaaatgttcattaacacgtccactaccacacccgccccgaggccacctacgccggcaccgactatcgccagtcaacccctctctctgcgccccgaggcttgccggcctgcggctggtggggcggtccacacccggggcctggattttgcgtgcgatatatacatctgggcacctcttgccggcacctgcggagtgctgcttctctcactcgttattacgctgtactgc

SEQ ID NO: 2533 - DNA, 2139 bp, synthetic construct
  misc_feature 1..2139: note = Synthetic
  source 1..2139: mol_type = other DNA
atggccttaccagtgaccgccttgctcctgccgctggccttgctgctccacgccgccaggccggaggtgcagctgctggaatctggaggcggcctcgtgcagcctggaggcagcctgaggctgagctgcgctgcttctggcttcaccttcagcagcttcgccatgagctgggtcagacaagctcccggcaaaggcctggaatgggtgtccgccgtgtctggcagcggcgacgatacctactacgccgatagcgtgaaaggaagatttacaatcagccgggacaacagcaagaataccctgtacctgcagatgaactctctgcgggccgaggacaccgccgtgtactattgcgccaagcacaccagctactacctggacgtgtggggcaagggcaccaccgtgaccgtttccagcggcggcggcggcagcggcggaggtggaagcggcggaggcggatctcagacagtggtgacacaggagcctagcttttctgtgtcccctggcggcaccgtgacactgacatgcgccctgagctccgatagcgtgtcaacatcttacttccccagctggtatcggcagacccctggacaggcccctagaaccctgatctacaacaccaacaccagaagcagcggcgtgccagatagattcagcggctccatcctgggcaacaaggccgccctgaccattacaggcgcccaggccgacgacgagagcgactactactgtgtgctgtacatgggcagcggcatcatcttcggctctggcacaaaggtgaccgtcctggcggccgcaaccacgacgccagcgccgcggccaccaacaccggcgcccaccatcgcgtcgcagcccctgtccctgcgcccagaggcgtgccggccagcggcggggggcgcagtgcacacgagggggctggacttcgcctgtgatatctacatctgggcgcccttggccgggacttgtggggtccttctcctgtcactggttatcaccctttactgcaaacggggcagaaagaaactcctgtatatattcaaacaaccatttatgagaccagtacaaactactcaagaggaagatggctgtagctgccgatttccagaagaagaagaaggaggatgtgaactgagagtgaagttcagcaggagcgcagacgcccccgcgtaccagcagggccagaaccagctctataacgagctcaatctaggacgaagagaggagtacgatgttttggacaagagacgtggccgggaccctgagatggggggaaagccgagaaggaagaaccctcaggaaggcctgtacaatgaactgcagaaagataagatggcggaggcctacagtgagattgggatgaaaggcgagcgccggaggggcaaggggcacgatggcctttaccagggtctcagtacagccaccaaggacacctacgacgcccttcacatgcaggccctgccccctcgcggctctggcgagggaaggggttccctgcttacttgcggcgacgtcgaagagaatcccggtccgatggccctcccagtaactgccctccttttgcccctcgcactccttcttcatgccgctcgccccaactgggtcaacgtgattagcgatttgaagaaaatcgaggaccttatacagtctatgcatattgacgctacactgtatactgagagtgatgtacacccgtcctgtaaggtaacggccatgaaatgctttcttctggagctccaggtcatcagcttggagtctggggacgcaagcatccacgatacggttgaaaacctcatcatccttgcgaacaactctctctcatctaatggaaacgttacagagagtgggtgtaaggagtgcgaagagttggaagaaaaaaacatcaaagaatttcttcaatccttcgttcacatagtgcaaatgttcattaacacgtccactaccacacccgccccgaggccacctacgccggcaccgactatcgccagtcaacccctctctctgcgccccgaggcttgccggcctgcggctggtggggcggtccacacccggggcctggattttgcgtgcgatatatacatctgggcacctcttgccggcacctgcggagtgctgcttctctcactcgttattacgctgtactgc

SEQ ID NO: 2534 - DNA, 2157 bp, synthetic construct
  misc_feature 1..2157: note = Synthetic
  source 1..2157: mol_type = other DNA
atggccttaccagtgaccgccttgctcctgccgctggccttgctgctccacgccgccaggccgcaagtgcagctggtggaaagcggaggcggcgtcgtgcaacctggcagaagcctgagactgagctgcgccgccagcggctttaacttcagcaccttcgacatccactgggtgcggcaggcccctggaaaaggcctggagtgggtcgccctgatctggtatgacggcagctacaagtactacgccgatagcgttaagggcaggttcaccatcagcagagataattctaagaacaccctggacctgagaatgaacagcctccgggctgaggacaccgccgtgtactactgcgccagaaatgacaactggaacgacgagcattactatcactactacatggacgtgtggggcaagggcaccaccgtgacagtgtcctctggcggcggcggcagcggcggcggcggcagcggtggaggcggaagcgagatcgtgctgacccagtctcctgatttccagtccgtgacccctaaggaaaaggtgaccatcacctgtagagcttctcagagcatcggcagctctctgcactggtatcagcagaaacctgaccagagcccaaagctgctgatcaaattcgccagccagtccttcagcggcgtgccctcccggtttagcggctccggcagcggaacagacttcaccctgacaattaacagcctggaagccgaggatgccgccacatacttctgccaccagtcttctagcctgccctggacattcggccagggcacaaaggtggagatcaaggcggccgcaaccacgacgccagcgccgcggccaccaacaccggcgcccaccatcgcgtcgcagcccctgtccctgcgcccagaggcgtgccggccagcggcggggggcgcagtgcacacgagggggctggacttcgcctgtgatatctacatctgggcgcccttggccgggacttgtggggtccttctcctgtcactggttatcaccctttactgcaaacggggcagaaagaaactcctgtatatattcaaacaaccatttatgagaccagtacaaactactcaagaggaagatggctgtagctgccgatttccagaagaagaagaaggaggatgtgaactgagagtgaagttcagcaggagcgcagacgcccccgcgtaccagcagggccagaaccagctctataacgagctcaatctaggacgaagagaggagtacgatgttttggacaagagacgtggccgggaccctgagatggggggaaagccgagaaggaagaaccctcaggaaggcctgtacaatgaactgcagaaagataagatggcggaggcctacagtgagattgggatgaaaggcgagcgccggaggggcaaggggcacgatggcctttaccagggtctcagtacagccaccaaggacacctacgacgcccttcacatgcaggccctgccccctcgcggctctggcgagggaaggggttccctgcttacttgcggcgacgtcgaagagaatcccggtccgatggccctcccagtaactgccctccttttgcccctcgcactccttcttcatgccgctcgccccaactgggtcaacgtgattagcgatttgaagaaaatcgaggaccttatacagtctatgcatattgacgctacactgtatactgagagtgatgtacacccgtcctgtaaggtaacggccatgaaatgctttcttctggagctccaggtcatcagcttggagtctggggacgcaagcatccacgatacggttgaaaacctcatcatccttgcgaacaactctctctcatctaatggaaacgttacagagagtgggtgtaaggagtgcgaagagttggaagaaaaaaacatcaaagaatttcttcaatccttcgttcacatagtgcaaatgttcattaacacgtccactaccacacccgccccgaggccacctacgccggcaccgactatcgccagtcaacccctctctctgcgccccgaggcttgccggcctgcggctggtggggcggtccacacccggggcctggattttgcgtgcgatatatacatctgggcacctcttgccggcacctgcggagtgctgcttctctcactcgttattacgctgtactgc

SEQ ID NO: 2535 - DNA, 2172 bp, synthetic construct
  misc_feature 1..2172: note = Synthetic
  source 1..2172: mol_type = other DNA
atggccttaccagtgaccgccttgctcctgccgctggccttgctgctccacgccgccaggccggaggtgcacctgctggaaagcggcggcggcctggtgcagcctggaggctctctgcggctgagctgtgccgcctctggttttaccttcagcagctacgccatgaattgggttagacaggcccctggcaagggcctggaatgggtcagcagcatcagcggctccggcagcagctcttactatgctgatagcgtgaagggcagattcaccattagcagagacaatagcaagaacaccctgtacctgcagatgaacagcctgcgggccgaggacaccgccgtgtactactgcgccagccggggcttcaactcccaataccctcctggctactactactactacatggacgtgtggggaaaaggcacgaccgtgaccgtgtcctccggcggcggcggaagcggcggcggcggctctggcggaggcggcagccagaccgtggtgacacaggagcctagcttcagcgtgtctccaggaggaacagtgaccctgacatgcggcctcagcagcggctctgtgtccaccagctatttccccagctggtatcagcagacccctggccaggctcccaggaccctgatctacatcaccaacacaagaagcagcggcgtgcccgacagattttctggcagcatcatcggcaacaaggccgctctgaccatcacaggcgcccaggccgacgacgagagtgattacttctgcgtgctgtacatgggcagcggaacatgggtgttcggcggaggcacaaagctgaccgtcctggcggccgcaaccacgacgccagcgccgcggccaccaacaccggcgcccaccatcgcgtcgcagcccctgtccctgcgcccagaggcgtgccggccagcggcggggggcgcagtgcacacgagggggctggacttcgcctgtgatatctacatctgggcgcccttggccgggacttgtggggtccttctcctgtcactggttatcaccctttactgcaaacggggcagaaagaaactcctgtatatattcaaacaaccatttatgagaccagtacaaactactcaagaggaagatggctgtagctgccgatttccagaagaagaagaaggaggatgtgaactgagagtgaagttcagcaggagcgcagacgcccccgcgtaccagcagggccagaaccagctctataacgagctcaatctaggacgaagagaggagtacgatgttttggacaagagacgtggccgggaccctgagatggggggaaagccgagaaggaagaaccctcaggaaggcctgtacaatgaactgcagaaagataagatggcggaggcctacagtgagattgggatgaaaggcgagcgccggaggggcaaggggcacgatggcctttaccagggtctcagtacagccaccaaggacacctacgacgcccttcacatgcaggccctgccccctcgcggctctggcgagggaaggggttccctgcttacttgcggcgacgtcgaagagaatcccggtccgatggccctcccagtaactgccctccttttgcccctcgcactccttcttcatgccgctcgccccaactgggtcaacgtgattagcgatttgaagaaaatcgaggaccttatacagtctatgcatattgacgctacactgtatactgagagtgatgtacacccgtcctgtaaggtaacggccatgaaatgctttcttctggagctccaggtcatcagcttggagtctggggacgcaagcatccacgatacggttgaaaacctcatcatccttgcgaacaactctctctcatctaatggaaacgttacagagagtgggtgtaaggagtgcgaagagttggaagaaaaaaacatcaaagaatttcttcaatccttcgttcacatagtgcaaatgttcattaacacgtccactaccacacccgccccgaggccacctacgccggcaccgactatcgccagtcaacccctctctctgcgccccgaggcttgccggcctgcggctggtggggcggtccacacccggggcctggattttgcgtgcgatatatacatctgggcacctcttgccggcacctgcggagtgctgcttctctcactcgttattacgctgtactgc

SEQ ID NO: 2536 - DNA, 2133 bp, synthetic construct
  misc_feature 1..2133: note = Synthetic
  source 1..2133: mol_type = other DNA
atggccttaccagtgaccgccttgctcctgccgctggccttgctgctccacgccgccaggccggaggtgcagctgctggaaagcggcggcggcctggtgcaacctggcggctccctgaggctgagctgcgccgccagcggcttcacctttagcaactacgctatgacctgggtcagacaggcccctggaaagggcctggagtgggtgtccgccatcagcggatctggtattggaacatactacgccgacagcgtgcaaggcagattcacaacaagcagagataattctaagaacaccctgtacctgcagatgaacagcctgcgggccgaggacaccgccgtgtactattgtgccaagggcggctacaactggaaggacgtgtggggcaagggaaccaccgtgaccgtttcttctggcggcggaggcagcggcggcggaggctccggaggcggaggcagcgagatcgtgctgacacagtctcccgactttcagagcgtgacccctaaagagaaggtgacaatcacctgcagagccagccagtcaatcggctctagcctgcactggtatcagcagaaacctgatcagagccctaagctgctgatcaagttcgcctctcagagcttcagcggcgtgccaagccggttcagcggctccggcagcggcaccgacttcaccctgaccatccacagcctggaggccgaagatgccgctacatactactgccaccagtccagcagcctcccctggaccttcggccagggcacaaaggtggaaatcaaagcggccgcaaccacgacgccagcgccgcggccaccaacaccggcgcccaccatcgcgtcgcagcccctgtccctgcgcccagaggcgtgccggccagcggcggggggcgcagtgcacacgagggggctggacttcgcctgtgatatctacatctgggcgcccttggccgggacttgtggggtccttctcctgtcactggttatcaccctttactgcaaacggggcagaaagaaactcctgtatatattcaaacaaccatttatgagaccagtacaaactactcaagaggaagatggctgtagctgccgatttccagaagaagaagaaggaggatgtgaactgagagtgaagttcagcaggagcgcagacgcccccgcgtaccagcagggccagaaccagctctataacgagctcaatctaggacgaagagaggagtacgatgttttggacaagagacgtggccgggaccctgagatggggggaaagccgagaaggaagaaccctcaggaaggcctgtacaatgaactgcagaaagataagatggcggaggcctacagtgagattgggatgaaaggcgagcgccggaggggcaaggggcacgatggcctttaccagggtctcagtacagccaccaaggacacctacgacgcccttcacatgcaggccctgccccctcgcggctctggcgagggaaggggttccctgcttacttgcggcgacgtcgaagagaatcccggtccgatggccctcccagtaactgccctccttttgcccctcgcactccttcttcatgccgctcgccccaactgggtcaacgtgattagcgatttgaagaaaatcgaggaccttatacagtctatgcatattgacgctacactgtatactgagagtgatgtacacccgtcctgtaaggtaacggccatgaaatgctttcttctggagctccaggtcatcagcttggagtctggggacgcaagcatccacgatacggttgaaaacctcatcatccttgcgaacaactctctctcatctaatggaaacgttacagagagtgggtgtaaggagtgcgaagagttggaagaaaaaaacatcaaagaatttcttcaatccttcgttcacatagtgcaaatgttcattaacacgtccactaccacacccgccccgaggccacctacgccggcaccgactatcgccagtcaacccctctctctgcgccccgaggcttgccggcctgcggctggtggggcggtccacacccggggcctggattttgcgtgcgatatatacatctgggcacctcttgccggcacctgcggagtgctgcttctctcactcgttattacgctgtactgc

SEQ ID NO: 2537 - DNA, 2157 bp, synthetic construct
  misc_feature 1..2157: note = Synthetic
  source 1..2157: mol_type = other DNA
atggccttaccagtgaccgccttgctcctgccgctggccttgctgctccacgccgccaggccgcaagtgcagctggtggagagcggcggcggcgtcgtgcagcccggcagaagcctgcggctgtcttgcgctgccagcggcttcacctttacaaactacgacatgcactgggtcagacaggcccctggcaaaggcctggaatgggtgaccatcatctggcacgacggctccaataagtactacctggacagcgtgcggggcagattcacgatcagcagagataattccaagaacaccctgtacctgcagatgaacagcctgagagccgaggacaccgccgtgtactattgcgccagaggcgacaactggaacgacgagcaccactacttctactacatggacgtgtggggcaagggcaccaccgtgaccgtgtccagcggcggaggcggctccggaggaggcggctctggtggcggcggcagcgagatcgtgctgacccagagccctgacttccagtctgtgacacctaaggaaaaggtgacaatcacctgtagggccagccaaagcatcggcagcagcctgcattggtatcagcagaagcccgatcagtctccaaagctgctgatcaaattcgccagccagagcttcagcggagttcctagccggttcagcggctctggcagcggaacagatttcaccctgacaattcactctctggaggccgaggatgccgccacatattactgccaccagtctagcagcctgccttggacctttggacagggcaccaaggtggaaatcaaggcggccgcaaccacgacgccagcgccgcggccaccaacaccggcgcccaccatcgcgtcgcagcccctgtccctgcgcccagaggcgtgccggccagcggcggggggcgcagtgcacacgagggggctggacttcgcctgtgatatctacatctgggcgcccttggccgggacttgtggggtccttctcctgtcactggttatcaccctttactgcaaacggggcagaaagaaactcctgtatatattcaaacaaccatttatgagaccagtacaaactactcaagaggaagatggctgtagctgccgatttccagaagaagaagaaggaggatgtgaactgagagtgaagttcagcaggagcgcagacgcccccgcgtaccagcagggccagaaccagctctataacgagctcaatctaggacgaagagaggagtacgatgttttggacaagagacgtggccgggaccctgagatggggggaaagccgagaaggaagaaccctcaggaaggcctgtacaatgaactgcagaaagataagatggcggaggcctacagtgagattgggatgaaaggcgagcgccggaggggcaaggggcacgatggcctttaccagggtctcagtacagccaccaaggacacctacgacgcccttcacatgcaggccctgccccctcgcggctctggcgagggaaggggttccctgcttacttgcggcgacgtcgaagagaatcccggtccgatggccctcccagtaactgccctccttttgcccctcgcactccttcttcatgccgctcgccccaactgggtcaacgtgattagcgatttgaagaaaatcgaggaccttatacagtctatgcatattgacgctacactgtatactgagagtgatgtacacccgtcctgtaaggtaacggccatgaaatgctttcttctggagctccaggtcatcagcttggagtctggggacgcaagcatccacgatacggttgaaaacctcatcatccttgcgaacaactctctctcatctaatggaaacgttacagagagtgggtgtaaggagtgcgaagagttggaagaaaaaaacatcaaagaatttcttcaatccttcgttcacatagtgcaaatgttcattaacacgtccactaccacacccgccccgaggccacctacgccggcaccgactatcgccagtcaacccctctctctgcgccccgaggcttgccggcctgcggctggtggggcggtccacacccggggcctggattttgcgtgcgatatatacatctgggcacctcttgccggcacctgcggagtgctgcttctctcactcgttattacgctgtactgc

SEQ ID NO: 2538 - DNA, 2157 bp, synthetic construct
  misc_feature 1..2157: note = Synthetic
  source 1..2157: mol_type = other DNA
atggccttaccagtgaccgccttgctcctgccgctggccttgctgctccacgccgccaggccgcaggtgcagctggttgagagcggcggaggcgtggtgcaacctggaagatctctgcgcctgagctgcgccgccagcggcttcaccttcagcaactacgatatgcactgggtgcggcaggcccctggcaagggcctggaatgggtcaccattatctggcatgacggcagcaacaagtactacctggacagcgtgaaaggcagattcaccatcagcagagacaatagcaagaacaccctgtacctgcagatgaacagcctgcgggccgaggacaccgccgtgtactattgcgccagaggcgacaactggaacgacgagcaccactacttctactatatggacgtgtggggcaaaggcacaaccgtgaccgtcagcagcggcggcggaggcagcggaggcggaggctctggcggcggtggcagtgaaatcgtgctgacccagagccccgctacactgagcctctcccctggcgagcgggccacactgtcttgtagagcctctcagtccgtgtccagcagcctggcctggtatcagcagaagcccggccaggctccaagactgctgatctacgacgccagcaatagagccaccggcatccccgcccggttttccggcagcggatctggaacagattttaccctgaccatcagcagcctggaacctgaggatttcgccgtgtactactgccagcaaagaagcaactggcctctgacattcggcggcggcacaaaggtggaaatcaaggcggccgcaaccacgacgccagcgccgcggccaccaacaccggcgcccaccatcgcgtcgcagcccctgtccctgcgcccagaggcgtgccggccagcggcggggggcgcagtgcacacgagggggctggacttcgcctgtgatatctacatctgggcgcccttggccgggacttgtggggtccttctcctgtcactggttatcaccctttactgcaaacggggcagaaagaaactcctgtatatattcaaacaaccatttatgagaccagtacaaactactcaagaggaagatggctgtagctgccgatttccagaagaagaagaaggaggatgtgaactgagagtgaagttcagcaggagcgcagacgcccccgcgtaccagcagggccagaaccagctctataacgagctcaatctaggacgaagagaggagtacgatgttttggacaagagacgtggccgggaccctgagatggggggaaagccgagaaggaagaaccctcaggaaggcctgtacaatgaactgcagaaagataagatggcggaggcctacagtgagattgggatgaaaggcgagcgccggaggggcaaggggcacgatggcctttaccagggtctcagtacagccaccaaggacacctacgacgcccttcacatgcaggccctgccccctcgcggctctggcgagggaaggggttccctgcttacttgcggcgacgtcgaagagaatcccggtccgatggccctcccagtaactgccctccttttgcccctcgcactccttcttcatgccgctcgccccaactgggtcaacgtgattagcgatttgaagaaaatcgaggaccttatacagtctatgcatattgacgctacactgtatactgagagtgatgtacacccgtcctgtaaggtaacggccatgaaatgctttcttctggagctccaggtcatcagcttggagtctggggacgcaagcatccacgatacggttgaaaacctcatcatccttgcgaacaactctctctcatctaatggaaacgttacagagagtgggtgtaaggagtgcgaagagttggaagaaaaaaacatcaaagaatttcttcaatccttcgttcacatagtgcaaatgttcattaacacgtccactaccacacccgccccgaggccacctacgccggcaccgactatcgccagtcaacccctctctctgcgccccgaggcttgccggcctgcggctggtggggcggtccacacccggggcctggattttgcgtgcgatatatacatctgggcacctcttgccggcacctgcggagtgctgcttctctcactcgttattacgctgtactgc

SEQ ID NO: 2539 - DNA, 2145 bp, synthetic construct
  misc_feature 1..2145: note = Synthetic
  source 1..2145: mol_type = other DNA
atggccttaccagtgaccgccttgctcctgccgctggccttgctgctccacgccgccaggccggaagtgcagctggtcgagagcggcggcggcgtggtgcggcctggcgggtccctgagactgagctgcgccgcctctggcttcaccttcgacgactatggcatgagctgggtcagacaggcccctggaaaaggcctggaatgggtgtccggaatcaactggaatggcggcagtacaggctacgtggacagcgtgaagggcagattcaccatcagccgggacaacgccaagaacagcctgtatctgcagatgaacagcctgcgggccgaggacaccgccctgtaccactgtgccagacctgtgacaaccgactactactactacatggacgtgtggggcaagggcaccaccgtgaccgtgtcttccggcggaggaggcagcggcggcggcggcagcggcggaggcggcagcgagatcgtgctgacacagagccccggaacactgagcctgagccctggcgagcgggctacactgtcttgcagagcttctcagagcgtttcctccagctacctggcctggtatcagcaaaagcccggccaagctccaagactgctgatctacggcgccagctctagggccaccggcattcctgatagattcagcggctctggcagcggaacagattttaccctgaccatcagcagactggagcctgaggatttcgccgtgtactactgccagcagtacggatctagctggacctttggccagggcaccaaggtggaaatcaaagcggccgcaaccacgacgccagcgccgcggccaccaacaccggcgcccaccatcgcgtcgcagcccctgtccctgcgcccagaggcgtgccggccagcggcggggggcgcagtgcacacgagggggctggacttcgcctgtgatatctacatctgggcgcccttggccgggacttgtggggtccttctcctgtcactggttatcaccctttactgcaaacggggcagaaagaaactcctgtatatattcaaacaaccatttatgagaccagtacaaactactcaagaggaagatggctgtagctgccgatttccagaagaagaagaaggaggatgtgaactgagagtgaagttcagcaggagcgcagacgcccccgcgtaccagcagggccagaaccagctctataacgagctcaatctaggacgaagagaggagtacgatgttttggacaagagacgtggccgggaccctgagatggggggaaagccgagaaggaagaaccctcaggaaggcctgtacaatgaactgcagaaagataagatggcggaggcctacagtgagattgggatgaaaggcgagcgccggaggggcaaggggcacgatggcctttaccagggtctcagtacagccaccaaggacacctacgacgcccttcacatgcaggccctgccccctcgcggctctggcgagggaaggggttccctgcttacttgcggcgacgtcgaagagaatcccggtccgatggccctcccagtaactgccctccttttgcccctcgcactccttcttcatgccgctcgccccaactgggtcaacgtgattagcgatttgaagaaaatcgaggaccttatacagtctatgcatattgacgctacactgtatactgagagtgatgtacacccgtcctgtaaggtaacggccatgaaatgctttcttctggagctccaggtcatcagcttggagtctggggacgcaagcatccacgatacggttgaaaacctcatcatccttgcgaacaactctctctcatctaatggaaacgttacagagagtgggtgtaaggagtgcgaagagttggaagaaaaaaacatcaaagaatttcttcaatccttcgttcacatagtgcaaatgttcattaacacgtccactaccacacccgccccgaggccacctacgccggcaccgactatcgccagtcaacccctctctctgcgccccgaggcttgccggcctgcggctggtggggcggtccacacccggggcctggattttgcgtgcgatatatacatctgggcacctcttgccggcacctgcggagtgctgcttctctcactcgttattacgctgtactgc

SEQ ID NO: 2540 - DNA, 2169 bp, synthetic construct
  misc_feature 1..2169: note = Synthetic
  source 1..2169: mol_type = other DNA
atggccttaccagtgaccgccttgctcctgccgctggccttgctgctccacgccgccaggccggaggtgcagctgctggagagcggaggaggcctggtgcaacctggcggcagcctgcggctgagctgcgccgcttccggcttcaccttcagcagctacgccatgagctgggtgcggcaggctcctggaaaaggcctggagtgggtcagcgccatcagcggcagcggaggctcaacatactacgccgacagcgtgaagggcagattcaccatcagccgcgacaactctaagaacaccctgtacctgcagatgaactctctgagagccgaggacaccgccgtgtactattgtgccaagaagggcacaagctacaactggaatgatgtgcactactactactactattatatggacgtgtggggcaaaggcacaaccgtgaccgtgtccagcggcggtggaggcagcggaggcggcggaagcggcggcggcggcagtgaaattgtgctgacccagagccccggcaccctgagcctgtctccaggcgagcgggctaccctgtcctgcagagccagccagtctgtttccagctcttacctggcctggtatcagcaaaagcctggacaggcccctagactgctgatctacggcgcctctagcagggctacaggcatccctgatagatttagcggcagcggctctggcaccgacttcaccctgaccatctccagactggaacccgaggatttcgccgtgtactactgccagcagtacggcagcagctggacatttggccagggcacaaaggtggaaatcaaggcggccgcaaccacgacgccagcgccgcggccaccaacaccggcgcccaccatcgcgtcgcagcccctgtccctgcgcccagaggcgtgccggccagcggcggggggcgcagtgcacacgagggggctggacttcgcctgtgatatctacatctgggcgcccttggccgggacttgtggggtccttctcctgtcactggttatcaccctttactgcaaacggggcagaaagaaactcctgtatatattcaaacaaccatttatgagaccagtacaaactactcaagaggaagatggctgtagctgccgatttccagaagaagaagaaggaggatgtgaactgagagtgaagttcagcaggagcgcagacgcccccgcgtaccagcagggccagaaccagctctataacgagctcaatctaggacgaagagaggagtacgatgttttggacaagagacgtggccgggaccctgagatggggggaaagccgagaaggaagaaccctcaggaaggcctgtacaatgaactgcagaaagataagatggcggaggcctacagtgagattgggatgaaaggcgagcgccggaggggcaaggggcacgatggcctttaccagggtctcagtacagccaccaaggacacctacgacgcccttcacatgcaggccctgccccctcgcggctctggcgagggaaggggttccctgcttacttgcggcgacgtcgaagagaatcccggtccgatggccctcccagtaactgccctccttttgcccctcgcactccttcttcatgccgctcgccccaactgggtcaacgtgattagcgatttgaagaaaatcgaggaccttatacagtctatgcatattgacgctacactgtatactgagagtgatgtacacccgtcctgtaaggtaacggccatgaaatgctttcttctggagctccaggtcatcagcttggagtctggggacgcaagcatccacgatacggttgaaaacctcatcatccttgcgaacaactctctctcatctaatggaaacgttacagagagtgggtgtaaggagtgcgaagagttggaagaaaaaaacatcaaagaatttcttcaatccttcgttcacatagtgcaaatgttcattaacacgtccactaccacacccgccccgaggccacctacgccggcaccgactatcgccagtcaacccctctctctgcgccccgaggcttgccggcctgcggctggtggggcggtccacacccggggcctggattttgcgtgcgatatatacatctgggcacctcttgccggcacctgcggagtgctgcttctctcactcgttattacgctgtactgc

SEQ ID NO: 2541 - DNA, 2151 bp, synthetic construct
  misc_feature 1..2151: note = Synthetic
  source 1..2151: mol_type = other DNA
atggccttaccagtgaccgccttgctcctgccgctggccttgctgctccacgccgccaggccgcagctgcaactgcaggagagcggtcctggactggtgaagccttctgagacactgagcctgacctgcaccgtgtccggcggctctatcagctcctccagctactactggggctggatcagacagccacctggcaagggcctggaatggatcggcagcatttactattctggctcaacatactacaaccccagccttaaaagcagagtgacaatcagcgtggacaccagcaagaaccagttcagcctgaagctgtcctctgtgaccgccgctgatactgccgtttactactgcaccaccggaacaacagcttattactactactactacatggacgtgtggggaaagggcaccacagtgaccgtgtccagcggcggaggcggcagcggcggaggaggatctggcggcggcggcagcgagatcgtgctgacccagtctccaggcaccctgagcctgagccccggcgagcgggccacactgagctgcagagcctctcagagcgtcagctctagctacctggcctggtatcagcaaaaacctggccaggcccctagactgctgatctacggcgccagcagccgggccaccggcatccctgatagattcagcggatctggcagcggcaccgactttaccctcaccatcagcagactggaacccgaggacttcgccgtgtactattgtcagcagtacggcagcagctggacattcggccagggcaccaaggtggaaatcaaggcggccgcaaccacgacgccagcgccgcggccaccaacaccggcgcccaccatcgcgtcgcagcccctgtccctgcgcccagaggcgtgccggccagcggcggggggcgcagtgcacacgagggggctggacttcgcctgtgatatctacatctgggcgcccttggccgggacttgtggggtccttctcctgtcactggttatcaccctttactgcaaacggggcagaaagaaactcctgtatatattcaaacaaccatttatgagaccagtacaaactactcaagaggaagatggctgtagctgccgatttccagaagaagaagaaggaggatgtgaactgagagtgaagttcagcaggagcgcagacgcccccgcgtaccagcagggccagaaccagctctataacgagctcaatctaggacgaagagaggagtacgatgttttggacaagagacgtggccgggaccctgagatggggggaaagccgagaaggaagaaccctcaggaaggcctgtacaatgaactgcagaaagataagatggcggaggcctacagtgagattgggatgaaaggcgagcgccggaggggcaaggggcacgatggcctttaccagggtctcagtacagccaccaaggacacctacgacgcccttcacatgcaggccctgccccctcgcggctctggcgagggaaggggttccctgcttacttgcggcgacgtcgaagagaatcccggtccgatggccctcccagtaactgccctccttttgcccctcgcactccttcttcatgccgctcgccccaactgggtcaacgtgattagcgatttgaagaaaatcgaggaccttatacagtctatgcatattgacgctacactgtatactgagagtgatgtacacccgtcctgtaaggtaacggccatgaaatgctttcttctggagctccaggtcatcagcttggagtctggggacgcaagcatccacgatacggttgaaaacctcatcatccttgcgaacaactctctctcatctaatggaaacgttacagagagtgggtgtaaggagtgcgaagagttggaagaaaaaaacatcaaagaatttcttcaatccttcgttcacatagtgcaaatgttcattaacacgtccactaccacacccgccccgaggccacctacgccggcaccgactatcgccagtcaacccctctctctgcgccccgaggcttgccggcctgcggctggtggggcggtccacacccggggcctggattttgcgtgcgatatatacatctgggcacctcttgccggcacctgcggagtgctgcttctctcactcgttattacgctgtactgc

SEQ ID NO: 2542 - DNA, 2148 bp, synthetic construct
  misc_feature 1..2148: note = Synthetic
  source 1..2148: mol_type = other DNA
atggccttaccagtgaccgccttgctcctgccgctggccttgctgctccacgccgccaggccggaggtgcagctgctggagagcggtggaggcctggtgcaacctggcggctccctgcggctgagctgcgccgccagcggcttcacctttagctcttacgccatgacctgggtcagacaggcccctggcaagggactggaatgggtgtctgccatcagcggcagcggaggatctacatactacgctgatagcgtgaagggcagatttacaatcagccgcgacaatagcaagaacaccctgtacctgcagatgaacagcctgagagccgaggacaccgccgtgtactactgcgctagaggcggctacaactggcactactactactacatggacgtgtggggcaaaggaaccaccgtgaccgtgtccagcggcggcggcggctctggcggaggcggctctggcggcggcggaagcgagatcgtgctgacccagtctcccggaacactctccctgtccccaggcgagcgggctacactgagctgccgggccagccagagcgtgtcctcgtcttatctggcctggtatcagcagaaacctggccaagcccctagactgctgatctacggcgccagcagccgggccacaggcatccccgatagattcagcggcagcggaagcggcaccgacttcaccctgacaatcagcagactggaacctgaggacttcgccgtgtactattgtcagcagtacggcagcagctggaccttcggccagggcaccaaggttgaaattaaggcggccgcaaccacgacgccagcgccgcggccaccaacaccggcgcccaccatcgcgtcgcagcccctgtccctgcgcccagaggcgtgccggccagcggcggggggcgcagtgcacacgagggggctggacttcgcctgtgatatctacatctgggcgcccttggccgggacttgtggggtccttctcctgtcactggttatcaccctttactgcaaacggggcagaaagaaactcctgtatatattcaaacaaccatttatgagaccagtacaaactactcaagaggaagatggctgtagctgccgatttccagaagaagaagaaggaggatgtgaactgagagtgaagttcagcaggagcgcagacgcccccgcgtaccagcagggccagaaccagctctataacgagctcaatctaggacgaagagaggagtacgatgttttggacaagagacgtggccgggaccctgagatggggggaaagccgagaaggaagaaccctcaggaaggcctgtacaatgaactgcagaaagataagatggcggaggcctacagtgagattgggatgaaaggcgagcgccggaggggcaaggggcacgatggcctttaccagggtctcagtacagccaccaaggacacctacgacgcccttcacatgcaggccctgccccctcgcggctctggcgagggaaggggttccctgcttacttgcggcgacgtcgaagagaatcccggtccgatggccctcccagtaactgccctccttttgcccctcgcactccttcttcatgccgctcgccccaactgggtcaacgtgattagcgatttgaagaaaatcgaggaccttatacagtctatgcatattgacgctacactgtatactgagagtgatgtacacccgtcctgtaaggtaacggccatgaaatgctttcttctggagctccaggtcatcagcttggagtctggggacgcaagcatccacgatacggttgaaaacctcatcatccttgcgaacaactctctctcatctaatggaaacgttacagagagtgggtgtaaggagtgcgaagagttggaagaaaaaaacatcaaagaatttcttcaatccttcgttcacatagtgcaaatgttcattaacacgtccactaccacacccgccccgaggccacctacgccggcaccgactatcgccagtcaacccctctctctgcgccccgaggcttgccggcctgcggctggtggggcggtccacacccggggcctggattttgcgtgcgatatatacatctgggcacctcttgccggcacctgcggagtgctgcttctctcactcgttattacgctgtactgc

SEQ ID NO: 2543 - DNA, 2160 bp, synthetic construct
  misc_feature 1..2160: note = Synthetic
  source 1..2160: mol_type = other DNA
atggccttaccagtgaccgccttgctcctgccgctggccttgctgctccacgccgccaggccgcaagtgcagctggtggagagcggaggcggagtcgtgcaacctggcagaagcctgagactgagctgcgccgcttctggcttcaccttttctagctacgacatgcactgggtgcggcaggcccctggaaaaggcctggaatgggtcagcgtgatctggtatgacggctccaacaagaagtacggcgacagcgccaagggcaggttcaccattagccgggacaattctaagaacaccctggacctgcagatgaacagcctgcgggctgaggacaccgccgtgtactattgtgccagaggcgataattggaacgacgagggcggctactactactactacatggacgtgtggggcaagggaacaaccgtgacagtgtccagcggcggcggcggaagcggcggcggcggatctggcggaggcggcagcgagatcgtgctgacccagagccccgacttccagtccgtgacccctaaggaaaaggtgaccatcacatgcagagccagccagaacatcggcagcagcctgcactggtatcagcagaaacctgatcagtctccaaagctgctgatcaaattcgcctctcagagcatcagcggtgttcctagcagattcagcggctccggcagcggcactgattttacactgaccatcaacagcctggaggccgaggatgccgctgcctactactgccaccagagctctagcctgccctggaccttcggccagggcacaaaggtggaaatcaaggcggccgcaaccacgacgccagcgccgcggccaccaacaccggcgcccaccatcgcgtcgcagcccctgtccctgcgcccagaggcgtgccggccagcggcggggggcgcagtgcacacgagggggctggacttcgcctgtgatatctacatctgggcgcccttggccgggacttgtggggtccttctcctgtcactggttatcaccctttactgcaaacggggcagaaagaaactcctgtatatattcaaacaaccatttatgagaccagtacaaactactcaagaggaagatggctgtagctgccgatttccagaagaagaagaaggaggatgtgaactgagagtgaagttcagcaggagcgcagacgcccccgcgtaccagcagggccagaaccagctctataacgagctcaatctaggacgaagagaggagtacgatgttttggacaagagacgtggccgggaccctgagatggggggaaagccgagaaggaagaaccctcaggaaggcctgtacaatgaactgcagaaagataagatggcggaggcctacagtgagattgggatgaaaggcgagcgccggaggggcaaggggcacgatggcctttaccagggtctcagtacagccaccaaggacacctacgacgcccttcacatgcaggccctgccccctcgcggctctggcgagggaaggggttccctgcttacttgcggcgacgtcgaagagaatcccggtccgatggccctcccagtaactgccctccttttgcccctcgcactccttcttcatgccgctcgccccaactgggtcaacgtgattagcgatttgaagaaaatcgaggaccttatacagtctatgcatattgacgctacactgtatactgagagtgatgtacacccgtcctgtaaggtaacggccatgaaatgctttcttctggagctccaggtcatcagcttggagtctggggacgcaagcatccacgatacggttgaaaacctcatcatccttgcgaacaactctctctcatctaatggaaacgttacagagagtgggtgtaaggagtgcgaagagttggaagaaaaaaacatcaaagaatttcttcaatccttcgttcacatagtgcaaatgttcattaacacgtccactaccacacccgccccgaggccacctacgccggcaccgactatcgccagtcaacccctctctctgcgccccgaggcttgccggcctgcggctggtggggcggtccacacccggggcctggattttgcgtgcgatatatacatctgggcacctcttgccggcacctgcggagtgctgcttctctcactcgttattacgctgtactgc

SEQ ID NO: 2544 - DNA, 2160 bp, synthetic construct
  misc_feature 1..2160: note = Synthetic
  source 1..2160: mol_type = other DNA
atggccttaccagtgaccgccttgctcctgccgctggccttgctgctccacgccgccaggccgcaagtgcagctggtggagagcggcggcggcgtggtgcagcccggacgctccctgcggctgagctgcgccgccagcggctttaccttctctagctacgatatgcactgggtcagacaggctcctggcaaaggcctggaatgggtgtccgtgatctggtacgacggctccaacaagaagtacggcgacagcgccaagggcagattcaccatctctcgggacaatagcaagaacacactggacctgcagatgaactctctgagagccgaggacaccgccgtgtactactgcgccagaggcgataattggaacgacgagggcggttattactactactatatggacgtgtggggaaaaggcacaaccgtgaccgtttccagcggcggaggcggcagcggcggcggcggatctggcggaggcggcagcgacattcagatgacacagagccccagcagcctctccacctctgtgggcgatagagtgaccatcacatgccgggccagccagggcatcagcaactacctggcctggttccagcagaagcctggaaaggcccctaagagcctgatctacgccgccagcagcctgcagagcggagtgccatctaagttcagcggcagcggatctggcaccgacttcagcctgaccatcagctctctgcagcctgaggattttgccacatactactgtcagcagtacaacagctaccctatcacattcggccagggcaccagactggaaatcaaggcggccgcaaccacgacgccagcgccgcggccaccaacaccggcgcccaccatcgcgtcgcagcccctgtccctgcgcccagaggcgtgccggccagcggcggggggcgcagtgcacacgagggggctggacttcgcctgtgatatctacatctgggcgcccttggccgggacttgtggggtccttctcctgtcactggttatcaccctttactgcaaacggggcagaaagaaactcctgtatatattcaaacaaccatttatgagaccagtacaaactactcaagaggaagatggctgtagctgccgatttccagaagaagaagaaggaggatgtgaactgagagtgaagttcagcaggagcgcagacgcccccgcgtaccagcagggccagaaccagctctataacgagctcaatctaggacgaagagaggagtacgatgttttggacaagagacgtggccgggaccctgagatggggggaaagccgagaaggaagaaccctcaggaaggcctgtacaatgaactgcagaaagataagatggcggaggcctacagtgagattgggatgaaaggcgagcgccggaggggcaaggggcacgatggcctttaccagggtctcagtacagccaccaaggacacctacgacgcccttcacatgcaggccctgccccctcgcggctctggcgagggaaggggttccctgcttacttgcggcgacgtcgaagagaatcccggtccgatggccctcccagtaactgccctccttttgcccctcgcactccttcttcatgccgctcgccccaactgggtcaacgtgattagcgatttgaagaaaatcgaggaccttatacagtctatgcatattgacgctacactgtatactgagagtgatgtacacccgtcctgtaaggtaacggccatgaaatgctttcttctggagctccaggtcatcagcttggagtctggggacgcaagcatccacgatacggttgaaaacctcatcatccttgcgaacaactctctctcatctaatggaaacgttacagagagtgggtgtaaggagtgcgaagagttggaagaaaaaaacatcaaagaatttcttcaatccttcgttcacatagtgcaaatgttcattaacacgtccactaccacacccgccccgaggccacctacgccggcaccgactatcgccagtcaacccctctctctgcgccccgaggcttgccggcctgcggctggtggggcggtccacacccggggcctggattttgcgtgcgatatatacatctgggcacctcttgccggcacctgcggagtgctgcttctctcactcgttattacgctgtactgc

SEQ ID NO: 2545 - DNA, 2151 bp, synthetic construct
  misc_feature 1..2151: note = Synthetic
  source 1..2151: mol_type = other DNA
atggccttaccagtgaccgccttgctcctgccgctggccttgctgctccacgccgccaggccgcaagtgcagctggtgcagtctggagccgaggtgaaaaagagcggcgcctcagtgaaggtgtcctgcaaggccagcggctacacactgaccagctacggcatctcttgggttagacaggcccctggacaaggcctggaatggatgggctggatcagcgcctacaacggcaacatcaactacgcccagaaattccagggcagagtgacaatgaccacagacaccagcacctccaccgcttacatggaactgcggagcctgagaagcgacgacaccgccgtgtactactgtgtgcgggacggcgatagatacaattggaaccacagctatatggacgtgtggggcaagggcacaacagtcaccgtgtcttctggaggcggaggcagcggaggcggcggcagcggcggcggcggcagcgagatcgtgctgacacagagccctgatttccaaagcgtgacccctaaggaaaaggtgaccatcacatgcagagcctctcagaacattggaagtagcctgcactggtatcagcagaaacccgatcagtccccaaagctgctgatcaagttcgccagccagagcatcagcggagtgcccagccggttcagcggctctggctctggcaccgacttcaccctgaccatcaatagcctggaggccgaggacgccgctgcttattactgccaccagagcagctccctgccttggacctttggccagggcaccaaggtcgagatcaaggcggccgcaaccacgacgccagcgccgcggccaccaacaccggcgcccaccatcgcgtcgcagcccctgtccctgcgcccagaggcgtgccggccagcggcggggggcgcagtgcacacgagggggctggacttcgcctgtgatatctacatctgggcgcccttggccgggacttgtggggtccttctcctgtcactggttatcaccctttactgcaaacggggcagaaagaaactcctgtatatattcaaacaaccatttatgagaccagtacaaactactcaagaggaagatggctgtagctgccgatttccagaagaagaagaaggaggatgtgaactgagagtgaagttcagcaggagcgcagacgcccccgcgtaccagcagggccagaaccagctctataacgagctcaatctaggacgaagagaggagtacgatgttttggacaagagacgtggccgggaccctgagatggggggaaagccgagaaggaagaaccctcaggaaggcctgtacaatgaactgcagaaagataagatggcggaggcctacagtgagattgggatgaaaggcgagcgccggaggggcaaggggcacgatggcctttaccagggtctcagtacagccaccaaggacacctacgacgcccttcacatgcaggccctgccccctcgcggctctggcgagggaaggggttccctgcttacttgcggcgacgtcgaagagaatcccggtccgatggccctcccagtaactgccctccttttgcccctcgcactccttcttcatgccgctcgccccaactgggtcaacgtgattagcgatttgaagaaaatcgaggaccttatacagtctatgcatattgacgctacactgtatactgagagtgatgtacacccgtcctgtaaggtaacggccatgaaatgctttcttctggagctccaggtcatcagcttggagtctggggacgcaagcatccacgatacggttgaaaacctcatcatccttgcgaacaactctctctcatctaatggaaacgttacagagagtgggtgtaaggagtgcgaagagttggaagaaaaaaacatcaaagaatttcttcaatccttcgttcacatagtgcaaatgttcattaacacgtccactaccacacccgccccgaggccacctacgccggcaccgactatcgccagtcaacccctctctctgcgccccgaggcttgccggcctgcggctggtggggcggtccacacccggggcctggattttgcgtgcgatatatacatctgggcacctcttgccggcacctgcggagtgctgcttctctcactcgttattacgctgtactgc

SEQ ID NO: 2546 - DNA, 2151 bp, synthetic construct
  misc_feature 1..2151: note = Synthetic
  source 1..2151: mol_type = other DNA
atggccttaccagtgaccgccttgctcctgccgctggccttgctgctccacgccgccaggccgcaagtgcagctggttcagagcggagccgaggtgaaaaagtccggcgccagcgtgaaggtgtcatgcaaggcctctggctacaccctgacctcctacggcatcagctgggtccggcaggcccctggccagggcctggagtggatgggctggatcagcgcttataatggcaacatcaattacgcccagaagttccaaggcagagtgacaatgaccacagataccagcaccagcacagcttacatggaactgagatccctgcggagcgacgacaccgccgtgtactattgtgtgcgggacggcgacagatacaactggaaccacagctacatggacgtgtggggcaagggcaccaccgtgaccgtgtccagcggcggcggcggctctggaggcggcggatctggcggaggaggttccgacatccagatgacacagagccccagcagcctgagcacctctgtgggcgatagagtgaccatcacctgcagagccagccagggcatcagcaactacctggcctggttccagcagaaacctggaaaggcccctaagagcctgatctacgccgcttcttctctgcaaagcggcgtgccaagcaagttcagcggcagcggcagcggaacagacttcagcctgacaatttctagcctccagcctgaggattttgccacatactactgccagcagtacaacagctaccccatcaccttcggccagggcacaagactggaaatcaaggcggccgcaaccacgacgccagcgccgcggccaccaacaccggcgcccaccatcgcgtcgcagcccctgtccctgcgcccagaggcgtgccggccagcggcggggggcgcagtgcacacgagggggctggacttcgcctgtgatatctacatctgggcgcccttggccgggacttgtggggtccttctcctgtcactggttatcaccctttactgcaaacggggcagaaagaaactcctgtatatattcaaacaaccatttatgagaccagtacaaactactcaagaggaagatggctgtagctgccgatttccagaagaagaagaaggaggatgtgaactgagagtgaagttcagcaggagcgcagacgcccccgcgtaccagcagggccagaaccagctctataacgagctcaatctaggacgaagagaggagtacgatgttttggacaagagacgtggccgggaccctgagatggggggaaagccgagaaggaagaaccctcaggaaggcctgtacaatgaactgcagaaagataagatggcggaggcctacagtgagattgggatgaaaggcgagcgccggaggggcaaggggcacgatggcctttaccagggtctcagtacagccaccaaggacacctacgacgcccttcacatgcaggccctgccccctcgcggctctggcgagggaaggggttccctgcttacttgcggcgacgtcgaagagaatcccggtccgatggccctcccagtaactgccctccttttgcccctcgcactccttcttcatgccgctcgccccaactgggtcaacgtgattagcgatttgaagaaaatcgaggaccttatacagtctatgcatattgacgctacactgtatactgagagtgatgtacacccgtcctgtaaggtaacggccatgaaatgctttcttctggagctccaggtcatcagcttggagtctggggacgcaagcatccacgatacggttgaaaacctcatcatccttgcgaacaactctctctcatctaatggaaacgttacagagagtgggtgtaaggagtgcgaagagttggaagaaaaaaacatcaaagaatttcttcaatccttcgttcacatagtgcaaatgttcattaacacgtccactaccacacccgccccgaggccacctacgccggcaccgactatcgccagtcaacccctctctctgcgccccgaggcttgccggcctgcggctggtggggcggtccacacccggggcctggattttgcgtgcgatatatacatctgggcacctcttgccggcacctgcggagtgctgcttctctcactcgttattacgctgtactgc

SEQ ID NO: 2547 - DNA, 2148 bp, synthetic construct
  misc_feature 1..2148: note = Synthetic
  source 1..2148: mol_type = other DNA
atggccttaccagtgaccgccttgctcctgccgctggccttgctgctccacgccgccaggccggaggtgcagctgctggaaagcggaggcgacctggtgcaacctggaggcagcctgcggctgagctgcgccgcttctggcttcacctttagcacctacgccatgacatgggttagacaggcccctggcaagggcctggagtgggtcagcgccatcagcggcaccagcggctctacctactacgccgacagcgtgaagggcagattcaccatctccagagataattcaaagagcaccctgtacctgcacatgaacagcctgagaaccgaggacaccgccgtgtactattgcgctagaggcggctacaactggcactactactactacatggacgtgtggggaaaaggcacaacagtgaccgtgtcttctggcggaggaggcagcggcggtggcggcagtggcggaggcggcagcgagatcgtgctgacacagtcccctgacttccagagcgtgacccctaaggaaaaggtgacaatcacctgccgggcctctcagagcatcggcagcagcctgcactggtatcagcagaagcccgatcagtccccaaagctgctgatcaaatacgtgtcccaatctatcagcggcgtgcccagccggttttctggcagcggcagcggaacagacttcaccctgaccattaactccctggaggccgaggatgccgctgcctactattgtcaccagagcagcagcctgccttggacattcggccagggcaccaaggtggaaatcaaggcggccgcaaccacgacgccagcgccgcggccaccaacaccggcgcccaccatcgcgtcgcagcccctgtccctgcgcccagaggcgtgccggccagcggcggggggcgcagtgcacacgagggggctggacttcgcctgtgatatctacatctgggcgcccttggccgggacttgtggggtccttctcctgtcactggttatcaccctttactgcaaacggggcagaaagaaactcctgtatatattcaaacaaccatttatgagaccagtacaaactactcaagaggaagatggctgtagctgccgatttccagaagaagaagaaggaggatgtgaactgagagtgaagttcagcaggagcgcagacgcccccgcgtaccagcagggccagaaccagctctataacgagctcaatctaggacgaagagaggagtacgatgttttggacaagagacgtggccgggaccctgagatggggggaaagccgagaaggaagaaccctcaggaaggcctgtacaatgaactgcagaaagataagatggcggaggcctacagtgagattgggatgaaaggcgagcgccggaggggcaaggggcacgatggcctttaccagggtctcagtacagccaccaaggacacctacgacgcccttcacatgcaggccctgccccctcgcggctctggcgagggaaggggttccctgcttacttgcggcgacgtcgaagagaatcccggtccgatggccctcccagtaactgccctccttttgcccctcgcactccttcttcatgccgctcgccccaactgggtcaacgtgattagcgatttgaagaaaatcgaggaccttatacagtctatgcatattgacgctacactgtatactgagagtgatgtacacccgtcctgtaaggtaacggccatgaaatgctttcttctggagctccaggtcatcagcttggagtctggggacgcaagcatccacgatacggttgaaaacctcatcatccttgcgaacaactctctctcatctaatggaaacgttacagagagtgggtgtaaggagtgcgaagagttggaagaaaaaaacatcaaagaatttcttcaatccttcgttcacatagtgcaaatgttcattaacacgtccactaccacacccgccccgaggccacctacgccggcaccgactatcgccagtcaacccctctctctgcgccccgaggcttgccggcctgcggctggtggggcggtccacacccggggcctggattttgcgtgcgatatatacatctgggcacctcttgccggcacctgcggagtgctgcttctctcactcgttattacgctgtactgc

SEQ ID NO: 2548 - DNA, 2151 bp, synthetic construct
  misc_feature 1..2151: note = Synthetic
  source 1..2151: mol_type = other DNA
atggccttaccagtgaccgccttgctcctgccgctggccttgctgctccacgccgccaggccggaggtgcaactgctggaaagcggaggagatctggtgcagcccggcggctccctgcgcctgtcttgcgccgccagcggctttacattcagcacctacgccatgacatgggttagacaggcccctggaaaaggcctggaatgggtgtccgccatcagcggaaccagcggcagcacatactacgccgacagcgtgaagggcagattcaccatcagccgggacaacagcaagtccaccctgtacctgcacatgaacagcctgcggaccgaggacaccgccgtgtactattgcgctagaggcggttataattggcactactactactacatggacgtgtggggcaagggcacgaccgtgacagtgtccagcggcggcggaggcagcggcggaggaggctctggcggcggcggcagcgagatcgtgatgacccagtctcctgctacactgagcctgagccccggcgagcgggccaccctgagttgtagagccagccagagcgtgtcttctagctacctgagctggtatcagcaaaaacctggccttgctccaagactgctgatctacggcgcctctacaagagccaccggcatccccgccagatttagcggctctggcagcggcaccgacttcaccctgaccatctccagcctccagcctgaggatttcgccgtctactactgccagcaggattacaacctgcctcctaccttcggccagggcacaaaggtggaaattaaggcggccgcaaccacgacgccagcgccgcggccaccaacaccggcgcccaccatcgcgtcgcagcccctgtccctgcgcccagaggcgtgccggccagcggcggggggcgcagtgcacacgagggggctggacttcgcctgtgatatctacatctgggcgcccttggccgggacttgtggggtccttctcctgtcactggttatcaccctttactgcaaacggggcagaaagaaactcctgtatatattcaaacaaccatttatgagaccagtacaaactactcaagaggaagatggctgtagctgccgatttccagaagaagaagaaggaggatgtgaactgagagtgaagttcagcaggagcgcagacgcccccgcgtaccagcagggccagaaccagctctataacgagctcaatctaggacgaagagaggagtacgatgttttggacaagagacgtggccgggaccctgagatggggggaaagccgagaaggaagaaccctcaggaaggcctgtacaatgaactgcagaaagataagatggcggaggcctacagtgagattgggatgaaaggcgagcgccggaggggcaaggggcacgatggcctttaccagggtctcagtacagccaccaaggacacctacgacgcccttcacatgcaggccctgccccctcgcggctctggcgagggaaggggttccctgcttacttgcggcgacgtcgaagagaatcccggtccgatggccctcccagtaactgccctccttttgcccctcgcactccttcttcatgccgctcgccccaactgggtcaacgtgattagcgatttgaagaaaatcgaggaccttatacagtctatgcatattgacgctacactgtatactgagagtgatgtacacccgtcctgtaaggtaacggccatgaaatgctttcttctggagctccaggtcatcagcttggagtctggggacgcaagcatccacgatacggttgaaaacctcatcatccttgcgaacaactctctctcatctaatggaaacgttacagagagtgggtgtaaggagtgcgaagagttggaagaaaaaaacatcaaagaatttcttcaatccttcgttcacatagtgcaaatgttcattaacacgtccactaccacacccgccccgaggccacctacgccggcaccgactatcgccagtcaacccctctctctgcgccccgaggcttgccggcctgcggctggtggggcggtccacacccggggcctggattttgcgtgcgatatatacatctgggcacctcttgccggcacctgcggagtgctgcttctctcactcgttattacgctgtactgc

SEQ ID NO: 2549 - protein, 497 aa, synthetic construct
  REGION 1..497: note = Synthetic
MALPVTALLLPLALLLHAARPEIVLTQSPDFQSVTPKEKVTITCRASQSIGSSLHWYQQKPDQSPKLLIKFASQSFSGVPSRFSGSGSGTDFTLTIHSLEAEDAATYYCHQSSSLPWTFGQGTKVEIKGSTSGSGKPGSGEGSTKGQVQLVESGGGVVQPGRSLRLSCAASGFTFNNYDMYWVRQAPGKGLEWVAVTWYDGSNKYYADSVKGRFTISRDNSKNTLYLQMNSLRAEDTAVYYCARGDNWNDEHHYFYYMDVWGKGTTVTVSSAAATTTPAPRPPTPAPTIASQPLSLRPEACRPAAGGAVHTRGLDFACDIYIWAPLAGTCGVLLLSLVITLYCKRGRKKLLYIFKQPFMRPVQTTQEEDGCSCRFPEEEEGGCELRVKFSRSADAPAYQQGQNQLYNELNLGRREEYDVLDKRRGRDPEMGGKPRRKNPQEGLYNELQKDKMAEAYSEIGMKGERRRGKGHDGLYQGLSTATKDTYDALHMQALPPR

SEQ ID NO: 2550 - protein, 497 aa, synthetic construct
  REGION 1..497: note = Synthetic
MALPVTALLLPLALLLHAARPEIVLTQSPDFQSVTPKEKVTITCRASQSIGSSLHWYQQKPDQSPKLLIKFASQSFSGVPSRFSGSGSGTDFTLTIHSLEAEDAATYYCHQSSSLPWTFGQGTKVEIKGSTSGSGKPGSGEGSTKGQVQLVESGGGVVQPGRSLRLSCAASGFTFSNYDMHWVRQAPGKGLEWVTIIWHDASNKYYLDSVKGRFTISRDNSKNTLYLQMNSLRAEDTAVYYCARGDNWNDEHHYFYYMDVWGKGTTVTVSSAAATTTPAPRPPTPAPTIASQPLSLRPEACRPAAGGAVHTRGLDFACDIYIWAPLAGTCGVLLLSLVITLYCKRGRKKLLYIFKQPFMRPVQTTQEEDGCSCRFPEEEEGGCELRVKFSRSADAPAYQQGQNQLYNELNLGRREEYDVLDKRRGRDPEMGGKPRRKNPQEGLYNELQKDKMAEAYSEIGMKGERRRGKGHDGLYQGLSTATKDTYDALHMQALPPR

SEQ ID NO: 2551 - protein, 497 aa, synthetic construct
  REGION 1..497: note = Synthetic
MALPVTALLLPLALLLHAARPEIVLTQSPDFQSVTPKEKVTITCRASQSIGSSLHWYQQKPDQSPKLLIKFASQSFSGVPSRFSGSGSGTDFTLTIHSLEAEDAATYYCHQSSSLPWTFGQGTKVEIKGSTSGSGKPGSGEGSTKGQVQLVESGGGVVQPGRSLRLSCAASGFTFSNYDMHWVRQAPGKGLEWVTIIWHDGSNKYYLDSVKGRFTISRDNSKNTLYLQMNSLRAEDTAVYYCARGDNWNDEHHYFYYMDVWGKGTTVTVSSAAATTTPAPRPPTPAPTIASQPLSLRPEACRPAAGGAVHTRGLDFACDIYIWAPLAGTCGVLLLSLVITLYCKRGRKKLLYIFKQPFMRPVQTTQEEDGCSCRFPEEEEGGCELRVKFSRSADAPAYQQGQNQLYNELNLGRREEYDVLDKRRGRDPEMGGKPRRKNPQEGLYNELQKDKMAEAYSEIGMKGERRRGKGHDGLYQGLSTATKDTYDALHMQALPPR

SEQ ID NO: 2552 - protein, 491 aa, synthetic construct
  REGION 1..491: note = Synthetic
MALPVTALLLPLALLLHAARPQTVVTQEPSLSVSPGGTVTLTCGLSSGSVSTSYYPSWYQQTPGQAPRTLIYSTNIRSSGVPDRFSGSILGNKAALTITGAQADDESDYYCKLYMGSGIIFGSGTKVTVLGSTSGSGKPGSGEGSTKGEVQLLESGGGLVQPGGSLRLSCAASGFTFSIYAMSWVRQAPGKGLEWVSAISGGGDTTYYADSVKGRFTISRDNSKTTLDLQMNSLRAEDTAVYYCAKHTSYYMDVWGKGTTVTVSSAAATTTPAPRPPTPAPTIASQPLSLRPEACRPAAGGAVHTRGLDFACDIYIWAPLAGTCGVLLLSLVITLYCKRGRKKLLYIFKQPFMRPVQTTQEEDGCSCRFPEEEEGGCELRVKFSRSADAPAYQQGQNQLYNELNLGRREEYDVLDKRRGRDPEMGGKPRRKNPQEGLYNELQKDKMAEAYSEIGMKGERRRGKGHDGLYQGLSTATKDTYDALHMQALPPR

SEQ ID NO: 2553 - protein, 497 aa, synthetic construct
  REGION 1..497: note = Synthetic
MALPVTALLLPLALLLHAARPEIVLTQSPDFQSVTPKEKVTITCRASQSIGSSLHWYQQKPDQSPKLLIKFASQSFSGVPSRFSGSGSGTDFTLTIHSLEAEDAATYYCHQSSSLPWTFGQGTKVEIKGSTSGSGKPGSGEGSTKGQVQLVESGGGVVQPGRSLRLSCAASGFTFSNYDKHWVRQAPGKGLEWVAVIWYDGSNKYYADSVKGRFTISRDNSKNTLYLQMNSLRAEDTAMYYCARGDNWNDEHHYFYYMDVWGKGTTVTVSSAAATTTPAPRPPTPAPTIASQPLSLRPEACRPAAGGAVHTRGLDFACDIYIWAPLAGTCGVLLLSLVITLYCKRGRKKLLYIFKQPFMRPVQTTQEEDGCSCRFPEEEEGGCELRVKFSRSADAPAYQQGQNQLYNELNLGRREEYDVLDKRRGRDPEMGGKPRRKNPQEGLYNELQKDKMAEAYSEIGMKGERRRGKGHDGLYQGLSTATKDTYDALHMQALPPR

SEQ ID NO: 2554 - protein, 495 aa, synthetic construct
  REGION 1..495: note = Synthetic
MALPVTALLLPLALLLHAARPEIVLTQSPATLSLSPGERATLSCGASQSVYNSYLAWYQQKPGLAPRLLIYDASLRATGVPDRFSGSGSGTDFTLTISTLEPEDFAVYYCQQYGGSPMYTFGQGTKLEIKGSTSGSGKPGSGEGSTKGQVQLVQSGAEVKKPGASVKVSCKASGYTFTNYGFSWVRQAPGQGLDWMGWISAYNGYTNYTQKLQGRVTMTTDTSTTTAYMELRSLRSDDTAVYYCARRGLLYYYYSMDVWGKGTTVTVSSAAATTTPAPRPPTPAPTIASQPLSLRPEACRPAAGGAVHTRGLDFACDIYIWAPLAGTCGVLLLSLVITLYCKRGRKKLLYIFKQPFMRPVQTTQEEDGCSCRFPEEEEGGCELRVKFSRSADAPAYQQGQNQLYNELNLGRREEYDVLDKRRGRDPEMGGKPRRKNPQEGLYNELQKDKMAEAYSEIGMKGERRRGKGHDGLYQGLSTATKDTYDALHMQALPPR

SEQ ID NO: 2555 - protein, 491 aa, synthetic construct
  REGION 1..491: note = Synthetic
MALPVTALLLPLALLLHAARPQTVVTQEPSLSVSPGGTVTLTCGLSSGSVSTSDYPSWYQQTPGQAPRTLIYRTNTRSSGVPDRFSGSILGNKAALTITGAQADDESDYYCVLYMDSGIIFGSGTKVTVLGSTSGSGKPGSGEGSTKGEVQLLESGGGLVQPGGSLRLSCTASGFTFSSFAMSWVRQAPGKGLEWVSAMSGSGDTTYYADSVKGRFTISRDNSKTTLYLQMNSLRAEDTAVYSCAKHTTYYMDVWGKGTTVTVSSAAATTTPAPRPPTPAPTIASQPLSLRPEACRPAAGGAVHTRGLDFACDIYIWAPLAGTCGVLLLSLVITLYCKRGRKKLLYIFKQPFMRPVQTTQEEDGCSCRFPEEEEGGCELRVKFSRSADAPAYQQGQNQLYNELNLGRREEYDVLDKRRGRDPEMGGKPRRKNPQEGLYNELQKDKMAEAYSEIGMKGERRRGKGHDGLYQGLSTATKDTYDALHMQALPPR

SEQ ID NO: 2556 - protein, 491 aa, synthetic construct
  REGION 1..491: note = Synthetic
MALPVTALLLPLALLLHAARPQTVVTQEPSLSVSPGGTVTLTCGLSSGSVSTSDYPSWYQQTPGQAPRTLIYRTNTRSSGVPDRFSGSILGNKAALTITGAQADDESDYYCVLYMGSGIIFGSGTKVTVLGSTSGSGKPGSGEGSTKGEVQLLESGGGLVQPGGSLRLSCAASGFTFNTYAMSWVRQAPGKGLEWVSAMSGSGDTTYYADSVKGRFTISRDNSKTTLYLQMNSLRAEDTAVYSCAKHTSYYMDVWGKGTTVTVSSAAATTTPAPRPPTPAPTIASQPLSLRPEACRPAAGGAVHTRGLDFACDIYIWAPLAGTCGVLLLSLVITLYCKRGRKKLLYIFKQPFMRPVQTTQEEDGCSCRFPEEEEGGCELRVKFSRSADAPAYQQGQNQLYNELNLGRREEYDVLDKRRGRDPEMGGKPRRKNPQEGLYNELQKDKMAEAYSEIGMKGERRRGKGHDGLYQGLSTATKDTYDALHMQALPPR

SEQ ID NO: 2557 - protein, 491 aa, synthetic construct
  REGION 1..491: note = Synthetic
MALPVTALLLPLALLLHAARPQTVVTQEPSFSVSPGGTVTLTCGLYSDSVSTSYYPSWYQQTPGQAPRTLIYNTNTRSSGVPDRFSGSILGNKAALTITGAQADDESDYYCVLYMVSGIVFGSGTKVTVLGSTSGSGKPGSGEGSTKGEVQLLESGGDLVQPGGSLRLSCAASGFTFSTYAMSWVRQAPGKGLEWVSAISGSGENIYYADSVKGRFTISRDNSKNTLFLQMNSLRAEDTAVYYCAKHTSYYMDVWGKGTTVTVSSAAATTTPAPRPPTPAPTIASQPLSLRPEACRPAAGGAVHTRGLDFACDIYIWAPLAGTCGVLLLSLVITLYCKRGRKKLLYIFKQPFMRPVQTTQEEDGCSCRFPEEEEGGCELRVKFSRSADAPAYQQGQNQLYNELNLGRREEYDVLDKRRGRDPEMGGKPRRKNPQEGLYNELQKDKMAEAYSEIGMKGERRRGKGHDGLYQGLSTATKDTYDALHMQALPPR

SEQ ID NO: 2558 - protein, 497 aa, synthetic construct
  REGION 1..497: note = Synthetic
MALPVTALLLPLALLLHAARPQTVVTQEPSFSVSPGGTVTLTCGLSSGSVSTSYYPGWYQQTPGQAPRTLIYSTNTRSSGVPDRFSGSILGNKAALTITGAQADDESDYYCVLYMGSGMFIFGSGTKVTVLGSTSGSGKPGSGEGSTKGQVQLVESGGGVVQPGRSLRLSCAASGFTFSSYGMHWVRQAPGKGLEWVAVIWYDGINKYYADSVKGRFTISRDNSKNTLYLQMNSLRAEDTAVYYCARERLERRYYYYMDVWGKGTTVTVSSAAATTTPAPRPPTPAPTIASQPLSLRPEACRPAAGGAVHTRGLDFACDIYIWAPLAGTCGVLLLSLVITLYCKRGRKKLLYIFKQPFMRPVQTTQEEDGCSCRFPEEEEGGCELRVKFSRSADAPAYQQGQNQLYNELNLGRREEYDVLDKRRGRDPEMGGKPRRKNPQEGLYNELQKDKMAEAYSEIGMKGERRRGKGHDGLYQGLSTATKDTYDALHMQALPPR

SEQ ID NO: 2559 - protein, 491 aa, synthetic construct
  REGION 1..491: note = Synthetic
MALPVTALLLPLALLLHAARPQTVVTQEPSFSVSPGGTVTLTCALSSDSVSTSYFPSWYRQTPGQAPRTLIYNTNTRSSGVPDRFSGSILGNKAALTITGAQADDESDYYCVLYMGSGIIFGSGTKVTVLGSTSGSGKPGSGEGSTKGEVQLLESGGGLVQPGGSLRLSCAASGFTFSSFAMSWVRQAPGKGLEWVSAVSGSGDDTYYADSVKGRFTISRDNSKNTLYLQMNSLRAEDTAVYYCAKHTSYYLDVWGKGTTVTVSSAAATTTPAPRPPTPAPTIASQPLSLRPEACRPAAGGAVHTRGLDFACDIYIWAPLAGTCGVLLLSLVITLYCKRGRKKLLYIFKQPFMRPVQTTQEEDGCSCRFPEEEEGGCELRVKFSRSADAPAYQQGQNQLYNELNLGRREEYDVLDKRRGRDPEMGGKPRRKNPQEGLYNELQKDKMAEAYSEIGMKGERRRGKGHDGLYQGLSTATKDTYDALHMQALPPR

SEQ ID NO: 2560 - protein, 497 aa, synthetic construct
  REGION 1..497: note = Synthetic
MALPVTALLLPLALLLHAARPEIVLTQSPDFQSVTPKEKVTITCRASQSIGSSLHWYQQKPDQSPKLLIKFASQSFSGVPSRFSGSGSGTDFTLTINSLEAEDAATYFCHQSSSLPWTFGQGTKVEIKGSTSGSGKPGSGEGSTKGQVQLVESGGGVVQPGRSLRLSCAASGFNFSTFDIHWVRQAPGKGLEWVALIWYDGSYKYYADSVKGRFTISRDNSKNTLDLRMNSLRAEDTAVYYCARNDNWNDEHYYHYYMDVWGKGTTVTVSSAAATTTPAPRPPTPAPTIASQPLSLRPEACRPAAGGAVHTRGLDFACDIYIWAPLAGTCGVLLLSLVITLYCKRGRKKLLYIFKQPFMRPVQTTQEEDGCSCRFPEEEEGGCELRVKFSRSADAPAYQQGQNQLYNELNLGRREEYDVLDKRRGRDPEMGGKPRRKNPQEGLYNELQKDKMAEAYSEIGMKGERRRGKGHDGLYQGLSTATKDTYDALHMQALPPR

SEQ ID NO: 2561 - protein, 502 aa, synthetic construct
  REGION 1..502: note = Synthetic
MALPVTALLLPLALLLHAARPQTVVTQEPSFSVSPGGTVTLTCGLSSGSVSTSYFPSWYQQTPGQAPRTLIYITNTRSSGVPDRFSGSIIGNKAALTITGAQADDESDYFCVLYMGSGTWVFGGGTKLTVLGSTSGSGKPGSGEGSTKGEVHLLESGGGLVQPGGSLRLSCAASGFTFSSYAMNWVRQAPGKGLEWVSSISGSGSSSYYADSVKGRFTISRDNSKNTLYLQMNSLRAEDTAVYYCASRGFNSQYPPGYYYYYMDVWGKGTTVTVSSAAATTTPAPRPPTPAPTIASQPLSLRPEACRPAAGGAVHTRGLDFACDIYIWAPLAGTCGVLLLSLVITLYCKRGRKKLLYIFKQPFMRPVQTTQEEDGCSCRFPEEEEGGCELRVKFSRSADAPAYQQGQNQLYNELNLGRREEYDVLDKRRGRDPEMGGKPRRKNPQEGLYNELQKDKMAEAYSEIGMKGERRRGKGHDGLYQGLSTATKDTYDALHMQALPPR

SEQ ID NO: 2562 - protein, 489 aa, synthetic construct
  REGION 1..489: note = Synthetic
MALPVTALLLPLALLLHAARPEIVLTQSPDFQSVTPKEKVTITCRASQSIGSSLHWYQQKPDQSPKLLIKFASQSFSGVPSRFSGSGSGTDFTLTIHSLEAEDAATYYCHQSSSLPWTFGQGTKVEIKGSTSGSGKPGSGEGSTKGEVQLLESGGGLVQPGGSLRLSCAASGFTFSNYAMTWVRQAPGKGLEWVSAISGSGIGTYYADSVQGRFTTSRDNSKNTLYLQMNSLRAEDTAVYYCAKGGYNWKDVWGKGTTVTVSSAAATTTPAPRPPTPAPTIASQPLSLRPEACRPAAGGAVHTRGLDFACDIYIWAPLAGTCGVLLLSLVITLYCKRGRKKLLYIFKQPFMRPVQTTQEEDGCSCRFPEEEEGGCELRVKFSRSADAPAYQQGQNQLYNELNLGRREEYDVLDKRRGRDPEMGGKPRRKNPQEGLYNELQKDKMAEAYSEIGMKGERRRGKGHDGLYQGLSTATKDTYDALHMQALPPR

SEQ ID NO: 2563 - protein, 497 aa, synthetic construct
  REGION 1..497: note = Synthetic
MALPVTALLLPLALLLHAARPEIVLTQSPDFQSVTPKEKVTITCRASQSIGSSLHWYQQKPDQSPKLLIKFASQSFSGVPSRFSGSGSGTDFTLTIHSLEAEDAATYYCHQSSSLPWTFGQGTKVEIKGSTSGSGKPGSGEGSTKGQVQLVESGGGVVQPGRSLRLSCAASGFTFTNYDMHWVRQAPGKGLEWVTIIWHDGSNKYYLDSVRGRFTISRDNSKNTLYLQMNSLRAEDTAVYYCARGDNWNDEHHYFYYMDVWGKGTTVTVSSAAATTTPAPRPPTPAPTIASQPLSLRPEACRPAAGGAVHTRGLDFACDIYIWAPLAGTCGVLLLSLVITLYCKRGRKKLLYIFKQPFMRPVQTTQEEDGCSCRFPEEEEGGCELRVKFSRSADAPAYQQGQNQLYNELNLGRREEYDVLDKRRGRDPEMGGKPRRKNPQEGLYNELQKDKMAEAYSEIGMKGERRRGKGHDGLYQGLSTATKDTYDALHMQALPPR

SEQ ID NO: 2564 - protein, 497 aa, synthetic construct
  REGION 1..497: note = Synthetic
MALPVTALLLPLALLLHAARPEIVLTQSPATLSLSPGERATLSCRASQSVSSSLAWYQQKPGQAPRLLIYDASNRATGIPARFSGSGSGTDFTLTISSLEPEDFAVYYCQQRSNWPLTFGGGTKVEIKGSTSGSGKPGSGEGSTKGQVQLVESGGGVVQPGRSLRLSCAASGFTFSNYDMHWVRQAPGKGLEWVTIIWHDGSNKYYLDSVKGRFTISRDNSKNTLYLQMNSLRAEDTAVYYCARGDNWNDEHHYFYYMDVWGKGTTVTVSSAAATTTPAPRPPTPAPTIASQPLSLRPEACRPAAGGAVHTRGLDFACDIYIWAPLAGTCGVLLLSLVITLYCKRGRKKLLYIFKQPFMRPVQTTQEEDGCSCRFPEEEEGGCELRVKFSRSADAPAYQQGQNQLYNELNLGRREEYDVLDKRRGRDPEMGGKPRRKNPQEGLYNELQKDKMAEAYSEIGMKGERRRGKGHDGLYQGLSTATKDTYDALHMQALPPR

SEQ ID NO: 2565 - protein, 493 aa, synthetic construct
  REGION 1..493: note = Synthetic
MALPVTALLLPLALLLHAARPEIVLTQSPGTLSLSPGERATLSCRASQSVSSSYLAWYQQKPGQAPRLLIYGASSRATGIPDRFSGSGSGTDFTLTISRLEPEDFAVYYCQQYGSSWTFGQGTKVEIKGSTSGSGKPGSGEGSTKGEVQLVESGGGVVRPGGSLRLSCAASGFTFDDYGMSWVRQAPGKGLEWVSGINWNGGSTGYVDSVKGRFTISRDNAKNSLYLQMNSLRAEDTALYHCARPVTTDYYYYMDVWGKGTTVTVSSAAATTTPAPRPPTPAPTIASQPLSLRPEACRPAAGGAVHTRGLDFACDIYIWAPLAGTCGVLLLSLVITLYCKRGRKKLLYIFKQPFMRPVQTTQEEDGCSCRFPEEEEGGCELRVKFSRSADAPAYQQGQNQLYNELNLGRREEYDVLDKRRGRDPEMGGKPRRKNPQEGLYNELQKDKMAEAYSEIGMKGERRRGKGHDGLYQGLSTATKDTYDALHMQALPPR

SEQ ID NO: 2566 - protein, 501 aa, synthetic construct
  REGION 1..501: note = Synthetic
MALPVTALLLPLALLLHAARPEIVLTQSPGTLSLSPGERATLSCRASQSVSSSYLAWYQQKPGQAPRLLIYGASSRATGIPDRFSGSGSGTDFTLTISRLEPEDFAVYYCQQYGSSWTFGQGTKVEIKGSTSGSGKPGSGEGSTKGEVQLLESGGGLVQPGGSLRLSCAASGFTFSSYAMSWVRQAPGKGLEWVSAISGSGGSTYYADSVKGRFTISRDNSKNTLYLQMNSLRAEDTAVYYCAKKGTSYNWNDVHYYYYYYMDVWGKGTTVTVSSAAATTTPAPRPPTPAPTIASQPLSLRPEACRPAAGGAVHTRGLDFACDIYIWAPLAGTCGVLLLSLVITLYCKRGRKKLLYIFKQPFMRPVQTTQEEDGCSCRFPEEEEGGCELRVKFSRSADAPAYQQGQNQLYNELNLGRREEYDVLDKRRGRDPEMGGKPRRKNPQEGLYNELQKDKMAEAYSEIGMKGERRRGKGHDGLYQGLSTATKDTYDALHMQALPPR

SEQ ID NO: 2567 - protein, 495 aa, synthetic construct
  REGION 1..495: note = Synthetic
MALPVTALLLPLALLLHAARPEIVLTQSPGTLSLSPGERATLSCRASQSVSSSYLAWYQQKPGQAPRLLIYGASSRATGIPDRFSGSGSGTDFTLTISRLEPEDFAVYYCQQYGSSWTFGQGTKVEIKGSTSGSGKPGSGEGSTKGQLQLQESGPGLVKPSETLSLTCTVSGGSISSSSYYWGWIRQPPGKGLEWIGSIYYSGSTYYNPSLKSRVTISVDTSKNQFSLKLSSVTAADTAVYYCTTGTTAYYYYYYMDVWGKGTTVTVSSAAATTTPAPRPPTPAPTIASQPLSLRPEACRPAAGGAVHTRGLDFACDIYIWAPLAGTCGVLLLSLVITLYCKRGRKKLLYIFKQPFMRPVQTTQEEDGCSCRFPEEEEGGCELRVKFSRSADAPAYQQGQNQLYNELNLGRREEYDVLDKRRGRDPEMGGKPRRKNPQEGLYNELQKDKMAEAYSEIGMKGERRRGKGHDGLYQGLSTATKDTYDALHMQALPPR

SEQ ID NO: 2568 - protein, 494 aa, synthetic construct
  REGION 1..494: note = Synthetic
MALPVTALLLPLALLLHAARPEIVLTQSPGTLSLSPGERATLSCRASQSVSSSYLAWYQQKPGQAPRLLIYGASSRATGIPDRFSGSGSGTDFTLTISRLEPEDFAVYYCQQYGSSWTFGQGTKVEIKGSTSGSGKPGSGEGSTKGEVQLLESGGGLVQPGGSLRLSCAASGFTFSSYAMTWVRQAPGKGLEWVSAISGSGGSTYYADSVKGRFTISRDNSKNTLYLQMNSLRAEDTAVYYCARGGYNWHYYYYMDVWGKGTTVTVSSAAATTTPAPRPPTPAPTIASQPLSLRPEACRPAAGGAVHTRGLDFACDIYIWAPLAGTCGVLLLSLVITLYCKRGRKKLLYIFKQPFMRPVQTTQEEDGCSCRFPEEEEGGCELRVKFSRSADAPAYQQGQNQLYNELNLGRREEYDVLDKRRGRDPEMGGKPRRKNPQEGLYNELQKDKMAEAYSEIGMKGERRRGKGHDGLYQGLSTATKDTYDALHMQALPPR

SEQ ID NO: 2569 - protein, 498 aa, synthetic construct
  REGION 1..498: note = Synthetic
MALPVTALLLPLALLLHAARPEIVLTQSPDFQSVTPKEKVTITCRASQNIGSSLHWYQQKPDQSPKLLIKFASQSISGVPSRFSGSGSGTDFTLTINSLEAEDAAAYYCHQSSSLPWTFGQGTKVEIKGSTSGSGKPGSGEGSTKGQVQLVESGGGVVQPGRSLRLSCAASGFTFSSYDMHWVRQAPGKGLEWVSVIWYDGSNKKYGDSAKGRFTISRDNSKNTLDLQMNSLRAEDTAVYYCARGDNWNDEGGYYYYYMDVWGKGTTVTVSSAAATTTPAPRPPTPAPTIASQPLSLRPEACRPAAGGAVHTRGLDFACDIYIWAPLAGTCGVLLLSLVITLYCKRGRKKLLYIFKQPFMRPVQTTQEEDGCSCRFPEEEEGGCELRVKFSRSADAPAYQQGQNQLYNELNLGRREEYDVLDKRRGRDPEMGGKPRRKNPQEGLYNELQKDKMAEAYSEIGMKGERRRGKGHDGLYQGLSTATKDTYDALHMQALPPR

SEQ ID NO: 2570 - protein, 498 aa, synthetic construct
  REGION 1..498: note = Synthetic
MALPVTALLLPLALLLHAARPDIQMTQSPSSLSTSVGDRVTITCRASQGISNYLAWFQQKPGKAPKSLIYAASSLQSGVPSKFSGSGSGTDFSLTISSLQPEDFATYYCQQYNSYPITFGQGTRLEIKGSTSGSGKPGSGEGSTKGQVQLVESGGGVVQPGRSLRLSCAASGFTFSSYDMHWVRQAPGKGLEWVSVIWYDGSNKKYGDSAKGRFTISRDNSKNTLDLQMNSLRAEDTAVYYCARGDNWNDEGGYYYYYMDVWGKGTTVTVSSAAATTTPAPRPPTPAPTIASQPLSLRPEACRPAAGGAVHTRGLDFACDIYIWAPLAGTCGVLLLSLVITLYCKRGRKKLLYIFKQPFMRPVQTTQEEDGCSCRFPEEEEGGCELRVKFSRSADAPAYQQGQNQLYNELNLGRREEYDVLDKRRGRDPEMGGKPRRKNPQEGLYNELQKDKMAEAYSEIGMKGERRRGKGHDGLYQGLSTATKDTYDALHMQALPPR

SEQ ID NO: 2571 - protein, 495 aa, synthetic construct
  REGION 1..495: note = Synthetic
MALPVTALLLPLALLLHAARPEIVLTQSPDFQSVTPKEKVTITCRASQNIGSSLHWYQQKPDQSPKLLIKFASQSISGVPSRFSGSGSGTDFTLTINSLEAEDAAAYYCHQSSSLPWTFGQGTKVEIKGSTSGSGKPGSGEGSTKGQVQLVQSGAEVKKSGASVKVSCKASGYTLTSYGISWVRQAPGQGLEWMGWISAYNGNINYAQKFQGRVTMTTDTSTSTAYMELRSLRSDDTAVYYCVRDGDRYNWNHSYMDVWGKGTTVTVSSAAATTTPAPRPPTPAPTIASQPLSLRPEACRPAAGGAVHTRGLDFACDIYIWAPLAGTCGVLLLSLVITLYCKRGRKKLLYIFKQPFMRPVQTTQEEDGCSCRFPEEEEGGCELRVKFSRSADAPAYQQGQNQLYNELNLGRREEYDVLDKRRGRDPEMGGKPRRKNPQEGLYNELQKDKMAEAYSEIGMKGERRRGKGHDGLYQGLSTATKDTYDALHMQALPPR

SEQ ID NO: 2572 - protein, 495 aa, synthetic construct
  REGION 1..495: note = Synthetic
MALPVTALLLPLALLLHAARPDIQMTQSPSSLSTSVGDRVTITCRASQGISNYLAWFQQKPGKAPKSLIYAASSLQSGVPSKFSGSGSGTDFSLTISSLQPEDFATYYCQQYNSYPITFGQGTRLEIKGSTSGSGKPGSGEGSTKGQVQLVQSGAEVKKSGASVKVSCKASGYTLTSYGISWVRQAPGQGLEWMGWISAYNGNINYAQKFQGRVTMTTDTSTSTAYMELRSLRSDDTAVYYCVRDGDRYNWNHSYMDVWGKGTTVTVSSAAATTTPAPRPPTPAPTIASQPLSLRPEACRPAAGGAVHTRGLDFACDIYIWAPLAGTCGVLLLSLVITLYCKRGRKKLLYIFKQPFMRPVQTTQEEDGCSCRFPEEEEGGCELRVKFSRSADAPAYQQGQNQLYNELNLGRREEYDVLDKRRGRDPEMGGKPRRKNPQEGLYNELQKDKMAEAYSEIGMKGERRRGKGHDGLYQGLSTATKDTYDALHMQALPPR

SEQ ID NO: 2573 - protein, 494 aa, synthetic construct
  REGION 1..494: note = Synthetic
MALPVTALLLPLALLLHAARPEIVLTQSPDFQSVTPKEKVTITCRASQSIGSSLHWYQQKPDQSPKLLIKYVSQSISGVPSRFSGSGSGTDFTLTINSLEAEDAAAYYCHQSSSLPWTFGQGTKVEIKGSTSGSGKPGSGEGSTKGEVQLLESGGDLVQPGGSLRLSCAASGFTFSTYAMTWVRQAPGKGLEWVSAISGTSGSTYYADSVKGRFTISRDNSKSTLYLHMNSLRTEDTAVYYCARGGYNWHYYYYMDVWGKGTTVTVSSAAATTTPAPRPPTPAPTIASQPLSLRPEACRPAAGGAVHTRGLDFACDIYIWAPLAGTCGVLLLSLVITLYCKRGRKKLLYIFKQPFMRPVQTTQEEDGCSCRFPEEEEGGCELRVKFSRSADAPAYQQGQNQLYNELNLGRREEYDVLDKRRGRDPEMGGKPRRKNPQEGLYNELQKDKMAEAYSEIGMKGERRRGKGHDGLYQGLSTATKDTYDALHMQALPPR

SEQ ID NO: 2574 - protein, 495 aa, synthetic construct
  REGION 1..495: note = Synthetic
MALPVTALLLPLALLLHAARPEIVMTQSPATLSLSPGERATLSCRASQSVSSSYLSWYQQKPGLAPRLLIYGASTRATGIPARFSGSGSGTDFTLTISSLQPEDFAVYYCQQDYNLPPTFGQGTKVEIKGSTSGSGKPGSGEGSTKGEVQLLESGGDLVQPGGSLRLSCAASGFTFSTYAMTWVRQAPGKGLEWVSAISGTSGSTYYADSVKGRFTISRDNSKSTLYLHMNSLRTEDTAVYYCARGGYNWHYYYYMDVWGKGTTVTVSSAAATTTPAPRPPTPAPTIASQPLSLRPEACRPAAGGAVHTRGLDFACDIYIWAPLAGTCGVLLLSLVITLYCKRGRKKLLYIFKQPFMRPVQTTQEEDGCSCRFPEEEEGGCELRVKFSRSADAPAYQQGQNQLYNELNLGRREEYDVLDKRRGRDPEMGGKPRRKNPQEGLYNELQKDKMAEAYSEIGMKGERRRGKGHDGLYQGLSTATKDTYDALHMQALPPR

SEQ ID NO: 2575 - DNA, 1491 bp, synthetic construct
  misc_feature 1..1491: note = Synthetic
  source 1..1491: mol_type = other DNA
atggccttaccagtgaccgccttgctcctgccgctggccttgctgctccacgccgccaggccggaaattgtgctgactcagtctccagactttcagtctgtgactccaaaggagaaagtcaccatcacctgccgggccagtcagagcattggtagtagcttacactggtaccagcagaaaccagatcagtctccaaagctcctcatcaagtttgcttcccagtccttctcaggggtcccctcgaggttcagtggcagtggatctgggacagatttcaccctcaccatccatagcctggaagctgaagatgctgcaacgtattactgtcatcagagtagtagtttaccgtggacgttcggccaagggaccaaggtggaaatcaaaggcagcaccagcggcagcggcaagcccggctccggagagggcagcaccaagggccaggtgcagctggtggagtctgggggaggcgtggtccagcctgggaggtccctgagactctcctgtgcagcgtctggattcaccttcaataattatgacatgtactgggtccgccaggccccaggcaaggggctggagtgggtggcagttacatggtatgatggaagtaataaatactatgcagactccgtgaagggccgattcaccatctccagagacaattccaagaacacgctgtatctgcaaatgaacagcctgagagccgaggacacggctgtgtattactgtgcgagaggtgacaactggaatgacgaacaccactatttttactacatggacgtctggggcaaagggaccacggtcaccgtctcctcagcggccgcaaccacgacgccagcgccgcggccaccaacaccggcgcccaccatcgcgtcgcagcccctgtccctgcgcccagaggcgtgccggccagcggcggggggcgcagtgcacacgagggggctggacttcgcctgtgatatctacatctgggcgcccttggccgggacttgtggggtccttctcctgtcactggttatcaccctttactgcaaacggggcagaaagaaactcctgtatatattcaaacaaccatttatgagaccagtacaaactactcaagaggaagatggctgtagctgccgatttccagaagaagaagaaggaggatgtgaactgagagtgaagttcagcaggagcgcagacgcccccgcgtaccagcagggccagaaccagctctataacgagctcaatctaggacgaagagaggagtacgatgttttggacaagagacgtggccgggaccctgagatggggggaaagccgagaaggaagaaccctcaggaaggcctgtacaatgaactgcagaaagataagatggcggaggcctacagtgagattgggatgaaaggcgagcgccggaggggcaaggggcacgatggcctttaccagggtctcagtacagccaccaaggacacctacgacgcccttcacatgcaggccctgccccctcgc

SEQ ID NO: 2576 - DNA, 1491 bp, synthetic construct
  misc_feature 1..1491: note = Synthetic
  source 1..1491: mol_type = other DNA
atggccttaccagtgaccgccttgctcctgccgctggccttgctgctccacgccgccaggccggaaattgtgctgactcagtctccagactttcagtctgtgactccaaaggagaaagtcaccatcacctgccgggccagtcagagcattggtagtagcttacactggtaccagcagaaaccagatcagtctccaaagctcctcatcaagtttgcttcccagtccttctcaggggtcccctcgaggttcagtggcagtggatctgggacagatttcaccctcaccatccatagcctggaagctgaagatgctgcaacgtattactgtcatcagagtagtagtttaccgtggacgttcggccaagggaccaaggtggaaatcaaaggcagcaccagcggcagcggcaagcccggctccggagagggcagcaccaagggccaggtgcagctggtggagtctgggggaggcgtggtccagcctgggaggtccctgagactctcctgtgcagcgtctgggttcaccttcagtaactatgacatgcactgggtccgccaggccccaggcaaggggctggagtgggtgacaattatatggcatgatgcaagtaataaatattatttagactccgtgaagggccgattcaccatctccagagacaattccaagaacacgctgtatctgcaaatgaacagcctgagagccgaggacacggctgtgtattactgtgcgagaggtgacaactggaacgacgaacaccactacttctactacatggacgtctggggcaaagggaccacggtcaccgtctcctcagcggccgcaaccacgacgccagcgccgcggccaccaacaccggcgcccaccatcgcgtcgcagcccctgtccctgcgcccagaggcgtgccggccagcggcggggggcgcagtgcacacgagggggctggacttcgcctgtgatatctacatctgggcgcccttggccgggacttgtggggtccttctcctgtcactggttatcaccctttactgcaaacggggcagaaagaaactcctgtatatattcaaacaaccatttatgagaccagtacaaactactcaagaggaagatggctgtagctgccgatttccagaagaagaagaaggaggatgtgaactgagagtgaagttcagcaggagcgcagacgcccccgcgtaccagcagggccagaaccagctctataacgagctcaatctaggacgaagagaggagtacgatgttttggacaagagacgtggccgggaccctgagatggggggaaagccgagaaggaagaaccctcaggaaggcctgtacaatgaactgcagaaagataagatggcggaggcctacagtgagattgggatgaaaggcgagcgccggaggggcaaggggcacgatggcctttaccagggtctcagtacagccaccaaggacacctacgacgcccttcacatgcaggccctgccccctcgc

SEQ ID NO: 2577 - DNA, 1491 bp, synthetic construct
  misc_feature 1..1491: note = Synthetic
  source 1..1491: mol_type = other DNA
atggccttaccagtgaccgccttgctcctgccgctggccttgctgctccacgccgccaggccggaaattgtgctgactcagtctccagactttcagtctgtgactccaaaggagaaagtcaccatcacctgccgggccagtcagagcattggtagtagcttacactggtaccagcagaaaccagatcagtctccaaagctcctcatcaagtttgcttcccagtccttctcaggggtcccctcgaggttcagtggcagtggatctgggacagatttcaccctcaccatccatagcctggaagctgaagatgctgcaacgtattactgtcatcagagtagtagtttaccgtggacgttcggccaagggaccaaggtggaaatcaaaggcagcaccagcggcagcggcaagcccggctccggagagggcagcaccaagggccaggtgcagctggtggagtctgggggaggcgtggtccagcctgggaggtccctgagactctcctgtgcagcgtctgggttcaccttcagtaactatgacatgcactgggtccgccaggccccaggcaaggggctggagtgggtgacaattatatggcatgatggaagtaataaatattatttagactccgtgaagggccgattcaccatctccagagacaattccaagaacacgctgtatctgcaaatgaacagcctgagagccgaggacacggctgtgtattactgtgcgagaggtgacaactggaacgacgaacaccactacttctactacatggacgtctggggcaaagggaccacggtcaccgtctcctcagcggccgcaaccacgacgccagcgccgcggccaccaacaccggcgcccaccatcgcgtcgcagcccctgtccctgcgcccagaggcgtgccggccagcggcggggggcgcagtgcacacgagggggctggacttcgcctgtgatatctacatctgggcgcccttggccgggacttgtggggtccttctcctgtcactggttatcaccctttactgcaaacggggcagaaagaaactcctgtatatattcaaacaaccatttatgagaccagtacaaactactcaagaggaagatggctgtagctgccgatttccagaagaagaagaaggaggatgtgaactgagagtgaagttcagcaggagcgcagacgcccccgcgtaccagcagggccagaaccagctctataacgagctcaatctaggacgaagagaggagtacgatgttttggacaagagacgtggccgggaccctgagatggggggaaagccgagaaggaagaaccctcaggaaggcctgtacaatgaactgcagaaagataagatggcggaggcctacagtgagattgggatgaaaggcgagcgccggaggggcaaggggcacgatggcctttaccagggtctcagtacagccaccaaggacacctacgacgcccttcacatgcaggccctgccccctcgc

SEQ ID NO: 2578 - DNA, 1473 bp, synthetic construct
  misc_feature 1..1473: note = Synthetic
  source 1..1473: mol_type = other DNA
atggccttaccagtgaccgccttgctcctgccgctggccttgctgctccacgccgccaggccgcagactgtggtgacccaggagccatcgctctcagtgtcccctggagggacagtcacactcacttgtggcttgagctctggctcagtctctactagttactaccccagctggtaccagcagaccccaggccaggctccacgcacgctcatctacagcacaaatattcggtcttctggggtccctgatcgcttctctggctccatccttgggaacaaagctgccctcaccatcacgggggcccaggcagatgatgaatctgattattattgtaagctgtatatgggaagtggcattattttcggcagtggaaccaaggtcactgtcctaggcagcaccagcggcagcggcaagcccggctccggagagggcagcaccaagggcgaggtgcagctgctggagtctgggggaggcttggtacagcctggggggtccctgagactctcctgtgcagcctctggattcacctttagcatctatgccatgagctgggtccgccaggctccagggaaggggctggagtgggtctcagctattagtggtggtggtgataccacatactacgcagactccgtgaagggccggttcaccatctccagagacaattccaagaccacgctggatctgcaaatgaacagcctgagagccgaggacacggccgtatattactgtgcgaaacacactagctactacatggacgtctggggcaaagggaccacggtcaccgtctcctcagcggccgcaaccacgacgccagcgccgcggccaccaacaccggcgcccaccatcgcgtcgcagcccctgtccctgcgcccagaggcgtgccggccagcggcggggggcgcagtgcacacgagggggctggacttcgcctgtgatatctacatctgggcgcccttggccgggacttgtggggtccttctcctgtcactggttatcaccctttactgcaaacggggcagaaagaaactcctgtatatattcaaacaaccatttatgagaccagtacaaactactcaagaggaagatggctgtagctgccgatttccagaagaagaagaaggaggatgtgaactgagagtgaagttcagcaggagcgcagacgcccccgcgtaccagcagggccagaaccagctctataacgagctcaatctaggacgaagagaggagtacgatgttttggacaagagacgtggccgggaccctgagatggggggaaagccgagaaggaagaaccctcaggaaggcctgtacaatgaactgcagaaagataagatggcggaggcctacagtgagattgggatgaaaggcgagcgccggaggggcaaggggcacgatggcctttaccagggtctcagtacagccaccaaggacacctacgacgcccttcacatgcaggccctgccccctcgc

SEQ ID NO: 2579 - DNA, 1491 bp, synthetic construct
  misc_feature 1..1491: note = Synthetic
  source 1..1491: mol_type = other DNA
atggccttaccagtgaccgccttgctcctgccgctggccttgctgctccacgccgccaggccggaaattgtgctgactcagtctccagactttcagtctgtgactccaaaggagaaagtcaccatcacctgccgggccagtcagagcattggtagtagcttacactggtaccagcagaaaccagatcagtctccaaagctcctcatcaagtttgcttcccagtccttctcaggggtcccctcgaggttcagtggcagtggatctgggacagatttcaccctcaccatccatagcctggaagctgaagatgctgcaacgtattactgtcatcagagtagtagtttaccgtggacgttcggccaagggaccaaggtggaaatcaaaggcagcaccagcggcagcggcaagcccggctccggagagggcagcaccaagggccaggtgcagctggtggagtctgggggaggcgtggtccagcctgggaggtccctgagactctcctgtgcagcgtctggattcaccttcagtaactatgacaagcactgggtccgccaggccccaggcaaggggctggagtgggtggcagttatatggtatgatggaagtaataagtactatgcagactccgtgaagggccgattcaccatttccagagacaattccaagaacacgctgtatctacaaatgaacagcctgagagccgaggacacggctatgtattactgtgcgagaggtgacaactggaacgacgaacaccactacttctactacatggacgtctggggcaaagggaccacggtcaccgtctcctcagcggccgcaaccacgacgccagcgccgcggccaccaacaccggcgcccaccatcgcgtcgcagcccctgtccctgcgcccagaggcgtgccggccagcggcggggggcgcagtgcacacgagggggctggacttcgcctgtgatatctacatctgggcgcccttggccgggacttgtggggtccttctcctgtcactggttatcaccctttactgcaaacggggcagaaagaaactcctgtatatattcaaacaaccatttatgagaccagtacaaactactcaagaggaagatggctgtagctgccgatttccagaagaagaagaaggaggatgtgaactgagagtgaagttcagcaggagcgcagacgcccccgcgtaccagcagggccagaaccagctctataacgagctcaatctaggacgaagagaggagtacgatgttttggacaagagacgtggccgggaccctgagatggggggaaagccgagaaggaagaaccctcaggaaggcctgtacaatgaactgcagaaagataagatggcggaggcctacagtgagattgggatgaaaggcgagcgccggaggggcaaggggcacgatggcctttaccagggtctcagtacagccaccaaggacacctacgacgcccttcacatgcaggccctgccccctcgc

SEQ ID NO: 2580 - DNA, 1485 bp, synthetic construct
  misc_feature 1..1485: note = Synthetic
  source 1..1485: mol_type = other DNA
atggccttaccagtgaccgccttgctcctgccgctggccttgctgctccacgccgccaggccggaaattgtgttgacgcagtctccagccaccctgtctttgtctccaggggaaagagccaccctctcctgcggggccagtcagagtgtttacaacagttacttagcctggtaccagcagaaacctggcctggcgcccaggctcctcatctatgatgcatccctcagggccactggcgtcccagacaggttcagtggcagtgggtctgggacagacttcactctcaccatcagcacactggagcctgaagattttgcagtgtattactgtcagcagtatggtggctcacccatgtacacttttggccaggggaccaagctggagatcaaaggcagcaccagcggcagcggcaagcccggctccggagagggcagcaccaagggccaggttcagttggtacagtctggagctgaggtgaagaagcctggggcctcagtgaaggtctcctgtaaggcttctggttacacctttaccaactatggtttcagctgggtgcgacaggcccctggacaagggcttgactggatgggatggatcagcgcttacaatggttacacaaattatacacagaaactccagggcagagtcaccatgaccactgacacatccacgaccacagcctacatggagctgaggagcctgagatctgacgacacggccgtctattactgtgcgagaagaggactactctactactactactccatggacgtctggggcaaagggaccacggtcaccgtctcctcagcggccgcaaccacgacgccagcgccgcggccaccaacaccggcgcccaccatcgcgtcgcagcccctgtccctgcgcccagaggcgtgccggccagcggcggggggcgcagtgcacacgagggggctggacttcgcctgtgatatctacatctgggcgcccttggccgggacttgtggggtccttctcctgtcactggttatcaccctttactgcaaacggggcagaaagaaactcctgtatatattcaaacaaccatttatgagaccagtacaaactactcaagaggaagatggctgtagctgccgatttccagaagaagaagaaggaggatgtgaactgagagtgaagttcagcaggagcgcagacgcccccgcgtaccagcagggccagaaccagctctataacgagctcaatctaggacgaagagaggagtacgatgttttggacaagagacgtggccgggaccctgagatggggggaaagccgagaaggaagaaccctcaggaaggcctgtacaatgaactgcagaaagataagatggcggaggcctacagtgagattgggatgaaaggcgagcgccggaggggcaaggggcacgatggcctttaccagggtctcagtacagccaccaaggacacctacgacgcccttcacatgcaggccctgccccctcgc

SEQ ID NO: 2581 - DNA, 1473 bp, synthetic construct
  misc_feature 1..1473: note = Synthetic
  source 1..1473: mol_type = other DNA
atggccttaccagtgaccgccttgctcctgccgctggccttgctgctccacgccgccaggccgcagactgtggtgacccaggagccatcgctctcagtgtcccctggagggacagtcacactcacttgtggcttgagctctggctcagtctctactagtgactaccccagctggtaccagcagaccccaggccaggctccacgcacgctcatctacagaacaaacactcgctcttctggggtccctgatcgcttctctggctccatccttgggaacaaagctgccctcaccatcacgggggcccaggcagatgatgaatctgattattactgtgtgctgtatatggatagtggcattattttcggcagtggaaccaaggtcactgtcctaggcagcaccagcggcagcggcaagcccggctccggagagggcagcaccaagggcgaggtgcagctgctggagtctgggggaggcctggtacagcctggggggtccctgagactctcctgtacagcctctggattcacctttagcagctttgccatgagctgggtccgccaggctccagggaaggggctggagtgggtctcagctatgagtggtagtggtgataccacatactacgcagactccgtgaagggccggttcaccatctcccgagacaattccaagaccacgctgtatctgcaaatgaacagcctgagagccgaggacacggccgtatattcctgtgcgaagcacactacctactacatggacgtctggggcaaagggaccacggtcaccgtctcctcagcggccgcaaccacgacgccagcgccgcggccaccaacaccggcgcccaccatcgcgtcgcagcccctgtccctgcgcccagaggcgtgccggccagcggcggggggcgcagtgcacacgagggggctggacttcgcctgtgatatctacatctgggcgcccttggccgggacttgtggggtccttctcctgtcactggttatcaccctttactgcaaacggggcagaaagaaactcctgtatatattcaaacaaccatttatgagaccagtacaaactactcaagaggaagatggctgtagctgccgatttccagaagaagaagaaggaggatgtgaactgagagtgaagttcagcaggagcgcagacgcccccgcgtaccagcagggccagaaccagctctataacgagctcaatctaggacgaagagaggagtacgatgttttggacaagagacgtggccgggaccctgagatggggggaaagccgagaaggaagaaccctcaggaaggcctgtacaatgaactgcagaaagataagatggcggaggcctacagtgagattgggatgaaaggcgagcgccggaggggcaaggggcacgatggcctttaccagggtctcagtacagccaccaaggacacctacgacgcccttcacatgcaggccctgccccctcgc

SEQ ID NO: 2582 - DNA, 1473 bp, synthetic construct
  misc_feature 1..1473: note = Synthetic
  source 1..1473: mol_type = other DNA
atggccttaccagtgaccgccttgctcctgccgctggccttgctgctccacgccgccaggccgcagactgtggtgacccaggagccatcgctctcagtgtcccctggagggacagtcacactcacttgtggcttgagctctggctcagtctctactagtgactaccccagttggtaccagcagaccccaggccaggctccacgcacgctcatctacagaacaaacactcgctcttctggggtccctgatcgcttctctggctccatccttgggaacaaagctgccctcaccatcacgggggcccaggcagatgatgaatctgattattactgtgtgctgtatatgggtagtggcattattttcggcagtggaaccaaggtcactgtcctaggcagcaccagcggcagcggcaagcccggctccggagagggcagcaccaagggcgaggtgcagctgctggagtctgggggaggcttggtacagcctggggggtccctgagactctcctgtgcagcctctggattcacctttaacacctatgccatgagctgggtccgccaggctccagggaaggggctggagtgggtctcagctatgagtggtagtggtgataccacatactacgcagactccgtgaagggccggttcaccatctccagagacaattccaagaccactctgtatctgcaaatgaacagcctgagagccgaggacacggccgtatattcctgtgcgaaacacacttcctactacatggacgtctggggcaaagggaccacggtcaccgtctcctcagcggccgcaaccacgacgccagcgccgcggccaccaacaccggcgcccaccatcgcgtcgcagcccctgtccctgcgcccagaggcgtgccggccagcggcggggggcgcagtgcacacgagggggctggacttcgcctgtgatatctacatctgggcgcccttggccgggacttgtggggtccttctcctgtcactggttatcaccctttactgcaaacggggcagaaagaaactcctgtatatattcaaacaaccatttatgagaccagtacaaactactcaagaggaagatggctgtagctgccgatttccagaagaagaagaaggaggatgtgaactgagagtgaagttcagcaggagcgcagacgcccccgcgtaccagcagggccagaaccagctctataacgagctcaatctaggacgaagagaggagtacgatgttttggacaagagacgtggccgggaccctgagatggggggaaagccgagaaggaagaaccctcaggaaggcctgtacaatgaactgcagaaagataagatggcggaggcctacagtgagattgggatgaaaggcgagcgccggaggggcaaggggcacgatggcctttaccagggtctcagtacagccaccaaggacacctacgacgcccttcacatgcaggccctgccccctcgc

SEQ ID NO: 2583 - DNA, 1473 bp, synthetic construct
  misc_feature 1..1473: note = Synthetic
  source 1..1473: mol_type = other DNA
atggccttaccagtgaccgccttgctcctgccgctggccttgctgctccacgccgccaggccgcagactgtggtgacccaggagccatcgttctcagtgtcccctggagggacagtcacactcacttgtggcttatactctgactcagtctctactagttactaccccagctggtaccagcagaccccaggccaggctccacgcacgctcatctacaacacaaacactcgctcttctggggtccctgatcgcttctctggctccatccttgggaacaaagctgccctcaccatcacgggggcccaggcagatgatgaatctgattattactgtgtactatatatggttagtggcattgttttcggcagtggaaccaaggtcactgtcctgggcagcaccagcggcagcggcaagcccggctccggagagggcagcaccaagggcgaggtccaattattggagtctgggggagacttggtacagcctggggggtccctgagactctcctgtgcagcctctggattcacctttagcacctatgccatgagctgggtccgccaggctccagggaaggggctggaatgggtctcagctattagtggtagtggtgaaaacatatactacgcagactccgtgaagggccggttcaccatctccagagacaattccaagaacacgctatttctacaaatgaacagcctgagagccgaggacacggccgtatattactgtgcgaaacacactagctattacatggacgtctggggcaaagggaccacggtcaccgtctcctcagcggccgcaaccacgacgccagcgccgcggccaccaacaccggcgcccaccatcgcgtcgcagcccctgtccctgcgcccagaggcgtgccggccagcggcggggggcgcagtgcacacgagggggctggacttcgcctgtgatatctacatctgggcgcccttggccgggacttgtggggtccttctcctgtcactggttatcaccctttactgcaaacggggcagaaagaaactcctgtatatattcaaacaaccatttatgagaccagtacaaactactcaagaggaagatggctgtagctgccgatttccagaagaagaagaaggaggatgtgaactgagagtgaagttcagcaggagcgcagacgcccccgcgtaccagcagggccagaaccagctctataacgagctcaatctaggacgaagagaggagtacgatgttttggacaagagacgtggccgggaccctgagatggggggaaagccgagaaggaagaaccctcaggaaggcctgtacaatgaactgcagaaagataagatggcggaggcctacagtgagattgggatgaaaggcgagcgccggaggggcaaggggcacgatggcctttaccagggtctcagtacagccaccaaggacacctacgacgcccttcacatgcaggccctgccccctcgc

SEQ ID NO: 2584 - DNA, 1491 bp, synthetic construct
  misc_feature 1..1491: note = Synthetic
  source 1..1491: mol_type = other DNA
atggccttaccagtgaccgccttgctcctgccgctggccttgctgctccacgccgccaggccgcagactgtggtgacccaggagccatcgttctcagtgtcccctggagggacagtcacactcacttgtggcttgagctctggctcagtctctactagttactaccccggctggtaccagcagaccccaggccaggctccacgcacgctcatctacagcacaaacactcgctcttctggggtccctgatcgcttctctggctccatccttgggaacaaagctgccctcaccatcacgggggcccaggcagatgatgaatctgattattactgtgtgctatatatgggtagtggcatgtttattttcggcagtggaaccaaggtcactgtcctaggcagcaccagcggcagcggcaagcccggctccggagagggcagcaccaagggccaggtgcagctggtggagtctgggggaggcgtggtccagcctgggaggtccctgagactctcctgtgcagcgtctggattcaccttcagtagttatggcatgcactgggtccgccaggctccaggcaaggggctggagtgggtggcagttatatggtatgatggaattaataaatactatgcagactccgtgaagggccgattcaccatctccagagacaattccaagaacacgctgtatctgcaaatgaacagcctgagagccgaagacacggctgtgtattactgtgcgagagaacggctggaacgaaggtactactactacatggacgtctggggcaaagggaccacggtcaccgtctcctcagcggccgcaaccacgacgccagcgccgcggccaccaacaccggcgcccaccatcgcgtcgcagcccctgtccctgcgcccagaggcgtgccggccagcggcggggggcgcagtgcacacgagggggctggacttcgcctgtgatatctacatctgggcgcccttggccgggacttgtggggtccttctcctgtcactggttatcaccctttactgcaaacggggcagaaagaaactcctgtatatattcaaacaaccatttatgagaccagtacaaactactcaagaggaagatggctgtagctgccgatttccagaagaagaagaaggaggatgtgaactgagagtgaagttcagcaggagcgcagacgcccccgcgtaccagcagggccagaaccagctctataacgagctcaatctaggacgaagagaggagtacgatgttttggacaagagacgtggccgggaccctgagatggggggaaagccgagaaggaagaaccctcaggaaggcctgtacaatgaactgcagaaagataagatggcggaggcctacagtgagattgggatgaaaggcgagcgccggaggggcaaggggcacgatggcctttaccagggtctcagtacagccaccaaggacacctacgacgcccttcacatgcaggccctgccccctcgc

SEQ ID NO: 2585 - DNA, 1473 bp, synthetic construct
  misc_feature 1..1473: note = Synthetic
  source 1..1473: mol_type = other DNA
atggccttaccagtgaccgccttgctcctgccgctggccttgctgctccacgccgccaggccgcagactgtggtgacccaggagccatcgttctcagtgtcccctggagggacagtcacactcacttgtgccttgagctctgactcagtctctactagttactttcccagctggtaccggcagaccccaggccaggctccacgcacgctcatctacaacacaaacactcgctcttctggggtccctgatcgcttctctggctccatccttgggaacaaagctgccctcaccatcacgggggcccaggcagatgatgaatctgattattactgtgtgctatatatgggtagtggcattattttcggcagtggaaccaaggtcactgtcctaggcagcaccagcggcagcggcaagcccggctccggagagggcagcaccaagggcgaggtgcagttgttggagtctgggggaggcttggtacagcctggggggtccctgagactctcctgtgcagcctctggattcacctttagcagctttgccatgagctgggtccgccaggctccagggaaggggctggaatgggtctcagctgttagtggtagtggtgatgacacatactacgcagactccgtgaagggccggttcaccatctccagagacaattccaagaacacgctgtatctgcaaatgaacagcctgagagccgaggacacggccgtatattactgtgcgaaacacactagctactacctggacgtctggggcaaagggaccacggtcaccgtctcctcagcggccgcaaccacgacgccagcgccgcggccaccaacaccggcgcccaccatcgcgtcgcagcccctgtccctgcgcccagaggcgtgccggccagcggcggggggcgcagtgcacacgagggggctggacttcgcctgtgatatctacatctgggcgcccttggccgggacttgtggggtccttctcctgtcactggttatcaccctttactgcaaacggggcagaaagaaactcctgtatatattcaaacaaccatttatgagaccagtacaaactactcaagaggaagatggctgtagctgccgatttccagaagaagaagaaggaggatgtgaactgagagtgaagttcagcaggagcgcagacgcccccgcgtaccagcagggccagaaccagctctataacgagctcaatctaggacgaagagaggagtacgatgttttggacaagagacgtggccgggaccctgagatggggggaaagccgagaaggaagaaccctcaggaaggcctgtacaatgaactgcagaaagataagatggcggaggcctacagtgagattgggatgaaaggcgagcgccggaggggcaaggggcacgatggcctttaccagggtctcagtacagccaccaaggacacctacgacgcccttcacatgcaggccctgccccctcgc

SEQ ID NO: 2586 - DNA, 1491 bp, synthetic construct
  misc_feature 1..1491: note = Synthetic
  source 1..1491: mol_type = other DNA
atggccttaccagtgaccgccttgctcctgccgctggccttgctgctccacgccgccaggccggaaattgtcctgactcagtctccagactttcagtctgtgactccaaaggagaaagtcaccatcacctgccgggccagtcagagtattggtagtagcttacactggtaccagcagaaaccagatcagtctccaaagctcctcatcaagtttgcttcccagtccttctcaggggtcccctcgaggttcagtggcagtggatctgggacagatttcaccctcaccatcaatagcctggaagctgaagatgctgcaacgtatttctgtcatcagagtagtagtttaccgtggacgttcggccaagggaccaaggtggaaatcaaaggcagcaccagcggcagcggcaagcccggctccggagagggcagcaccaagggccaggtgcagctggtggagtctgggggaggcgtggtccagcctgggaggtccctgagactctcctgtgcagcgtctggattcaacttcagtacctttgacatacactgggtccgccaggctccaggcaaggggctggagtgggtggcacttatatggtatgatggaagttataaatactatgcagactccgtgaagggccgattcaccatttccagagacaattccaagaacacgctggatctgcgaatgaacagcctgagagccgaggacacggctgtgtattactgtgcgcgaaatgacaactggaacgacgaacactactaccactattacatggacgtctggggcaaagggaccacggtcaccgtctcctcagcggccgcaaccacgacgccagcgccgcggccaccaacaccggcgcccaccatcgcgtcgcagcccctgtccctgcgcccagaggcgtgccggccagcggcggggggcgcagtgcacacgagggggctggacttcgcctgtgatatctacatctgggcgcccttggccgggacttgtggggtccttctcctgtcactggttatcaccctttactgcaaacggggcagaaagaaactcctgtatatattcaaacaaccatttatgagaccagtacaaactactcaagaggaagatggctgtagctgccgatttccagaagaagaagaaggaggatgtgaactgagagtgaagttcagcaggagcgcagacgcccccgcgtaccagcagggccagaaccagctctataacgagctcaatctaggacgaagagaggagtacgatgttttggacaagagacgtggccgggaccctgagatggggggaaagccgagaaggaagaaccctcaggaaggcctgtacaatgaactgcagaaagataagatggcggaggcctacagtgagattgggatgaaaggcgagcgccggaggggcaaggggcacgatggcctttaccagggtctcagtacagccaccaaggacacctacgacgcccttcacatgcaggccctgccccctcgc

SEQ ID NO: 2587 - DNA, 1506 bp, synthetic construct
  misc_feature 1..1506: note = Synthetic
  source 1..1506: mol_type = other DNA
atggccttaccagtgaccgccttgctcctgccgctggccttgctgctccacgccgccaggccgcagactgtggtgacccaggagccatcgttctcagtgtcccctggagggacagtcacactcacttgtggcttgagctctggctcagtctccactagttacttccccagctggtaccagcagacccccggccaggctccacgcacgctcatctacatcacaaacactcgctcttcaggggtccctgatcgcttctctggctccattattgggaacaaagctgccctcaccatcacgggggcccaggcagatgatgaatctgattatttctgtgtactatatatgggtagtggcacttgggtgttcggtggaggaaccaagctgactgtcctaggcagcaccagcggcagcggcaagcccggctccggagagggcagcaccaagggcgaagtgcacctgttggagtctgggggaggcttggtccagcctggggggtccctgagactctcctgtgcggcctctggattcacctttagcagctatgccatgaactgggtccgccaggctccagggaaggggctggagtgggtctcttctattagtggtagtggtagtagctcatactacgcagactccgtgaagggccggttcaccatctccagagacaattccaagaacacgctgtatctgcaaatgaacagcctgagagccgaggacacggccgtatattactgtgcgtctcgtggattcaactcccagtatcctcccggatactactactactacatggacgtctggggcaaagggaccacggtcaccgtctcctcagcggccgcaaccacgacgccagcgccgcggccaccaacaccggcgcccaccatcgcgtcgcagcccctgtccctgcgcccagaggcgtgccggccagcggcggggggcgcagtgcacacgagggggctggacttcgcctgtgatatctacatctgggcgcccttggccgggacttgtggggtccttctcctgtcactggttatcaccctttactgcaaacggggcagaaagaaactcctgtatatattcaaacaaccatttatgagaccagtacaaactactcaagaggaagatggctgtagctgccgatttccagaagaagaagaaggaggatgtgaactgagagtgaagttcagcaggagcgcagacgcccccgcgtaccagcagggccagaaccagctctataacgagctcaatctaggacgaagagaggagtacgatgttttggacaagagacgtggccgggaccctgagatggggggaaagccgagaaggaagaaccctcaggaaggcctgtacaatgaactgcagaaagataagatggcggaggcctacagtgagattgggatgaaaggcgagcgccggaggggcaaggggcacgatggcctttaccagggtctcagtacagccaccaaggacacctacgacgcccttcacatgcaggccctgccccctcgc

SEQ ID NO: 2588 - DNA, 1467 bp, synthetic construct
  misc_feature 1..1467: note = Synthetic
  source 1..1467: mol_type = other DNA
atggccttaccagtgaccgccttgctcctgccgctggccttgctgctccacgccgccaggccggaaattgtgctgactcagtctccagactttcagtctgtgactccaaaggagaaagtcaccatcacctgccgggccagtcagagcattggtagtagcttacactggtaccagcagaaaccagatcagtctccaaagctcctcatcaagtttgcttcccagtccttctcaggggtcccctcgaggttcagtggcagtggatctgggacagatttcaccctcaccatccatagcctggaagctgaagatgctgcaacgtattactgtcatcagagtagtagtttaccgtggacgttcggccaagggaccaaggtggaaatcaaaggcagcaccagcggcagcggcaagcccggctccggagagggcagcaccaagggcgaggtgcagctgttggagtctgggggaggcttggtacagcctggggggtccctgagactctcctgtgcagcctctggattcaccttcagcaactatgccatgacctgggtccgccaggctccagggaaggggctggagtgggtctcagctattagtggtagtggtattggcacatactacgcagactccgtgcagggccggttcaccacctccagagacaattccaagaacacgctgtatctgcaaatgaacagcctgagagccgaggacacggccgtttattactgtgcgaaaggggggtacaactggaaggacgtctggggcaaagggaccacggtcaccgtctcctcagcggccgcaaccacgacgccagcgccgcggccaccaacaccggcgcccaccatcgcgtcgcagcccctgtccctgcgcccagaggcgtgccggccagcggcggggggcgcagtgcacacgagggggctggacttcgcctgtgatatctacatctgggcgcccttggccgggacttgtggggtccttctcctgtcactggttatcaccctttactgcaaacggggcagaaagaaactcctgtatatattcaaacaaccatttatgagaccagtacaaactactcaagaggaagatggctgtagctgccgatttccagaagaagaagaaggaggatgtgaactgagagtgaagttcagcaggagcgcagacgcccccgcgtaccagcagggccagaaccagctctataacgagctcaatctaggacgaagagaggagtacgatgttttggacaagagacgtggccgggaccctgagatggggggaaagccgagaaggaagaaccctcaggaaggcctgtacaatgaactgcagaaagataagatggcggaggcctacagtgagattgggatgaaaggcgagcgccggaggggcaaggggcacgatggcctttaccagggtctcagtacagccaccaaggacacctacgacgcccttcacatgcaggccctgccccctcgc

SEQ ID NO: 2589 - DNA, 1491 bp, synthetic construct
  misc_feature 1..1491: note = Synthetic
  source 1..1491: mol_type = other DNA
atggccttaccagtgaccgccttgctcctgccgctggccttgctgctccacgccgccaggccggaaattgtgctgactcagtctccagactttcagtctgtgactccaaaggagaaagtcaccatcacctgccgggccagtcagagcattggtagtagcttacactggtaccagcagaaaccagatcagtctccaaagctcctcatcaagtttgcttcccagtccttctcaggggtcccctcgaggttcagtggcagtggatctgggacagatttcaccctcaccatccatagcctggaagctgaagatgctgcaacgtattactgtcatcagagtagtagtttaccgtggacgttcggccaagggaccaaggtggaaatcaaaggcagcaccagcggcagcggcaagcccggctccggagagggcagcaccaagggccaggtgcagctggtggagtctgggggaggcgtggtccagcctgggaggtccctgagactctcctgtgcagcgtctgggttcaccttcactaactatgacatgcactgggtccgccaggccccaggcaaggggctggagtgggtgacaattatatggcatgatggaagtaataaatattatttagactccgtgaggggccgattcaccatctccagagacaattccaagaacacgctgtatctgcaaatgaacagcctgagagccgaggacacggctgtgtattactgtgcgagaggtgacaactggaacgacgaacaccactacttctactacatggacgtctggggcaaagggaccacggtcaccgtctcctcagcggccgcaaccacgacgccagcgccgcggccaccaacaccggcgcccaccatcgcgtcgcagcccctgtccctgcgcccagaggcgtgccggccagcggcggggggcgcagtgcacacgagggggctggacttcgcctgtgatatctacatctgggcgcccttggccgggacttgtggggtccttctcctgtcactggttatcaccctttactgcaaacggggcagaaagaaactcctgtatatattcaaacaaccatttatgagaccagtacaaactactcaagaggaagatggctgtagctgccgatttccagaagaagaagaaggaggatgtgaactgagagtgaagttcagcaggagcgcagacgcccccgcgtaccagcagggccagaaccagctctataacgagctcaatctaggacgaagagaggagtacgatgttttggacaagagacgtggccgggaccctgagatggggggaaagccgagaaggaagaaccctcaggaaggcctgtacaatgaactgcagaaagataagatggcggaggcctacagtgagattgggatgaaaggcgagcgccggaggggcaaggggcacgatggcctttaccagggtctcagtacagccaccaaggacacctacgacgcccttcacatgcaggccctgccccctcgc

SEQ ID NO: 2590 - DNA, 1491 bp, synthetic construct
  misc_feature 1..1491: note = Synthetic
  source 1..1491: mol_type = other DNA
atggccttaccagtgaccgccttgctcctgccgctggccttgctgctccacgccgccaggccggaaattgtgttgacacagtctccagccaccctgtctttgtctccaggggaaagagccaccctctcctgcagggccagtcagagtgttagcagctccttagcctggtaccaacagaaacctggccaggctccccggctcctcatctatgatgcatccaacagggccactggcatcccagccaggttcagtggcagtgggtctgggacagacttcactctcaccatcagcagcctagagcctgaagattttgcagtttattactgtcagcagcgtagcaactggcctctcactttcggcggagggaccaaggtggagatcaaaggcagcaccagcggcagcggcaagcccggctccggagagggcagcaccaagggccaggtgcagctggtggagtctgggggaggcgtggtccagcctgggaggtccctgagactctcctgtgcagcgtctgggttcaccttcagtaactatgacatgcactgggtccgccaggccccaggcaaggggctggagtgggtgacaattatatggcatgatggaagtaataaatattatttagactccgtgaagggccgattcaccatctccagagacaattccaagaacacgctgtatctgcaaatgaacagcctgagagccgaggacacggctgtgtattactgtgcgagaggtgacaactggaacgacgaacaccactacttctactacatggacgtctggggcaaagggaccacggtcaccgtctcctcagcggccgcaaccacgacgccagcgccgcggccaccaacaccggcgcccaccatcgcgtcgcagcccctgtccctgcgcccagaggcgtgccggccagcggcggggggcgcagtgcacacgagggggctggacttcgcctgtgatatctacatctgggcgcccttggccgggacttgtggggtccttctcctgtcactggttatcaccctttactgcaaacggggcagaaagaaactcctgtatatattcaaacaaccatttatgagaccagtacaaactactcaagaggaagatggctgtagctgccgatttccagaagaagaagaaggaggatgtgaactgagagtgaagttcagcaggagcgcagacgcccccgcgtaccagcagggccagaaccagctctataacgagctcaatctaggacgaagagaggagtacgatgttttggacaagagacgtggccgggaccctgagatggggggaaagccgagaaggaagaaccctcaggaaggcctgtacaatgaactgcagaaagataagatggcggaggcctacagtgagattgggatgaaaggcgagcgccggaggggcaaggggcacgatggcctttaccagggtctcagtacagccaccaaggacacctacgacgcccttcacatgcaggccctgccccctcgc

SEQ ID NO: 2591 - DNA, 1479 bp, synthetic construct
  misc_feature 1..1479: note = Synthetic
  source 1..1479: mol_type = other DNA
atggccttaccagtgaccgccttgctcctgccgctggccttgctgctccacgccgccaggccggaaattgtgttgacgcagtctccaggcaccctgtctttgtctccaggggaaagagccaccctctcctgcagggccagtcagagtgttagcagcagctacttagcctggtaccagcagaaacctggccaggctcccaggctcctcatctatggtgcatccagcagggccactggcatcccagacaggttcagtggcagtgggtctgggacagacttcactctcaccatcagcagactggagcctgaagattttgcagtgtattactgtcagcagtatggtagctcgtggacgttcggccaagggaccaaggtggaaatcaaaggcagcaccagcggcagcggcaagcccggctccggagagggcagcaccaagggcgaggtgcagctggtggagtctgggggaggtgtggtacggcctggggggtccctgagactctcctgtgcagcctctggattcacctttgatgattatggcatgagctgggtccgccaagctccagggaaggggctggagtgggtctctggtattaattggaatggtggtagcacaggttatgtagactctgtgaagggccgattcaccatctccagagacaacgccaagaactccctgtatctgcaaatgaacagtctgagagccgaggacacggccttgtatcactgtgcgagaccagtaactacggactactactactacatggacgtctggggcaaagggaccacggtcaccgtctcctcagcggccgcaaccacgacgccagcgccgcggccaccaacaccggcgcccaccatcgcgtcgcagcccctgtccctgcgcccagaggcgtgccggccagcggcggggggcgcagtgcacacgagggggctggacttcgcctgtgatatctacatctgggcgcccttggccgggacttgtggggtccttctcctgtcactggttatcaccctttactgcaaacggggcagaaagaaactcctgtatatattcaaacaaccatttatgagaccagtacaaactactcaagaggaagatggctgtagctgccgatttccagaagaagaagaaggaggatgtgaactgagagtgaagttcagcaggagcgcagacgcccccgcgtaccagcagggccagaaccagctctataacgagctcaatctaggacgaagagaggagtacgatgttttggacaagagacgtggccgggaccctgagatggggggaaagccgagaaggaagaaccctcaggaaggcctgtacaatgaactgcagaaagataagatggcggaggcctacagtgagattgggatgaaaggcgagcgccggaggggcaaggggcacgatggcctttaccagggtctcagtacagccaccaaggacacctacgacgcccttcacatgcaggccctgccccctcgc

SEQ ID NO: 2592 - DNA, 1503 bp, synthetic construct
  misc_feature 1..1503: note = Synthetic
  source 1..1503: mol_type = other DNA
atggccttaccagtgaccgccttgctcctgccgctggccttgctgctccacgccgccaggccggaaattgtgttgacgcagtctccaggcaccctgtctttgtctccaggggaaagagccaccctctcctgcagggccagtcagagtgttagcagcagctacttagcctggtaccagcagaaacctggccaggctcccaggctcctcatctatggtgcatccagcagggccactggcatcccagacaggttcagtggcagtgggtctgggacagacttcactctcaccatcagcagactggagcctgaagattttgcagtgtattactgtcagcagtatggtagctcgtggacgttcggccaagggaccaaggtggaaatcaaaggcagcaccagcggcagcggcaagcccggctccggagagggcagcaccaagggcgaggtgcagctgttggagtctgggggaggcttggtacagcctggggggtccctgagactctcctgtgcagcctctggattcacctttagcagctatgccatgagctgggtccgccaggctccagggaaggggctggagtgggtctcagctattagtggtagtggtggtagcacatactacgcagactccgtgaagggccggttcaccatctccagagacaattccaagaacacgctgtatctgcaaatgaacagcctgagagccgaggacacggccgtatattactgtgcgaaaaaggggacgtcgtacaactggaacgacgtccattactactactactactacatggacgtctggggcaaagggaccacggtcaccgtctcctcagcggccgcaaccacgacgccagcgccgcggccaccaacaccggcgcccaccatcgcgtcgcagcccctgtccctgcgcccagaggcgtgccggccagcggcggggggcgcagtgcacacgagggggctggacttcgcctgtgatatctacatctgggcgcccttggccgggacttgtggggtccttctcctgtcactggttatcaccctttactgcaaacggggcagaaagaaactcctgtatatattcaaacaaccatttatgagaccagtacaaactactcaagaggaagatggctgtagctgccgatttccagaagaagaagaaggaggatgtgaactgagagtgaagttcagcaggagcgcagacgcccccgcgtaccagcagggccagaaccagctctataacgagctcaatctaggacgaagagaggagtacgatgttttggacaagagacgtggccgggaccctgagatggggggaaagccgagaaggaagaaccctcaggaaggcctgtacaatgaactgcagaaagataagatggcggaggcctacagtgagattgggatgaaaggcgagcgccggaggggcaaggggcacgatggcctttaccagggtctcagtacagccaccaaggacacctacgacgcccttcacatgcaggccctgccccctcgc

SEQ ID NO: 2593 - DNA, 1485 bp, synthetic construct
  misc_feature 1..1485: note = Synthetic
  source 1..1485: mol_type = other DNA
atggccttaccagtgaccgccttgctcctgccgctggccttgctgctccacgccgccaggccggaaattgtgttgacgcagtctccaggcaccctgtctttgtctccaggggaaagagccaccctctcctgcagggccagtcagagtgttagcagcagctacttagcctggtaccagcagaaacctggccaggctcccaggctcctcatctatggtgcatccagcagggccactggcatcccagacaggttcagtggcagtgggtctgggacagacttcactctcaccatcagcagactggagcctgaagattttgcagtgtattactgtcagcagtatggtagctcgtggacgttcggccaagggaccaaggtggaaatcaaaggcagcaccagcggcagcggcaagcccggctccggagagggcagcaccaagggccagctgcagctgcaggagtcgggcccaggactggtgaagccttcggagaccctgtccctcacctgcactgtctctggtggctccatcagcagtagtagttactactggggctggatccgccagcccccagggaaggggctggagtggattgggagtatctattatagtgggagcacctactacaacccgtccctcaagagtcgagtcaccatatccgtagacacgtccaagaaccagttctccctgaagctgagctctgtgaccgccgcagacacggctgtgtattactgcacaactggaacgacggcttactactactactactacatggacgtctggggcaaagggaccacggtcaccgtctcctcagcggccgcaaccacgacgccagcgccgcggccaccaacaccggcgcccaccatcgcgtcgcagcccctgtccctgcgcccagaggcgtgccggccagcggcggggggcgcagtgcacacgagggggctggacttcgcctgtgatatctacatctgggcgcccttggccgggacttgtggggtccttctcctgtcactggttatcaccctttactgcaaacggggcagaaagaaactcctgtatatattcaaacaaccatttatgagaccagtacaaactactcaagaggaagatggctgtagctgccgatttccagaagaagaagaaggaggatgtgaactgagagtgaagttcagcaggagcgcagacgcccccgcgtaccagcagggccagaaccagctctataacgagctcaatctaggacgaagagaggagtacgatgttttggacaagagacgtggccgggaccctgagatggggggaaagccgagaaggaagaaccctcaggaaggcctgtacaatgaactgcagaaagataagatggcggaggcctacagtgagattgggatgaaaggcgagcgccggaggggcaaggggcacgatggcctttaccagggtctcagtacagccaccaaggacacctacgacgcccttcacatgcaggccctgccccctcgc

SEQ ID NO: 2594 - DNA, 1482 bp, synthetic construct
  misc_feature 1..1482: note = Synthetic
  source 1..1482: mol_type = other DNA
atggccttaccagtgaccgccttgctcctgccgctggccttgctgctccacgccgccaggccggaaattgtgttgacgcagtctccaggcaccctgtctttgtctccaggggaaagagccaccctctcctgcagggccagtcagagtgttagcagcagctacttagcctggtaccagcagaaacctggccaggctcccaggctcctcatctatggtgcatccagcagggccactggcatcccagacaggttcagtggcagtgggtctgggacagacttcactctcaccatcagcagactggagcctgaagattttgcagtgtattactgtcagcagtatggtagctcgtggacgttcggccaagggaccaaggtggaaatcaaaggcagcaccagcggcagcggcaagcccggctccggagagggcagcaccaagggcgaggtgcagctgttggagtctgggggaggcttggtgcagcctggggggtccctgagactctcctgtgcagcctctggattcacctttagcagctatgccatgacctgggtccgccaggctccagggaaggggctggagtgggtctcagctattagtggtagtggtggtagcacatactacgcagactccgtgaagggccggttcaccatctccagagacaattccaagaacacgctgtatctgcaaatgaacagcctgagagccgaggacacggccgtatattactgtgcgagaggcgggtataactggcactactactactacatggacgtctggggcaaagggaccacggtcaccgtctcctcagcggccgcaaccacgacgccagcgccgcggccaccaacaccggcgcccaccatcgcgtcgcagcccctgtccctgcgcccagaggcgtgccggccagcggcggggggcgcagtgcacacgagggggctggacttcgcctgtgatatctacatctgggcgcccttggccgggacttgtggggtccttctcctgtcactggttatcaccctttactgcaaacggggcagaaagaaactcctgtatatattcaaacaaccatttatgagaccagtacaaactactcaagaggaagatggctgtagctgccgatttccagaagaagaagaaggaggatgtgaactgagagtgaagttcagcaggagcgcagacgcccccgcgtaccagcagggccagaaccagctctataacgagctcaatctaggacgaagagaggagtacgatgttttggacaagagacgtggccgggaccctgagatggggggaaagccgagaaggaagaaccctcaggaaggcctgtacaatgaactgcagaaagataagatggcggaggcctacagtgagattgggatgaaaggcgagcgccggaggggcaaggggcacgatggcctttaccagggtctcagtacagccaccaaggacacctacgacgcccttcacatgcaggccctgccccctcgc

SEQ ID NO: 2595 - DNA, 1494 bp, synthetic construct
  misc_feature 1..1494: note = Synthetic
  source 1..1494: mol_type = other DNA
atggccttaccagtgaccgccttgctcctgccgctggccttgctgctccacgccgccaggccggaaattgtgctgactcagtctccagactttcagtctgtgactccaaaggagaaagtcaccatcacctgccgggccagtcagaacattggtagtagcttacactggtaccagcagaaaccagatcagtctccaaagctcctcatcaagtttgcttcccagtccatctcaggggtcccctcgaggttcagtggcagtggatctgggacagatttcaccctcaccatcaatagcctggaagctgaagatgctgcagcgtattactgtcatcagagtagtagtttaccgtggacgttcggccaagggaccaaggtggaaatcaaaggcagcaccagcggcagcggcaagcccggctccggagagggcagcaccaagggccaggtgcagctggtggagtctgggggaggcgtggtccagcctgggaggtccctgagactctcctgtgcagcgtctggattcaccttcagtagctatgacatgcactgggtccgccaggctccaggcaaggggctggagtgggtgtcagttatatggtatgatggaagtaataaaaagtatggagactccgcgaagggccgattcaccatctccagagacaattccaagaacacgctggatctgcaaatgaacagcctgagagccgaggacacggctgtgtattactgtgcgagaggcgacaactggaacgacgaaggtggctactactactactacatggacgtctggggcaaagggaccacggtcaccgtctcctcagcggccgcaaccacgacgccagcgccgcggccaccaacaccggcgcccaccatcgcgtcgcagcccctgtccctgcgcccagaggcgtgccggccagcggcggggggcgcagtgcacacgagggggctggacttcgcctgtgatatctacatctgggcgcccttggccgggacttgtggggtccttctcctgtcactggttatcaccctttactgcaaacggggcagaaagaaactcctgtatatattcaaacaaccatttatgagaccagtacaaactactcaagaggaagatggctgtagctgccgatttccagaagaagaagaaggaggatgtgaactgagagtgaagttcagcaggagcgcagacgcccccgcgtaccagcagggccagaaccagctctataacgagctcaatctaggacgaagagaggagtacgatgttttggacaagagacgtggccgggaccctgagatggggggaaagccgagaaggaagaaccctcaggaaggcctgtacaatgaactgcagaaagataagatggcggaggcctacagtgagattgggatgaaaggcgagcgccggaggggcaaggggcacgatggcctttaccagggtctcagtacagccaccaaggacacctacgacgcccttcacatgcaggccctgccccctcgc

SEQ ID NO: 2596 - DNA, 1494 bp, synthetic construct
  misc_feature 1..1494: note = Synthetic
  source 1..1494: mol_type = other DNA
atggccttaccagtgaccgccttgctcctgccgctggccttgctgctccacgccgccaggccggacatccagatgacccagtctccatcctcactgtctacatctgtaggagacagagtcaccatcacttgtcgggcgagtcagggcattagcaattatttagcctggtttcagcagaaaccagggaaagcccctaagtccctgatctatgctgcatccagtttgcaaagtggggtcccatcaaagttcagcggcagtggatctgggacagatttctctctcaccattagcagcctgcagcctgaagattttgcaacttattactgccaacagtataatagttacccgatcaccttcggccaagggacacgactggagattaaaggcagcaccagcggcagcggcaagcccggctccggagagggcagcaccaagggccaggtgcagctggtggagtctgggggaggcgtggtccagcctgggaggtccctgagactctcctgtgcagcgtctggattcaccttcagtagctatgacatgcactgggtccgccaggctccaggcaaggggctggagtgggtgtcagttatatggtatgatggaagtaataaaaagtatggagactccgcgaagggccgattcaccatctccagagacaattccaagaacacgctggatctgcaaatgaacagcctgagagccgaggacacggctgtgtattactgtgcgagaggcgacaactggaacgacgaaggtggctactactactactacatggacgtctggggcaaagggaccacggtcaccgtctcctcagcggccgcaaccacgacgccagcgccgcggccaccaacaccggcgcccaccatcgcgtcgcagcccctgtccctgcgcccagaggcgtgccggccagcggcggggggcgcagtgcacacgagggggctggacttcgcctgtgatatctacatctgggcgcccttggccgggacttgtggggtccttctcctgtcactggttatcaccctttactgcaaacggggcagaaagaaactcctgtatatattcaaacaaccatttatgagaccagtacaaactactcaagaggaagatggctgtagctgccgatttccagaagaagaagaaggaggatgtgaactgagagtgaagttcagcaggagcgcagacgcccccgcgtaccagcagggccagaaccagctctataacgagctcaatctaggacgaagagaggagtacgatgttttggacaagagacgtggccgggaccctgagatggggggaaagccgagaaggaagaaccctcaggaaggcctgtacaatgaactgcagaaagataagatggcggaggcctacagtgagattgggatgaaaggcgagcgccggaggggcaaggggcacgatggcctttaccagggtctcagtacagccaccaaggacacctacgacgcccttcacatgcaggccctgccccctcgc

SEQ ID NO: 2597 - DNA, 1485 bp, synthetic construct
  misc_feature 1..1485: note = Synthetic
  source 1..1485: mol_type = other DNA
atggccttaccagtgaccgccttgctcctgccgctggccttgctgctccacgccgccaggccggaaattgtgctgactcagtctccagactttcagtctgtgactccaaaggagaaagtcaccatcacctgccgggccagtcagaacattggtagtagcttacactggtaccagcagaaaccagatcagtctccaaagctcctcatcaagtttgcttcccagtccatctcaggggtcccctcgaggttcagtggcagtggatctgggacagatttcaccctcaccatcaatagcctggaagctgaagatgctgcagcgtattactgtcatcagagtagtagtttaccgtggacgttcggccaagggaccaaggtggaaatcaaaggcagcaccagcggcagcggcaagcccggctccggagagggcagcaccaagggccaggttcagctggtacagtctggagctgaggtgaagaagtctggggcctcagtgaaggtctcctgcaaggcttctggttacaccttaaccagctatggcatcagctgggtgcgacaggcccctggacaagggcttgagtggatgggatggatcagcgcttacaatggtaacataaactatgcacagaagttccagggcagagtcaccatgaccacagacacatccacgagcacagcctacatggagctgaggagcctgagatctgacgacacggccgtgtattactgtgtgagagatggggaccggtacaactggaaccacagctacatggacgtctggggcaaagggaccacggtcaccgtctcctcagcggccgcaaccacgacgccagcgccgcggccaccaacaccggcgcccaccatcgcgtcgcagcccctgtccctgcgcccagaggcgtgccggccagcggcggggggcgcagtgcacacgagggggctggacttcgcctgtgatatctacatctgggcgcccttggccgggacttgtggggtccttctcctgtcactggttatcaccctttactgcaaacggggcagaaagaaactcctgtatatattcaaacaaccatttatgagaccagtacaaactactcaagaggaagatggctgtagctgccgatttccagaagaagaagaaggaggatgtgaactgagagtgaagttcagcaggagcgcagacgcccccgcgtaccagcagggccagaaccagctctataacgagctcaatctaggacgaagagaggagtacgatgttttggacaagagacgtggccgggaccctgagatggggggaaagccgagaaggaagaaccctcaggaaggcctgtacaatgaactgcagaaagataagatggcggaggcctacagtgagattgggatgaaaggcgagcgccggaggggcaaggggcacgatggcctttaccagggtctcagtacagccaccaaggacacctacgacgcccttcacatgcaggccctgccccctcgc

SEQ ID NO: 2598 - DNA, 1485 bp, synthetic construct
  misc_feature 1..1485: note = Synthetic
  source 1..1485: mol_type = other DNA
atggccttaccagtgaccgccttgctcctgccgctggccttgctgctccacgccgccaggccggacatccagatgacccagtctccatcctcactgtctacatctgtaggagacagagtcaccatcacttgtcgggcgagtcagggcattagcaattatttagcctggtttcagcagaaaccagggaaagcccctaagtccctgatctatgctgcatccagtttgcaaagtggggtcccatcaaagttcagcggcagtggatctgggacagatttctctctcaccattagcagcctgcagcctgaagattttgcaacttattactgccaacagtataatagttacccgatcaccttcggccaagggacacgactggagattaaaggcagcaccagcggcagcggcaagcccggctccggagagggcagcaccaagggccaggttcagctggtacagtctggagctgaggtgaagaagtctggggcctcagtgaaggtctcctgcaaggcttctggttacaccttaaccagctatggcatcagctgggtgcgacaggcccctggacaagggcttgagtggatgggatggatcagcgcttacaatggtaacataaactatgcacagaagttccagggcagagtcaccatgaccacagacacatccacgagcacagcctacatggagctgaggagcctgagatctgacgacacggccgtgtattactgtgtgagagatggggaccggtacaactggaaccacagctacatggacgtctggggcaaagggaccacggtcaccgtctcctcagcggccgcaaccacgacgccagcgccgcggccaccaacaccggcgcccaccatcgcgtcgcagcccctgtccctgcgcccagaggcgtgccggccagcggcggggggcgcagtgcacacgagggggctggacttcgcctgtgatatctacatctgggcgcccttggccgggacttgtggggtccttctcctgtcactggttatcaccctttactgcaaacggggcagaaagaaactcctgtatatattcaaacaaccatttatgagaccagtacaaactactcaagaggaagatggctgtagctgccgatttccagaagaagaagaaggaggatgtgaactgagagtgaagttcagcaggagcgcagacgcccccgcgtaccagcagggccagaaccagctctataacgagctcaatctaggacgaagagaggagtacgatgttttggacaagagacgtggccgggaccctgagatggggggaaagccgagaaggaagaaccctcaggaaggcctgtacaatgaactgcagaaagataagatggcggaggcctacagtgagattgggatgaaaggcgagcgccggaggggcaaggggcacgatggcctttaccagggtctcagtacagccaccaaggacacctacgacgcccttcacatgcaggccctgccccctcgc

SEQ ID NO: 2599 - DNA, 1482 bp, synthetic construct
  misc_feature 1..1482: note = Synthetic
  source 1..1482: mol_type = other DNA
atggccttaccagtgaccgccttgctcctgccgctggccttgctgctccacgccgccaggccggaaattgtgctgactcagtctccagactttcagtctgtgactccaaaggagaaagtcaccatcacctgccgggccagtcagagcattggaagtagcttacactggtaccagcagaaaccagatcagtctccaaagctcctcatcaagtatgtttcccagtccatctcaggggtcccctcgaggttcagtggcagtggatctgggacagatttcaccctcaccatcaatagcctggaagctgaagatgctgcagcgtattactgtcatcagagtagtagtttaccgtggacgttcggccaagggaccaaggtggaaatcaaaggcagcaccagcggcagcggcaagcccggctccggagagggcagcaccaagggcgaggtgcagctgttggagtctgggggagacttggtacagcctggggggtccctgcgactctcctgtgcagcctctggattcacctttagcacctatgccatgacctgggtccgccaggctccagggaaggggctggagtgggtctcagctattagtggtactagtggtagcacatactacgcagactccgtgaagggccggttcaccatctccagagacaattccaagagcacgctgtatctgcacatgaacagcctgagaaccgaggacacggccgtatattactgtgcgagaggcggatataactggcactactactactacatggacgtctggggcaaagggaccacggtcaccgtctcctcagcggccgcaaccacgacgccagcgccgcggccaccaacaccggcgcccaccatcgcgtcgcagcccctgtccctgcgcccagaggcgtgccggccagcggcggggggcgcagtgcacacgagggggctggacttcgcctgtgatatctacatctgggcgcccttggccgggacttgtggggtccttctcctgtcactggttatcaccctttactgcaaacggggcagaaagaaactcctgtatatattcaaacaaccatttatgagaccagtacaaactactcaagaggaagatggctgtagctgccgatttccagaagaagaagaaggaggatgtgaactgagagtgaagttcagcaggagcgcagacgcccccgcgtaccagcagggccagaaccagctctataacgagctcaatctaggacgaagagaggagtacgatgttttggacaagagacgtggccgggaccctgagatggggggaaagccgagaaggaagaaccctcaggaaggcctgtacaatgaactgcagaaagataagatggcggaggcctacagtgagattgggatgaaaggcgagcgccggaggggcaaggggcacgatggcctttaccagggtctcagtacagccaccaaggacacctacgacgcccttcacatgcaggccctgccccctcgc

SEQ ID NO: 2600 - DNA, 1485 bp, synthetic construct
  misc_feature 1..1485: note = Synthetic
  source 1..1485: mol_type = other DNA
atggccttaccagtgaccgccttgctcctgccgctggccttgctgctccacgccgccaggccggaaattgtaatgacacagtctccagccaccctgtctttgtctccaggggaaagagccaccctctcctgcagggccagtcagagtgttagcagcagctacttatcctggtaccagcagaaacctgggctggctcccaggctcctcatctatggtgcatccaccagggccactggcatcccagccaggttcagtggcagtgggtctgggacagacttcactctcaccatcagcagcctgcagcctgaagattttgcagtttattactgtcagcaggattataacttacctccgacgttcggccaagggaccaaggtggaaatcaaaggcagcaccagcggcagcggcaagcccggctccggagagggcagcaccaagggcgaggtgcagctgttggagtctgggggagacttggtacagcctggggggtccctgcgactctcctgtgcagcctctggattcacctttagcacctatgccatgacctgggtccgccaggctccagggaaggggctggagtgggtctcagctattagtggtactagtggtagcacatactacgcagactccgtgaagggccggttcaccatctccagagacaattccaagagcacgctgtatctgcacatgaacagcctgagaaccgaggacacggccgtatattactgtgcgagaggcggatataactggcactactactactacatggacgtctggggcaaagggaccacggtcaccgtctcctcagcggccgcaaccacgacgccagcgccgcggccaccaacaccggcgcccaccatcgcgtcgcagcccctgtccctgcgcccagaggcgtgccggccagcggcggggggcgcagtgcacacgagggggctggacttcgcctgtgatatctacatctgggcgcccttggccgggacttgtggggtccttctcctgtcactggttatcaccctttactgcaaacggggcagaaagaaactcctgtatatattcaaacaaccatttatgagaccagtacaaactactcaagaggaagatggctgtagctgccgatttccagaagaagaagaaggaggatgtgaactgagagtgaagttcagcaggagcgcagacgcccccgcgtaccagcagggccagaaccagctctataacgagctcaatctaggacgaagagaggagtacgatgttttggacaagagacgtggccgggaccctgagatggggggaaagccgagaaggaagaaccctcaggaaggcctgtacaatgaactgcagaaagataagatggcggaggcctacagtgagattgggatgaaaggcgagcgccggaggggcaaggggcacgatggcctttaccagggtctcagtacagccaccaaggacacctacgacgcccttcacatgcaggccctgccccctcgc

SEQ ID NO: 2601 - protein, 722 aa, synthetic construct
  REGION 1..722: note = Synthetic
MALPVTALLLPLALLLHAARPEIVLTQSPDFQSVTPKEKVTITCRASQSIGSSLHWYQQKPDQSPKLLIKFASQSFSGVPSRFSGSGSGTDFTLTIHSLEAEDAATYYCHQSSSLPWTFGQGTKVEIKGSTSGSGKPGSGEGSTKGQVQLVESGGGVVQPGRSLRLSCAASGFTFNNYDMYWVRQAPGKGLEWVAVTWYDGSNKYYADSVKGRFTISRDNSKNTLYLQMNSLRAEDTAVYYCARGDNWNDEHHYFYYMDVWGKGTTVTVSSAAATTTPAPRPPTPAPTIASQPLSLRPEACRPAAGGAVHTRGLDFACDIYIWAPLAGTCGVLLLSLVITLYCKRGRKKLLYIFKQPFMRPVQTTQEEDGCSCRFPEEEEGGCELRVKFSRSADAPAYQQGQNQLYNELNLGRREEYDVLDKRRGRDPEMGGKPRRKNPQEGLYNELQKDKMAEAYSEIGMKGERRRGKGHDGLYQGLSTATKDTYDALHMQALPPRGSGEGRGSLLTCGDVEENPGPMALPVTALLLPLALLLHAARPNWVNVISDLKKIEDLIQSMHIDATLYTESDVHPSCKVTAMKCFLLELQVISLESGDASIHDTVENLIILANNSLSSNGNVTESGCKECEELEEKNIKEFLQSFVHIVQMFINTSTTTPAPRPPTPAPTIASQPLSLRPEACRPAAGGAVHTRGLDFACDIYIWAPLAGTCGVLLLSLVITLYC

SEQ ID NO: 2602 - protein, 722 aa, synthetic construct
  REGION 1..722: note = Synthetic
MALPVTALLLPLALLLHAARPEIVLTQSPDFQSVTPKEKVTITCRASQSIGSSLHWYQQKPDQSPKLLIKFASQSFSGVPSRFSGSGSGTDFTLTIHSLEAEDAATYYCHQSSSLPWTFGQGTKVEIKGSTSGSGKPGSGEGSTKGQVQLVESGGGVVQPGRSLRLSCAASGFTFSNYDMHWVRQAPGKGLEWVTIIWHDASNKYYLDSVKGRFTISRDNSKNTLYLQMNSLRAEDTAVYYCARGDNWNDEHHYFYYMDVWGKGTTVTVSSAAATTTPAPRPPTPAPTIASQPLSLRPEACRPAAGGAVHTRGLDFACDIYIWAPLAGTCGVLLLSLVITLYCKRGRKKLLYIFKQPFMRPVQTTQEEDGCSCRFPEEEEGGCELRVKFSRSADAPAYQQGQNQLYNELNLGRREEYDVLDKRRGRDPEMGGKPRRKNPQEGLYNELQKDKMAEAYSEIGMKGERRRGKGHDGLYQGLSTATKDTYDALHMQALPPRGSGEGRGSLLTCGDVEENPGPMALPVTALLLPLALLLHAARPNWVNVISDLKKIEDLIQSMHIDATLYTESDVHPSCKVTAMKCFLLELQVISLESGDASIHDTVENLIILANNSLSSNGNVTESGCKECEELEEKNIKEFLQSFVHIVQMFINTSTTTPAPRPPTPAPTIASQPLSLRPEACRPAAGGAVHTRGLDFACDIYIWAPLAGTCGVLLLSLVITLYC

SEQ ID NO: 2603 - protein, 722 aa, synthetic construct
  REGION 1..722: note = Synthetic
MALPVTALLLPLALLLHAARPEIVLTQSPDFQSVTPKEKVTITCRASQSIGSSLHWYQQKPDQSPKLLIKFASQSFSGVPSRFSGSGSGTDFTLTIHSLEAEDAATYYCHQSSSLPWTFGQGTKVEIKGSTSGSGKPGSGEGSTKGQVQLVESGGGVVQPGRSLRLSCAASGFTFSNYDMHWVRQAPGKGLEWVTIIWHDGSNKYYLDSVKGRFTISRDNSKNTLYLQMNSLRAEDTAVYYCARGDNWNDEHHYFYYMDVWGKGTTVTVSSAAATTTPAPRPPTPAPTIASQPLSLRPEACRPAAGGAVHTRGLDFACDIYIWAPLAGTCGVLLLSLVITLYCKRGRKKLLYIFKQPFMRPVQTTQEEDGCSCRFPEEEEGGCELRVKFSRSADAPAYQQGQNQLYNELNLGRREEYDVLDKRRGRDPEMGGKPRRKNPQEGLYNELQKDKMAEAYSEIGMKGERRRGKGHDGLYQGLSTATKDTYDALHMQALPPRGSGEGRGSLLTCGDVEENPGPMALPVTALLLPLALLLHAARPNWVNVISDLKKIEDLIQSMHIDATLYTESDVHPSCKVTAMKCFLLELQVISLESGDASIHDTVENLIILANNSLSSNGNVTESGCKECEELEEKNIKEFLQSFVHIVQMFINTSTTTPAPRPPTPAPTIASQPLSLRPEACRPAAGGAVHTRGLDFACDIYIWAPLAGTCGVLLLSLVITLYC

SEQ ID NO: 2604 - protein, 716 aa, synthetic construct
  REGION 1..716: note = Synthetic
MALPVTALLLPLALLLHAARPQTVVTQEPSLSVSPGGTVTLTCGLSSGSVSTSYYPSWYQQTPGQAPRTLIYSTNIRSSGVPDRFSGSILGNKAALTITGAQADDESDYYCKLYMGSGIIFGSGTKVTVLGSTSGSGKPGSGEGSTKGEVQLLESGGGLVQPGGSLRLSCAASGFTFSIYAMSWVRQAPGKGLEWVSAISGGGDTTYYADSVKGRFTISRDNSKTTLDLQMNSLRAEDTAVYYCAKHTSYYMDVWGKGTTVTVSSAAATTTPAPRPPTPAPTIASQPLSLRPEACRPAAGGAVHTRGLDFACDIYIWAPLAGTCGVLLLSLVITLYCKRGRKKLLYIFKQPFMRPVQTTQEEDGCSCRFPEEEEGGCELRVKFSRSADAPAYQQGQNQLYNELNLGRREEYDVLDKRRGRDPEMGGKPRRKNPQEGLYNELQKDKMAEAYSEIGMKGERRRGKGHDGLYQGLSTATKDTYDALHMQALPPRGSGEGRGSLLTCGDVEENPGPMALPVTALLLPLALLLHAARPNWVNVISDLKKIEDLIQSMHIDATLYTESDVHPSCKVTAMKCFLLELQVISLESGDASIHDTVENLIILANNSLSSNGNVTESGCKECEELEEKNIKEFLQSFVHIVQMFINTSTTTPAPRPPTPAPTIASQPLSLRPEACRPAAGGAVHTRGLDFACDIYIWAPLAGTCGVLLLSLVITLYC

SEQ ID NO: 2605 - protein, 722 aa, synthetic construct
  REGION 1..722: note = Synthetic
MALPVTALLLPLALLLHAARPEIVLTQSPDFQSVTPKEKVTITCRASQSIGSSLHWYQQKPDQSPKLLIKFASQSFSGVPSRFSGSGSGTDFTLTIHSLEAEDAATYYCHQSSSLPWTFGQGTKVEIKGSTSGSGKPGSGEGSTKGQVQLVESGGGVVQPGRSLRLSCAASGFTFSNYDKHWVRQAPGKGLEWVAVIWYDGSNKYYADSVKGRFTISRDNSKNTLYLQMNSLRAEDTAMYYCARGDNWNDEHHYFYYMDVWGKGTTVTVSSAAATTTPAPRPPTPAPTIASQPLSLRPEACRPAAGGAVHTRGLDFACDIYIWAPLAGTCGVLLLSLVITLYCKRGRKKLLYIFKQPFMRPVQTTQEEDGCSCRFPEEEEGGCELRVKFSRSADAPAYQQGQNQLYNELNLGRREEYDVLDKRRGRDPEMGGKPRRKNPQEGLYNELQKDKMAEAYSEIGMKGERRRGKGHDGLYQGLSTATKDTYDALHMQALPPRGSGEGRGSLLTCGDVEENPGPMALPVTALLLPLALLLHAARPNWVNVISDLKKIEDLIQSMHIDATLYTESDVHPSCKVTAMKCFLLELQVISLESGDASIHDTVENLIILANNSLSSNGNVTESGCKECEELEEKNIKEFLQSFVHIVQMFINTSTTTPAPRPPTPAPTIASQPLSLRPEACRPAAGGAVHTRGLDFACDIYIWAPLAGTCGVLLLSLVITLYC

SEQ ID NO: 2606 - protein, 720 aa, synthetic construct
  REGION 1..720: note = Synthetic
MALPVTALLLPLALLLHAARPEIVLTQSPATLSLSPGERATLSCGASQSVYNSYLAWYQQKPGLAPRLLIYDASLRATGVPDRFSGSGSGTDFTLTISTLEPEDFAVYYCQQYGGSPMYTFGQGTKLEIKGSTSGSGKPGSGEGSTKGQVQLVQSGAEVKKPGASVKVSCKASGYTFTNYGFSWVRQAPGQGLDWMGWISAYNGYTNYTQKLQGRVTMTTDTSTTTAYMELRSLRSDDTAVYYCARRGLLYYYYSMDVWGKGTTVTVSSAAATTTPAPRPPTPAPTIASQPLSLRPEACRPAAGGAVHTRGLDFACDIYIWAPLAGTCGVLLLSLVITLYCKRGRKKLLYIFKQPFMRPVQTTQEEDGCSCRFPEEEEGGCELRVKFSRSADAPAYQQGQNQLYNELNLGRREEYDVLDKRRGRDPEMGGKPRRKNPQEGLYNELQKDKMAEAYSEIGMKGERRRGKGHDGLYQGLSTATKDTYDALHMQALPPRGSGEGRGSLLTCGDVEENPGPMALPVTALLLPLALLLHAARPNWVNVISDLKKIEDLIQSMHIDATLYTESDVHPSCKVTAMKCFLLELQVISLESGDASIHDTVENLIILANNSLSSNGNVTESGCKECEELEEKNIKEFLQSFVHIVQMFINTSTTTPAPRPPTPAPTIASQPLSLRPEACRPAAGGAVHTRGLDFACDIYIWAPLAGTCGVLLLSLVITLYC

SEQ ID NO: 2607 - protein, 716 aa, synthetic construct
  REGION 1..716: note = Synthetic
MALPVTALLLPLALLLHAARPQTVVTQEPSLSVSPGGTVTLTCGLSSGSVSTSDYPSWYQQTPGQAPRTLIYRTNTRSSGVPDRFSGSILGNKAALTITGAQADDESDYYCVLYMDSGIIFGSGTKVTVLGSTSGSGKPGSGEGSTKGEVQLLESGGGLVQPGGSLRLSCTASGFTFSSFAMSWVRQAPGKGLEWVSAMSGSGDTTYYADSVKGRFTISRDNSKTTLYLQMNSLRAEDTAVYSCAKHTTYYMDVWGKGTTVTVSSAAATTTPAPRPPTPAPTIASQPLSLRPEACRPAAGGAVHTRGLDFACDIYIWAPLAGTCGVLLLSLVITLYCKRGRKKLLYIFKQPFMRPVQTTQEEDGCSCRFPEEEEGGCELRVKFSRSADAPAYQQGQNQLYNELNLGRREEYDVLDKRRGRDPEMGGKPRRKNPQEGLYNELQKDKMAEAYSEIGMKGERRRGKGHDGLYQGLSTATKDTYDALHMQALPPRGSGEGRGSLLTCGDVEENPGPMALPVTALLLPLALLLHAARPNWVNVISDLKKIEDLIQSMHIDATLYTESDVHPSCKVTAMKCFLLELQVISLESGDASIHDTVENLIILANNSLSSNGNVTESGCKECEELEEKNIKEFLQSFVHIVQMFINTSTTTPAPRPPTPAPTIASQPLSLRPEACRPAAGGAVHTRGLDFACDIYIWAPLAGTCGVLLLSLVITLYC

SEQ ID NO: 2608 - protein, 716 aa, synthetic construct
  REGION 1..716: note = Synthetic
MALPVTALLLPLALLLHAARPQTVVTQEPSLSVSPGGTVTLTCGLSSGSVSTSDYPSWYQQTPGQAPRTLIYRTNTRSSGVPDRFSGSILGNKAALTITGAQADDESDYYCVLYMGSGIIFGSGTKVTVLGSTSGSGKPGSGEGSTKGEVQLLESGGGLVQPGGSLRLSCAASGFTFNTYAMSWVRQAPGKGLEWVSAMSGSGDTTYYADSVKGRFTISRDNSKTTLYLQMNSLRAEDTAVYSCAKHTSYYMDVWGKGTTVTVSSAAATTTPAPRPPTPAPTIASQPLSLRPEACRPAAGGAVHTRGLDFACDIYIWAPLAGTCGVLLLSLVITLYCKRGRKKLLYIFKQPFMRPVQTTQEEDGCSCRFPEEEEGGCELRVKFSRSADAPAYQQGQNQLYNELNLGRREEYDVLDKRRGRDPEMGGKPRRKNPQEGLYNELQKDKMAEAYSEIGMKGERRRGKGHDGLYQGLSTATKDTYDALHMQALPPRGSGEGRGSLLTCGDVEENPGPMALPVTALLLPLALLLHAARPNWVNVISDLKKIEDLIQSMHIDATLYTESDVHPSCKVTAMKCFLLELQVISLESGDASIHDTVENLIILANNSLSSNGNVTESGCKECEELEEKNIKEFLQSFVHIVQMFINTSTTTPAPRPPTPAPTIASQPLSLRPEACRPAAGGAVHTRGLDFACDIYIWAPLAGTCGVLLLSLVITLYC

SEQ ID NO: 2609 - protein, 716 aa, synthetic construct
  REGION 1..716: note = Synthetic
MALPVTALLLPLALLLHAARPQTVVTQEPSFSVSPGGTVTLTCGLYSDSVSTSYYPSWYQQTPGQAPRTLIYNTNTRSSGVPDRFSGSILGNKAALTITGAQADDESDYYCVLYMVSGIVFGSGTKVTVLGSTSGSGKPGSGEGSTKGEVQLLESGGDLVQPGGSLRLSCAASGFTFSTYAMSWVRQAPGKGLEWVSAISGSGENIYYADSVKGRFTISRDNSKNTLFLQMNSLRAEDTAVYYCAKHTSYYMDVWGKGTTVTVSSAAATTTPAPRPPTPAPTIASQPLSLRPEACRPAAGGAVHTRGLDFACDIYIWAPLAGTCGVLLLSLVITLYCKRGRKKLLYIFKQPFMRPVQTTQEEDGCSCRFPEEEEGGCELRVKFSRSADAPAYQQGQNQLYNELNLGRREEYDVLDKRRGRDPEMGGKPRRKNPQEGLYNELQKDKMAEAYSEIGMKGERRRGKGHDGLYQGLSTATKDTYDALHMQALPPRGSGEGRGSLLTCGDVEENPGPMALPVTALLLPLALLLHAARPNWVNVISDLKKIEDLIQSMHIDATLYTESDVHPSCKVTAMKCFLLELQVISLESGDASIHDTVENLIILANNSLSSNGNVTESGCKECEELEEKNIKEFLQSFVHIVQMFINTSTTTPAPRPPTPAPTIASQPLSLRPEACRPAAGGAVHTRGLDFACDIYIWAPLAGTCGVLLLSLVITLYC

SEQ ID NO: 2610 - protein, 722 aa, synthetic construct
  REGION 1..722: note = Synthetic
MALPVTALLLPLALLLHAARPQTVVTQEPSFSVSPGGTVTLTCGLSSGSVSTSYYPGWYQQTPGQAPRTLIYSTNTRSSGVPDRFSGSILGNKAALTITGAQADDESDYYCVLYMGSGMFIFGSGTKVTVLGSTSGSGKPGSGEGSTKGQVQLVESGGGVVQPGRSLRLSCAASGFTFSSYGMHWVRQAPGKGLEWVAVIWYDGINKYYADSVKGRFTISRDNSKNTLYLQMNSLRAEDTAVYYCARERLERRYYYYMDVWGKGTTVTVSSAAATTTPAPRPPTPAPTIASQPLSLRPEACRPAAGGAVHTRGLDFACDIYIWAPLAGTCGVLLLSLVITLYCKRGRKKLLYIFKQPFMRPVQTTQEEDGCSCRFPEEEEGGCELRVKFSRSADAPAYQQGQNQLYNELNLGRREEYDVLDKRRGRDPEMGGKPRRKNPQEGLYNELQKDKMAEAYSEIGMKGERRRGKGHDGLYQGLSTATKDTYDALHMQALPPRGSGEGRGSLLTCGDVEENPGPMALPVTALLLPLALLLHAARPNWVNVISDLKKIEDLIQSMHIDATLYTESDVHPSCKVTAMKCFLLELQVISLESGDASIHDTVENLIILANNSLSSNGNVTESGCKECEELEEKNIKEFLQSFVHIVQMFINTSTTTPAPRPPTPAPTIASQPLSLRPEACRPAAGGAVHTRGLDFACDIYIWAPLAGTCGVLLLSLVITLYC

SEQ ID NO: 2611 - protein, 716 aa, synthetic construct
  REGION 1..716: note = Synthetic
MALPVTALLLPLALLLHAARPQTVVTQEPSFSVSPGGTVTLTCALSSDSVSTSYFPSWYRQTPGQAPRTLIYNTNTRSSGVPDRFSGSILGNKAALTITGAQADDESDYYCVLYMGSGIIFGSGTKVTVLGSTSGSGKPGSGEGSTKGEVQLLESGGGLVQPGGSLRLSCAASGFTFSSFAMSWVRQAPGKGLEWVSAVSGSGDDTYYADSVKGRFTISRDNSKNTLYLQMNSLRAEDTAVYYCAKHTSYYLDVWGKGTTVTVSSAAATTTPAPRPPTPAPTIASQPLSLRPEACRPAAGGAVHTRGLDFACDIYIWAPLAGTCGVLLLSLVITLYCKRGRKKLLYIFKQPFMRPVQTTQEEDGCSCRFPEEEEGGCELRVKFSRSADAPAYQQGQNQLYNELNLGRREEYDVLDKRRGRDPEMGGKPRRKNPQEGLYNELQKDKMAEAYSEIGMKGERRRGKGHDGLYQGLSTATKDTYDALHMQALPPRGSGEGRGSLLTCGDVEENPGPMALPVTALLLPLALLLHAARPNWVNVISDLKKIEDLIQSMHIDATLYTESDVHPSCKVTAMKCFLLELQVISLESGDASIHDTVENLIILANNSLSSNGNVTESGCKECEELEEKNIKEFLQSFVHIVQMFINTSTTTPAPRPPTPAPTIASQPLSLRPEACRPAAGGAVHTRGLDFACDIYIWAPLAGTCGVLLLSLVITLYC

SEQ ID NO: 2612 - protein, 722 aa, synthetic construct
  REGION 1..722: note = Synthetic
MALPVTALLLPLALLLHAARPEIVLTQSPDFQSVTPKEKVTITCRASQSIGSSLHWYQQKPDQSPKLLIKFASQSFSGVPSRFSGSGSGTDFTLTINSLEAEDAATYFCHQSSSLPWTFGQGTKVEIKGSTSGSGKPGSGEGSTKGQVQLVESGGGVVQPGRSLRLSCAASGFNFSTFDIHWVRQAPGKGLEWVALIWYDGSYKYYADSVKGRFTISRDNSKNTLDLRMNSLRAEDTAVYYCARNDNWNDEHYYHYYMDVWGKGTTVTVSSAAATTTPAPRPPTPAPTIASQPLSLRPEACRPAAGGAVHTRGLDFACDIYIWAPLAGTCGVLLLSLVITLYCKRGRKKLLYIFKQPFMRPVQTTQEEDGCSCRFPEEEEGGCELRVKFSRSADAPAYQQGQNQLYNELNLGRREEYDVLDKRRGRDPEMGGKPRRKNPQEGLYNELQKDKMAEAYSEIGMKGERRRGKGHDGLYQGLSTATKDTYDALHMQALPPRGSGEGRGSLLTCGDVEENPGPMALPVTALLLPLALLLHAARPNWVNVISDLKKIEDLIQSMHIDATLYTESDVHPSCKVTAMKCFLLELQVISLESGDASIHDTVENLIILANNSLSSNGNVTESGCKECEELEEKNIKEFLQSFVHIVQMFINTSTTTPAPRPPTPAPTIASQPLSLRPEACRPAAGGAVHTRGLDFACDIYIWAPLAGTCGVLLLSLVITLYC

SEQ ID NO: 2613 - protein, 727 aa, synthetic construct
  REGION 1..727: note = Synthetic
MALPVTALLLPLALLLHAARPQTVVTQEPSFSVSPGGTVTLTCGLSSGSVSTSYFPSWYQQTPGQAPRTLIYITNTRSSGVPDRFSGSIIGNKAALTITGAQADDESDYFCVLYMGSGTWVFGGGTKLTVLGSTSGSGKPGSGEGSTKGEVHLLESGGGLVQPGGSLRLSCAASGFTFSSYAMNWVRQAPGKGLEWVSSISGSGSSSYYADSVKGRFTISRDNSKNTLYLQMNSLRAEDTAVYYCASRGFNSQYPPGYYYYYMDVWGKGTTVTVSSAAATTTPAPRPPTPAPTIASQPLSLRPEACRPAAGGAVHTRGLDFACDIYIWAPLAGTCGVLLLSLVITLYCKRGRKKLLYIFKQPFMRPVQTTQEEDGCSCRFPEEEEGGCELRVKFSRSADAPAYQQGQNQLYNELNLGRREEYDVLDKRRGRDPEMGGKPRRKNPQEGLYNELQKDKMAEAYSEIGMKGERRRGKGHDGLYQGLSTATKDTYDALHMQALPPRGSGEGRGSLLTCGDVEENPGPMALPVTALLLPLALLLHAARPNWVNVISDLKKIEDLIQSMHIDATLYTESDVHPSCKVTAMKCFLLELQVISLESGDASIHDTVENLIILANNSLSSNGNVTESGCKECEELEEKNIKEFLQSFVHIVQMFINTSTTTPAPRPPTPAPTIASQPLSLRPEACRPAAGGAVHTRGLDFACDIYIWAPLAGTCGVLLLSLVITLYC

SEQ ID NO: 2614 - protein, 714 aa, synthetic construct
  REGION 1..714: note = Synthetic
MALPVTALLLPLALLLHAARPEIVLTQSPDFQSVTPKEKVTITCRASQSIGSSLHWYQQKPDQSPKLLIKFASQSFSGVPSRFSGSGSGTDFTLTIHSLEAEDAATYYCHQSSSLPWTFGQGTKVEIKGSTSGSGKPGSGEGSTKGEVQLLESGGGLVQPGGSLRLSCAASGFTFSNYAMTWVRQAPGKGLEWVSAISGSGIGTYYADSVQGRFTTSRDNSKNTLYLQMNSLRAEDTAVYYCAKGGYNWKDVWGKGTTVTVSSAAATTTPAPRPPTPAPTIASQPLSLRPEACRPAAGGAVHTRGLDFACDIYIWAPLAGTCGVLLLSLVITLYCKRGRKKLLYIFKQPFMRPVQTTQEEDGCSCRFPEEEEGGCELRVKFSRSADAPAYQQGQNQLYNELNLGRREEYDVLDKRRGRDPEMGGKPRRKNPQEGLYNELQKDKMAEAYSEIGMKGERRRGKGHDGLYQGLSTATKDTYDALHMQALPPRGSGEGRGSLLTCGDVEENPGPMALPVTALLLPLALLLHAARPNWVNVISDLKKIEDLIQSMHIDATLYTESDVHPSCKVTAMKCFLLELQVISLESGDASIHDTVENLIILANNSLSSNGNVTESGCKECEELEEKNIKEFLQSFVHIVQMFINTSTTTPAPRPPTPAPTIASQPLSLRPEACRPAAGGAVHTRGLDFACDIYIWAPLAGTCGVLLLSLVITLYC

SEQ ID NO: 2615 - protein, 722 aa, synthetic construct
  REGION 1..722: note = Synthetic
MALPVTALLLPLALLLHAARPEIVLTQSPDFQSVTPKEKVTITCRASQSIGSSLHWYQQKPDQSPKLLIKFASQSFSGVPSRFSGSGSGTDFTLTIHSLEAEDAATYYCHQSSSLPWTFGQGTKVEIKGSTSGSGKPGSGEGSTKGQVQLVESGGGVVQPGRSLRLSCAASGFTFTNYDMHWVRQAPGKGLEWVTIIWHDGSNKYYLDSVRGRFTISRDNSKNTLYLQMNSLRAEDTAVYYCARGDNWNDEHHYFYYMDVWGKGTTVTVSSAAATTTPAPRPPTPAPTIASQPLSLRPEACRPAAGGAVHTRGLDFACDIYIWAPLAGTCGVLLLSLVITLYCKRGRKKLLYIFKQPFMRPVQTTQEEDGCSCRFPEEEEGGCELRVKFSRSADAPAYQQGQNQLYNELNLGRREEYDVLDKRRGRDPEMGGKPRRKNPQEGLYNELQKDKMAEAYSEIGMKGERRRGKGHDGLYQGLSTATKDTYDALHMQALPPRGSGEGRGSLLTCGDVEENPGPMALPVTALLLPLALLLHAARPNWVNVISDLKKIEDLIQSMHIDATLYTESDVHPSCKVTAMKCFLLELQVISLESGDASIHDTVENLIILANNSLSSNGNVTESGCKECEELEEKNIKEFLQSFVHIVQMFINTSTTTPAPRPPTPAPTIASQPLSLRPEACRPAAGGAVHTRGLDFACDIYIWAPLAGTCGVLLLSLVITLYC

SEQ ID NO: 2616 - protein, 722 aa, synthetic construct
  REGION 1..722: note = Synthetic
MALPVTALLLPLALLLHAARPEIVLTQSPATLSLSPGERATLSCRASQSVSSSLAWYQQKPGQAPRLLIYDASNRATGIPARFSGSGSGTDFTLTISSLEPEDFAVYYCQQRSNWPLTFGGGTKVEIKGSTSGSGKPGSGEGSTKGQVQLVESGGGVVQPGRSLRLSCAASGFTFSNYDMHWVRQAPGKGLEWVTIIWHDGSNKYYLDSVKGRFTISRDNSKNTLYLQMNSLRAEDTAVYYCARGDNWNDEHHYFYYMDVWGKGTTVTVSSAAATTTPAPRPPTPAPTIASQPLSLRPEACRPAAGGAVHTRGLDFACDIYIWAPLAGTCGVLLLSLVITLYCKRGRKKLLYIFKQPFMRPVQTTQEEDGCSCRFPEEEEGGCELRVKFSRSADAPAYQQGQNQLYNELNLGRREEYDVLDKRRGRDPEMGGKPRRKNPQEGLYNELQKDKMAEAYSEIGMKGERRRGKGHDGLYQGLSTATKDTYDALHMQALPPRGSGEGRGSLLTCGDVEENPGPMALPVTALLLPLALLLHAARPNWVNVISDLKKIEDLIQSMHIDATLYTESDVHPSCKVTAMKCFLLELQVISLESGDASIHDTVENLIILANNSLSSNGNVTESGCKECEELEEKNIKEFLQSFVHIVQMFINTSTTTPAPRPPTPAPTIASQPLSLRPEACRPAAGGAVHTRGLDFACDIYIWAPLAGTCGVLLLSLVITLYC

SEQ ID NO: 2617 - protein, 718 aa, synthetic construct
  REGION 1..718: note = Synthetic
MALPVTALLLPLALLLHAARPEIVLTQSPGTLSLSPGERATLSCRASQSVSSSYLAWYQQKPGQAPRLLIYGASSRATGIPDRFSGSGSGTDFTLTISRLEPEDFAVYYCQQYGSSWTFGQGTKVEIKGSTSGSGKPGSGEGSTKGEVQLVESGGGVVRPGGSLRLSCAASGFTFDDYGMSWVRQAPGKGLEWVSGINWNGGSTGYVDSVKGRFTISRDNAKNSLYLQMNSLRAEDTALYHCARPVTTDYYYYMDVWGKGTTVTVSSAAATTTPAPRPPTPAPTIASQPLSLRPEACRPAAGGAVHTRGLDFACDIYIWAPLAGTCGVLLLSLVITLYCKRGRKKLLYIFKQPFMRPVQTTQEEDGCSCRFPEEEEGGCELRVKFSRSADAPAYQQGQNQLYNELNLGRREEYDVLDKRRGRDPEMGGKPRRKNPQEGLYNELQKDKMAEAYSEIGMKGERRRGKGHDGLYQGLSTATKDTYDALHMQALPPRGSGEGRGSLLTCGDVEENPGPMALPVTALLLPLALLLHAARPNWVNVISDLKKIEDLIQSMHIDATLYTESDVHPSCKVTAMKCFLLELQVISLESGDASIHDTVENLIILANNSLSSNGNVTESGCKECEELEEKNIKEFLQSFVHIVQMFINTSTTTPAPRPPTPAPTIASQPLSLRPEACRPAAGGAVHTRGLDFACDIYIWAPLAGTCGVLLLSLVITLYC

SEQ ID NO: 2618 - protein, 726 aa, synthetic construct
  REGION 1..726: note = Synthetic
MALPVTALLLPLALLLHAARPEIVLTQSPGTLSLSPGERATLSCRASQSVSSSYLAWYQQKPGQAPRLLIYGASSRATGIPDRFSGSGSGTDFTLTISRLEPEDFAVYYCQQYGSSWTFGQGTKVEIKGSTSGSGKPGSGEGSTKGEVQLLESGGGLVQPGGSLRLSCAASGFTFSSYAMSWVRQAPGKGLEWVSAISGSGGSTYYADSVKGRFTISRDNSKNTLYLQMNSLRAEDTAVYYCAKKGTSYNWNDVHYYYYYYMDVWGKGTTVTVSSAAATTTPAPRPPTPAPTIASQPLSLRPEACRPAAGGAVHTRGLDFACDIYIWAPLAGTCGVLLLSLVITLYCKRGRKKLLYIFKQPFMRPVQTTQEEDGCSCRFPEEEEGGCELRVKFSRSADAPAYQQGQNQLYNELNLGRREEYDVLDKRRGRDPEMGGKPRRKNPQEGLYNELQKDKMAEAYSEIGMKGERRRGKGHDGLYQGLSTATKDTYDALHMQALPPRGSGEGRGSLLTCGDVEENPGPMALPVTALLLPLALLLHAARPNWVNVISDLKKIEDLIQSMHIDATLYTESDVHPSCKVTAMKCFLLELQVISLESGDASIHDTVENLIILANNSLSSNGNVTESGCKECEELEEKNIKEFLQSFVHIVQMFINTSTTTPAPRPPTPAPTIASQPLSLRPEACRPAAGGAVHTRGLDFACDIYIWAPLAGTCGVLLLSLVITLYC

SEQ ID NO: 2619 - protein, 720 aa, synthetic construct
  REGION 1..720: note = Synthetic
MALPVTALLLPLALLLHAARPEIVLTQSPGTLSLSPGERATLSCRASQSVSSSYLAWYQQKPGQAPRLLIYGASSRATGIPDRFSGSGSGTDFTLTISRLEPEDFAVYYCQQYGSSWTFGQGTKVEIKGSTSGSGKPGSGEGSTKGQLQLQESGPGLVKPSETLSLTCTVSGGSISSSSYYWGWIRQPPGKGLEWIGSIYYSGSTYYNPSLKSRVTISVDTSKNQFSLKLSSVTAADTAVYYCTTGTTAYYYYYYMDVWGKGTTVTVSSAAATTTPAPRPPTPAPTIASQPLSLRPEACRPAAGGAVHTRGLDFACDIYIWAPLAGTCGVLLLSLVITLYCKRGRKKLLYIFKQPFMRPVQTTQEEDGCSCRFPEEEEGGCELRVKFSRSADAPAYQQGQNQLYNELNLGRREEYDVLDKRRGRDPEMGGKPRRKNPQEGLYNELQKDKMAEAYSEIGMKGERRRGKGHDGLYQGLSTATKDTYDALHMQALPPRGSGEGRGSLLTCGDVEENPGPMALPVTALLLPLALLLHAARPNWVNVISDLKKIEDLIQSMHIDATLYTESDVHPSCKVTAMKCFLLELQVISLESGDASIHDTVENLIILANNSLSSNGNVTESGCKECEELEEKNIKEFLQSFVHIVQMFINTSTTTPAPRPPTPAPTIASQPLSLRPEACRPAAGGAVHTRGLDFACDIYIWAPLAGTCGVLLLSLVITLYC

SEQ ID NO: 2620 - protein, 719 aa, synthetic construct
  REGION 1..719: note = Synthetic
MALPVTALLLPLALLLHAARPEIVLTQSPGTLSLSPGERATLSCRASQSVSSSYLAWYQQKPGQAPRLLIYGASSRATGIPDRFSGSGSGTDFTLTISRLEPEDFAVYYCQQYGSSWTFGQGTKVEIKGSTSGSGKPGSGEGSTKGEVQLLESGGGLVQPGGSLRLSCAASGFTFSSYAMTWVRQAPGKGLEWVSAISGSGGSTYYADSVKGRFTISRDNSKNTLYLQMNSLRAEDTAVYYCARGGYNWHYYYYMDVWGKGTTVTVSSAAATTTPAPRPPTPAPTIASQPLSLRPEACRPAAGGAVHTRGLDFACDIYIWAPLAGTCGVLLLSLVITLYCKRGRKKLLYIFKQPFMRPVQTTQEEDGCSCRFPEEEEGGCELRVKFSRSADAPAYQQGQNQLYNELNLGRREEYDVLDKRRGRDPEMGGKPRRKNPQEGLYNELQKDKMAEAYSEIGMKGERRRGKGHDGLYQGLSTATKDTYDALHMQALPPRGSGEGRGSLLTCGDVEENPGPMALPVTALLLPLALLLHAARPNWVNVISDLKKIEDLIQSMHIDATLYTESDVHPSCKVTAMKCFLLELQVISLESGDASIHDTVENLIILANNSLSSNGNVTESGCKECEELEEKNIKEFLQSFVHIVQMFINTSTTTPAPRPPTPAPTIASQPLSLRPEACRPAAGGAVHTRGLDFACDIYIWAPLAGTCGVLLLSLVITLYC

SEQ ID NO: 2621 - protein, 723 aa, synthetic construct
  REGION 1..723: note = Synthetic
MALPVTALLLPLALLLHAARPEIVLTQSPDFQSVTPKEKVTITCRASQNIGSSLHWYQQKPDQSPKLLIKFASQSISGVPSRFSGSGSGTDFTLTINSLEAEDAAAYYCHQSSSLPWTFGQGTKVEIKGSTSGSGKPGSGEGSTKGQVQLVESGGGVVQPGRSLRLSCAASGFTFSSYDMHWVRQAPGKGLEWVSVIWYDGSNKKYGDSAKGRFTISRDNSKNTLDLQMNSLRAEDTAVYYCARGDNWNDEGGYYYYYMDVWGKGTTVTVSSAAATTTPAPRPPTPAPTIASQPLSLRPEACRPAAGGAVHTRGLDFACDIYIWAPLAGTCGVLLLSLVITLYCKRGRKKLLYIFKQPFMRPVQTTQEEDGCSCRFPEEEEGGCELRVKFSRSADAPAYQQGQNQLYNELNLGRREEYDVLDKRRGRDPEMGGKPRRKNPQEGLYNELQKDKMAEAYSEIGMKGERRRGKGHDGLYQGLSTATKDTYDALHMQALPPRGSGEGRGSLLTCGDVEENPGPMALPVTALLLPLALLLHAARPNWVNVISDLKKIEDLIQSMHIDATLYTESDVHPSCKVTAMKCFLLELQVISLESGDASIHDTVENLIILANNSLSSNGNVTESGCKECEELEEKNIKEFLQSFVHIVQMFINTSTTTPAPRPPTPAPTIASQPLSLRPEACRPAAGGAVHTRGLDFACDIYIWAPLAGTCGVLLLSLVITLYC

SEQ ID NO: 2622 - protein, 723 aa, synthetic construct
  REGION 1..723: note = Synthetic
MALPVTALLLPLALLLHAARPDIQMTQSPSSLSTSVGDRVTITCRASQGISNYLAWFQQKPGKAPKSLIYAASSLQSGVPSKFSGSGSGTDFSLTISSLQPEDFATYYCQQYNSYPITFGQGTRLEIKGSTSGSGKPGSGEGSTKGQVQLVESGGGVVQPGRSLRLSCAASGFTFSSYDMHWVRQAPGKGLEWVSVIWYDGSNKKYGDSAKGRFTISRDNSKNTLDLQMNSLRAEDTAVYYCARGDNWNDEGGYYYYYMDVWGKGTTVTVSSAAATTTPAPRPPTPAPTIASQPLSLRPEACRPAAGGAVHTRGLDFACDIYIWAPLAGTCGVLLLSLVITLYCKRGRKKLLYIFKQPFMRPVQTTQEEDGCSCRFPEEEEGGCELRVKFSRSADAPAYQQGQNQLYNELNLGRREEYDVLDKRRGRDPEMGGKPRRKNPQEGLYNELQKDKMAEAYSEIGMKGERRRGKGHDGLYQGLSTATKDTYDALHMQALPPRGSGEGRGSLLTCGDVEENPGPMALPVTALLLPLALLLHAARPNWVNVISDLKKIEDLIQSMHIDATLYTESDVHPSCKVTAMKCFLLELQVISLESGDASIHDTVENLIILANNSLSSNGNVTESGCKECEELEEKNIKEFLQSFVHIVQMFINTSTTTPAPRPPTPAPTIASQPLSLRPEACRPAAGGAVHTRGLDFACDIYIWAPLAGTCGVLLLSLVITLYC

SEQ ID NO: 2623 - protein, 720 aa, synthetic construct
  REGION 1..720: note = Synthetic
MALPVTALLLPLALLLHAARPEIVLTQSPDFQSVTPKEKVTITCRASQNIGSSLHWYQQKPDQSPKLLIKFASQSISGVPSRFSGSGSGTDFTLTINSLEAEDAAAYYCHQSSSLPWTFGQGTKVEIKGSTSGSGKPGSGEGSTKGQVQLVQSGAEVKKSGASVKVSCKASGYTLTSYGISWVRQAPGQGLEWMGWISAYNGNINYAQKFQGRVTMTTDTSTSTAYMELRSLRSDDTAVYYCVRDGDRYNWNHSYMDVWGKGTTVTVSSAAATTTPAPRPPTPAPTIASQPLSLRPEACRPAAGGAVHTRGLDFACDIYIWAPLAGTCGVLLLSLVITLYCKRGRKKLLYIFKQPFMRPVQTTQEEDGCSCRFPEEEEGGCELRVKFSRSADAPAYQQGQNQLYNELNLGRREEYDVLDKRRGRDPEMGGKPRRKNPQEGLYNELQKDKMAEAYSEIGMKGERRRGKGHDGLYQGLSTATKDTYDALHMQALPPRGSGEGRGSLLTCGDVEENPGPMALPVTALLLPLALLLHAARPNWVNVISDLKKIEDLIQSMHIDATLYTESDVHPSCKVTAMKCFLLELQVISLESGDASIHDTVENLIILANNSLSSNGNVTESGCKECEELEEKNIKEFLQSFVHIVQMFINTSTTTPAPRPPTPAPTIASQPLSLRPEACRPAAGGAVHTRGLDFACDIYIWAPLAGTCGVLLLSLVITLYC

SEQ ID NO: 2624 - protein, 720 aa, synthetic construct
  REGION 1..720: note = Synthetic
MALPVTALLLPLALLLHAARPDIQMTQSPSSLSTSVGDRVTITCRASQGISNYLAWFQQKPGKAPKSLIYAASSLQSGVPSKFSGSGSGTDFSLTISSLQPEDFATYYCQQYNSYPITFGQGTRLEIKGSTSGSGKPGSGEGSTKGQVQLVQSGAEVKKSGASVKVSCKASGYTLTSYGISWVRQAPGQGLEWMGWISAYNGNINYAQKFQGRVTMTTDTSTSTAYMELRSLRSDDTAVYYCVRDGDRYNWNHSYMDVWGKGTTVTVSSAAATTTPAPRPPTPAPTIASQPLSLRPEACRPAAGGAVHTRGLDFACDIYIWAPLAGTCGVLLLSLVITLYCKRGRKKLLYIFKQPFMRPVQTTQEEDGCSCRFPEEEEGGCELRVKFSRSADAPAYQQGQNQLYNELNLGRREEYDVLDKRRGRDPEMGGKPRRKNPQEGLYNELQKDKMAEAYSEIGMKGERRRGKGHDGLYQGLSTATKDTYDALHMQALPPRGSGEGRGSLLTCGDVEENPGPMALPVTALLLPLALLLHAARPNWVNVISDLKKIEDLIQSMHIDATLYTESDVHPSCKVTAMKCFLLELQVISLESGDASIHDTVENLIILANNSLSSNGNVTESGCKECEELEEKNIKEFLQSFVHIVQMFINTSTTTPAPRPPTPAPTIASQPLSLRPEACRPAAGGAVHTRGLDFACDIYIWAPLAGTCGVLLLSLVITLYC

SEQ ID NO: 2625 - protein, 719 aa, synthetic construct
  REGION 1..719: note = Synthetic
MALPVTALLLPLALLLHAARPEIVLTQSPDFQSVTPKEKVTITCRASQSIGSSLHWYQQKPDQSPKLLIKYVSQSISGVPSRFSGSGSGTDFTLTINSLEAEDAAAYYCHQSSSLPWTFGQGTKVEIKGSTSGSGKPGSGEGSTKGEVQLLESGGDLVQPGGSLRLSCAASGFTFSTYAMTWVRQAPGKGLEWVSAISGTSGSTYYADSVKGRFTISRDNSKSTLYLHMNSLRTEDTAVYYCARGGYNWHYYYYMDVWGKGTTVTVSSAAATTTPAPRPPTPAPTIASQPLSLRPEACRPAAGGAVHTRGLDFACDIYIWAPLAGTCGVLLLSLVITLYCKRGRKKLLYIFKQPFMRPVQTTQEEDGCSCRFPEEEEGGCELRVKFSRSADAPAYQQGQNQLYNELNLGRREEYDVLDKRRGRDPEMGGKPRRKNPQEGLYNELQKDKMAEAYSEIGMKGERRRGKGHDGLYQGLSTATKDTYDALHMQALPPRGSGEGRGSLLTCGDVEENPGPMALPVTALLLPLALLLHAARPNWVNVISDLKKIEDLIQSMHIDATLYTESDVHPSCKVTAMKCFLLELQVISLESGDASIHDTVENLIILANNSLSSNGNVTESGCKECEELEEKNIKEFLQSFVHIVQMFINTSTTTPAPRPPTPAPTIASQPLSLRPEACRPAAGGAVHTRGLDFACDIYIWAPLAGTCGVLLLSLVITLYC

SEQ ID NO: 2626 - protein, 720 aa, synthetic construct
  REGION 1..720: note = Synthetic
MALPVTALLLPLALLLHAARPEIVMTQSPATLSLSPGERATLSCRASQSVSSSYLSWYQQKPGLAPRLLIYGASTRATGIPARFSGSGSGTDFTLTISSLQPEDFAVYYCQQDYNLPPTFGQGTKVEIKGSTSGSGKPGSGEGSTKGEVQLLESGGDLVQPGGSLRLSCAASGFTFSTYAMTWVRQAPGKGLEWVSAISGTSGSTYYADSVKGRFTISRDNSKSTLYLHMNSLRTEDTAVYYCARGGYNWHYYYYMDVWGKGTTVTVSSAAATTTPAPRPPTPAPTIASQPLSLRPEACRPAAGGAVHTRGLDFACDIYIWAPLAGTCGVLLLSLVITLYCKRGRKKLLYIFKQPFMRPVQTTQEEDGCSCRFPEEEEGGCELRVKFSRSADAPAYQQGQNQLYNELNLGRREEYDVLDKRRGRDPEMGGKPRRKNPQEGLYNELQKDKMAEAYSEIGMKGERRRGKGHDGLYQGLSTATKDTYDALHMQALPPRGSGEGRGSLLTCGDVEENPGPMALPVTALLLPLALLLHAARPNWVNVISDLKKIEDLIQSMHIDATLYTESDVHPSCKVTAMKCFLLELQVISLESGDASIHDTVENLIILANNSLSSNGNVTESGCKECEELEEKNIKEFLQSFVHIVQMFINTSTTTPAPRPPTPAPTIASQPLSLRPEACRPAAGGAVHTRGLDFACDIYIWAPLAGTCGVLLLSLVITLYC

SEQ ID NO: 2627 - DNA, 2166 bp, synthetic construct
  misc_feature 1..2166: note = Synthetic
  source 1..2166: mol_type = other DNA
atggccttaccagtgaccgccttgctcctgccgctggccttgctgctccacgccgccaggccggaaattgtgctgactcagtctccagactttcagtctgtgactccaaaggagaaagtcaccatcacctgccgggccagtcagagcattggtagtagcttacactggtaccagcagaaaccagatcagtctccaaagctcctcatcaagtttgcttcccagtccttctcaggggtcccctcgaggttcagtggcagtggatctgggacagatttcaccctcaccatccatagcctggaagctgaagatgctgcaacgtattactgtcatcagagtagtagtttaccgtggacgttcggccaagggaccaaggtggaaatcaaaggcagcaccagcggcagcggcaagcccggctccggagagggcagcaccaagggccaggtgcagctggtggagtctgggggaggcgtggtccagcctgggaggtccctgagactctcctgtgcagcgtctggattcaccttcaataattatgacatgtactgggtccgccaggccccaggcaaggggctggagtgggtggcagttacatggtatgatggaagtaataaatactatgcagactccgtgaagggccgattcaccatctccagagacaattccaagaacacgctgtatctgcaaatgaacagcctgagagccgaggacacggctgtgtattactgtgcgagaggtgacaactggaatgacgaacaccactatttttactacatggacgtctggggcaaagggaccacggtcaccgtctcctcagcggccgcaaccacgacgccagcgccgcggccaccaacaccggcgcccaccatcgcgtcgcagcccctgtccctgcgcccagaggcgtgccggccagcggcggggggcgcagtgcacacgagggggctggacttcgcctgtgatatctacatctgggcgcccttggccgggacttgtggggtccttctcctgtcactggttatcaccctttactgcaaacggggcagaaagaaactcctgtatatattcaaacaaccatttatgagaccagtacaaactactcaagaggaagatggctgtagctgccgatttccagaagaagaagaaggaggatgtgaactgagagtgaagttcagcaggagcgcagacgcccccgcgtaccagcagggccagaaccagctctataacgagctcaatctaggacgaagagaggagtacgatgttttggacaagagacgtggccgggaccctgagatggggggaaagccgagaaggaagaaccctcaggaaggcctgtacaatgaactgcagaaagataagatggcggaggcctacagtgagattgggatgaaaggcgagcgccggaggggcaaggggcacgatggcctttaccagggtctcagtacagccaccaaggacacctacgacgcccttcacatgcaggccctgccccctcgcggctctggcgagggaaggggttccctgcttacttgcggcgacgtcgaagagaatcccggtccgatggccctcccagtaactgccctccttttgcccctcgcactccttcttcatgccgctcgccccaactgggtcaacgtgattagcgatttgaagaaaatcgaggaccttatacagtctatgcatattgacgctacactgtatactgagagtgatgtacacccgtcctgtaaggtaacggccatgaaatgctttcttctggagctccaggtcatcagcttggagtctggggacgcaagcatccacgatacggttgaaaacctcatcatccttgcgaacaactctctctcatctaatggaaacgttacagagagtgggtgtaaggagtgcgaagagttggaagaaaaaaacatcaaagaatttcttcaatccttcgttcacatagtgcaaatgttcattaacacgtccactaccacacccgccccgaggccacctacgccggcaccgactatcgccagtcaacccctctctctgcgccccgaggcttgccggcctgcggctggtggggcggtccacacccggggcctggattttgcgtgcgatatatacatctgggcacctcttgccggcacctgcggagtgctgcttctctcactcgttattacgctgtactgc

SEQ ID NO: 2628 - DNA, 2166 bp, synthetic construct
  misc_feature 1..2166: note = Synthetic
  source 1..2166: mol_type = other DNA
atggccttaccagtgaccgccttgctcctgccgctggccttgctgctccacgccgccaggccggaaattgtgctgactcagtctccagactttcagtctgtgactccaaaggagaaagtcaccatcacctgccgggccagtcagagcattggtagtagcttacactggtaccagcagaaaccagatcagtctccaaagctcctcatcaagtttgcttcccagtccttctcaggggtcccctcgaggttcagtggcagtggatctgggacagatttcaccctcaccatccatagcctggaagctgaagatgctgcaacgtattactgtcatcagagtagtagtttaccgtggacgttcggccaagggaccaaggtggaaatcaaaggcagcaccagcggcagcggcaagcccggctccggagagggcagcaccaagggccaggtgcagctggtggagtctgggggaggcgtggtccagcctgggaggtccctgagactctcctgtgcagcgtctgggttcaccttcagtaactatgacatgcactgggtccgccaggccccaggcaaggggctggagtgggtgacaattatatggcatgatgcaagtaataaatattatttagactccgtgaagggccgattcaccatctccagagacaattccaagaacacgctgtatctgcaaatgaacagcctgagagccgaggacacggctgtgtattactgtgcgagaggtgacaactggaacgacgaacaccactacttctactacatggacgtctggggcaaagggaccacggtcaccgtctcctcagcggccgcaaccacgacgccagcgccgcggccaccaacaccggcgcccaccatcgcgtcgcagcccctgtccctgcgcccagaggcgtgccggccagcggcggggggcgcagtgcacacgagggggctggacttcgcctgtgatatctacatctgggcgcccttggccgggacttgtggggtccttctcctgtcactggttatcaccctttactgcaaacggggcagaaagaaactcctgtatatattcaaacaaccatttatgagaccagtacaaactactcaagaggaagatggctgtagctgccgatttccagaagaagaagaaggaggatgtgaactgagagtgaagttcagcaggagcgcagacgcccccgcgtaccagcagggccagaaccagctctataacgagctcaatctaggacgaagagaggagtacgatgttttggacaagagacgtggccgggaccctgagatggggggaaagccgagaaggaagaaccctcaggaaggcctgtacaatgaactgcagaaagataagatggcggaggcctacagtgagattgggatgaaaggcgagcgccggaggggcaaggggcacgatggcctttaccagggtctcagtacagccaccaaggacacctacgacgcccttcacatgcaggccctgccccctcgcggctctggcgagggaaggggttccctgcttacttgcggcgacgtcgaagagaatcccggtccgatggccctcccagtaactgccctccttttgcccctcgcactccttcttcatgccgctcgccccaactgggtcaacgtgattagcgatttgaagaaaatcgaggaccttatacagtctatgcatattgacgctacactgtatactgagagtgatgtacacccgtcctgtaaggtaacggccatgaaatgctttcttctggagctccaggtcatcagcttggagtctggggacgcaagcatccacgatacggttgaaaacctcatcatccttgcgaacaactctctctcatctaatggaaacgttacagagagtgggtgtaaggagtgcgaagagttggaagaaaaaaacatcaaagaatttcttcaatccttcgttcacatagtgcaaatgttcattaacacgtccactaccacacccgccccgaggccacctacgccggcaccgactatcgccagtcaacccctctctctgcgccccgaggcttgccggcctgcggctggtggggcggtccacacccggggcctggattttgcgtgcgatatatacatctgggcacctcttgccggcacctgcggagtgctgcttctctcactcgttattacgctgtactgc

SEQ ID NO: 2629 - DNA, 2166 bp, synthetic construct
  misc_feature 1..2166: note = Synthetic
  source 1..2166: mol_type = other DNA
atggccttaccagtgaccgccttgctcctgccgctggccttgctgctccacgccgccaggccggaaattgtgctgactcagtctccagactttcagtctgtgactccaaaggagaaagtcaccatcacctgccgggccagtcagagcattggtagtagcttacactggtaccagcagaaaccagatcagtctccaaagctcctcatcaagtttgcttcccagtccttctcaggggtcccctcgaggttcagtggcagtggatctgggacagatttcaccctcaccatccatagcctggaagctgaagatgctgcaacgtattactgtcatcagagtagtagtttaccgtggacgttcggccaagggaccaaggtggaaatcaaaggcagcaccagcggcagcggcaagcccggctccggagagggcagcaccaagggccaggtgcagctggtggagtctgggggaggcgtggtccagcctgggaggtccctgagactctcctgtgcagcgtctgggttcaccttcagtaactatgacatgcactgggtccgccaggccccaggcaaggggctggagtgggtgacaattatatggcatgatggaagtaataaatattatttagactccgtgaagggccgattcaccatctccagagacaattccaagaacacgctgtatctgcaaatgaacagcctgagagccgaggacacggctgtgtattactgtgcgagaggtgacaactggaacgacgaacaccactacttctactacatggacgtctggggcaaagggaccacggtcaccgtctcctcagcggccgcaaccacgacgccagcgccgcggccaccaacaccggcgcccaccatcgcgtcgcagcccctgtccctgcgcccagaggcgtgccggccagcggcggggggcgcagtgcacacgagggggctggacttcgcctgtgatatctacatctgggcgcccttggccgggacttgtggggtccttctcctgtcactggttatcaccctttactgcaaacggggcagaaagaaactcctgtatatattcaaacaaccatttatgagaccagtacaaactactcaagaggaagatggctgtagctgccgatttccagaagaagaagaaggaggatgtgaactgagagtgaagttcagcaggagcgcagacgcccccgcgtaccagcagggccagaaccagctctataacgagctcaatctaggacgaagagaggagtacgatgttttggacaagagacgtggccgggaccctgagatggggggaaagccgagaaggaagaaccctcaggaaggcctgtacaatgaactgcagaaagataagatggcggaggcctacagtgagattgggatgaaaggcgagcgccggaggggcaaggggcacgatggcctttaccagggtctcagtacagccaccaaggacacctacgacgcccttcacatgcaggccctgccccctcgcggctctggcgagggaaggggttccctgcttacttgcggcgacgtcgaagagaatcccggtccgatggccctcccagtaactgccctccttttgcccctcgcactccttcttcatgccgctcgccccaactgggtcaacgtgattagcgatttgaagaaaatcgaggaccttatacagtctatgcatattgacgctacactgtatactgagagtgatgtacacccgtcctgtaaggtaacggccatgaaatgctttcttctggagctccaggtcatcagcttggagtctggggacgcaagcatccacgatacggttgaaaacctcatcatccttgcgaacaactctctctcatctaatggaaacgttacagagagtgggtgtaaggagtgcgaagagttggaagaaaaaaacatcaaagaatttcttcaatccttcgttcacatagtgcaaatgttcattaacacgtccactaccacacccgccccgaggccacctacgccggcaccgactatcgccagtcaacccctctctctgcgccccgaggcttgccggcctgcggctggtggggcggtccacacccggggcctggattttgcgtgcgatatatacatctgggcacctcttgccggcacctgcggagtgctgcttctctcactcgttattacgctgtactgc

SEQ ID NO: 2630 - DNA, 2148 bp, synthetic construct
  misc_feature 1..2148: note = Synthetic
  source 1..2148: mol_type = other DNA
atggccttaccagtgaccgccttgctcctgccgctggccttgctgctccacgccgccaggccgcagactgtggtgacccaggagccatcgctctcagtgtcccctggagggacagtcacactcacttgtggcttgagctctggctcagtctctactagttactaccccagctggtaccagcagaccccaggccaggctccacgcacgctcatctacagcacaaatattcggtcttctggggtccctgatcgcttctctggctccatccttgggaacaaagctgccctcaccatcacgggggcccaggcagatgatgaatctgattattattgtaagctgtatatgggaagtggcattattttcggcagtggaaccaaggtcactgtcctaggcagcaccagcggcagcggcaagcccggctccggagagggcagcaccaagggcgaggtgcagctgctggagtctgggggaggcttggtacagcctggggggtccctgagactctcctgtgcagcctctggattcacctttagcatctatgccatgagctgggtccgccaggctccagggaaggggctggagtgggtctcagctattagtggtggtggtgataccacatactacgcagactccgtgaagggccggttcaccatctccagagacaattccaagaccacgctggatctgcaaatgaacagcctgagagccgaggacacggccgtatattactgtgcgaaacacactagctactacatggacgtctggggcaaagggaccacggtcaccgtctcctcagcggccgcaaccacgacgccagcgccgcggccaccaacaccggcgcccaccatcgcgtcgcagcccctgtccctgcgcccagaggcgtgccggccagcggcggggggcgcagtgcacacgagggggctggacttcgcctgtgatatctacatctgggcgcccttggccgggacttgtggggtccttctcctgtcactggttatcaccctttactgcaaacggggcagaaagaaactcctgtatatattcaaacaaccatttatgagaccagtacaaactactcaagaggaagatggctgtagctgccgatttccagaagaagaagaaggaggatgtgaactgagagtgaagttcagcaggagcgcagacgcccccgcgtaccagcagggccagaaccagctctataacgagctcaatctaggacgaagagaggagtacgatgttttggacaagagacgtggccgggaccctgagatggggggaaagccgagaaggaagaaccctcaggaaggcctgtacaatgaactgcagaaagataagatggcggaggcctacagtgagattgggatgaaaggcgagcgccggaggggcaaggggcacgatggcctttaccagggtctcagtacagccaccaaggacacctacgacgcccttcacatgcaggccctgccccctcgcggctctggcgagggaaggggttccctgcttacttgcggcgacgtcgaagagaatcccggtccgatggccctcccagtaactgccctccttttgcccctcgcactccttcttcatgccgctcgccccaactgggtcaacgtgattagcgatttgaagaaaatcgaggaccttatacagtctatgcatattgacgctacactgtatactgagagtgatgtacacccgtcctgtaaggtaacggccatgaaatgctttcttctggagctccaggtcatcagcttggagtctggggacgcaagcatccacgatacggttgaaaacctcatcatccttgcgaacaactctctctcatctaatggaaacgttacagagagtgggtgtaaggagtgcgaagagttggaagaaaaaaacatcaaagaatttcttcaatccttcgttcacatagtgcaaatgttcattaacacgtccactaccacacccgccccgaggccacctacgccggcaccgactatcgccagtcaacccctctctctgcgccccgaggcttgccggcctgcggctggtggggcggtccacacccggggcctggattttgcgtgcgatatatacatctgggcacctcttgccggcacctgcggagtgctgcttctctcactcgttattacgctgtactgc

SEQ ID NO: 2631 - DNA, 2166 bp, synthetic construct
  misc_feature 1..2166: note = Synthetic
  source 1..2166: mol_type = other DNA
atggccttaccagtgaccgccttgctcctgccgctggccttgctgctccacgccgccaggccggaaattgtgctgactcagtctccagactttcagtctgtgactccaaaggagaaagtcaccatcacctgccgggccagtcagagcattggtagtagcttacactggtaccagcagaaaccagatcagtctccaaagctcctcatcaagtttgcttcccagtccttctcaggggtcccctcgaggttcagtggcagtggatctgggacagatttcaccctcaccatccatagcctggaagctgaagatgctgcaacgtattactgtcatcagagtagtagtttaccgtggacgttcggccaagggaccaaggtggaaatcaaaggcagcaccagcggcagcggcaagcccggctccggagagggcagcaccaagggccaggtgcagctggtggagtctgggggaggcgtggtccagcctgggaggtccctgagactctcctgtgcagcgtctggattcaccttcagtaactatgacaagcactgggtccgccaggccccaggcaaggggctggagtgggtggcagttatatggtatgatggaagtaataagtactatgcagactccgtgaagggccgattcaccatttccagagacaattccaagaacacgctgtatctacaaatgaacagcctgagagccgaggacacggctatgtattactgtgcgagaggtgacaactggaacgacgaacaccactacttctactacatggacgtctggggcaaagggaccacggtcaccgtctcctcagcggccgcaaccacgacgccagcgccgcggccaccaacaccggcgcccaccatcgcgtcgcagcccctgtccctgcgcccagaggcgtgccggccagcggcggggggcgcagtgcacacgagggggctggacttcgcctgtgatatctacatctgggcgcccttggccgggacttgtggggtccttctcctgtcactggttatcaccctttactgcaaacggggcagaaagaaactcctgtatatattcaaacaaccatttatgagaccagtacaaactactcaagaggaagatggctgtagctgccgatttccagaagaagaagaaggaggatgtgaactgagagtgaagttcagcaggagcgcagacgcccccgcgtaccagcagggccagaaccagctctataacgagctcaatctaggacgaagagaggagtacgatgttttggacaagagacgtggccgggaccctgagatggggggaaagccgagaaggaagaaccctcaggaaggcctgtacaatgaactgcagaaagataagatggcggaggcctacagtgagattgggatgaaaggcgagcgccggaggggcaaggggcacgatggcctttaccagggtctcagtacagccaccaaggacacctacgacgcccttcacatgcaggccctgccccctcgcggctctggcgagggaaggggttccctgcttacttgcggcgacgtcgaagagaatcccggtccgatggccctcccagtaactgccctccttttgcccctcgcactccttcttcatgccgctcgccccaactgggtcaacgtgattagcgatttgaagaaaatcgaggaccttatacagtctatgcatattgacgctacactgtatactgagagtgatgtacacccgtcctgtaaggtaacggccatgaaatgctttcttctggagctccaggtcatcagcttggagtctggggacgcaagcatccacgatacggttgaaaacctcatcatccttgcgaacaactctctctcatctaatggaaacgttacagagagtgggtgtaaggagtgcgaagagttggaagaaaaaaacatcaaagaatttcttcaatccttcgttcacatagtgcaaatgttcattaacacgtccactaccacacccgccccgaggccacctacgccggcaccgactatcgccagtcaacccctctctctgcgccccgaggcttgccggcctgcggctggtggggcggtccacacccggggcctggattttgcgtgcgatatatacatctgggcacctcttgccggcacctgcggagtgctgcttctctcactcgttattacgctgtactgc

SEQ ID NO: 2632 - DNA, 2160 bp, synthetic construct
  misc_feature 1..2160: note = Synthetic
  source 1..2160: mol_type = other DNA
atggccttaccagtgaccgccttgctcctgccgctggccttgctgctccacgccgccaggccggaaattgtgttgacgcagtctccagccaccctgtctttgtctccaggggaaagagccaccctctcctgcggggccagtcagagtgtttacaacagttacttagcctggtaccagcagaaacctggcctggcgcccaggctcctcatctatgatgcatccctcagggccactggcgtcccagacaggttcagtggcagtgggtctgggacagacttcactctcaccatcagcacactggagcctgaagattttgcagtgtattactgtcagcagtatggtggctcacccatgtacacttttggccaggggaccaagctggagatcaaaggcagcaccagcggcagcggcaagcccggctccggagagggcagcaccaagggccaggttcagttggtacagtctggagctgaggtgaagaagcctggggcctcagtgaaggtctcctgtaaggcttctggttacacctttaccaactatggtttcagctgggtgcgacaggcccctggacaagggcttgactggatgggatggatcagcgcttacaatggttacacaaattatacacagaaactccagggcagagtcaccatgaccactgacacatccacgaccacagcctacatggagctgaggagcctgagatctgacgacacggccgtctattactgtgcgagaagaggactactctactactactactccatggacgtctggggcaaagggaccacggtcaccgtctcctcagcggccgcaaccacgacgccagcgccgcggccaccaacaccggcgcccaccatcgcgtcgcagcccctgtccctgcgcccagaggcgtgccggccagcggcggggggcgcagtgcacacgagggggctggacttcgcctgtgatatctacatctgggcgcccttggccgggacttgtggggtccttctcctgtcactggttatcaccctttactgcaaacggggcagaaagaaactcctgtatatattcaaacaaccatttatgagaccagtacaaactactcaagaggaagatggctgtagctgccgatttccagaagaagaagaaggaggatgtgaactgagagtgaagttcagcaggagcgcagacgcccccgcgtaccagcagggccagaaccagctctataacgagctcaatctaggacgaagagaggagtacgatgttttggacaagagacgtggccgggaccctgagatggggggaaagccgagaaggaagaaccctcaggaaggcctgtacaatgaactgcagaaagataagatggcggaggcctacagtgagattgggatgaaaggcgagcgccggaggggcaaggggcacgatggcctttaccagggtctcagtacagccaccaaggacacctacgacgcccttcacatgcaggccctgccccctcgcggctctggcgagggaaggggttccctgcttacttgcggcgacgtcgaagagaatcccggtccgatggccctcccagtaactgccctccttttgcccctcgcactccttcttcatgccgctcgccccaactgggtcaacgtgattagcgatttgaagaaaatcgaggaccttatacagtctatgcatattgacgctacactgtatactgagagtgatgtacacccgtcctgtaaggtaacggccatgaaatgctttcttctggagctccaggtcatcagcttggagtctggggacgcaagcatccacgatacggttgaaaacctcatcatccttgcgaacaactctctctcatctaatggaaacgttacagagagtgggtgtaaggagtgcgaagagttggaagaaaaaaacatcaaagaatttcttcaatccttcgttcacatagtgcaaatgttcattaacacgtccactaccacacccgccccgaggccacctacgccggcaccgactatcgccagtcaacccctctctctgcgccccgaggcttgccggcctgcggctggtggggcggtccacacccggggcctggattttgcgtgcgatatatacatctgggcacctcttgccggcacctgcggagtgctgcttctctcactcgttattacgctgtactgc

SEQ ID NO: 2633 - DNA, 2148 bp, synthetic construct
  misc_feature 1..2148: note = Synthetic
  source 1..2148: mol_type = other DNA
atggccttaccagtgaccgccttgctcctgccgctggccttgctgctccacgccgccaggccgcagactgtggtgacccaggagccatcgctctcagtgtcccctggagggacagtcacactcacttgtggcttgagctctggctcagtctctactagtgactaccccagctggtaccagcagaccccaggccaggctccacgcacgctcatctacagaacaaacactcgctcttctggggtccctgatcgcttctctggctccatccttgggaacaaagctgccctcaccatcacgggggcccaggcagatgatgaatctgattattactgtgtgctgtatatggatagtggcattattttcggcagtggaaccaaggtcactgtcctaggcagcaccagcggcagcggcaagcccggctccggagagggcagcaccaagggcgaggtgcagctgctggagtctgggggaggcctggtacagcctggggggtccctgagactctcctgtacagcctctggattcacctttagcagctttgccatgagctgggtccgccaggctccagggaaggggctggagtgggtctcagctatgagtggtagtggtgataccacatactacgcagactccgtgaagggccggttcaccatctcccgagacaattccaagaccacgctgtatctgcaaatgaacagcctgagagccgaggacacggccgtatattcctgtgcgaagcacactacctactacatggacgtctggggcaaagggaccacggtcaccgtctcctcagcggccgcaaccacgacgccagcgccgcggccaccaacaccggcgcccaccatcgcgtcgcagcccctgtccctgcgcccagaggcgtgccggccagcggcggggggcgcagtgcacacgagggggctggacttcgcctgtgatatctacatctgggcgcccttggccgggacttgtggggtccttctcctgtcactggttatcaccctttactgcaaacggggcagaaagaaactcctgtatatattcaaacaaccatttatgagaccagtacaaactactcaagaggaagatggctgtagctgccgatttccagaagaagaagaaggaggatgtgaactgagagtgaagttcagcaggagcgcagacgcccccgcgtaccagcagggccagaaccagctctataacgagctcaatctaggacgaagagaggagtacgatgttttggacaagagacgtggccgggaccctgagatggggggaaagccgagaaggaagaaccctcaggaaggcctgtacaatgaactgcagaaagataagatggcggaggcctacagtgagattgggatgaaaggcgagcgccggaggggcaaggggcacgatggcctttaccagggtctcagtacagccaccaaggacacctacgacgcccttcacatgcaggccctgccccctcgcggctctggcgagggaaggggttccctgcttacttgcggcgacgtcgaagagaatcccggtccgatggccctcccagtaactgccctccttttgcccctcgcactccttcttcatgccgctcgccccaactgggtcaacgtgattagcgatttgaagaaaatcgaggaccttatacagtctatgcatattgacgctacactgtatactgagagtgatgtacacccgtcctgtaaggtaacggccatgaaatgctttcttctggagctccaggtcatcagcttggagtctggggacgcaagcatccacgatacggttgaaaacctcatcatccttgcgaacaactctctctcatctaatggaaacgttacagagagtgggtgtaaggagtgcgaagagttggaagaaaaaaacatcaaagaatttcttcaatccttcgttcacatagtgcaaatgttcattaacacgtccactaccacacccgccccgaggccacctacgccggcaccgactatcgccagtcaacccctctctctgcgccccgaggcttgccggcctgcggctggtggggcggtccacacccggggcctggattttgcgtgcgatatatacatctgggcacctcttgccggcacctgcggagtgctgcttctctcactcgttattacgctgtactgc

SEQ ID NO: 2634 - DNA, 2148 bp, synthetic construct
  misc_feature 1..2148: note = Synthetic
  source 1..2148: mol_type = other DNA
atggccttaccagtgaccgccttgctcctgccgctggccttgctgctccacgccgccaggccgcagactgtggtgacccaggagccatcgctctcagtgtcccctggagggacagtcacactcacttgtggcttgagctctggctcagtctctactagtgactaccccagttggtaccagcagaccccaggccaggctccacgcacgctcatctacagaacaaacactcgctcttctggggtccctgatcgcttctctggctccatccttgggaacaaagctgccctcaccatcacgggggcccaggcagatgatgaatctgattattactgtgtgctgtatatgggtagtggcattattttcggcagtggaaccaaggtcactgtcctaggcagcaccagcggcagcggcaagcccggctccggagagggcagcaccaagggcgaggtgcagctgctggagtctgggggaggcttggtacagcctggggggtccctgagactctcctgtgcagcctctggattcacctttaacacctatgccatgagctgggtccgccaggctccagggaaggggctggagtgggtctcagctatgagtggtagtggtgataccacatactacgcagactccgtgaagggccggttcaccatctccagagacaattccaagaccactctgtatctgcaaatgaacagcctgagagccgaggacacggccgtatattcctgtgcgaaacacacttcctactacatggacgtctggggcaaagggaccacggtcaccgtctcctcagcggccgcaaccacgacgccagcgccgcggccaccaacaccggcgcccaccatcgcgtcgcagcccctgtccctgcgcccagaggcgtgccggccagcggcggggggcgcagtgcacacgagggggctggacttcgcctgtgatatctacatctgggcgcccttggccgggacttgtggggtccttctcctgtcactggttatcaccctttactgcaaacggggcagaaagaaactcctgtatatattcaaacaaccatttatgagaccagtacaaactactcaagaggaagatggctgtagctgccgatttccagaagaagaagaaggaggatgtgaactgagagtgaagttcagcaggagcgcagacgcccccgcgtaccagcagggccagaaccagctctataacgagctcaatctaggacgaagagaggagtacgatgttttggacaagagacgtggccgggaccctgagatggggggaaagccgagaaggaagaaccctcaggaaggcctgtacaatgaactgcagaaagataagatggcggaggcctacagtgagattgggatgaaaggcgagcgccggaggggcaaggggcacgatggcctttaccagggtctcagtacagccaccaaggacacctacgacgcccttcacatgcaggccctgccccctcgcggctctggcgagggaaggggttccctgcttacttgcggcgacgtcgaagagaatcccggtccgatggccctcccagtaactgccctccttttgcccctcgcactccttcttcatgccgctcgccccaactgggtcaacgtgattagcgatttgaagaaaatcgaggaccttatacagtctatgcatattgacgctacactgtatactgagagtgatgtacacccgtcctgtaaggtaacggccatgaaatgctttcttctggagctccaggtcatcagcttggagtctggggacgcaagcatccacgatacggttgaaaacctcatcatccttgcgaacaactctctctcatctaatggaaacgttacagagagtgggtgtaaggagtgcgaagagttggaagaaaaaaacatcaaagaatttcttcaatccttcgttcacatagtgcaaatgttcattaacacgtccactaccacacccgccccgaggccacctacgccggcaccgactatcgccagtcaacccctctctctgcgccccgaggcttgccggcctgcggctggtggggcggtccacacccggggcctggattttgcgtgcgatatatacatctgggcacctcttgccggcacctgcggagtgctgcttctctcactcgttattacgctgtactgc

SEQ ID NO: 2635 - DNA, 2148 bp, synthetic construct
  misc_feature 1..2148: note = Synthetic
  source 1..2148: mol_type = other DNA
atggccttaccagtgaccgccttgctcctgccgctggccttgctgctccacgccgccaggccgcagactgtggtgacccaggagccatcgttctcagtgtcccctggagggacagtcacactcacttgtggcttatactctgactcagtctctactagttactaccccagctggtaccagcagaccccaggccaggctccacgcacgctcatctacaacacaaacactcgctcttctggggtccctgatcgcttctctggctccatccttgggaacaaagctgccctcaccatcacgggggcccaggcagatgatgaatctgattattactgtgtactatatatggttagtggcattgttttcggcagtggaaccaaggtcactgtcctgggcagcaccagcggcagcggcaagcccggctccggagagggcagcaccaagggcgaggtccaattattggagtctgggggagacttggtacagcctggggggtccctgagactctcctgtgcagcctctggattcacctttagcacctatgccatgagctgggtccgccaggctccagggaaggggctggaatgggtctcagctattagtggtagtggtgaaaacatatactacgcagactccgtgaagggccggttcaccatctccagagacaattccaagaacacgctatttctacaaatgaacagcctgagagccgaggacacggccgtatattactgtgcgaaacacactagctattacatggacgtctggggcaaagggaccacggtcaccgtctcctcagcggccgcaaccacgacgccagcgccgcggccaccaacaccggcgcccaccatcgcgtcgcagcccctgtccctgcgcccagaggcgtgccggccagcggcggggggcgcagtgcacacgagggggctggacttcgcctgtgatatctacatctgggcgcccttggccgggacttgtggggtccttctcctgtcactggttatcaccctttactgcaaacggggcagaaagaaactcctgtatatattcaaacaaccatttatgagaccagtacaaactactcaagaggaagatggctgtagctgccgatttccagaagaagaagaaggaggatgtgaactgagagtgaagttcagcaggagcgcagacgcccccgcgtaccagcagggccagaaccagctctataacgagctcaatctaggacgaagagaggagtacgatgttttggacaagagacgtggccgggaccctgagatggggggaaagccgagaaggaagaaccctcaggaaggcctgtacaatgaactgcagaaagataagatggcggaggcctacagtgagattgggatgaaaggcgagcgccggaggggcaaggggcacgatggcctttaccagggtctcagtacagccaccaaggacacctacgacgcccttcacatgcaggccctgccccctcgcggctctggcgagggaaggggttccctgcttacttgcggcgacgtcgaagagaatcccggtccgatggccctcccagtaactgccctccttttgcccctcgcactccttcttcatgccgctcgccccaactgggtcaacgtgattagcgatttgaagaaaatcgaggaccttatacagtctatgcatattgacgctacactgtatactgagagtgatgtacacccgtcctgtaaggtaacggccatgaaatgctttcttctggagctccaggtcatcagcttggagtctggggacgcaagcatccacgatacggttgaaaacctcatcatccttgcgaacaactctctctcatctaatggaaacgttacagagagtgggtgtaaggagtgcgaagagttggaagaaaaaaacatcaaagaatttcttcaatccttcgttcacatagtgcaaatgttcattaacacgtccactaccacacccgccccgaggccacctacgccggcaccgactatcgccagtcaacccctctctctgcgccccgaggcttgccggcctgcggctggtggggcggtccacacccggggcctggattttgcgtgcgatatatacatctgggcacctcttgccggcacctgcggagtgctgcttctctcactcgttattacgctgtactgc

SEQ ID NO: 2636 - DNA, 2166 bp, synthetic construct
  misc_feature 1..2166: note = Synthetic
  source 1..2166: mol_type = other DNA
atggccttaccagtgaccgccttgctcctgccgctggccttgctgctccacgccgccaggccgcagactgtggtgacccaggagccatcgttctcagtgtcccctggagggacagtcacactcacttgtggcttgagctctggctcagtctctactagttactaccccggctggtaccagcagaccccaggccaggctccacgcacgctcatctacagcacaaacactcgctcttctggggtccctgatcgcttctctggctccatccttgggaacaaagctgccctcaccatcacgggggcccaggcagatgatgaatctgattattactgtgtgctatatatgggtagtggcatgtttattttcggcagtggaaccaaggtcactgtcctaggcagcaccagcggcagcggcaagcccggctccggagagggcagcaccaagggccaggtgcagctggtggagtctgggggaggcgtggtccagcctgggaggtccctgagactctcctgtgcagcgtctggattcaccttcagtagttatggcatgcactgggtccgccaggctccaggcaaggggctggagtgggtggcagttatatggtatgatggaattaataaatactatgcagactccgtgaagggccgattcaccatctccagagacaattccaagaacacgctgtatctgcaaatgaacagcctgagagccgaagacacggctgtgtattactgtgcgagagaacggctggaacgaaggtactactactacatggacgtctggggcaaagggaccacggtcaccgtctcctcagcggccgcaaccacgacgccagcgccgcggccaccaacaccggcgcccaccatcgcgtcgcagcccctgtccctgcgcccagaggcgtgccggccagcggcggggggcgcagtgcacacgagggggctggacttcgcctgtgatatctacatctgggcgcccttggccgggacttgtggggtccttctcctgtcactggttatcaccctttactgcaaacggggcagaaagaaactcctgtatatattcaaacaaccatttatgagaccagtacaaactactcaagaggaagatggctgtagctgccgatttccagaagaagaagaaggaggatgtgaactgagagtgaagttcagcaggagcgcagacgcccccgcgtaccagcagggccagaaccagctctataacgagctcaatctaggacgaagagaggagtacgatgttttggacaagagacgtggccgggaccctgagatggggggaaagccgagaaggaagaaccctcaggaaggcctgtacaatgaactgcagaaagataagatggcggaggcctacagtgagattgggatgaaaggcgagcgccggaggggcaaggggcacgatggcctttaccagggtctcagtacagccaccaaggacacctacgacgcccttcacatgcaggccctgccccctcgcggctctggcgagggaaggggttccctgcttacttgcggcgacgtcgaagagaatcccggtccgatggccctcccagtaactgccctccttttgcccctcgcactccttcttcatgccgctcgccccaactgggtcaacgtgattagcgatttgaagaaaatcgaggaccttatacagtctatgcatattgacgctacactgtatactgagagtgatgtacacccgtcctgtaaggtaacggccatgaaatgctttcttctggagctccaggtcatcagcttggagtctggggacgcaagcatccacgatacggttgaaaacctcatcatccttgcgaacaactctctctcatctaatggaaacgttacagagagtgggtgtaaggagtgcgaagagttggaagaaaaaaacatcaaagaatttcttcaatccttcgttcacatagtgcaaatgttcattaacacgtccactaccacacccgccccgaggccacctacgccggcaccgactatcgccagtcaacccctctctctgcgccccgaggcttgccggcctgcggctggtggggcggtccacacccggggcctggattttgcgtgcgatatatacatctgggcacctcttgccggcacctgcggagtgctgcttctctcactcgttattacgctgtactgc

SEQ ID NO: 2637 - DNA, 2148 bp, synthetic construct
  misc_feature 1..2148: note = Synthetic
  source 1..2148: mol_type = other DNA
atggccttaccagtgaccgccttgctcctgccgctggccttgctgctccacgccgccaggccgcagactgtggtgacccaggagccatcgttctcagtgtcccctggagggacagtcacactcacttgtgccttgagctctgactcagtctctactagttactttcccagctggtaccggcagaccccaggccaggctccacgcacgctcatctacaacacaaacactcgctcttctggggtccctgatcgcttctctggctccatccttgggaacaaagctgccctcaccatcacgggggcccaggcagatgatgaatctgattattactgtgtgctatatatgggtagtggcattattttcggcagtggaaccaaggtcactgtcctaggcagcaccagcggcagcggcaagcccggctccggagagggcagcaccaagggcgaggtgcagttgttggagtctgggggaggcttggtacagcctggggggtccctgagactctcctgtgcagcctctggattcacctttagcagctttgccatgagctgggtccgccaggctccagggaaggggctggaatgggtctcagctgttagtggtagtggtgatgacacatactacgcagactccgtgaagggccggttcaccatctccagagacaattccaagaacacgctgtatctgcaaatgaacagcctgagagccgaggacacggccgtatattactgtgcgaaacacactagctactacctggacgtctggggcaaagggaccacggtcaccgtctcctcagcggccgcaaccacgacgccagcgccgcggccaccaacaccggcgcccaccatcgcgtcgcagcccctgtccctgcgcccagaggcgtgccggccagcggcggggggcgcagtgcacacgagggggctggacttcgcctgtgatatctacatctgggcgcccttggccgggacttgtggggtccttctcctgtcactggttatcaccctttactgcaaacggggcagaaagaaactcctgtatatattcaaacaaccatttatgagaccagtacaaactactcaagaggaagatggctgtagctgccgatttccagaagaagaagaaggaggatgtgaactgagagtgaagttcagcaggagcgcagacgcccccgcgtaccagcagggccagaaccagctctataacgagctcaatctaggacgaagagaggagtacgatgttttggacaagagacgtggccgggaccctgagatggggggaaagccgagaaggaagaaccctcaggaaggcctgtacaatgaactgcagaaagataagatggcggaggcctacagtgagattgggatgaaaggcgagcgccggaggggcaaggggcacgatggcctttaccagggtctcagtacagccaccaaggacacctacgacgcccttcacatgcaggccctgccccctcgcggctctggcgagggaaggggttccctgcttacttgcggcgacgtcgaagagaatcccggtccgatggccctcccagtaactgccctccttttgcccctcgcactccttcttcatgccgctcgccccaactgggtcaacgtgattagcgatttgaagaaaatcgaggaccttatacagtctatgcatattgacgctacactgtatactgagagtgatgtacacccgtcctgtaaggtaacggccatgaaatgctttcttctggagctccaggtcatcagcttggagtctggggacgcaagcatccacgatacggttgaaaacctcatcatccttgcgaacaactctctctcatctaatggaaacgttacagagagtgggtgtaaggagtgcgaagagttggaagaaaaaaacatcaaagaatttcttcaatccttcgttcacatagtgcaaatgttcattaacacgtccactaccacacccgccccgaggccacctacgccggcaccgactatcgccagtcaacccctctctctgcgccccgaggcttgccggcctgcggctggtggggcggtccacacccggggcctggattttgcgtgcgatatatacatctgggcacctcttgccggcacctgcggagtgctgcttctctcactcgttattacgctgtactgc

SEQ ID NO: 2638 - DNA, 2166 bp, synthetic construct
  misc_feature 1..2166: note = Synthetic
  source 1..2166: mol_type = other DNA
atggccttaccagtgaccgccttgctcctgccgctggccttgctgctccacgccgccaggccggaaattgtcctgactcagtctccagactttcagtctgtgactccaaaggagaaagtcaccatcacctgccgggccagtcagagtattggtagtagcttacactggtaccagcagaaaccagatcagtctccaaagctcctcatcaagtttgcttcccagtccttctcaggggtcccctcgaggttcagtggcagtggatctgggacagatttcaccctcaccatcaatagcctggaagctgaagatgctgcaacgtatttctgtcatcagagtagtagtttaccgtggacgttcggccaagggaccaaggtggaaatcaaaggcagcaccagcggcagcggcaagcccggctccggagagggcagcaccaagggccaggtgcagctggtggagtctgggggaggcgtggtccagcctgggaggtccctgagactctcctgtgcagcgtctggattcaacttcagtacctttgacatacactgggtccgccaggctccaggcaaggggctggagtgggtggcacttatatggtatgatggaagttataaatactatgcagactccgtgaagggccgattcaccatttccagagacaattccaagaacacgctggatctgcgaatgaacagcctgagagccgaggacacggctgtgtattactgtgcgcgaaatgacaactggaacgacgaacactactaccactattacatggacgtctggggcaaagggaccacggtcaccgtctcctcagcggccgcaaccacgacgccagcgccgcggccaccaacaccggcgcccaccatcgcgtcgcagcccctgtccctgcgcccagaggcgtgccggccagcggcggggggcgcagtgcacacgagggggctggacttcgcctgtgatatctacatctgggcgcccttggccgggacttgtggggtccttctcctgtcactggttatcaccctttactgcaaacggggcagaaagaaactcctgtatatattcaaacaaccatttatgagaccagtacaaactactcaagaggaagatggctgtagctgccgatttccagaagaagaagaaggaggatgtgaactgagagtgaagttcagcaggagcgcagacgcccccgcgtaccagcagggccagaaccagctctataacgagctcaatctaggacgaagagaggagtacgatgttttggacaagagacgtggccgggaccctgagatggggggaaagccgagaaggaagaaccctcaggaaggcctgtacaatgaactgcagaaagataagatggcggaggcctacagtgagattgggatgaaaggcgagcgccggaggggcaaggggcacgatggcctttaccagggtctcagtacagccaccaaggacacctacgacgcccttcacatgcaggccctgccccctcgcggctctggcgagggaaggggttccctgcttacttgcggcgacgtcgaagagaatcccggtccgatggccctcccagtaactgccctccttttgcccctcgcactccttcttcatgccgctcgccccaactgggtcaacgtgattagcgatttgaagaaaatcgaggaccttatacagtctatgcatattgacgctacactgtatactgagagtgatgtacacccgtcctgtaaggtaacggccatgaaatgctttcttctggagctccaggtcatcagcttggagtctggggacgcaagcatccacgatacggttgaaaacctcatcatccttgcgaacaactctctctcatctaatggaaacgttacagagagtgggtgtaaggagtgcgaagagttggaagaaaaaaacatcaaagaatttcttcaatccttcgttcacatagtgcaaatgttcattaacacgtccactaccacacccgccccgaggccacctacgccggcaccgactatcgccagtcaacccctctctctgcgccccgaggcttgccggcctgcggctggtggggcggtccacacccggggcctggattttgcgtgcgatatatacatctgggcacctcttgccggcacctgcggagtgctgcttctctcactcgttattacgctgtactgc

SEQ ID NO: 2639 - DNA, 2181 bp, synthetic construct
  misc_feature 1..2181: note = Synthetic
  source 1..2181: mol_type = other DNA
atggccttaccagtgaccgccttgctcctgccgctggccttgctgctccacgccgccaggccgcagactgtggtgacccaggagccatcgttctcagtgtcccctggagggacagtcacactcacttgtggcttgagctctggctcagtctccactagttacttccccagctggtaccagcagacccccggccaggctccacgcacgctcatctacatcacaaacactcgctcttcaggggtccctgatcgcttctctggctccattattgggaacaaagctgccctcaccatcacgggggcccaggcagatgatgaatctgattatttctgtgtactatatatgggtagtggcacttgggtgttcggtggaggaaccaagctgactgtcctaggcagcaccagcggcagcggcaagcccggctccggagagggcagcaccaagggcgaagtgcacctgttggagtctgggggaggcttggtccagcctggggggtccctgagactctcctgtgcggcctctggattcacctttagcagctatgccatgaactgggtccgccaggctccagggaaggggctggagtgggtctcttctattagtggtagtggtagtagctcatactacgcagactccgtgaagggccggttcaccatctccagagacaattccaagaacacgctgtatctgcaaatgaacagcctgagagccgaggacacggccgtatattactgtgcgtctcgtggattcaactcccagtatcctcccggatactactactactacatggacgtctggggcaaagggaccacggtcaccgtctcctcagcggccgcaaccacgacgccagcgccgcggccaccaacaccggcgcccaccatcgcgtcgcagcccctgtccctgcgcccagaggcgtgccggccagcggcggggggcgcagtgcacacgagggggctggacttcgcctgtgatatctacatctgggcgcccttggccgggacttgtggggtccttctcctgtcactggttatcaccctttactgcaaacggggcagaaagaaactcctgtatatattcaaacaaccatttatgagaccagtacaaactactcaagaggaagatggctgtagctgccgatttccagaagaagaagaaggaggatgtgaactgagagtgaagttcagcaggagcgcagacgcccccgcgtaccagcagggccagaaccagctctataacgagctcaatctaggacgaagagaggagtacgatgttttggacaagagacgtggccgggaccctgagatggggggaaagccgagaaggaagaaccctcaggaaggcctgtacaatgaactgcagaaagataagatggcggaggcctacagtgagattgggatgaaaggcgagcgccggaggggcaaggggcacgatggcctttaccagggtctcagtacagccaccaaggacacctacgacgcccttcacatgcaggccctgccccctcgcggctctggcgagggaaggggttccctgcttacttgcggcgacgtcgaagagaatcccggtccgatggccctcccagtaactgccctccttttgcccctcgcactccttcttcatgccgctcgccccaactgggtcaacgtgattagcgatttgaagaaaatcgaggaccttatacagtctatgcatattgacgctacactgtatactgagagtgatgtacacccgtcctgtaaggtaacggccatgaaatgctttcttctggagctccaggtcatcagcttggagtctggggacgcaagcatccacgatacggttgaaaacctcatcatccttgcgaacaactctctctcatctaatggaaacgttacagagagtgggtgtaaggagtgcgaagagttggaagaaaaaaacatcaaagaatttcttcaatccttcgttcacatagtgcaaatgttcattaacacgtccactaccacacccgccccgaggccacctacgccggcaccgactatcgccagtcaacccctctctctgcgccccgaggcttgccggcctgcggctggtggggcggtccacacccggggcctggattttgcgtgcgatatatacatctgggcacctcttgccggcacctgcggagtgctgcttctctcactcgttattacgctgtactgc

SEQ ID NO: 2640 - DNA, 2142 bp, synthetic construct
  misc_feature 1..2142: note = Synthetic
  source 1..2142: mol_type = other DNA
atggccttaccagtgaccgccttgctcctgccgctggccttgctgctccacgccgccaggccggaaattgtgctgactcagtctccagactttcagtctgtgactccaaaggagaaagtcaccatcacctgccgggccagtcagagcattggtagtagcttacactggtaccagcagaaaccagatcagtctccaaagctcctcatcaagtttgcttcccagtccttctcaggggtcccctcgaggttcagtggcagtggatctgggacagatttcaccctcaccatccatagcctggaagctgaagatgctgcaacgtattactgtcatcagagtagtagtttaccgtggacgttcggccaagggaccaaggtggaaatcaaaggcagcaccagcggcagcggcaagcccggctccggagagggcagcaccaagggcgaggtgcagctgttggagtctgggggaggcttggtacagcctggggggtccctgagactctcctgtgcagcctctggattcaccttcagcaactatgccatgacctgggtccgccaggctccagggaaggggctggagtgggtctcagctattagtggtagtggtattggcacatactacgcagactccgtgcagggccggttcaccacctccagagacaattccaagaacacgctgtatctgcaaatgaacagcctgagagccgaggacacggccgtttattactgtgcgaaaggggggtacaactggaaggacgtctggggcaaagggaccacggtcaccgtctcctcagcggccgcaaccacgacgccagcgccgcggccaccaacaccggcgcccaccatcgcgtcgcagcccctgtccctgcgcccagaggcgtgccggccagcggcggggggcgcagtgcacacgagggggctggacttcgcctgtgatatctacatctgggcgcccttggccgggacttgtggggtccttctcctgtcactggttatcaccctttactgcaaacggggcagaaagaaactcctgtatatattcaaacaaccatttatgagaccagtacaaactactcaagaggaagatggctgtagctgccgatttccagaagaagaagaaggaggatgtgaactgagagtgaagttcagcaggagcgcagacgcccccgcgtaccagcagggccagaaccagctctataacgagctcaatctaggacgaagagaggagtacgatgttttggacaagagacgtggccgggaccctgagatggggggaaagccgagaaggaagaaccctcaggaaggcctgtacaatgaactgcagaaagataagatggcggaggcctacagtgagattgggatgaaaggcgagcgccggaggggcaaggggcacgatggcctttaccagggtctcagtacagccaccaaggacacctacgacgcccttcacatgcaggccctgccccctcgcggctctggcgagggaaggggttccctgcttacttgcggcgacgtcgaagagaatcccggtccgatggccctcccagtaactgccctccttttgcccctcgcactccttcttcatgccgctcgccccaactgggtcaacgtgattagcgatttgaagaaaatcgaggaccttatacagtctatgcatattgacgctacactgtatactgagagtgatgtacacccgtcctgtaaggtaacggccatgaaatgctttcttctggagctccaggtcatcagcttggagtctggggacgcaagcatccacgatacggttgaaaacctcatcatccttgcgaacaactctctctcatctaatggaaacgttacagagagtgggtgtaaggagtgcgaagagttggaagaaaaaaacatcaaagaatttcttcaatccttcgttcacatagtgcaaatgttcattaacacgtccactaccacacccgccccgaggccacctacgccggcaccgactatcgccagtcaacccctctctctgcgccccgaggcttgccggcctgcggctggtggggcggtccacacccggggcctggattttgcgtgcgatatatacatctgggcacctcttgccggcacctgcggagtgctgcttctctcactcgttattacgctgtactgc

SEQ ID NO: 2641 - DNA, 2166 bp, synthetic construct
  misc_feature 1..2166: note = Synthetic
  source 1..2166: mol_type = other DNA
atggccttaccagtgaccgccttgctcctgccgctggccttgctgctccacgccgccaggccggaaattgtgctgactcagtctccagactttcagtctgtgactccaaaggagaaagtcaccatcacctgccgggccagtcagagcattggtagtagcttacactggtaccagcagaaaccagatcagtctccaaagctcctcatcaagtttgcttcccagtccttctcaggggtcccctcgaggttcagtggcagtggatctgggacagatttcaccctcaccatccatagcctggaagctgaagatgctgcaacgtattactgtcatcagagtagtagtttaccgtggacgttcggccaagggaccaaggtggaaatcaaaggcagcaccagcggcagcggcaagcccggctccggagagggcagcaccaagggccaggtgcagctggtggagtctgggggaggcgtggtccagcctgggaggtccctgagactctcctgtgcagcgtctgggttcaccttcactaactatgacatgcactgggtccgccaggccccaggcaaggggctggagtgggtgacaattatatggcatgatggaagtaataaatattatttagactccgtgaggggccgattcaccatctccagagacaattccaagaacacgctgtatctgcaaatgaacagcctgagagccgaggacacggctgtgtattactgtgcgagaggtgacaactggaacgacgaacaccactacttctactacatggacgtctggggcaaagggaccacggtcaccgtctcctcagcggccgcaaccacgacgccagcgccgcggccaccaacaccggcgcccaccatcgcgtcgcagcccctgtccctgcgcccagaggcgtgccggccagcggcggggggcgcagtgcacacgagggggctggacttcgcctgtgatatctacatctgggcgcccttggccgggacttgtggggtccttctcctgtcactggttatcaccctttactgcaaacggggcagaaagaaactcctgtatatattcaaacaaccatttatgagaccagtacaaactactcaagaggaagatggctgtagctgccgatttccagaagaagaagaaggaggatgtgaactgagagtgaagttcagcaggagcgcagacgcccccgcgtaccagcagggccagaaccagctctataacgagctcaatctaggacgaagagaggagtacgatgttttggacaagagacgtggccgggaccctgagatggggggaaagccgagaaggaagaaccctcaggaaggcctgtacaatgaactgcagaaagataagatggcggaggcctacagtgagattgggatgaaaggcgagcgccggaggggcaaggggcacgatggcctttaccagggtctcagtacagccaccaaggacacctacgacgcccttcacatgcaggccctgccccctcgcggctctggcgagggaaggggttccctgcttacttgcggcgacgtcgaagagaatcccggtccgatggccctcccagtaactgccctccttttgcccctcgcactccttcttcatgccgctcgccccaactgggtcaacgtgattagcgatttgaagaaaatcgaggaccttatacagtctatgcatattgacgctacactgtatactgagagtgatgtacacccgtcctgtaaggtaacggccatgaaatgctttcttctggagctccaggtcatcagcttggagtctggggacgcaagcatccacgatacggttgaaaacctcatcatccttgcgaacaactctctctcatctaatggaaacgttacagagagtgggtgtaaggagtgcgaagagttggaagaaaaaaacatcaaagaatttcttcaatccttcgttcacatagtgcaaatgttcattaacacgtccactaccacacccgccccgaggccacctacgccggcaccgactatcgccagtcaacccctctctctgcgccccgaggcttgccggcctgcggctggtggggcggtccacacccggggcctggattttgcgtgcgatatatacatctgggcacctcttgccggcacctgcggagtgctgcttctctcactcgttattacgctgtactgc

SEQ ID NO: 2642 - DNA, 2166 bp, synthetic construct
  misc_feature 1..2166: note = Synthetic
  source 1..2166: mol_type = other DNA
atggccttaccagtgaccgccttgctcctgccgctggccttgctgctccacgccgccaggccggaaattgtgttgacacagtctccagccaccctgtctttgtctccaggggaaagagccaccctctcctgcagggccagtcagagtgttagcagctccttagcctggtaccaacagaaacctggccaggctccccggctcctcatctatgatgcatccaacagggccactggcatcccagccaggttcagtggcagtgggtctgggacagacttcactctcaccatcagcagcctagagcctgaagattttgcagtttattactgtcagcagcgtagcaactggcctctcactttcggcggagggaccaaggtggagatcaaaggcagcaccagcggcagcggcaagcccggctccggagagggcagcaccaagggccaggtgcagctggtggagtctgggggaggcgtggtccagcctgggaggtccctgagactctcctgtgcagcgtctgggttcaccttcagtaactatgacatgcactgggtccgccaggccccaggcaaggggctggagtgggtgacaattatatggcatgatggaagtaataaatattatttagactccgtgaagggccgattcaccatctccagagacaattccaagaacacgctgtatctgcaaatgaacagcctgagagccgaggacacggctgtgtattactgtgcgagaggtgacaactggaacgacgaacaccactacttctactacatggacgtctggggcaaagggaccacggtcaccgtctcctcagcggccgcaaccacgacgccagcgccgcggccaccaacaccggcgcccaccatcgcgtcgcagcccctgtccctgcgcccagaggcgtgccggccagcggcggggggcgcagtgcacacgagggggctggacttcgcctgtgatatctacatctgggcgcccttggccgggacttgtggggtccttctcctgtcactggttatcaccctttactgcaaacggggcagaaagaaactcctgtatatattcaaacaaccatttatgagaccagtacaaactactcaagaggaagatggctgtagctgccgatttccagaagaagaagaaggaggatgtgaactgagagtgaagttcagcaggagcgcagacgcccccgcgtaccagcagggccagaaccagctctataacgagctcaatctaggacgaagagaggagtacgatgttttggacaagagacgtggccgggaccctgagatggggggaaagccgagaaggaagaaccctcaggaaggcctgtacaatgaactgcagaaagataagatggcggaggcctacagtgagattgggatgaaaggcgagcgccggaggggcaaggggcacgatggcctttaccagggtctcagtacagccaccaaggacacctacgacgcccttcacatgcaggccctgccccctcgcggctctggcgagggaaggggttccctgcttacttgcggcgacgtcgaagagaatcccggtccgatggccctcccagtaactgccctccttttgcccctcgcactccttcttcatgccgctcgccccaactgggtcaacgtgattagcgatttgaagaaaatcgaggaccttatacagtctatgcatattgacgctacactgtatactgagagtgatgtacacccgtcctgtaaggtaacggccatgaaatgctttcttctggagctccaggtcatcagcttggagtctggggacgcaagcatccacgatacggttgaaaacctcatcatccttgcgaacaactctctctcatctaatggaaacgttacagagagtgggtgtaaggagtgcgaagagttggaagaaaaaaacatcaaagaatttcttcaatccttcgttcacatagtgcaaatgttcattaacacgtccactaccacacccgccccgaggccacctacgccggcaccgactatcgccagtcaacccctctctctgcgccccgaggcttgccggcctgcggctggtggggcggtccacacccggggcctggattttgcgtgcgatatatacatctgggcacctcttgccggcacctgcggagtgctgcttctctcactcgttattacgctgtactgc

SEQ ID NO: 2643 - DNA, 2154 bp, synthetic construct
  misc_feature 1..2154: note = Synthetic
  source 1..2154: mol_type = other DNA
atggccttaccagtgaccgccttgctcctgccgctggccttgctgctccacgccgccaggccggaaattgtgttgacgcagtctccaggcaccctgtctttgtctccaggggaaagagccaccctctcctgcagggccagtcagagtgttagcagcagctacttagcctggtaccagcagaaacctggccaggctcccaggctcctcatctatggtgcatccagcagggccactggcatcccagacaggttcagtggcagtgggtctgggacagacttcactctcaccatcagcagactggagcctgaagattttgcagtgtattactgtcagcagtatggtagctcgtggacgttcggccaagggaccaaggtggaaatcaaaggcagcaccagcggcagcggcaagcccggctccggagagggcagcaccaagggcgaggtgcagctggtggagtctgggggaggtgtggtacggcctggggggtccctgagactctcctgtgcagcctctggattcacctttgatgattatggcatgagctgggtccgccaagctccagggaaggggctggagtgggtctctggtattaattggaatggtggtagcacaggttatgtagactctgtgaagggccgattcaccatctccagagacaacgccaagaactccctgtatctgcaaatgaacagtctgagagccgaggacacggccttgtatcactgtgcgagaccagtaactacggactactactactacatggacgtctggggcaaagggaccacggtcaccgtctcctcagcggccgcaaccacgacgccagcgccgcggccaccaacaccggcgcccaccatcgcgtcgcagcccctgtccctgcgcccagaggcgtgccggccagcggcggggggcgcagtgcacacgagggggctggacttcgcctgtgatatctacatctgggcgcccttggccgggacttgtggggtccttctcctgtcactggttatcaccctttactgcaaacggggcagaaagaaactcctgtatatattcaaacaaccatttatgagaccagtacaaactactcaagaggaagatggctgtagctgccgatttccagaagaagaagaaggaggatgtgaactgagagtgaagttcagcaggagcgcagacgcccccgcgtaccagcagggccagaaccagctctataacgagctcaatctaggacgaagagaggagtacgatgttttggacaagagacgtggccgggaccctgagatggggggaaagccgagaaggaagaaccctcaggaaggcctgtacaatgaactgcagaaagataagatggcggaggcctacagtgagattgggatgaaaggcgagcgccggaggggcaaggggcacgatggcctttaccagggtctcagtacagccaccaaggacacctacgacgcccttcacatgcaggccctgccccctcgcggctctggcgagggaaggggttccctgcttacttgcggcgacgtcgaagagaatcccggtccgatggccctcccagtaactgccctccttttgcccctcgcactccttcttcatgccgctcgccccaactgggtcaacgtgattagcgatttgaagaaaatcgaggaccttatacagtctatgcatattgacgctacactgtatactgagagtgatgtacacccgtcctgtaaggtaacggccatgaaatgctttcttctggagctccaggtcatcagcttggagtctggggacgcaagcatccacgatacggttgaaaacctcatcatccttgcgaacaactctctctcatctaatggaaacgttacagagagtgggtgtaaggagtgcgaagagttggaagaaaaaaacatcaaagaatttcttcaatccttcgttcacatagtgcaaatgttcattaacacgtccactaccacacccgccccgaggccacctacgccggcaccgactatcgccagtcaacccctctctctgcgccccgaggcttgccggcctgcggctggtggggcggtccacacccggggcctggattttgcgtgcgatatatacatctgggcacctcttgccggcacctgcggagtgctgcttctctcactcgttattacgctgtactgc

SEQ ID NO: 2644 - DNA, 2178 bp, synthetic construct
  misc_feature 1..2178: note = Synthetic
  source 1..2178: mol_type = other DNA
atggccttaccagtgaccgccttgctcctgccgctggccttgctgctccacgccgccaggccggaaattgtgttgacgcagtctccaggcaccctgtctttgtctccaggggaaagagccaccctctcctgcagggccagtcagagtgttagcagcagctacttagcctggtaccagcagaaacctggccaggctcccaggctcctcatctatggtgcatccagcagggccactggcatcccagacaggttcagtggcagtgggtctgggacagacttcactctcaccatcagcagactggagcctgaagattttgcagtgtattactgtcagcagtatggtagctcgtggacgttcggccaagggaccaaggtggaaatcaaaggcagcaccagcggcagcggcaagcccggctccggagagggcagcaccaagggcgaggtgcagctgttggagtctgggggaggcttggtacagcctggggggtccctgagactctcctgtgcagcctctggattcacctttagcagctatgccatgagctgggtccgccaggctccagggaaggggctggagtgggtctcagctattagtggtagtggtggtagcacatactacgcagactccgtgaagggccggttcaccatctccagagacaattccaagaacacgctgtatctgcaaatgaacagcctgagagccgaggacacggccgtatattactgtgcgaaaaaggggacgtcgtacaactggaacgacgtccattactactactactactacatggacgtctggggcaaagggaccacggtcaccgtctcctcagcggccgcaaccacgacgccagcgccgcggccaccaacaccggcgcccaccatcgcgtcgcagcccctgtccctgcgcccagaggcgtgccggccagcggcggggggcgcagtgcacacgagggggctggacttcgcctgtgatatctacatctgggcgcccttggccgggacttgtggggtccttctcctgtcactggttatcaccctttactgcaaacggggcagaaagaaactcctgtatatattcaaacaaccatttatgagaccagtacaaactactcaagaggaagatggctgtagctgccgatttccagaagaagaagaaggaggatgtgaactgagagtgaagttcagcaggagcgcagacgcccccgcgtaccagcagggccagaaccagctctataacgagctcaatctaggacgaagagaggagtacgatgttttggacaagagacgtggccgggaccctgagatggggggaaagccgagaaggaagaaccctcaggaaggcctgtacaatgaactgcagaaagataagatggcggaggcctacagtgagattgggatgaaaggcgagcgccggaggggcaaggggcacgatggcctttaccagggtctcagtacagccaccaaggacacctacgacgcccttcacatgcaggccctgccccctcgcggctctggcgagggaaggggttccctgcttacttgcggcgacgtcgaagagaatcccggtccgatggccctcccagtaactgccctccttttgcccctcgcactccttcttcatgccgctcgccccaactgggtcaacgtgattagcgatttgaagaaaatcgaggaccttatacagtctatgcatattgacgctacactgtatactgagagtgatgtacacccgtcctgtaaggtaacggccatgaaatgctttcttctggagctccaggtcatcagcttggagtctggggacgcaagcatccacgatacggttgaaaacctcatcatccttgcgaacaactctctctcatctaatggaaacgttacagagagtgggtgtaaggagtgcgaagagttggaagaaaaaaacatcaaagaatttcttcaatccttcgttcacatagtgcaaatgttcattaacacgtccactaccacacccgccccgaggccacctacgccggcaccgactatcgccagtcaacccctctctctgcgccccgaggcttgccggcctgcggctggtggggcggtccacacccggggcctggattttgcgtgcgatatatacatctgggcacctcttgccggcacctgcggagtgctgcttctctcactcgttattacgctgtactgc

SEQ ID NO: 2645 - DNA, 2160 bp, synthetic construct
  misc_feature 1..2160: note = Synthetic
  source 1..2160: mol_type = other DNA
atggccttaccagtgaccgccttgctcctgccgctggccttgctgctccacgccgccaggccggaaattgtgttgacgcagtctccaggcaccctgtctttgtctccaggggaaagagccaccctctcctgcagggccagtcagagtgttagcagcagctacttagcctggtaccagcagaaacctggccaggctcccaggctcctcatctatggtgcatccagcagggccactggcatcccagacaggttcagtggcagtgggtctgggacagacttcactctcaccatcagcagactggagcctgaagattttgcagtgtattactgtcagcagtatggtagctcgtggacgttcggccaagggaccaaggtggaaatcaaaggcagcaccagcggcagcggcaagcccggctccggagagggcagcaccaagggccagctgcagctgcaggagtcgggcccaggactggtgaagccttcggagaccctgtccctcacctgcactgtctctggtggctccatcagcagtagtagttactactggggctggatccgccagcccccagggaaggggctggagtggattgggagtatctattatagtgggagcacctactacaacccgtccctcaagagtcgagtcaccatatccgtagacacgtccaagaaccagttctccctgaagctgagctctgtgaccgccgcagacacggctgtgtattactgcacaactggaacgacggcttactactactactactacatggacgtctggggcaaagggaccacggtcaccgtctcctcagcggccgcaaccacgacgccagcgccgcggccaccaacaccggcgcccaccatcgcgtcgcagcccctgtccctgcgcccagaggcgtgccggccagcggcggggggcgcagtgcacacgagggggctggacttcgcctgtgatatctacatctgggcgcccttggccgggacttgtggggtccttctcctgtcactggttatcaccctttactgcaaacggggcagaaagaaactcctgtatatattcaaacaaccatttatgagaccagtacaaactactcaagaggaagatggctgtagctgccgatttccagaagaagaagaaggaggatgtgaactgagagtgaagttcagcaggagcgcagacgcccccgcgtaccagcagggccagaaccagctctataacgagctcaatctaggacgaagagaggagtacgatgttttggacaagagacgtggccgggaccctgagatggggggaaagccgagaaggaagaaccctcaggaaggcctgtacaatgaactgcagaaagataagatggcggaggcctacagtgagattgggatgaaaggcgagcgccggaggggcaaggggcacgatggcctttaccagggtctcagtacagccaccaaggacacctacgacgcccttcacatgcaggccctgccccctcgcggctctggcgagggaaggggttccctgcttacttgcggcgacgtcgaagagaatcccggtccgatggccctcccagtaactgccctccttttgcccctcgcactccttcttcatgccgctcgccccaactgggtcaacgtgattagcgatttgaagaaaatcgaggaccttatacagtctatgcatattgacgctacactgtatactgagagtgatgtacacccgtcctgtaaggtaacggccatgaaatgctttcttctggagctccaggtcatcagcttggagtctggggacgcaagcatccacgatacggttgaaaacctcatcatccttgcgaacaactctctctcatctaatggaaacgttacagagagtgggtgtaaggagtgcgaagagttggaagaaaaaaacatcaaagaatttcttcaatccttcgttcacatagtgcaaatgttcattaacacgtccactaccacacccgccccgaggccacctacgccggcaccgactatcgccagtcaacccctctctctgcgccccgaggcttgccggcctgcggctggtggggcggtccacacccggggcctggattttgcgtgcgatatatacatctgggcacctcttgccggcacctgcggagtgctgcttctctcactcgttattacgctgtactgc

SEQ ID NO: 2646 - DNA, 2157 bp, synthetic construct
  misc_feature 1..2157: note = Synthetic
  source 1..2157: mol_type = other DNA
atggccttaccagtgaccgccttgctcctgccgctggccttgctgctccacgccgccaggccggaaattgtgttgacgcagtctccaggcaccctgtctttgtctccaggggaaagagccaccctctcctgcagggccagtcagagtgttagcagcagctacttagcctggtaccagcagaaacctggccaggctcccaggctcctcatctatggtgcatccagcagggccactggcatcccagacaggttcagtggcagtgggtctgggacagacttcactctcaccatcagcagactggagcctgaagattttgcagtgtattactgtcagcagtatggtagctcgtggacgttcggccaagggaccaaggtggaaatcaaaggcagcaccagcggcagcggcaagcccggctccggagagggcagcaccaagggcgaggtgcagctgttggagtctgggggaggcttggtgcagcctggggggtccctgagactctcctgtgcagcctctggattcacctttagcagctatgccatgacctgggtccgccaggctccagggaaggggctggagtgggtctcagctattagtggtagtggtggtagcacatactacgcagactccgtgaagggccggttcaccatctccagagacaattccaagaacacgctgtatctgcaaatgaacagcctgagagccgaggacacggccgtatattactgtgcgagaggcgggtataactggcactactactactacatggacgtctggggcaaagggaccacggtcaccgtctcctcagcggccgcaaccacgacgccagcgccgcggccaccaacaccggcgcccaccatcgcgtcgcagcccctgtccctgcgcccagaggcgtgccggccagcggcggggggcgcagtgcacacgagggggctggacttcgcctgtgatatctacatctgggcgcccttggccgggacttgtggggtccttctcctgtcactggttatcaccctttactgcaaacggggcagaaagaaactcctgtatatattcaaacaaccatttatgagaccagtacaaactactcaagaggaagatggctgtagctgccgatttccagaagaagaagaaggaggatgtgaactgagagtgaagttcagcaggagcgcagacgcccccgcgtaccagcagggccagaaccagctctataacgagctcaatctaggacgaagagaggagtacgatgttttggacaagagacgtggccgggaccctgagatggggggaaagccgagaaggaagaaccctcaggaaggcctgtacaatgaactgcagaaagataagatggcggaggcctacagtgagattgggatgaaaggcgagcgccggaggggcaaggggcacgatggcctttaccagggtctcagtacagccaccaaggacacctacgacgcccttcacatgcaggccctgccccctcgcggctctggcgagggaaggggttccctgcttacttgcggcgacgtcgaagagaatcccggtccgatggccctcccagtaactgccctccttttgcccctcgcactccttcttcatgccgctcgccccaactgggtcaacgtgattagcgatttgaagaaaatcgaggaccttatacagtctatgcatattgacgctacactgtatactgagagtgatgtacacccgtcctgtaaggtaacggccatgaaatgctttcttctggagctccaggtcatcagcttggagtctggggacgcaagcatccacgatacggttgaaaacctcatcatccttgcgaacaactctctctcatctaatggaaacgttacagagagtgggtgtaaggagtgcgaagagttggaagaaaaaaacatcaaagaatttcttcaatccttcgttcacatagtgcaaatgttcattaacacgtccactaccacacccgccccgaggccacctacgccggcaccgactatcgccagtcaacccctctctctgcgccccgaggcttgccggcctgcggctggtggggcggtccacacccggggcctggattttgcgtgcgatatatacatctgggcacctcttgccggcacctgcggagtgctgcttctctcactcgttattacgctgtactgc

SEQ ID NO: 2647 - DNA, 2169 bp, synthetic construct
  misc_feature 1..2169: note = Synthetic
  source 1..2169: mol_type = other DNA
atggccttaccagtgaccgccttgctcctgccgctggccttgctgctccacgccgccaggccggaaattgtgctgactcagtctccagactttcagtctgtgactccaaaggagaaagtcaccatcacctgccgggccagtcagaacattggtagtagcttacactggtaccagcagaaaccagatcagtctccaaagctcctcatcaagtttgcttcccagtccatctcaggggtcccctcgaggttcagtggcagtggatctgggacagatttcaccctcaccatcaatagcctggaagctgaagatgctgcagcgtattactgtcatcagagtagtagtttaccgtggacgttcggccaagggaccaaggtggaaatcaaaggcagcaccagcggcagcggcaagcccggctccggagagggcagcaccaagggccaggtgcagctggtggagtctgggggaggcgtggtccagcctgggaggtccctgagactctcctgtgcagcgtctggattcaccttcagtagctatgacatgcactgggtccgccaggctccaggcaaggggctggagtgggtgtcagttatatggtatgatggaagtaataaaaagtatggagactccgcgaagggccgattcaccatctccagagacaattccaagaacacgctggatctgcaaatgaacagcctgagagccgaggacacggctgtgtattactgtgcgagaggcgacaactggaacgacgaaggtggctactactactactacatggacgtctggggcaaagggaccacggtcaccgtctcctcagcggccgcaaccacgacgccagcgccgcggccaccaacaccggcgcccaccatcgcgtcgcagcccctgtccctgcgcccagaggcgtgccggccagcggcggggggcgcagtgcacacgagggggctggacttcgcctgtgatatctacatctgggcgcccttggccgggacttgtggggtccttctcctgtcactggttatcaccctttactgcaaacggggcagaaagaaactcctgtatatattcaaacaaccatttatgagaccagtacaaactactcaagaggaagatggctgtagctgccgatttccagaagaagaagaaggaggatgtgaactgagagtgaagttcagcaggagcgcagacgcccccgcgtaccagcagggccagaaccagctctataacgagctcaatctaggacgaagagaggagtacgatgttttggacaagagacgtggccgggaccctgagatggggggaaagccgagaaggaagaaccctcaggaaggcctgtacaatgaactgcagaaagataagatggcggaggcctacagtgagattgggatgaaaggcgagcgccggaggggcaaggggcacgatggcctttaccagggtctcagtacagccaccaaggacacctacgacgcccttcacatgcaggccctgccccctcgcggctctggcgagggaaggggttccctgcttacttgcggcgacgtcgaagagaatcccggtccgatggccctcccagtaactgccctccttttgcccctcgcactccttcttcatgccgctcgccccaactgggtcaacgtgattagcgatttgaagaaaatcgaggaccttatacagtctatgcatattgacgctacactgtatactgagagtgatgtacacccgtcctgtaaggtaacggccatgaaatgctttcttctggagctccaggtcatcagcttggagtctggggacgcaagcatccacgatacggttgaaaacctcatcatccttgcgaacaactctctctcatctaatggaaacgttacagagagtgggtgtaaggagtgcgaagagttggaagaaaaaaacatcaaagaatttcttcaatccttcgttcacatagtgcaaatgttcattaacacgtccactaccacacccgccccgaggccacctacgccggcaccgactatcgccagtcaacccctctctctgcgccccgaggcttgccggcctgcggctggtggggcggtccacacccggggcctggattttgcgtgcgatatatacatctgggcacctcttgccggcacctgcggagtgctgcttctctcactcgttattacgctgtactgc

SEQ ID NO: 2648 - DNA, 2169 bp, synthetic construct
  misc_feature 1..2169: note = Synthetic
  source 1..2169: mol_type = other DNA
atggccttaccagtgaccgccttgctcctgccgctggccttgctgctccacgccgccaggccggacatccagatgacccagtctccatcctcactgtctacatctgtaggagacagagtcaccatcacttgtcgggcgagtcagggcattagcaattatttagcctggtttcagcagaaaccagggaaagcccctaagtccctgatctatgctgcatccagtttgcaaagtggggtcccatcaaagttcagcggcagtggatctgggacagatttctctctcaccattagcagcctgcagcctgaagattttgcaacttattactgccaacagtataatagttacccgatcaccttcggccaagggacacgactggagattaaaggcagcaccagcggcagcggcaagcccggctccggagagggcagcaccaagggccaggtgcagctggtggagtctgggggaggcgtggtccagcctgggaggtccctgagactctcctgtgcagcgtctggattcaccttcagtagctatgacatgcactgggtccgccaggctccaggcaaggggctggagtgggtgtcagttatatggtatgatggaagtaataaaaagtatggagactccgcgaagggccgattcaccatctccagagacaattccaagaacacgctggatctgcaaatgaacagcctgagagccgaggacacggctgtgtattactgtgcgagaggcgacaactggaacgacgaaggtggctactactactactacatggacgtctggggcaaagggaccacggtcaccgtctcctcagcggccgcaaccacgacgccagcgccgcggccaccaacaccggcgcccaccatcgcgtcgcagcccctgtccctgcgcccagaggcgtgccggccagcggcggggggcgcagtgcacacgagggggctggacttcgcctgtgatatctacatctgggcgcccttggccgggacttgtggggtccttctcctgtcactggttatcaccctttactgcaaacggggcagaaagaaactcctgtatatattcaaacaaccatttatgagaccagtacaaactactcaagaggaagatggctgtagctgccgatttccagaagaagaagaaggaggatgtgaactgagagtgaagttcagcaggagcgcagacgcccccgcgtaccagcagggccagaaccagctctataacgagctcaatctaggacgaagagaggagtacgatgttttggacaagagacgtggccgggaccctgagatggggggaaagccgagaaggaagaaccctcaggaaggcctgtacaatgaactgcagaaagataagatggcggaggcctacagtgagattgggatgaaaggcgagcgccggaggggcaaggggcacgatggcctttaccagggtctcagtacagccaccaaggacacctacgacgcccttcacatgcaggccctgccccctcgcggctctggcgagggaaggggttccctgcttacttgcggcgacgtcgaagagaatcccggtccgatggccctcccagtaactgccctccttttgcccctcgcactccttcttcatgccgctcgccccaactgggtcaacgtgattagcgatttgaagaaaatcgaggaccttatacagtctatgcatattgacgctacactgtatactgagagtgatgtacacccgtcctgtaaggtaacggccatgaaatgctttcttctggagctccaggtcatcagcttggagtctggggacgcaagcatccacgatacggttgaaaacctcatcatccttgcgaacaactctctctcatctaatggaaacgttacagagagtgggtgtaaggagtgcgaagagttggaagaaaaaaacatcaaagaatttcttcaatccttcgttcacatagtgcaaatgttcattaacacgtccactaccacacccgccccgaggccacctacgccggcaccgactatcgccagtcaacccctctctctgcgccccgaggcttgccggcctgcggctggtggggcggtccacacccggggcctggattttgcgtgcgatatatacatctgggcacctcttgccggcacctgcggagtgctgcttctctcactcgttattacgctgtactgc

SEQ ID NO: 2649 - DNA, 2160 bp, synthetic construct
  misc_feature 1..2160: note = Synthetic
  source 1..2160: mol_type = other DNA
atggccttaccagtgaccgccttgctcctgccgctggccttgctgctccacgccgccaggccggaaattgtgctgactcagtctccagactttcagtctgtgactccaaaggagaaagtcaccatcacctgccgggccagtcagaacattggtagtagcttacactggtaccagcagaaaccagatcagtctccaaagctcctcatcaagtttgcttcccagtccatctcaggggtcccctcgaggttcagtggcagtggatctgggacagatttcaccctcaccatcaatagcctggaagctgaagatgctgcagcgtattactgtcatcagagtagtagtttaccgtggacgttcggccaagggaccaaggtggaaatcaaaggcagcaccagcggcagcggcaagcccggctccggagagggcagcaccaagggccaggttcagctggtacagtctggagctgaggtgaagaagtctggggcctcagtgaaggtctcctgcaaggcttctggttacaccttaaccagctatggcatcagctgggtgcgacaggcccctggacaagggcttgagtggatgggatggatcagcgcttacaatggtaacataaactatgcacagaagttccagggcagagtcaccatgaccacagacacatccacgagcacagcctacatggagctgaggagcctgagatctgacgacacggccgtgtattactgtgtgagagatggggaccggtacaactggaaccacagctacatggacgtctggggcaaagggaccacggtcaccgtctcctcagcggccgcaaccacgacgccagcgccgcggccaccaacaccggcgcccaccatcgcgtcgcagcccctgtccctgcgcccagaggcgtgccggccagcggcggggggcgcagtgcacacgagggggctggacttcgcctgtgatatctacatctgggcgcccttggccgggacttgtggggtccttctcctgtcactggttatcaccctttactgcaaacggggcagaaagaaactcctgtatatattcaaacaaccatttatgagaccagtacaaactactcaagaggaagatggctgtagctgccgatttccagaagaagaagaaggaggatgtgaactgagagtgaagttcagcaggagcgcagacgcccccgcgtaccagcagggccagaaccagctctataacgagctcaatctaggacgaagagaggagtacgatgttttggacaagagacgtggccgggaccctgagatggggggaaagccgagaaggaagaaccctcaggaaggcctgtacaatgaactgcagaaagataagatggcggaggcctacagtgagattgggatgaaaggcgagcgccggaggggcaaggggcacgatggcctttaccagggtctcagtacagccaccaaggacacctacgacgcccttcacatgcaggccctgccccctcgcggctctggcgagggaaggggttccctgcttacttgcggcgacgtcgaagagaatcccggtccgatggccctcccagtaactgccctccttttgcccctcgcactccttcttcatgccgctcgccccaactgggtcaacgtgattagcgatttgaagaaaatcgaggaccttatacagtctatgcatattgacgctacactgtatactgagagtgatgtacacccgtcctgtaaggtaacggccatgaaatgctttcttctggagctccaggtcatcagcttggagtctggggacgcaagcatccacgatacggttgaaaacctcatcatccttgcgaacaactctctctcatctaatggaaacgttacagagagtgggtgtaaggagtgcgaagagttggaagaaaaaaacatcaaagaatttcttcaatccttcgttcacatagtgcaaatgttcattaacacgtccactaccacacccgccccgaggccacctacgccggcaccgactatcgccagtcaacccctctctctgcgccccgaggcttgccggcctgcggctggtggggcggtccacacccggggcctggattttgcgtgcgatatatacatctgggcacctcttgccggcacctgcggagtgctgcttctctcactcgttattacgctgtactgc

SEQ ID NO: 2650 - DNA, 2160 bp, synthetic construct
  misc_feature 1..2160: note = Synthetic
  source 1..2160: mol_type = other DNA
atggccttaccagtgaccgccttgctcctgccgctggccttgctgctccacgccgccaggccggacatccagatgacccagtctccatcctcactgtctacatctgtaggagacagagtcaccatcacttgtcgggcgagtcagggcattagcaattatttagcctggtttcagcagaaaccagggaaagcccctaagtccctgatctatgctgcatccagtttgcaaagtggggtcccatcaaagttcagcggcagtggatctgggacagatttctctctcaccattagcagcctgcagcctgaagattttgcaacttattactgccaacagtataatagttacccgatcaccttcggccaagggacacgactggagattaaaggcagcaccagcggcagcggcaagcccggctccggagagggcagcaccaagggccaggttcagctggtacagtctggagctgaggtgaagaagtctggggcctcagtgaaggtctcctgcaaggcttctggttacaccttaaccagctatggcatcagctgggtgcgacaggcccctggacaagggcttgagtggatgggatggatcagcgcttacaatggtaacataaactatgcacagaagttccagggcagagtcaccatgaccacagacacatccacgagcacagcctacatggagctgaggagcctgagatctgacgacacggccgtgtattactgtgtgagagatggggaccggtacaactggaaccacagctacatggacgtctggggcaaagggaccacggtcaccgtctcctcagcggccgcaaccacgacgccagcgccgcggccaccaacaccggcgcccaccatcgcgtcgcagcccctgtccctgcgcccagaggcgtgccggccagcggcggggggcgcagtgcacacgagggggctggacttcgcctgtgatatctacatctgggcgcccttggccgggacttgtggggtccttctcctgtcactggttatcaccctttactgcaaacggggcagaaagaaactcctgtatatattcaaacaaccatttatgagaccagtacaaactactcaagaggaagatggctgtagctgccgatttccagaagaagaagaaggaggatgtgaactgagagtgaagttcagcaggagcgcagacgcccccgcgtaccagcagggccagaaccagctctataacgagctcaatctaggacgaagagaggagtacgatgttttggacaagagacgtggccgggaccctgagatggggggaaagccgagaaggaagaaccctcaggaaggcctgtacaatgaactgcagaaagataagatggcggaggcctacagtgagattgggatgaaaggcgagcgccggaggggcaaggggcacgatggcctttaccagggtctcagtacagccaccaaggacacctacgacgcccttcacatgcaggccctgccccctcgcggctctggcgagggaaggggttccctgcttacttgcggcgacgtcgaagagaatcccggtccgatggccctcccagtaactgccctccttttgcccctcgcactccttcttcatgccgctcgccccaactgggtcaacgtgattagcgatttgaagaaaatcgaggaccttatacagtctatgcatattgacgctacactgtatactgagagtgatgtacacccgtcctgtaaggtaacggccatgaaatgctttcttctggagctccaggtcatcagcttggagtctggggacgcaagcatccacgatacggttgaaaacctcatcatccttgcgaacaactctctctcatctaatggaaacgttacagagagtgggtgtaaggagtgcgaagagttggaagaaaaaaacatcaaagaatttcttcaatccttcgttcacatagtgcaaatgttcattaacacgtccactaccacacccgccccgaggccacctacgccggcaccgactatcgccagtcaacccctctctctgcgccccgaggcttgccggcctgcggctggtggggcggtccacacccggggcctggattttgcgtgcgatatatacatctgggcacctcttgccggcacctgcggagtgctgcttctctcactcgttattacgctgtactgc

SEQ ID NO: 2651 - DNA, 2157 bp, synthetic construct
  misc_feature 1..2157: note = Synthetic
  source 1..2157: mol_type = other DNA
atggccttaccagtgaccgccttgctcctgccgctggccttgctgctccacgccgccaggccggaaattgtgctgactcagtctccagactttcagtctgtgactccaaaggagaaagtcaccatcacctgccgggccagtcagagcattggaagtagcttacactggtaccagcagaaaccagatcagtctccaaagctcctcatcaagtatgtttcccagtccatctcaggggtcccctcgaggttcagtggcagtggatctgggacagatttcaccctcaccatcaatagcctggaagctgaagatgctgcagcgtattactgtcatcagagtagtagtttaccgtggacgttcggccaagggaccaaggtggaaatcaaaggcagcaccagcggcagcggcaagcccggctccggagagggcagcaccaagggcgaggtgcagctgttggagtctgggggagacttggtacagcctggggggtccctgcgactctcctgtgcagcctctggattcacctttagcacctatgccatgacctgggtccgccaggctccagggaaggggctggagtgggtctcagctattagtggtactagtggtagcacatactacgcagactccgtgaagggccggttcaccatctccagagacaattccaagagcacgctgtatctgcacatgaacagcctgagaaccgaggacacggccgtatattactgtgcgagaggcggatataactggcactactactactacatggacgtctggggcaaagggaccacggtcaccgtctcctcagcggccgcaaccacgacgccagcgccgcggccaccaacaccggcgcccaccatcgcgtcgcagcccctgtccctgcgcccagaggcgtgccggccagcggcggggggcgcagtgcacacgagggggctggacttcgcctgtgatatctacatctgggcgcccttggccgggacttgtggggtccttctcctgtcactggttatcaccctttactgcaaacggggcagaaagaaactcctgtatatattcaaacaaccatttatgagaccagtacaaactactcaagaggaagatggctgtagctgccgatttccagaagaagaagaaggaggatgtgaactgagagtgaagttcagcaggagcgcagacgcccccgcgtaccagcagggccagaaccagctctataacgagctcaatctaggacgaagagaggagtacgatgttttggacaagagacgtggccgggaccctgagatggggggaaagccgagaaggaagaaccctcaggaaggcctgtacaatgaactgcagaaagataagatggcggaggcctacagtgagattgggatgaaaggcgagcgccggaggggcaaggggcacgatggcctttaccagggtctcagtacagccaccaaggacacctacgacgcccttcacatgcaggccctgccccctcgcggctctggcgagggaaggggttccctgcttacttgcggcgacgtcgaagagaatcccggtccgatggccctcccagtaactgccctccttttgcccctcgcactccttcttcatgccgctcgccccaactgggtcaacgtgattagcgatttgaagaaaatcgaggaccttatacagtctatgcatattgacgctacactgtatactgagagtgatgtacacccgtcctgtaaggtaacggccatgaaatgctttcttctggagctccaggtcatcagcttggagtctggggacgcaagcatccacgatacggttgaaaacctcatcatccttgcgaacaactctctctcatctaatggaaacgttacagagagtgggtgtaaggagtgcgaagagttggaagaaaaaaacatcaaagaatttcttcaatccttcgttcacatagtgcaaatgttcattaacacgtccactaccacacccgccccgaggccacctacgccggcaccgactatcgccagtcaacccctctctctgcgccccgaggcttgccggcctgcggctggtggggcggtccacacccggggcctggattttgcgtgcgatatatacatctgggcacctcttgccggcacctgcggagtgctgcttctctcactcgttattacgctgtactgc

SEQ ID NO: 2652 - DNA, 2160 bp, synthetic construct
  misc_feature 1..2160: note = Synthetic
  source 1..2160: mol_type = other DNA
atggccttaccagtgaccgccttgctcctgccgctggccttgctgctccacgccgccaggccggaaattgtaatgacacagtctccagccaccctgtctttgtctccaggggaaagagccaccctctcctgcagggccagtcagagtgttagcagcagctacttatcctggtaccagcagaaacctgggctggctcccaggctcctcatctatggtgcatccaccagggccactggcatcccagccaggttcagtggcagtgggtctgggacagacttcactctcaccatcagcagcctgcagcctgaagattttgcagtttattactgtcagcaggattataacttacctccgacgttcggccaagggaccaaggtggaaatcaaaggcagcaccagcggcagcggcaagcccggctccggagagggcagcaccaagggcgaggtgcagctgttggagtctgggggagacttggtacagcctggggggtccctgcgactctcctgtgcagcctctggattcacctttagcacctatgccatgacctgggtccgccaggctccagggaaggggctggagtgggtctcagctattagtggtactagtggtagcacatactacgcagactccgtgaagggccggttcaccatctccagagacaattccaagagcacgctgtatctgcacatgaacagcctgagaaccgaggacacggccgtatattactgtgcgagaggcggatataactggcactactactactacatggacgtctggggcaaagggaccacggtcaccgtctcctcagcggccgcaaccacgacgccagcgccgcggccaccaacaccggcgcccaccatcgcgtcgcagcccctgtccctgcgcccagaggcgtgccggccagcggcggggggcgcagtgcacacgagggggctggacttcgcctgtgatatctacatctgggcgcccttggccgggacttgtggggtccttctcctgtcactggttatcaccctttactgcaaacggggcagaaagaaactcctgtatatattcaaacaaccatttatgagaccagtacaaactactcaagaggaagatggctgtagctgccgatttccagaagaagaagaaggaggatgtgaactgagagtgaagttcagcaggagcgcagacgcccccgcgtaccagcagggccagaaccagctctataacgagctcaatctaggacgaagagaggagtacgatgttttggacaagagacgtggccgggaccctgagatggggggaaagccgagaaggaagaaccctcaggaaggcctgtacaatgaactgcagaaagataagatggcggaggcctacagtgagattgggatgaaaggcgagcgccggaggggcaaggggcacgatggcctttaccagggtctcagtacagccaccaaggacacctacgacgcccttcacatgcaggccctgccccctcgcggctctggcgagggaaggggttccctgcttacttgcggcgacgtcgaagagaatcccggtccgatggccctcccagtaactgccctccttttgcccctcgcactccttcttcatgccgctcgccccaactgggtcaacgtgattagcgatttgaagaaaatcgaggaccttatacagtctatgcatattgacgctacactgtatactgagagtgatgtacacccgtcctgtaaggtaacggccatgaaatgctttcttctggagctccaggtcatcagcttggagtctggggacgcaagcatccacgatacggttgaaaacctcatcatccttgcgaacaactctctctcatctaatggaaacgttacagagagtgggtgtaaggagtgcgaagagttggaagaaaaaaacatcaaagaatttcttcaatccttcgttcacatagtgcaaatgttcattaacacgtccactaccacacccgccccgaggccacctacgccggcaccgactatcgccagtcaacccctctctctgcgccccgaggcttgccggcctgcggctggtggggcggtccacacccggggcctggattttgcgtgcgatatatacatctgggcacctcttgccggcacctgcggagtgctgcttctctcactcgttattacgctgtactgc

SEQ ID NO: 2653 - protein, 494 aa, synthetic construct
  REGION 1..494: note = Synthetic
MALPVTALLLPLALLLHAARPQVQLVESGGGVVQPGRSLRLSCAASGFTFSSHDMHWVRQAPGKGLDWVAVIWSDGNKKYYVDSAKGRFTISRDNSKNTVYLQMNSLRAEDTAIYYCARGDNWNDEHSYYYYMDVWGKGTTVTVSSGGGGSGGGGSGGGGSEIVLTQSPDFQSVTPKEKVTITCRASQTIGSSLHWYQQKPDQSPKLLIKHASQSFSGVPSRFSGSGSGTDFTLTVNSLEAEDAATYYCHQSSSLPWTFGQGTKVEIKAAATTTPAPRPPTPAPTIASQPLSLRPEACRPAAGGAVHTRGLDFACDIYIWAPLAGTCGVLLLSLVITLYCKRGRKKLLYIFKQPFMRPVQTTQEEDGCSCRFPEEEEGGCELRVKFSRSADAPAYQQGQNQLYNELNLGRREEYDVLDKRRGRDPEMGGKPRRKNPQEGLYNELQKDKMAEAYSEIGMKGERRRGKGHDGLYQGLSTATKDTYDALHMQALPPR

SEQ ID NO: 2654 - protein, 494 aa, synthetic construct
  REGION 1..494: note = Synthetic
MALPVTALLLPLALLLHAARPQVQLVESGGGVVQPGRSLRLSCAASGFTFSSHDMHWVRQAPGKGLDWVAVIWSDGNNKYYADSAKGRFTISRDNSKNTVYLQMNSLRAEDTAIYYCARGDNWNDEHSYYYYMDVWGKGTTVTVSSGGGGSGGGGSGGGGSEIVLTQSPDFQSVTPKEKVTITCRASQTIGSSLHWYQQKPDQSPKLLIKHASQSFSGVPSRFSGSGSGTDFTLTVNSLEAEDAATYYCHQSSSLPWTFGQGTKVEIKAAATTTPAPRPPTPAPTIASQPLSLRPEACRPAAGGAVHTRGLDFACDIYIWAPLAGTCGVLLLSLVITLYCKRGRKKLLYIFKQPFMRPVQTTQEEDGCSCRFPEEEEGGCELRVKFSRSADAPAYQQGQNQLYNELNLGRREEYDVLDKRRGRDPEMGGKPRRKNPQEGLYNELQKDKMAEAYSEIGMKGERRRGKGHDGLYQGLSTATKDTYDALHMQALPPR

SEQ ID NO: 2655 - protein, 493 aa, synthetic construct
  REGION 1..493: note = Synthetic
MALPVTALLLPLALLLHAARPQLQLVQSGAEVKKPGASVKVSCKASGYTFTNYGISWLRQAPGQGLEWMGWISGYNDNTHYAQKFQGRVTMTTDTSTTTAYMELRNLRSDDTAVYYCARDGIAARPVYYYYMDVWGKGTTVTVSSGGGGSGGGGSGGGGSDIQMTQSPSSLSASVGDRVTITCRASQSISNYLNWYHQKPGKAPKLLIYAASSLESGVPSRFSGSGSGTDFTLTISSLQPEDFATYYCQQSYSNPLTFGGGTKVESKAAATTTPAPRPPTPAPTIASQPLSLRPEACRPAAGGAVHTRGLDFACDIYIWAPLAGTCGVLLLSLVITLYCKRGRKKLLYIFKQPFMRPVQTTQEEDGCSCRFPEEEEGGCELRVKFSRSADAPAYQQGQNQLYNELNLGRREEYDVLDKRRGRDPEMGGKPRRKNPQEGLYNELQKDKMAEAYSEIGMKGERRRGKGHDGLYQGLSTATKDTYDALHMQALPPR

SEQ ID NO: 2656 - protein, 494 aa, synthetic construct
  REGION 1..494: note = Synthetic
MALPVTALLLPLALLLHAARPQVQLVESGGGVVQPGRSLRLSCVASGFTFSSNDIYWVRQAPGKGLEWVAVIWYDGSNKYYADSVKGRFTISRDNSKNTLYLQMNSLRAEDTAVYYCARGDNWNDEHHYHYYMDVWGKGTTVTVSSGGGGSGGGGSGGGGSEIVLTQSPDFQSVTPKEKVTITCRASQSIGSSLHWYQQKPDQSPKLLIKFASQSFSGVPSRFSGSGSGTDFTLTIHSLEAEDAATYYCHQSGSLPWTFGQGTKVEIKAAATTTPAPRPPTPAPTIASQPLSLRPEACRPAAGGAVHTRGLDFACDIYIWAPLAGTCGVLLLSLVITLYCKRGRKKLLYIFKQPFMRPVQTTQEEDGCSCRFPEEEEGGCELRVKFSRSADAPAYQQGQNQLYNELNLGRREEYDVLDKRRGRDPEMGGKPRRKNPQEGLYNELQKDKMAEAYSEIGMKGERRRGKGHDGLYQGLSTATKDTYDALHMQALPPR

SEQ ID NO: 2657 - protein, 487 aa, synthetic construct
  REGION 1..487: note = Synthetic
MALPVTALLLPLALLLHAARPQVQLVESGGGVVQPGRSLRLSCAASGFTFSSYGMHWVRQAPGKGLEWVAVISYDGSNKYYADSVKGRFTISRDNSKTTLYLQMNSLRAEDTAVYYCARDHYYYYMDVWGKGTTVTVSSGGGGSGGGGSGGGGSVTQEPSFSVSPGGTVTLTCGLSSGSVSTSYYPSWYQQTPGQAPRTLIYSTNIRSSGVPDRFSGSILGNKAALTITGAQADDESDYYCVLYMGSDIVVFGGGTKLTVLAAATTTPAPRPPTPAPTIASQPLSLRPEACRPAAGGAVHTRGLDFACDIYIWAPLAGTCGVLLLSLVITLYCKRGRKKLLYIFKQPFMRPVQTTQEEDGCSCRFPEEEEGGCELRVKFSRSADAPAYQQGQNQLYNELNLGRREEYDVLDKRRGRDPEMGGKPRRKNPQEGLYNELQKDKMAEAYSEIGMKGERRRGKGHDGLYQGLSTATKDTYDALHMQALPPR

SEQ ID NO: 2658 - protein, 492 aa, synthetic construct
  REGION 1..492: note = Synthetic
MALPVTALLLPLALLLHAARPQLQLQESGPGLVKPSETLSLTCTVSGGSISSSSYYWGWIRQPPGKGLEWIGSLYYSGSTYYNPSLKSRVTISVDTSKNQFSLKLSSVTAADTAVYYCAAVQLERRGYFYMDVWGKGTTVTVSSGGGGSGGGGSGGGGSEIVLTQSPATLSLSPGERATLSCRASQSVSSYFAWYQQKPGQAPRLLIYDASNRATGIPARFSGSGSGTDFTLTISSLEPEDFAVYYCQQRSNWPLTFGGGTKVEIKAAATTTPAPRPPTPAPTIASQPLSLRPEACRPAAGGAVHTRGLDFACDIYIWAPLAGTCGVLLLSLVITLYCKRGRKKLLYIFKQPFMRPVQTTQEEDGCSCRFPEEEEGGCELRVKFSRSADAPAYQQGQNQLYNELNLGRREEYDVLDKRRGRDPEMGGKPRRKNPQEGLYNELQKDKMAEAYSEIGMKGERRRGKGHDGLYQGLSTATKDTYDALHMQALPPR

SEQ ID NO: 2659 - protein, 494 aa, synthetic construct
  REGION 1..494: note = Synthetic
MALPVTALLLPLALLLHAARPQVQLVESGGGVVQPGRSLRLSCAASGFTFSNYGMHWVRQAPGKGLEWMAVIWSDGHNKYYADSVKGRFTISRDNSKNTLYLQMNSLRAEDTAVYYCARAQLERRYFYYMDVWGKGTTVTVSSGGGGSGGGGSGGGGSQTVVTQEPSFSVSPGGTVTLTCGLTSGSVSTSYYPNWYQQTPGQAPRTLIYSTNIRSSGVPDRFSGSILGNKAALTITGAQADDESDYYCVLYMGSGMFIFGSGTKVTVLAAATTTPAPRPPTPAPTIASQPLSLRPEACRPAAGGAVHTRGLDFACDIYIWAPLAGTCGVLLLSLVITLYCKRGRKKLLYIFKQPFMRPVQTTQEEDGCSCRFPEEEEGGCELRVKFSRSADAPAYQQGQNQLYNELNLGRREEYDVLDKRRGRDPEMGGKPRRKNPQEGLYNELQKDKMAEAYSEIGMKGERRRGKGHDGLYQGLSTATKDTYDALHMQALPPR

SEQ ID NO: 2660 - protein, 494 aa, synthetic construct
  REGION 1..494: note = Synthetic
MALPVTALLLPLALLLHAARPQVQLVQSGAEVKKPGASVKVSCKASGYTFTSYDINWVRQATGQGLEWMGWMIPNSGDTGSAQKFQGRVTMTRNTSIGTAYMELSSLRSEDTAVYYCARGGYCNSTSCYYYYMDVWGKGTTVTVSSGGGGSGGGGSGGGGSDIQMTQSPSSLSASVGDRVTITCRASQGISSWLAWYQQKPEKAPKSLIYAASSLQGGVPSRFSGSGSGTDFTLTISSLQPEDFATYYCQQYDSYPYTFGQGTKLEIKAAATTTPAPRPPTPAPTIASQPLSLRPEACRPAAGGAVHTRGLDFACDIYIWAPLAGTCGVLLLSLVITLYCKRGRKKLLYIFKQPFMRPVQTTQEEDGCSCRFPEEEEGGCELRVKFSRSADAPAYQQGQNQLYNELNLGRREEYDVLDKRRGRDPEMGGKPRRKNPQEGLYNELQKDKMAEAYSEIGMKGERRRGKGHDGLYQGLSTATKDTYDALHMQALPPR

SEQ ID NO: 2661 - protein, 495 aa, synthetic construct
  REGION 1..495: note = Synthetic
MALPVTALLLPLALLLHAARPQVQLVQSGAEVKKPGASVKVSCKASGYTFTSYDINWVRQATGQGLEWMGWMNPNSGNTVYAQKFQGRVTMTRNTSISTAYMELSSLRSEDTAVYYCARGGDFWSGYHDYYYYMDVWGKGTTVTVSSGGGGSGGGGSGGGGSDIQVTQSPTFLSASVGDRVTITCRASQGISSYLAWYQQKPGKAPKLLIYGASTLQSGVPSRFSGSGSGTEFTLTISSLQPEDFATYYCQQLNSYPWTFGQGTKVEIKAAATTTPAPRPPTPAPTIASQPLSLRPEACRPAAGGAVHTRGLDFACDIYIWAPLAGTCGVLLLSLVITLYCKRGRKKLLYIFKQPFMRPVQTTQEEDGCSCRFPEEEEGGCELRVKFSRSADAPAYQQGQNQLYNELNLGRREEYDVLDKRRGRDPEMGGKPRRKNPQEGLYNELQKDKMAEAYSEIGMKGERRRGKGHDGLYQGLSTATKDTYDALHMQALPPR

SEQ ID NO: 2662 - protein, 493 aa, synthetic construct
  REGION 1..493: note = Synthetic
MALPVTALLLPLALLLHAARPQVQLQESGPGLVKPSETLSLTCTVSGGSISSYYWSWIRQPAGKGLEWIGRIYTSGSTNYNPSLKSRVTMSVDTSKNQFSLKLSSVTAADTAVYYCAREEYQLLPALYYYYYMDVWGKGTTVTVSSGGGGSGGGGSGGGGSSYELTQPPSVSVSPGQTASITCSGDKLGDKYACWYQQKPGQSPVLVIYQDSKRPSGIPERFSGSNSGNTATLTISGTQAMDEADYYCQAWDSSTAVFGGGTQLTALAAATTTPAPRPPTPAPTIASQPLSLRPEACRPAAGGAVHTRGLDFACDIYIWAPLAGTCGVLLLSLVITLYCKRGRKKLLYIFKQPFMRPVQTTQEEDGCSCRFPEEEEGGCELRVKFSRSADAPAYQQGQNQLYNELNLGRREEYDVLDKRRGRDPEMGGKPRRKNPQEGLYNELQKDKMAEAYSEIGMKGERRRGKGHDGLYQGLSTATKDTYDALHMQALPPR

SEQ ID NO: 2663 - protein, 494 aa, synthetic construct
  REGION 1..494: note = Synthetic
MALPVTALLLPLALLLHAARPQVQLVESGGGVVQPGRSLRLSCAATGFTFSSYGMHWVRQAPGKGLEWMVVIWSDGHNKYYADSVKGRFTISRDNSKNTLYLQMNSLRAEDTAVYYCARAQLERRYFYYMDVWGKGTTVTVSSGGGGSGGGGSGGGGSQTVVTQEPSFSVSPGGTVTLTCGLTSGSVSTSYYPNWYQQTPGQAPRTLIYSTNIRSSGVPDRFSGSILGNKAALTITGAQADDESDYYCVLYMGSGMFIFGSGTKVTVLAAATTTPAPRPPTPAPTIASQPLSLRPEACRPAAGGAVHTRGLDFACDIYIWAPLAGTCGVLLLSLVITLYCKRGRKKLLYIFKQPFMRPVQTTQEEDGCSCRFPEEEEGGCELRVKFSRSADAPAYQQGQNQLYNELNLGRREEYDVLDKRRGRDPEMGGKPRRKNPQEGLYNELQKDKMAEAYSEIGMKGERRRGKGHDGLYQGLSTATKDTYDALHMQALPPR

SEQ ID NO: 2664 - protein, 494 aa, synthetic construct
  REGION 1..494: note = Synthetic
MALPVTALLLPLALLLHAARPQVQLVESGGGVVQPGRSLRLSCAASGFTFTSYDMHWVRQAPGKGLEWVTIIWFDGSNKYYADSVKGRFTISRDNSKNTLYLQMNSLSAEDTAVYYCARGDNWNDRYYYYYYMDVWGKGTTVTVSSGGGGSGGGGSGGGGSEIVLTQSPDFQSVTPKEKVTITCRASQSIGSSLHWYQQKPDQSPMLLIKFASQSISGVPSRFSGSGSGTDFTLTINSLEAEDAAAYYCHQSSSLPWTFGQGTKVEIKAAATTTPAPRPPTPAPTIASQPLSLRPEACRPAAGGAVHTRGLDFACDIYIWAPLAGTCGVLLLSLVITLYCKRGRKKLLYIFKQPFMRPVQTTQEEDGCSCRFPEEEEGGCELRVKFSRSADAPAYQQGQNQLYNELNLGRREEYDVLDKRRGRDPEMGGKPRRKNPQEGLYNELQKDKMAEAYSEIGMKGERRRGKGHDGLYQGLSTATKDTYDALHMQALPPR

SEQ ID NO: 2665 - protein, 499 aa, synthetic construct
  REGION 1..499: note = Synthetic
MALPVTALLLPLALLLHAARPQVQLVQSGAEVKKPGASVKVSCKASGYTFTSYGISWVRQAPGQGLEWMGWISAYNGHTDYTQKLQGRVTMTTDTSTTTAYMELRSLSSADTAVYYCVREVVLPTTDYYYFYMDVWGKGTTVTVSSGGGGSGGGGSGGGGSDIVMTQPPLSSPVTLGQPASISCRSSQSLVHSDGNTYLSWLQQRPGQPPRLLIYKVSNRFSGVPDRFSGSGAGTDFTLKISRVEAEDVGVYYCTQATQFPHTFGQGTKLEIKAAATTTPAPRPPTPAPTIASQPLSLRPEACRPAAGGAVHTRGLDFACDIYIWAPLAGTCGVLLLSLVITLYCKRGRKKLLYIFKQPFMRPVQTTQEEDGCSCRFPEEEEGGCELRVKFSRSADAPAYQQGQNQLYNELNLGRREEYDVLDKRRGRDPEMGGKPRRKNPQEGLYNELQKDKMAEAYSEIGMKGERRRGKGHDGLYQGLSTATKDTYDALHMQALPPR

SEQ ID NO: 2666 - protein, 498 aa, synthetic construct
  REGION 1..498: note = Synthetic
MALPVTALLLPLALLLHAARPQVQLVQSGAEVKKPGASVKVSCKVSGYTLTELSMHWVRQAPGKGLEWMGGFDPEDGETIYAQKFQGRVTMTEDTSTDTAYMELSSLRSEDTAVYYCATGRITMVRGVIIPYYYYYMDVWGKGTTVTVSSGGGGSGGGGSGGGGSDIQMTQSPSSLSASVGDRVTITCRASQGISSWLAWYQQKPEKAPKSLIYAASSLQSGVPSRFSGSGSGTDFTLTISSLQPEDFATYYCQQYNSYPYTFGQGTKLEIKAAATTTPAPRPPTPAPTIASQPLSLRPEACRPAAGGAVHTRGLDFACDIYIWAPLAGTCGVLLLSLVITLYCKRGRKKLLYIFKQPFMRPVQTTQEEDGCSCRFPEEEEGGCELRVKFSRSADAPAYQQGQNQLYNELNLGRREEYDVLDKRRGRDPEMGGKPRRKNPQEGLYNELQKDKMAEAYSEIGMKGERRRGKGHDGLYQGLSTATKDTYDALHMQALPPR

SEQ ID NO: 2667 - protein, 496 aa, synthetic construct
  REGION 1..496: note = Synthetic
MALPVTALLLPLALLLHAARPQVQLVQSGTEVKKPGASVKVSCKASGYTFTNYGIGWVRQAPGQGLEWMGWIIAYNGYTKYAQILQGRVTMTTDTSTNTAYMELRSLRSDDTAVYYCARQQLGGDYHYYMDVWGKGTTVTVSSGGGGSGGGGSGGGGSDIVMTQTPLSLSVTPGQPASISCKSSKSLLHSDGKTYLYWYLQKPGQPPQLLIYEVSNRFSGVPDRFSGSGSGTDFTLKISRVEAEDVGVYYCMQSIQFPWTFGQGTKVEIKAAATTTPAPRPPTPAPTIASQPLSLRPEACRPAAGGAVHTRGLDFACDIYIWAPLAGTCGVLLLSLVITLYCKRGRKKLLYIFKQPFMRPVQTTQEEDGCSCRFPEEEEGGCELRVKFSRSADAPAYQQGQNQLYNELNLGRREEYDVLDKRRGRDPEMGGKPRRKNPQEGLYNELQKDKMAEAYSEIGMKGERRRGKGHDGLYQGLSTATKDTYDALHMQALPPR

SEQ ID NO: 2668 - protein, 496 aa, synthetic construct
  REGION 1..496: note = Synthetic
MALPVTALLLPLALLLHAARPQVQLVQSGTEVKKPGASVKVSCKASGYTFTNYGIGWVRQAPGQGLEWMGWIIAYNGYTKYAQILQGRVTMTTDTSTNTAYMELRSLRSDDTAVYYCARQQLGGDYHYYMDVWGKGTTVTVSSGGGGSGGGGSGGGGSDIVMTQTPLSLSVTPGQPASISCKSSKSLLHSDGKTYLYWYLQKPGQPPQLLIYEVSTRFSGVPDRFSGSGSGTDFTLKISRVEAEDVGVYYCMQSIQFPWTFGQGTKVEIKAAATTTPAPRPPTPAPTIASQPLSLRPEACRPAAGGAVHTRGLDFACDIYIWAPLAGTCGVLLLSLVITLYCKRGRKKLLYIFKQPFMRPVQTTQEEDGCSCRFPEEEEGGCELRVKFSRSADAPAYQQGQNQLYNELNLGRREEYDVLDKRRGRDPEMGGKPRRKNPQEGLYNELQKDKMAEAYSEIGMKGERRRGKGHDGLYQGLSTATKDTYDALHMQALPPR

SEQ ID NO: 2669 - protein, 494 aa, synthetic construct
  REGION 1..494: note = Synthetic
MALPVTALLLPLALLLHAARPQVQLVQSGTEVKKPGASVKVSCKTSGYTFTSYDINWVRQATGQGLEWMGWMNPISGDTGSAQKFQGRVTMTRNTSIGTAYMELSSLRSEDTAVYYCARGGYCSSTSCYYYYMDVWGKGTTVTVSSGGGGSGGGGSGGGGSDIQMTQSPSSLSASVGDRVTITCRASQGISNWLAWYQQKPEKAPKSLIYAASSLQGGVPSRFSGSGSGTDFTLTISSLQPEDFATYYCQQYDSYPYTFGQGTKLEIKAAATTTPAPRPPTPAPTIASQPLSLRPEACRPAAGGAVHTRGLDFACDIYIWAPLAGTCGVLLLSLVITLYCKRGRKKLLYIFKQPFMRPVQTTQEEDGCSCRFPEEEEGGCELRVKFSRSADAPAYQQGQNQLYNELNLGRREEYDVLDKRRGRDPEMGGKPRRKNPQEGLYNELQKDKMAEAYSEIGMKGERRRGKGHDGLYQGLSTATKDTYDALHMQALPPR

SEQ ID NO: 2670 - protein, 494 aa, synthetic construct
  REGION 1..494: note = Synthetic
MALPVTALLLPLALLLHAARPQVQLVQSGAEVKKPGASVKVSCKASGYTFTSYDINWVRQATGQGLEWMGWMIPNSGDTGSAQKFQGRVTMTRNTSISTAYMELSSLRSEDTAVYYCARGGYCNSTSCYYYYMDVWGKGTTVTVSSGGGGSGGGGSGGGGSDIQMTQSPSSLSASVGDRVTITCRASQGISSWLAWYQQKPEKAPKSLIYAASSLQGGVPSRFSGSGSGTDFTLTISSLQPEDFATYYCQQYDSYPYTFGQGTKLEIKAAATTTPAPRPPTPAPTIASQPLSLRPEACRPAAGGAVHTRGLDFACDIYIWAPLAGTCGVLLLSLVITLYCKRGRKKLLYIFKQPFMRPVQTTQEEDGCSCRFPEEEEGGCELRVKFSRSADAPAYQQGQNQLYNELNLGRREEYDVLDKRRGRDPEMGGKPRRKNPQEGLYNELQKDKMAEAYSEIGMKGERRRGKGHDGLYQGLSTATKDTYDALHMQALPPR

SEQ ID NO: 2671 - protein, 495 aa, synthetic construct
  REGION 1..495: note = Synthetic
MALPVTALLLPLALLLHAARPEVQLLESGGGLVQPGGSLRLSCAASGFTFSSYVMNWVRQAPGKGLEWVSSVSGSGNNSFYADSVKGRFTISRDNSKNTLYLQMNSLRAEDTAVYYCASRSSSYLYYYYYMDVWGKGTTVTVSSGGGGSGGGGSGGGGSEIVLTQSPGTLSLSPGERATLSCRASQSVSSSYLAWYQQKPGQAPRLLIYGASSRATGIPDRFSDSGSGTDFTLTISRLEPEDFAVYYCQHYGSSPPRITFGPGTKVDIKAAATTTPAPRPPTPAPTIASQPLSLRPEACRPAAGGAVHTRGLDFACDIYIWAPLAGTCGVLLLSLVITLYCKRGRKKLLYIFKQPFMRPVQTTQEEDGCSCRFPEEEEGGCELRVKFSRSADAPAYQQGQNQLYNELNLGRREEYDVLDKRRGRDPEMGGKPRRKNPQEGLYNELQKDKMAEAYSEIGMKGERRRGKGHDGLYQGLSTATKDTYDALHMQALPPR

SEQ ID NO: 2672 - DNA, 1482 bp, synthetic construct
  misc_feature 1..1482: note = Synthetic
  source 1..1482: mol_type = other DNA
atggccttaccagtgaccgccttgctcctgccgctggccttgctgctccacgccgccaggccgcaggtgcagctggtggagtctgggggaggcgtggtccagcctgggaggtccctgagactttcctgtgcagcgtctggattcaccttcagcagtcatgacatgcactgggtccgccaggctccaggcaaggggctggactgggtggcagttatatggagtgatggaaataaaaaatactatgtagactccgcgaagggccggttcaccatctccagagacaattccaagaacacggtgtatctgcaaatgaacagcctgagagccgaggacacggctatatattactgtgcgagaggtgacaactggaacgacgaacactcctactattactacatggacgtctggggcaaggggaccacggtcaccgtctcctcaggcggcggtggatctggaggcggaggctctggaggcggcggctccgaaattgtgctgactcagtctccagactttcagtctgtgactccaaaggagaaagtcaccatcacctgccgggccagtcagaccattggcagtagcttacactggtaccagcagaaaccagatcagtctccaaagctcctcatcaagcatgcttcccagtccttctcaggggtcccctcgaggttcagtggcagtggatctgggacagatttcaccctcaccgtcaatagcctggaagctgaagatgctgcaacgtattactgtcatcagagtagtagtttaccgtggacgttcggccaagggaccaaggtggaaatcaaagcggccgcaaccacgacgccagcgccgcggccaccaacaccggcgcccaccatcgcgtcgcagcccctgtccctgcgcccagaggcgtgccggccagcggcggggggcgcagtgcacacgagggggctggacttcgcctgtgatatctacatctgggcgcccttggccgggacttgtggggtccttctcctgtcactggttatcaccctttactgcaaacggggcagaaagaaactcctgtatatattcaaacaaccatttatgagaccagtacaaactactcaagaggaagatggctgtagctgccgatttccagaagaagaagaaggaggatgtgaactgagagtgaagttcagcaggagcgcagacgcccccgcgtaccagcagggccagaaccagctctataacgagctcaatctaggacgaagagaggagtacgatgttttggacaagagacgtggccgggaccctgagatggggggaaagccgagaaggaagaaccctcaggaaggcctgtacaatgaactgcagaaagataagatggcggaggcctacagtgagattgggatgaaaggcgagcgccggaggggcaaggggcacgatggcctttaccagggtctcagtacagccaccaaggacacctacgacgcccttcacatgcaggccctgccccctcgc

SEQ ID NO: 2673 - DNA, 1482 bp, synthetic construct
  misc_feature 1..1482: note = Synthetic
  source 1..1482: mol_type = other DNA
atggccttaccagtgaccgccttgctcctgccgctggccttgctgctccacgccgccaggccgcaggtgcagctggtggagtctgggggaggcgtggtccagcctgggaggtccctgagactttcctgtgcagcgtctggattcaccttcagtagtcatgacatgcactgggtccgccaggctccaggcaaggggctggactgggtggcagttatatggagtgatggaaataataaatactatgcagactccgcgaagggccggttcaccatctccagagacaattccaagaacacggtgtatctgcaaatgaacagcctgagagccgaggacacggctatatattactgtgcgagaggtgacaactggaacgacgaacactcctactattactacatggacgtctggggcaaggggaccacggtcaccgtctcctcaggcggcggtggatctggaggcggaggctctggaggcggcggctccgaaattgtgctgactcagtctccagactttcagtctgtgactccaaaggagaaagtcaccatcacctgccgggccagtcagaccattggcagtagcttacactggtaccagcagaaaccagatcagtctccaaagctcctcatcaagcatgcttcccagtccttctcaggggtcccctcgaggttcagtggcagtggatctgggacagatttcaccctcaccgtcaatagcctggaagctgaagatgctgcaacgtattactgtcatcagagtagtagtttaccgtggacgttcggccaagggaccaaggtggaaatcaaagcggccgcaaccacgacgccagcgccgcggccaccaacaccggcgcccaccatcgcgtcgcagcccctgtccctgcgcccagaggcgtgccggccagcggcggggggcgcagtgcacacgagggggctggacttcgcctgtgatatctacatctgggcgcccttggccgggacttgtggggtccttctcctgtcactggttatcaccctttactgcaaacggggcagaaagaaactcctgtatatattcaaacaaccatttatgagaccagtacaaactactcaagaggaagatggctgtagctgccgatttccagaagaagaagaaggaggatgtgaactgagagtgaagttcagcaggagcgcagacgcccccgcgtaccagcagggccagaaccagctctataacgagctcaatctaggacgaagagaggagtacgatgttttggacaagagacgtggccgggaccctgagatggggggaaagccgagaaggaagaaccctcaggaaggcctgtacaatgaactgcagaaagataagatggcggaggcctacagtgagattgggatgaaaggcgagcgccggaggggcaaggggcacgatggcctttaccagggtctcagtacagccaccaaggacacctacgacgcccttcacatgcaggccctgccccctcgc

SEQ ID NO: 2674 - DNA, 1479 bp, synthetic construct
  misc_feature 1..1479: note = Synthetic
  source 1..1479: mol_type = other DNA
atggccttaccagtgaccgccttgctcctgccgctggccttgctgctccacgccgccaggccgcagcttcagctggtgcagtctggagctgaggtgaagaagcctggggcctcagtgaaggtctcctgcaaggcttctggttacacctttaccaactatggtatcagctggttgcgacaggcccctggacaagggcttgagtggatgggatggatcagtggttacaatgataacacacactatgcacagaagttccagggcagagtcaccatgaccacagacacatccacgaccacagcctacatggaactgaggaacctgagatctgacgacacggccgtgtattactgtgcgagagatgggatagcagctcgtccagtctactactactacatggacgtctggggcaaagggaccacggtcaccgtctcctcaggcggcggtggatctggaggcggaggctctggaggcggcggctccgacatacagatgacccagtctccatcctccctgtctgcatctgtaggagacagagtcaccatcacttgccgggcaagccagagcattagcaactatttaaattggtatcaccagaaaccagggaaagcccctaagctcctgatctatgctgcatccagtttggaaagtggggtcccatcaaggttcagtggcagtggatctgggacagatttcactctcaccatcagcagtctgcaacctgaagattttgcaacttactactgtcaacagagttacagtaacccgctcactttcggcggagggaccaaggtggagagcaaagcggccgcaaccacgacgccagcgccgcggccaccaacaccggcgcccaccatcgcgtcgcagcccctgtccctgcgcccagaggcgtgccggccagcggcggggggcgcagtgcacacgagggggctggacttcgcctgtgatatctacatctgggcgcccttggccgggacttgtggggtccttctcctgtcactggttatcaccctttactgcaaacggggcagaaagaaactcctgtatatattcaaacaaccatttatgagaccagtacaaactactcaagaggaagatggctgtagctgccgatttccagaagaagaagaaggaggatgtgaactgagagtgaagttcagcaggagcgcagacgcccccgcgtaccagcagggccagaaccagctctataacgagctcaatctaggacgaagagaggagtacgatgttttggacaagagacgtggccgggaccctgagatggggggaaagccgagaaggaagaaccctcaggaaggcctgtacaatgaactgcagaaagataagatggcggaggcctacagtgagattgggatgaaaggcgagcgccggaggggcaaggggcacgatggcctttaccagggtctcagtacagccaccaaggacacctacgacgcccttcacatgcaggccctgccccctcgc

SEQ ID NO: 2675 - DNA, 1482 bp, synthetic construct
  misc_feature 1..1482: note = Synthetic
  source 1..1482: mol_type = other DNA
atggccttaccagtgaccgccttgctcctgccgctggccttgctgctccacgccgccaggccgcaggtgcagctggtggagtctgggggaggcgtggtccagcctgggaggtccctgagactctcctgtgtagcgtctggattcaccttcagtagcaatgacatatactgggtccgccaggccccaggcaaggggctggagtgggtggcagttatatggtatgatggaagtaataaatactatgcagactccgtgaagggccgattcaccatctccagagacaattccaagaacacgctgtatctgcaaatgaacagcctgagagccgaggacacggctgtgtattactgtgcgagaggtgacaactggaacgacgaacaccactaccactactacatggacgtctggggcaaagggaccacggtcaccgtctcctcaggcggcggtggatctggaggcggaggctctggaggcggcggctccgaaattgtgctgactcagtctccagactttcagtctgtgactccaaaggagaaagtcaccatcacctgccgggccagtcagagcattggtagtagcttacactggtaccagcagaaaccagatcagtctccaaagctcctcatcaagtttgcttcccagtccttctcaggggtcccctcgaggttcagtggcagtggatctgggacagatttcaccctcaccatccatagcctggaagctgaagatgctgcaacgtattactgtcatcagagtggtagtttaccgtggacgttcggccaagggaccaaggtggaaatcaaagcggccgcaaccacgacgccagcgccgcggccaccaacaccggcgcccaccatcgcgtcgcagcccctgtccctgcgcccagaggcgtgccggccagcggcggggggcgcagtgcacacgagggggctggacttcgcctgtgatatctacatctgggcgcccttggccgggacttgtggggtccttctcctgtcactggttatcaccctttactgcaaacggggcagaaagaaactcctgtatatattcaaacaaccatttatgagaccagtacaaactactcaagaggaagatggctgtagctgccgatttccagaagaagaagaaggaggatgtgaactgagagtgaagttcagcaggagcgcagacgcccccgcgtaccagcagggccagaaccagctctataacgagctcaatctaggacgaagagaggagtacgatgttttggacaagagacgtggccgggaccctgagatggggggaaagccgagaaggaagaaccctcaggaaggcctgtacaatgaactgcagaaagataagatggcggaggcctacagtgagattgggatgaaaggcgagcgccggaggggcaaggggcacgatggcctttaccagggtctcagtacagccaccaaggacacctacgacgcccttcacatgcaggccctgccccctcgc

SEQ ID NO: 2676 - DNA, 1462 bp, synthetic construct
  misc_feature 1..1462: note = Synthetic
  source 1..1462: mol_type = other DNA
atggccttaccagtgaccgccttgctcctgccgctggccttgctgctccacgccgccaggccgcaggtgcagttggtggagtctgggggaggcgtggtccagcctgggaggtccctgagactctcctgtgcagcctctggattcaccttcagtagctatggcatgcactgggtccgccaggctccaggcaaggggctggagtgggtggcagttatatcatatgatggaagtaataaatactatgcagactccgtgaagggccgattcaccatctccagggacaattccaagaccacgctgtatctgcaaatgaacagcctgagagctgaggacacggctgtgtattactgtgcgagagatcactactactactacatggacgtctggggcaaagggaccacggtcaccgtctcctcaggcggcggtggatctggaggcggaggctctggaggcggcggctccggtgacccaggagccatcgttctcagtgtcccctggagggacagtcacactcacttgtggcttgagctctggctcagtctctactagttactaccccagctggtaccagcagaccccaggccaggctccacgcacgctcatctacagcacaaacattcgctcttctggggtccctgatcgcttctctggctccatccttgggaacaaagctgccctcaccatcacgggggcccaggcagatgatgaatctgattattactgtgtgctgtatatgggtagtgacattgtggtattcggcggagggaccaagctgaccgtcctagcggccgcaaccacgacgccagcgccgcggccaccaacaccggcgcccaccatcgcgtcgcagcccctgtccctgcgcccagaggcgtgccggccagcggcggggggcgcagtgcacacgagggggctggacttcgcctgtgatatctacatctgggcgcccttggccgggacttgtggggtccttctcctgtcactggttatcaccctttactgcaaacggggcagaaagaaactcctgtatatattcaaacaaccatttatgagaccagtacaaactactcaagaggaagatggctgtagctgccgatttccagaagaagaagaaggaggatgtgaactgagagtgaagttcagcaggagcgcagacgcccccgcgtaccagcagggccagaaccagctctataacgagctcaatctaggacgaagagaggagtacgatgttttggacaagagacgtggccgggaccctgagatggggggaaagccgagaaggaagaaccctcaggaaggcctgtacaatgaactgcagaaagataagatggcggaggcctacagtgagattgggatgaaaggcgagcgccggaggggcaaggggcacgatggcctttaccagggtctcagtacagccaccaaggacacctacgacgcccttcacatgcaggccctgccccctcgc

SEQ ID NO: 2677 - DNA, 1476 bp, synthetic construct
  misc_feature 1..1476: note = Synthetic
  source 1..1476: mol_type = other DNA
atggccttaccagtgaccgccttgctcctgccgctggccttgctgctccacgccgccaggccgcaactgcagctgcaggagtcgggcccaggactggtgaagccttcggagaccctgtccctcacctgcactgtctctggtggctccatcagcagtagtagttactactggggctggatccgccagcccccagggaaggggctggagtggattgggagtctctattatagtgggagcacctactacaacccgtccctcaagagtcgagtcaccatatccgttgacacgtccaagaaccagttctccctgaagctgagctctgtgaccgccgcagacacggctgtgtattactgtgcggccgtacaactggaacgacgtgggtacttctacatggacgtctggggcaaagggaccacggtcaccgtctcctcaggcggcggtggatctggaggcggaggctctggaggcggcggctccgaaattgtgttgacacagtctccagccaccctgtctttgtctccaggggaaagagccaccctctcctgcagggccagtcagagtgttagcagctactttgcctggtaccaacagaaacctggccaggctcccaggctcctcatctatgatgcatccaacagggccactggcatcccagccaggttcagtggcagtgggtctgggacagacttcactctcaccatcagcagcctggagcctgaagattttgcagtttattactgtcagcagcgtagcaactggcctctcactttcggcggagggaccaaggtggagatcaaagcggccgcaaccacgacgccagcgccgcggccaccaacaccggcgcccaccatcgcgtcgcagcccctgtccctgcgcccagaggcgtgccggccagcggcggggggcgcagtgcacacgagggggctggacttcgcctgtgatatctacatctgggcgcccttggccgggacttgtggggtccttctcctgtcactggttatcaccctttactgcaaacggggcagaaagaaactcctgtatatattcaaacaaccatttatgagaccagtacaaactactcaagaggaagatggctgtagctgccgatttccagaagaagaagaaggaggatgtgaactgagagtgaagttcagcaggagcgcagacgcccccgcgtaccagcagggccagaaccagctctataacgagctcaatctaggacgaagagaggagtacgatgttttggacaagagacgtggccgggaccctgagatggggggaaagccgagaaggaagaaccctcaggaaggcctgtacaatgaactgcagaaagataagatggcggaggcctacagtgagattgggatgaaaggcgagcgccggaggggcaaggggcacgatggcctttaccagggtctcagtacagccaccaaggacacctacgacgcccttcacatgcaggccctgccccctcgc

SEQ ID NO: 2678 - DNA, 1482 bp, synthetic construct
  misc_feature 1..1482: note = Synthetic
  source 1..1482: mol_type = other DNA
atggccttaccagtgaccgccttgctcctgccgctggccttgctgctccacgccgccaggccgcaggtgcagctggtggagtctgggggaggcgtggtccagcctgggaggtccctgagactctcctgtgcagcatctggattcaccttcagtaactatggcatgcactgggtccgccaggctccaggcaaggggctggagtggatggcagttatatggtctgatggacataataaatactatgcagactccgtgaagggccgattcaccatctccagagacaattccaagaacacgctgtatctgcaaatgaacagcctgagagccgaggacacggctgtgtattactgtgcgagggcacaattggaacgacggtacttctactacatggacgtctggggcaaagggaccacggtcaccgtctcctcaggcggcggtggatctggaggcggaggctctggaggcggcggctcccagactgtagtgacccaggaaccatcgttctcagtgtcccctggagggacagtcacactcacttgtggcttgacctctggctcagtctctactagttactaccccaactggtaccagcagaccccaggccaggctccacgcacgctcatctatagtacaaatattcgctcttctggggtccctgatcgcttctctggctccatccttgggaacaaagctgccctcaccatcacgggggcccaggcagatgatgaatctgattattactgtgtgctgtatatgggtagtggcatgtttattttcggcagtggaaccaaggtcactgtcctagcggccgcaaccacgacgccagcgccgcggccaccaacaccggcgcccaccatcgcgtcgcagcccctgtccctgcgcccagaggcgtgccggccagcggcggggggcgcagtgcacacgagggggctggacttcgcctgtgatatctacatctgggcgcccttggccgggacttgtggggtccttctcctgtcactggttatcaccctttactgcaaacggggcagaaagaaactcctgtatatattcaaacaaccatttatgagaccagtacaaactactcaagaggaagatggctgtagctgccgatttccagaagaagaagaaggaggatgtgaactgagagtgaagttcagcaggagcgcagacgcccccgcgtaccagcagggccagaaccagctctataacgagctcaatctaggacgaagagaggagtacgatgttttggacaagagacgtggccgggaccctgagatggggggaaagccgagaaggaagaaccctcaggaaggcctgtacaatgaactgcagaaagataagatggcggaggcctacagtgagattgggatgaaaggcgagcgccggaggggcaaggggcacgatggcctttaccagggtctcagtacagccaccaaggacacctacgacgcccttcacatgcaggccctgccccctcgc

SEQ ID NO: 2679 - DNA, 1482 bp, synthetic construct
  misc_feature 1..1482: note = Synthetic
  source 1..1482: mol_type = other DNA
atggccttaccagtgaccgccttgctcctgccgctggccttgctgctccacgccgccaggccgcaggtgcagctggtgcagtctggggctgaggtgaagaagcctggggcctcagtgaaggtctcctgcaaggcttctggatacaccttcaccagttatgatatcaactgggtgcgacaggccactggacaagggcttgagtggatgggatggatgatccctaacagtggtgacacaggctctgcacagaagttccagggcagagtcaccatgaccaggaacacctccataggcacagcctacatggagctgagcagcctgagatctgaggacacggccgtttattactgtgcgagaggcggatattgtaatagtaccagttgctactactactacatggacgtctggggcaaagggaccacggtcaccgtctcctcaggcggcggtggatctggaggcggaggctctggaggcggcggctccgacatccagatgacccagtctccatcctcactgtctgcatctgtaggagacagagtcaccatcacttgtcgggcgagtcagggtattagcagctggttagcctggtatcagcagaaaccagagaaagcccctaagtccctgatctatgctgcatccagtttacagggtggggtcccatcaaggttcagcggcagtggatctgggacagatttcactctcaccatcagcagcctgcagcctgaagattttgcaacttattactgccaacagtatgatagttacccgtacacttttggccaggggaccaagctggagatcaaagcggccgcaaccacgacgccagcgccgcggccaccaacaccggcgcccaccatcgcgtcgcagcccctgtccctgcgcccagaggcgtgccggccagcggcggggggcgcagtgcacacgagggggctggacttcgcctgtgatatctacatctgggcgcccttggccgggacttgtggggtccttctcctgtcactggttatcaccctttactgcaaacggggcagaaagaaactcctgtatatattcaaacaaccatttatgagaccagtacaaactactcaagaggaagatggctgtagctgccgatttccagaagaagaagaaggaggatgtgaactgagagtgaagttcagcaggagcgcagacgcccccgcgtaccagcagggccagaaccagctctataacgagctcaatctaggacgaagagaggagtacgatgttttggacaagagacgtggccgggaccctgagatggggggaaagccgagaaggaagaaccctcaggaaggcctgtacaatgaactgcagaaagataagatggcggaggcctacagtgagattgggatgaaaggcgagcgccggaggggcaaggggcacgatggcctttaccagggtctcagtacagccaccaaggacacctacgacgcccttcacatgcaggccctgccccctcgc

SEQ ID NO: 2680 - DNA, 1485 bp, synthetic construct
  misc_feature 1..1485: note = Synthetic
  source 1..1485: mol_type = other DNA
atggccttaccagtgaccgccttgctcctgccgctggccttgctgctccacgccgccaggccgcaggtgcagctggtgcagtctggggctgaggtgaagaagcctggggcctcagtgaaggtctcctgcaaggcttctggatacaccttcaccagttatgatatcaactgggtgcgacaggccactggacaagggcttgagtggatgggatggatgaaccctaatagtggtaacacagtctatgcacagaagttccagggcagagtcaccatgaccaggaacacctccataagcacagcctacatggagctgagcagcctgagatctgaggacacggccgtgtattactgtgcgagaggaggcgatttttggagtggttaccatgactactactactacatggacgtctggggcaaagggaccacggtcaccgtctcctcaggcggcggtggatctggaggcggaggctctggaggcggcggctccgacatccaggtgacccagtctccaaccttcctgtctgcatctgtaggagacagagtcaccatcacttgccgggccagtcagggcattagcagttatttagcctggtatcagcaaaaaccagggaaagcccctaagctcctgatctatggtgcatccactttgcaaagtggggtcccatcaaggttcagcggcagtggatctgggacagaattcactctcacaatcagcagcctgcagcctgaagattttgcaacttattactgtcaacagcttaatagttacccgtggacgttcggccaagggaccaaggtggaaatcaaagcggccgcaaccacgacgccagcgccgcggccaccaacaccggcgcccaccatcgcgtcgcagcccctgtccctgcgcccagaggcgtgccggccagcggcggggggcgcagtgcacacgagggggctggacttcgcctgtgatatctacatctgggcgcccttggccgggacttgtggggtccttctcctgtcactggttatcaccctttactgcaaacggggcagaaagaaactcctgtatatattcaaacaaccatttatgagaccagtacaaactactcaagaggaagatggctgtagctgccgatttccagaagaagaagaaggaggatgtgaactgagagtgaagttcagcaggagcgcagacgcccccgcgtaccagcagggccagaaccagctctataacgagctcaatctaggacgaagagaggagtacgatgttttggacaagagacgtggccgggaccctgagatggggggaaagccgagaaggaagaaccctcaggaaggcctgtacaatgaactgcagaaagataagatggcggaggcctacagtgagattgggatgaaaggcgagcgccggaggggcaaggggcacgatggcctttaccagggtctcagtacagccaccaaggacacctacgacgcccttcacatgcaggccctgccccctcgc

SEQ ID NO: 2681 - DNA, 1479 bp, synthetic construct
  misc_feature 1..1479: note = Synthetic
  source 1..1479: mol_type = other DNA
atggccttaccagtgaccgccttgctcctgccgctggccttgctgctccacgccgccaggccgcaggtgcagctgcaggagtcgggcccaggactggtgaagccttcggagaccctgtccctcacctgcactgtctctggtggctccatcagtagttactactggagctggatccggcagcccgccgggaagggactggagtggattgggcgtatctataccagtgggagcaccaactacaacccctccctcaagagtcgagtcaccatgtcagtagacacgtccaagaaccagttctccctgaagctgagctctgtgaccgccgcggacacggccgtgtattactgtgcgagagaggagtaccagctgctaccggccctctactactactactacatggacgtctggggcaaagggaccacggtcaccgtctcctcaggcggcggtggatctggaggcggaggctctggaggcggcggctcctcctatgagctgactcagccaccctcagtgtccgtgtccccaggacagacagccagcatcacctgctctggagataaattgggggataaatatgcttgctggtatcagcagaagccaggccagtcccctgtgctggtcatctatcaagatagcaagcggccctcagggatccctgagcgattctctggctccaactctgggaacacagccactctgaccatcagcgggacccaggctatggatgaggctgactattactgtcaggcgtgggacagcagcactgctgtgttcggaggaggcacccagctgaccgccctcgcggccgcaaccacgacgccagcgccgcggccaccaacaccggcgcccaccatcgcgtcgcagcccctgtccctgcgcccagaggcgtgccggccagcggcggggggcgcagtgcacacgagggggctggacttcgcctgtgatatctacatctgggcgcccttggccgggacttgtggggtccttctcctgtcactggttatcaccctttactgcaaacggggcagaaagaaactcctgtatatattcaaacaaccatttatgagaccagtacaaactactcaagaggaagatggctgtagctgccgatttccagaagaagaagaaggaggatgtgaactgagagtgaagttcagcaggagcgcagacgcccccgcgtaccagcagggccagaaccagctctataacgagctcaatctaggacgaagagaggagtacgatgttttggacaagagacgtggccgggaccctgagatggggggaaagccgagaaggaagaaccctcaggaaggcctgtacaatgaactgcagaaagataagatggcggaggcctacagtgagattgggatgaaaggcgagcgccggaggggcaaggggcacgatggcctttaccagggtctcagtacagccaccaaggacacctacgacgcccttcacatgcaggccctgccccctcgc

SEQ ID NO: 2682 - DNA, 1482 bp, synthetic construct
  misc_feature 1..1482: note = Synthetic
  source 1..1482: mol_type = other DNA
atggccttaccagtgaccgccttgctcctgccgctggccttgctgctccacgccgccaggccgcaggtgcagctggtggagtctgggggaggcgtggtccagcctgggaggtccctgagactctcctgtgcagcaactggattcaccttcagtagctatggcatgcactgggtccgccaggctccaggcaaggggctggagtggatggtagttatatggtctgatggacataataaatactatgcagactccgtgaagggccgattcaccatctccagagacaattccaagaacacgctgtatctgcaaatgaacagcctgagagccgaggacacggctgtgtattactgtgcgagggcacaactggaacgacggtacttctactacatggacgtctggggcaaagggaccacggtcaccgtctcctcaggcggcggtggatctggaggcggaggctctggaggcggcggctcccagactgtagtgacccaggaaccatcgttctcagtgtcccctggagggacagtcacactcacttgtggcttgacctctggctcagtctctactagttactaccccaactggtaccagcagaccccaggccaggctccacgcacgctcatctacagcacaaatattcgctcttctggggtccctgatcgcttctctggctccatccttgggaacaaagctgccctcaccatcacgggggcccaggcagatgatgaatctgattattactgtgtgctgtatatgggtagtggcatgtttattttcggcagtggaaccaaggtcactgtcctagcggccgcaaccacgacgccagcgccgcggccaccaacaccggcgcccaccatcgcgtcgcagcccctgtccctgcgcccagaggcgtgccggccagcggcggggggcgcagtgcacacgagggggctggacttcgcctgtgatatctacatctgggcgcccttggccgggacttgtggggtccttctcctgtcactggttatcaccctttactgcaaacggggcagaaagaaactcctgtatatattcaaacaaccatttatgagaccagtacaaactactcaagaggaagatggctgtagctgccgatttccagaagaagaagaaggaggatgtgaactgagagtgaagttcagcaggagcgcagacgcccccgcgtaccagcagggccagaaccagctctataacgagctcaatctaggacgaagagaggagtacgatgttttggacaagagacgtggccgggaccctgagatggggggaaagccgagaaggaagaaccctcaggaaggcctgtacaatgaactgcagaaagataagatggcggaggcctacagtgagattgggatgaaaggcgagcgccggaggggcaaggggcacgatggcctttaccagggtctcagtacagccaccaaggacacctacgacgcccttcacatgcaggccctgccccctcgc

SEQ ID NO: 2683 - DNA, 1482 bp, synthetic construct
  misc_feature 1..1482: note = Synthetic
  source 1..1482: mol_type = other DNA
atggccttaccagtgaccgccttgctcctgccgctggccttgctgctccacgccgccaggccgcaggtgcagctggtggagtctgggggaggcgtggtccagcctgggaggtccctgagactctcctgtgcagcgtctggattcaccttcactagttatgacatgcactgggtccgccaggctccaggcaaggggctggagtgggtgacaattatatggtttgatggaagtaataaatactatgcagactccgtgaagggccgattcaccatctccagagacaattccaagaacacgctgtatctgcaaatgaacagcctgagcgccgaggacacggctgtgtattactgtgcgagaggagacaactggaacgaccggtactactactactactacatggacgtctggggcaaagggaccacggtcaccgtctcctcaggcggcggtggatctggaggcggaggctctggaggcggcggctccgaaattgtgctgactcagtctccagactttcagtctgtgactccaaaggagaaagtcaccatcacctgccgggccagtcagagcattggtagtagcttacactggtaccagcagaaaccagatcagtctccaatgctcctcatcaagtttgcttcccagtccatctcaggggtcccctcgaggttcagtggcagtggatctgggacagatttcaccctcaccatcaatagcctggaagctgaagatgctgcagcgtattactgtcatcagagtagtagtttaccgtggacgttcggccaagggaccaaggtggaaatcaaagcggccgcaaccacgacgccagcgccgcggccaccaacaccggcgcccaccatcgcgtcgcagcccctgtccctgcgcccagaggcgtgccggccagcggcggggggcgcagtgcacacgagggggctggacttcgcctgtgatatctacatctgggcgcccttggccgggacttgtggggtccttctcctgtcactggttatcaccctttactgcaaacggggcagaaagaaactcctgtatatattcaaacaaccatttatgagaccagtacaaactactcaagaggaagatggctgtagctgccgatttccagaagaagaagaaggaggatgtgaactgagagtgaagttcagcaggagcgcagacgcccccgcgtaccagcagggccagaaccagctctataacgagctcaatctaggacgaagagaggagtacgatgttttggacaagagacgtggccgggaccctgagatggggggaaagccgagaaggaagaaccctcaggaaggcctgtacaatgaactgcagaaagataagatggcggaggcctacagtgagattgggatgaaaggcgagcgccggaggggcaaggggcacgatggcctttaccagggtctcagtacagccaccaaggacacctacgacgcccttcacatgcaggccctgccccctcgc

SEQ ID NO: 2684 - DNA, 1497 bp, synthetic construct
  misc_feature 1..1497: note = Synthetic
  source 1..1497: mol_type = other DNA
atggccttaccagtgaccgccttgctcctgccgctggccttgctgctccacgccgccaggccgcaggttcagctggtgcagtctggagctgaggtgaagaagcctggggcctcagtgaaggtctcctgcaaggcttctggttacacctttaccagctatggtatcagctgggtgcgacaggcccctggacaagggcttgagtggatggggtggatcagcgcttacaatggtcacacagactatacacagaaactccagggcagagtcaccatgaccacagacacatccacgaccacagcctacatggaactgaggagcctgagctctgccgacacggccgtgtattactgtgtgagagaagtggtacttcccaccacggactactactacttttacatggacgtctggggcaaagggaccacggtcaccgtctcctcaggcggcggtggatctggaggcggaggctctggaggcggcggctccgatattgtgatgacccagcctccactctcctcgcctgtcacccttggacagccggcctccatctcctgcaggtctagtcaaagcctcgtacacagtgatggaaacacctacttgagttggcttcagcagaggccaggccagcctccaagactcctaatttataaggtttctaaccggttctctggggtcccagacagattcagtggcagtggggcagggacagatttcacactgaaaatcagcagggtggaagctgaggatgtcggggtttattactgcacgcaagctacacaatttcctcacacttttggccaggggaccaagctggagatcaaagcggccgcaaccacgacgccagcgccgcggccaccaacaccggcgcccaccatcgcgtcgcagcccctgtccctgcgcccagaggcgtgccggccagcggcggggggcgcagtgcacacgagggggctggacttcgcctgtgatatctacatctgggcgcccttggccgggacttgtggggtccttctcctgtcactggttatcaccctttactgcaaacggggcagaaagaaactcctgtatatattcaaacaaccatttatgagaccagtacaaactactcaagaggaagatggctgtagctgccgatttccagaagaagaagaaggaggatgtgaactgagagtgaagttcagcaggagcgcagacgcccccgcgtaccagcagggccagaaccagctctataacgagctcaatctaggacgaagagaggagtacgatgttttggacaagagacgtggccgggaccctgagatggggggaaagccgagaaggaagaaccctcaggaaggcctgtacaatgaactgcagaaagataagatggcggaggcctacagtgagattgggatgaaaggcgagcgccggaggggcaaggggcacgatggcctttaccagggtctcagtacagccaccaaggacacctacgacgcccttcacatgcaggccctgccccctcgc

SEQ ID NO: 2685 - DNA, 1494 bp, synthetic construct
  misc_feature 1..1494: note = Synthetic
  source 1..1494: mol_type = other DNA
atggccttaccagtgaccgccttgctcctgccgctggccttgctgctccacgccgccaggccgcaggtccagctggtacagtctggggctgaggtgaagaagcctggggcctcagtgaaggtctcctgcaaggtttccggatacaccctcactgaattatccatgcactgggtgcgacaggctcctggaaaagggcttgagtggatgggaggttttgatcctgaagatggtgaaacaatctacgcacagaagttccagggcagagtcaccatgaccgaggacacatctacagacacagcctacatggagctgagcagcctgagatctgaggacacggccgtgtattactgtgcaacaggacgtattactatggttcggggagttattatcccctactactactactacatggacgtctggggcaaagggaccacggtcaccgtctcctcaggcggcggtggatctggaggcggaggctctggaggcggcggctccgacatccagatgacccagtctccatcctcactgtctgcatctgtaggagacagagtcaccatcacttgtcgggcgagtcagggtattagcagctggttagcctggtatcagcagaaaccagagaaagcccctaagtccctgatctatgctgcatccagtttgcaaagtggggtcccatcaaggttcagcggcagtggatctgggacagatttcactctcaccatcagcagcctgcagcctgaagattttgcaacttattactgccaacagtataatagttacccgtacacttttggccaggggaccaagctggagatcaaagcggccgcaaccacgacgccagcgccgcggccaccaacaccggcgcccaccatcgcgtcgcagcccctgtccctgcgcccagaggcgtgccggccagcggcggggggcgcagtgcacacgagggggctggacttcgcctgtgatatctacatctgggcgcccttggccgggacttgtggggtccttctcctgtcactggttatcaccctttactgcaaacggggcagaaagaaactcctgtatatattcaaacaaccatttatgagaccagtacaaactactcaagaggaagatggctgtagctgccgatttccagaagaagaagaaggaggatgtgaactgagagtgaagttcagcaggagcgcagacgcccccgcgtaccagcagggccagaaccagctctataacgagctcaatctaggacgaagagaggagtacgatgttttggacaagagacgtggccgggaccctgagatggggggaaagccgagaaggaagaaccctcaggaaggcctgtacaatgaactgcagaaagataagatggcggaggcctacagtgagattgggatgaaaggcgagcgccggaggggcaaggggcacgatggcctttaccagggtctcagtacagccaccaaggacacctacgacgcccttcacatgcaggccctgccccctcgc

SEQ ID NO: 2686 - DNA, 1488 bp, synthetic construct
  misc_feature 1..1488: note = Synthetic
  source 1..1488: mol_type = other DNA
atggccttaccagtgaccgccttgctcctgccgctggccttgctgctccacgccgccaggccgcaggttcagctggtgcagtctggaactgaggtgaagaagcctggggcctcagtgaaggtctcctgcaaggcttctggttacacctttaccaactatggtatcggctgggtgcgacaggcccctggacaagggcttgagtggatgggatggatcatcgcttacaatggttacacaaagtatgcacagattctccagggcagagtcaccatgaccacagacacatccacgaacacagcttatatggaactgaggagcctgagatctgacgacacggccgtgtattactgtgcgagacagcagctcgggggggactaccactactacatggacgtctggggcaaagggaccacggtcaccgtctcctcaggcggcggtggatctggaggcggaggctctggaggcggcggctccgatattgtgatgacccagactccactctctctgtccgtcacccctggacagccggcctccatctcctgcaagtctagtaagagcctcctgcatagtgatggaaagacctatttgtattggtacctgcagaagccaggccagcctccacagctcctgatctatgaagtttccaaccggttctctggagtgccagataggttcagtggcagcgggtcagggacagatttcacactgaaaatcagccgggtggaggctgaggatgttggggtttattactgcatgcaaagtatacaatttccgtggacgttcggccaagggaccaaggtggaaatcaaggcggccgcaaccacgacgccagcgccgcggccaccaacaccggcgcccaccatcgcgtcgcagcccctgtccctgcgcccagaggcgtgccggccagcggcggggggcgcagtgcacacgagggggctggacttcgcctgtgatatctacatctgggcgcccttggccgggacttgtggggtccttctcctgtcactggttatcaccctttactgcaaacggggcagaaagaaactcctgtatatattcaaacaaccatttatgagaccagtacaaactactcaagaggaagatggctgtagctgccgatttccagaagaagaagaaggaggatgtgaactgagagtgaagttcagcaggagcgcagacgcccccgcgtaccagcagggccagaaccagctctataacgagctcaatctaggacgaagagaggagtacgatgttttggacaagagacgtggccgggaccctgagatggggggaaagccgagaaggaagaaccctcaggaaggcctgtacaatgaactgcagaaagataagatggcggaggcctacagtgagattgggatgaaaggcgagcgccggaggggcaaggggcacgatggcctttaccagggtctcagtacagccaccaaggacacctacgacgcccttcacatgcaggccctgccccctcgc

SEQ ID NO: 2687 - DNA, 1488 bp, synthetic construct
  misc_feature 1..1488: note = Synthetic
  source 1..1488: mol_type = other DNA
atggccttaccagtgaccgccttgctcctgccgctggccttgctgctccacgccgccaggccgcaggttcagctggtgcagtctggaactgaggtgaagaagcctggggcctcagtgaaggtctcctgcaaggcttctggttacacctttaccaactatggtatcggctgggtgcgacaggcccctggacaagggcttgagtggatgggatggatcatcgcttacaatggttacacaaagtatgcacagattctccagggcagagtcaccatgaccacggacacatccacgaacacagcctatatggaactgaggagcctgagatctgacgacacggccgtgtattactgtgcgcgacagcagctcgggggggactaccactactacatggacgtctggggcaaagggaccacggtcaccgtctcttcaggcggcggtggatctggaggcggaggctctggaggcggcggctccgatattgtgatgacccagactccactctctctgtccgtcacccctggacagccggcctccatctcctgcaagtctagtaagagcctcctgcatagtgatggaaagacctatttgtattggtacctgcagaagccaggccagcctccacagctcctgatctatgaagtttccacccggttctctggagtgccagataggttcagtggcagcgggtcagggacagatttcacactgaaaatcagccgggtggaggctgaggatgttggggtttattactgcatgcaaagtatacagtttccgtggacgttcggccaagggaccaaggtggaaatcaaagcggccgcaaccacgacgccagcgccgcggccaccaacaccggcgcccaccatcgcgtcgcagcccctgtccctgcgcccagaggcgtgccggccagcggcggggggcgcagtgcacacgagggggctggacttcgcctgtgatatctacatctgggcgcccttggccgggacttgtggggtccttctcctgtcactggttatcaccctttactgcaaacggggcagaaagaaactcctgtatatattcaaacaaccatttatgagaccagtacaaactactcaagaggaagatggctgtagctgccgatttccagaagaagaagaaggaggatgtgaactgagagtgaagttcagcaggagcgcagacgcccccgcgtaccagcagggccagaaccagctctataacgagctcaatctaggacgaagagaggagtacgatgttttggacaagagacgtggccgggaccctgagatggggggaaagccgagaaggaagaaccctcaggaaggcctgtacaatgaactgcagaaagataagatggcggaggcctacagtgagattgggatgaaaggcgagcgccggaggggcaaggggcacgatggcctttaccagggtctcagtacagccaccaaggacacctacgacgcccttcacatgcaggccctgccccctcgc

SEQ ID NO: 2688 - DNA, 1482 bp, synthetic construct
  misc_feature 1..1482: note = Synthetic
  source 1..1482: mol_type = other DNA
atggccttaccagtgaccgccttgctcctgccgctggccttgctgctccacgccgccaggccgcaggtgcagctggtgcagtctgggactgaggtgaagaagcctggggcctcagtgaaggtctcctgtaagacttctggatacaccttcaccagttatgatatcaactgggtgcgacaggccactggacaagggcttgagtggatgggatggatgaaccctatcagtggtgacacaggctctgcacagaagttccagggcagagtcaccatgaccaggaacacctccataggcacagcctacatggagctgagcagcctgagatctgaggacacggccgtttattactgtgcgagaggcggatattgtagtagtaccagctgctactactactacatggacgtctggggcaaagggaccacggtcaccgtctcctcaggcggcggtggatctggaggcggaggctctggaggcggcggctccgacatccagatgacccagtctccatcctcactgtctgcctctgtaggagacagagtcaccatcacttgtcgggcgagtcagggtattagcaactggttagcctggtatcagcagaaaccagagaaagcccctaagtccctgatctatgctgcatccagtttgcaaggtggggtcccatcaagattcagcggcagtggatctgggacagatttcactctcaccatcagcagcctgcagcctgaagattttgcaacttattactgccaacagtatgatagttacccgtacacttttggccaggggaccaagctggagatcaaagcggccgcaaccacgacgccagcgccgcggccaccaacaccggcgcccaccatcgcgtcgcagcccctgtccctgcgcccagaggcgtgccggccagcggcggggggcgcagtgcacacgagggggctggacttcgcctgtgatatctacatctgggcgcccttggccgggacttgtggggtccttctcctgtcactggttatcaccctttactgcaaacggggcagaaagaaactcctgtatatattcaaacaaccatttatgagaccagtacaaactactcaagaggaagatggctgtagctgccgatttccagaagaagaagaaggaggatgtgaactgagagtgaagttcagcaggagcgcagacgcccccgcgtaccagcagggccagaaccagctctataacgagctcaatctaggacgaagagaggagtacgatgttttggacaagagacgtggccgggaccctgagatggggggaaagccgagaaggaagaaccctcaggaaggcctgtacaatgaactgcagaaagataagatggcggaggcctacagtgagattgggatgaaaggcgagcgccggaggggcaaggggcacgatggcctttaccagggtctcagtacagccaccaaggacacctacgacgcccttcacatgcaggccctgccccctcgc

SEQ ID NO: 2689 - DNA, 1482 bp, synthetic construct
  misc_feature 1..1482: note = Synthetic
  source 1..1482: mol_type = other DNA
atggccttaccagtgaccgccttgctcctgccgctggccttgctgctccacgccgccaggccgcaggtgcagctggtgcagtctggggctgaggtgaagaagcctggggcctcagtgaaggtctcctgcaaggcttctggatacaccttcaccagttatgatatcaactgggtgcgacaggccactggacaagggcttgagtggatgggatggatgatccctaacagtggtgacacaggctctgcacagaagttccagggcagagtcaccatgaccaggaacacctccataagcacagcctacatggagctgagcagcctgagatctgaggacacggccgtttattactgtgcgagaggcggatattgtaatagtaccagttgctactactactacatggacgtctggggcaaagggaccacggtcaccgtctcctcaggcggcggtggatctggaggcggaggctctggaggcggcggctccgacatccagatgacccagtctccatcctcactgtctgcatctgtaggagacagagtcaccatcacttgtcgggcgagtcagggtattagcagctggttagcctggtatcagcagaaaccagagaaagcccctaagtccctgatctatgctgcatccagtttacaaggtggggtcccatcaaggttcagcggcagtggatctgggacagatttcactctcaccatcagcagcctgcagcctgaagattttgcaacttattactgccaacagtatgatagttacccgtacacttttggccaggggaccaagctggagatcaaagcggccgcaaccacgacgccagcgccgcggccaccaacaccggcgcccaccatcgcgtcgcagcccctgtccctgcgcccagaggcgtgccggccagcggcggggggcgcagtgcacacgagggggctggacttcgcctgtgatatctacatctgggcgcccttggccgggacttgtggggtccttctcctgtcactggttatcaccctttactgcaaacggggcagaaagaaactcctgtatatattcaaacaaccatttatgagaccagtacaaactactcaagaggaagatggctgtagctgccgatttccagaagaagaagaaggaggatgtgaactgagagtgaagttcagcaggagcgcagacgcccccgcgtaccagcagggccagaaccagctctataacgagctcaatctaggacgaagagaggagtacgatgttttggacaagagacgtggccgggaccctgagatggggggaaagccgagaaggaagaaccctcaggaaggcctgtacaatgaactgcagaaagataagatggcggaggcctacagtgagattgggatgaaaggcgagcgccggaggggcaaggggcacgatggcctttaccagggtctcagtacagccaccaaggacacctacgacgcccttcacatgcaggccctgccccctcgc

SEQ ID NO: 2690 - DNA, 1485 bp, synthetic construct
  misc_feature 1..1485: note = Synthetic
  source 1..1485: mol_type = other DNA
atggccttaccagtgaccgccttgctcctgccgctggccttgctgctccacgccgccaggccggaggtgcagttgttggagtctgggggaggcttggtacaacctggggggtccctgagactctcctgtgcagcctctggattcacctttagcagctatgtcatgaactgggtccgccaggctccagggaaggggctggaatgggtctcatctgttagtggtagtggtaataactcattctacgcagactccgtgaagggccggttcaccatctccagagacaattccaagaacacgctgtatctgcaaatgaacagcctgagagccgaggacacggccgtatattactgtgcgagtcgtagttccagttatctctactactactactacatggacgtctggggcaaagggaccaccgtcaccgtctcctcaggcggcggtggatctggaggcggaggctctggaggcggcggctccgaaattgtgttgacgcagtctccaggcaccctgtctttgtctccaggggaaagagccaccctctcctgcagggccagtcagagtgttagcagcagctacttagcctggtaccagcagaaacctggccaggctcccaggctcctcatctatggtgcatccagcagggccactggcatcccagacaggttcagtgacagtgggtctgggacagacttcactctcaccatcagcagactggagcctgaagattttgcagtgtattactgtcagcactatggtagctcacctccgaggatcactttcggccctgggaccaaagtggatatcaaagcggccgcaaccacgacgccagcgccgcggccaccaacaccggcgcccaccatcgcgtcgcagcccctgtccctgcgcccagaggcgtgccggccagcggcggggggcgcagtgcacacgagggggctggacttcgcctgtgatatctacatctgggcgcccttggccgggacttgtggggtccttctcctgtcactggttatcaccctttactgcaaacggggcagaaagaaactcctgtatatattcaaacaaccatttatgagaccagtacaaactactcaagaggaagatggctgtagctgccgatttccagaagaagaagaaggaggatgtgaactgagagtgaagttcagcaggagcgcagacgcccccgcgtaccagcagggccagaaccagctctataacgagctcaatctaggacgaagagaggagtacgatgttttggacaagagacgtggccgggaccctgagatggggggaaagccgagaaggaagaaccctcaggaaggcctgtacaatgaactgcagaaagataagatggcggaggcctacagtgagattgggatgaaaggcgagcgccggaggggcaaggggcacgatggcctttaccagggtctcagtacagccaccaaggacacctacgacgcccttcacatgcaggccctgccccctcgc

SEQ ID NO: 2691 - DNA, 1482 bp, synthetic construct
  misc_feature 1..1482: note = Synthetic
  source 1..1482: mol_type = other DNA
atggccttaccagtgaccgccttgctcctgccgctggccttgctgctccacgccgccaggccgcaagtgcagctggtggagagcggcggcggagtggtgcaacctggaagaagcctgcggctgagctgcgctgctagcggcttcaccttcagcagccacgacatgcactgggtgcggcaggcccctggcaagggcctggactgggtcgccgtgatctggagcgacggcaacaagaagtactacgtggacagcgccaagggcagattcaccatcagccgcgacaatagcaagaacaccgtgtacctgcagatgaacagcctgagagccgaggacaccgccatctactattgcgccagaggcgataattggaacgacgagcacagctactattactacatggacgtgtggggcaaaggcacaaccgtgaccgtgtcctccggcggcggcggttctggcggaggaggctccgggggcggcggaagcgagatcgtgctgacccagagccccgacttccagtctgtgacacctaaggaaaaggttacaattacctgtagagcttcccagaccatcggctcttctctgcactggtaccagcagaaacctgatcagtctccaaagctgctgatcaagcacgccagccagagcttctctggcgtccccagccggttttctggcagcggcagcggaacagattttacactgacagtgaactcactggaagccgaggatgccgccacctactactgccatcagagctccagcctcccttggaccttcggccagggcacgaaggtggaaatcaaagcggccgcaaccacgacgccagcgccgcggccaccaacaccggcgcccaccatcgcgtcgcagcccctgtccctgcgcccagaggcgtgccggccagcggcggggggcgcagtgcacacgagggggctggacttcgcctgtgatatctacatctgggcgcccttggccgggacttgtggggtccttctcctgtcactggttatcaccctttactgcaaacggggcagaaagaaactcctgtatatattcaaacaaccatttatgagaccagtacaaactactcaagaggaagatggctgtagctgccgatttccagaagaagaagaaggaggatgtgaactgagagtgaagttcagcaggagcgcagacgcccccgcgtaccagcagggccagaaccagctctataacgagctcaatctaggacgaagagaggagtacgatgttttggacaagagacgtggccgggaccctgagatggggggaaagccgagaaggaagaaccctcaggaaggcctgtacaatgaactgcagaaagataagatggcggaggcctacagtgagattgggatgaaaggcgagcgccggaggggcaaggggcacgatggcctttaccagggtctcagtacagccaccaaggacacctacgacgcccttcacatgcaggccctgccccctcgc

SEQ ID NO: 2692 - DNA, 1482 bp, synthetic construct
  misc_feature 1..1482: note = Synthetic
  source 1..1482: mol_type = other DNA
atggccttaccagtgaccgccttgctcctgccgctggccttgctgctccacgccgccaggccgcaagtgcagctggtggaaagcggcggcggagtggtgcaacctggcagatctctgcggctgtcttgtgccgcctctggatttacattcagctctcatgatatgcactgggtgcggcaggcccctggcaaaggcctggactgggtcgccgtgatctggagcgacggcaacaacaagtactacgccgacagcgccaagggaagattcaccatcagccgggacaattctaaaaacaccgtgtacctgcagatgaacagcctgagagctgaggacaccgccatctactattgcgccagaggagataattggaacgacgagcacagctactactactatatggacgtgtggggcaagggcacaacagtgaccgtgtcctccggcggcggaggtagcggcggaggcggcagcggcggcggcggctccgagatcgtgctgacacagtccccagattttcagagcgtgacccccaaggaaaaggtgacaatcacctgcagagccagccagaccatcggcagcagcctgcactggtaccagcagaaacccgatcagtctcctaagctgctgatcaagcacgccagccagagcttcagcggcgttcccagcaggttcagcggaagcggcagcggcaccgacttcaccctgaccgtgaactctctcgaggccgaggacgccgctacatactactgccaccagagcagctccctgccttggaccttcggccagggcaccaaggtcgaaattaaggcggccgcaaccacgacgccagcgccgcggccaccaacaccggcgcccaccatcgcgtcgcagcccctgtccctgcgcccagaggcgtgccggccagcggcggggggcgcagtgcacacgagggggctggacttcgcctgtgatatctacatctgggcgcccttggccgggacttgtggggtccttctcctgtcactggttatcaccctttactgcaaacggggcagaaagaaactcctgtatatattcaaacaaccatttatgagaccagtacaaactactcaagaggaagatggctgtagctgccgatttccagaagaagaagaaggaggatgtgaactgagagtgaagttcagcaggagcgcagacgcccccgcgtaccagcagggccagaaccagctctataacgagctcaatctaggacgaagagaggagtacgatgttttggacaagagacgtggccgggaccctgagatggggggaaagccgagaaggaagaaccctcaggaaggcctgtacaatgaactgcagaaagataagatggcggaggcctacagtgagattgggatgaaaggcgagcgccggaggggcaaggggcacgatggcctttaccagggtctcagtacagccaccaaggacacctacgacgcccttcacatgcaggccctgccccctcgc

SEQ ID NO: 2693 - DNA, 1479 bp, synthetic construct
  misc_feature 1..1479: note = Synthetic
  source 1..1479: mol_type = other DNA
atggccttaccagtgaccgccttgctcctgccgctggccttgctgctccacgccgccaggccgcaactgcagctggtgcagagcggagccgaggtgaagaagcctggcgctagcgttaaggtgtcctgcaaggcctccggctacacctttaccaactacggcatctcctggctgcgccaggccccaggccagggcctggagtggatgggctggatctccggatacaacgacaacacccactacgcccagaaattccagggtagagtgactatgaccaccgataccagcacaacaacagcctacatggaactgagaaacctgcggagcgacgacaccgccgtgtactactgcgcccgggacggcattgccgctagacctgtgtactactattacatggacgtgtggggcaagggcaccaccgtgacagtgtcttctggcggcggcggcagcggcggcggaggatctggcggcggaggatctgatatccagatgacccagagccccagcagcctgagcgccagcgtgggcgaccgggtcacaatcacctgcagagccagccagagcatcagcaattacctgaactggtaccaccagaagcccggcaaagcccctaagctgctgatctacgctgcttctagcctcgagagcggcgtgcctagcagattcagcggcagcggcagcggaacagatttcaccctgacaatcagctctctgcaacctgaggacttcgccacatactattgtcagcagtcctacagcaatcctctgaccttcggcggcggcacaaaggtggaatctaaggcggccgcaaccacgacgccagcgccgcggccaccaacaccggcgcccaccatcgcgtcgcagcccctgtccctgcgcccagaggcgtgccggccagcggcggggggcgcagtgcacacgagggggctggacttcgcctgtgatatctacatctgggcgcccttggccgggacttgtggggtccttctcctgtcactggttatcaccctttactgcaaacggggcagaaagaaactcctgtatatattcaaacaaccatttatgagaccagtacaaactactcaagaggaagatggctgtagctgccgatttccagaagaagaagaaggaggatgtgaactgagagtgaagttcagcaggagcgcagacgcccccgcgtaccagcagggccagaaccagctctataacgagctcaatctaggacgaagagaggagtacgatgttttggacaagagacgtggccgggaccctgagatggggggaaagccgagaaggaagaaccctcaggaaggcctgtacaatgaactgcagaaagataagatggcggaggcctacagtgagattgggatgaaaggcgagcgccggaggggcaaggggcacgatggcctttaccagggtctcagtacagccaccaaggacacctacgacgcccttcacatgcaggccctgccccctcgc

SEQ ID NO: 2694 - DNA, 1482 bp, synthetic construct
  misc_feature 1..1482: note = Synthetic
  source 1..1482: mol_type = other DNA
atggccttaccagtgaccgccttgctcctgccgctggccttgctgctccacgccgccaggccgcaagtgcagctggtggagagcgggggaggtgtcgtgcagcctggaagaagcctcagactgtcttgtgtggccagcggctttaccttcagctctaatgacatctactgggtgcggcaggcccctggcaagggcctggaatgggtcgctgtgatctggtacgacggcagcaacaaatactacgccgattctgtgaagggcagattcaccatcagcagagataattctaagaacaccctgtacctgcagatgaacagcctgagagccgaggataccgccgtgtactattgcgccaggggcgacaactggaacgacgagcaccattaccactactacatggacgtgtggggcaaaggcaccaccgtgaccgtgtccagcggcggcggaggctctggaggaggcggcagcggcggcggcggctccgagattgttctgacccagagccctgatttccagagcgtgacccccaaggaaaaggtgacaatcacctgccgggccagccaaagcatcggctccagcctgcactggtatcagcagaagcccgaccagtccccaaagctgctgatcaaattcgcctctcagtcattcagcggcgtgccttcccggttcagcggaagcggcagcggcacagactttaccctgacaatccacagcctggaagccgaggacgccgctacatactactgccaccagagcggcagcctgccctggacattcggccagggcacgaaggtggagatcaaggcggccgcaaccacgacgccagcgccgcggccaccaacaccggcgcccaccatcgcgtcgcagcccctgtccctgcgcccagaggcgtgccggccagcggcggggggcgcagtgcacacgagggggctggacttcgcctgtgatatctacatctgggcgcccttggccgggacttgtggggtccttctcctgtcactggttatcaccctttactgcaaacggggcagaaagaaactcctgtatatattcaaacaaccatttatgagaccagtacaaactactcaagaggaagatggctgtagctgccgatttccagaagaagaagaaggaggatgtgaactgagagtgaagttcagcaggagcgcagacgcccccgcgtaccagcagggccagaaccagctctataacgagctcaatctaggacgaagagaggagtacgatgttttggacaagagacgtggccgggaccctgagatggggggaaagccgagaaggaagaaccctcaggaaggcctgtacaatgaactgcagaaagataagatggcggaggcctacagtgagattgggatgaaaggcgagcgccggaggggcaaggggcacgatggcctttaccagggtctcagtacagccaccaaggacacctacgacgcccttcacatgcaggccctgccccctcgc

SEQ ID NO: 2695 - DNA, 1470 bp, synthetic construct
  misc_feature 1..1470: note = Synthetic
  source 1..1470: mol_type = other DNA
atggccttaccagtgaccgccttgctcctgccgctggccttgctgctccacgccgccaggccgcaagtgcagctggtggaaagcggcggcggtgttgtgcaacctggcagaagcctgcggctgtcatgcgccgccagcggcttcaccttcagctcttacggcatgcactgggtgcggcaggcccctggaaagggactggaatgggtcgccgtgatcagctacgacggctccaacaagtactacgccgacagcgtgaaaggcagattcaccatctctagggacaacagcaagaccaccctctacctgcagatgaacagcctgagagccgaggacaccgccgtgtactattgtgccagagatcactactactactacatggacgtgtggggcaagggcaccaccgtgaccgtgtcttctggcggcggaggcagcggcggaggcggcagcggcggcggcggctcccagaccgtggtgactcaggagcccagcttcagcgtcagccccggcggaacagtgaccctgacatgcggcctgagcagcggcagcgtgtccaccagctactatcctagctggtaccagcagacaccaggccaggctcctagaaccctgatctacagcaccaacatccggagcagcggcgtgcctgatagatttagcggctctatcctgggaaataaagccgctctgaccattacaggcgcccaggctgatgacgagagcgactactactgcgtgctgtacatgggctctgatatcgtggttttcggcggcggcacaaagctgacagtgctggcggccgcaaccacgacgccagcgccgcggccaccaacaccggcgcccaccatcgcgtcgcagcccctgtccctgcgcccagaggcgtgccggccagcggcggggggcgcagtgcacacgagggggctggacttcgcctgtgatatctacatctgggcgcccttggccgggacttgtggggtccttctcctgtcactggttatcaccctttactgcaaacggggcagaaagaaactcctgtatatattcaaacaaccatttatgagaccagtacaaactactcaagaggaagatggctgtagctgccgatttccagaagaagaagaaggaggatgtgaactgagagtgaagttcagcaggagcgcagacgcccccgcgtaccagcagggccagaaccagctctataacgagctcaatctaggacgaagagaggagtacgatgttttggacaagagacgtggccgggaccctgagatggggggaaagccgagaaggaagaaccctcaggaaggcctgtacaatgaactgcagaaagataagatggcggaggcctacagtgagattgggatgaaaggcgagcgccggaggggcaaggggcacgatggcctttaccagggtctcagtacagccaccaaggacacctacgacgcccttcacatgcaggccctgccccctcgc

SEQ ID NO: 2696 - DNA, 1476 bp, synthetic construct
  misc_feature 1..1476: note = Synthetic
  source 1..1476: mol_type = other DNA
atggccttaccagtgaccgccttgctcctgccgctggccttgctgctccacgccgccaggccgcaactgcagctgcaggagagcggccctggactggtgaagcccagcgagacactgagcctgacatgcaccgtgtccggaggctctatcagcagcagcagctactactggggatggattagacagccccccggcaagggcctggaatggatcggcagcctgtactacagcggcagcacctactacaaccccagcctgaagtctagagtgaccatcagcgtggacaccagcaagaaccagttcagcctgaaactgagctctgtcacagccgccgataccgccgtgtactactgcgccgctgtgcagctggaaaggcggggctacttctacatggacgtgtggggcaaaggcaccaccgtgacagtgtctagcggcggcggcggaagcggcggcggtggcagtggcggcggcggctctgagatcgtgctgacacagtcccctgctaccctgagcctgagccctggcgagcgggccaccctgagctgcagagccagccagagcgtgtccagctactttgcctggtatcagcagaagcctggccaggccccacggctgctgatctacgacgcctctaatagagccacaggcatcccagctagattcagcggctccggctccggaaccgatttcaccctgaccatctctagcctcgagcctgaggacttcgccgtttactattgtcagcaaagaagcaactggcctctgacatttggcggaggcacaaaggtggaaatcaaggcggccgcaaccacgacgccagcgccgcggccaccaacaccggcgcccaccatcgcgtcgcagcccctgtccctgcgcccagaggcgtgccggccagcggcggggggcgcagtgcacacgagggggctggacttcgcctgtgatatctacatctgggcgcccttggccgggacttgtggggtccttctcctgtcactggttatcaccctttactgcaaacggggcagaaagaaactcctgtatatattcaaacaaccatttatgagaccagtacaaactactcaagaggaagatggctgtagctgccgatttccagaagaagaagaaggaggatgtgaactgagagtgaagttcagcaggagcgcagacgcccccgcgtaccagcagggccagaaccagctctataacgagctcaatctaggacgaagagaggagtacgatgttttggacaagagacgtggccgggaccctgagatggggggaaagccgagaaggaagaaccctcaggaaggcctgtacaatgaactgcagaaagataagatggcggaggcctacagtgagattgggatgaaaggcgagcgccggaggggcaaggggcacgatggcctttaccagggtctcagtacagccaccaaggacacctacgacgcccttcacatgcaggccctgccccctcgc

SEQ ID NO: 2697 - DNA, 1482 bp, synthetic construct
  misc_feature 1..1482: note = Synthetic
  source 1..1482: mol_type = other DNA
atggccttaccagtgaccgccttgctcctgccgctggccttgctgctccacgccgccaggccgcaagtgcaactggtggaaagcggcggcggcgttgtgcagcctggcagaagcctgcggctgtcatgcgccgccagcggttttaccttctctaattacggcatgcactgggtgcggcaggctcccggcaaaggcctggaatggatggccgtgatctggtccgatggccacaacaagtactacgccgatagcgtgaaaggcagattcaccattagcagagataattctaagaacaccctgtacctgcagatgaacagcctgcgcgccgaggacaccgccgtgtactattgtgccagagcccagctggagcggagatacttctactatatggacgtgtggggcaagggcaccaccgtgacagtgtctagcggcggaggcggctctggcggcggcggctctggaggcggaggaagccagaccgtcgtgacccaggagcctagcttcagcgtgtccccaggcggaaccgtcacactgacatgcggcctcacaagcggcagcgtgtccaccagctactaccccaactggtaccagcagacacctggacaggcccctagaaccctgatctacagcaccaacatccggagcagcggagtgcccgacagattttctggcagcatcctgggcaacaaggccgctctgaccatcaccggcgctcaggccgacgacgagagcgactactactgcgtgctgtacatgggcagcggcatgttcatcttcggcagcggcacaaaggtgacagtgctggcggccgcaaccacgacgccagcgccgcggccaccaacaccggcgcccaccatcgcgtcgcagcccctgtccctgcgcccagaggcgtgccggccagcggcggggggcgcagtgcacacgagggggctggacttcgcctgtgatatctacatctgggcgcccttggccgggacttgtggggtccttctcctgtcactggttatcaccctttactgcaaacggggcagaaagaaactcctgtatatattcaaacaaccatttatgagaccagtacaaactactcaagaggaagatggctgtagctgccgatttccagaagaagaagaaggaggatgtgaactgagagtgaagttcagcaggagcgcagacgcccccgcgtaccagcagggccagaaccagctctataacgagctcaatctaggacgaagagaggagtacgatgttttggacaagagacgtggccgggaccctgagatggggggaaagccgagaaggaagaaccctcaggaaggcctgtacaatgaactgcagaaagataagatggcggaggcctacagtgagattgggatgaaaggcgagcgccggaggggcaaggggcacgatggcctttaccagggtctcagtacagccaccaaggacacctacgacgcccttcacatgcaggccctgccccctcgc

SEQ ID NO: 2698 - DNA, 1482 bp, synthetic construct
  misc_feature 1..1482: note = Synthetic
  source 1..1482: mol_type = other DNA
atggccttaccagtgaccgccttgctcctgccgctggccttgctgctccacgccgccaggccgcaggttcagctggtgcagagcggagccgaggtgaaaaagcccggcgcaagcgtgaaggtgtcttgcaaggcctccggatataccttcaccagctacgatatcaactgggtgcggcaggccacaggccagggtctcgaatggatgggctggatgatccccaattctggcgacacaggcagcgcccaaaagttccagggcagagtgacaatgaccagaaacaccagcatcggaacagcctacatggaactgagctccctgagaagcgaggataccgccgtgtactattgtgccagaggcggctactgcaacagcacctcctgctactactactacatggacgtgtggggcaaaggcacaaccgtcaccgtgagctctggcggcggcggcagcggaggcggcggaagcggcggaggcggaagcgacatccagatgacacagagccctagcagcctgtctgcttccgtgggcgatagagtgacaatcacctgccgggcctcccagggcatcagctcctggctggcctggtaccagcagaagcctgagaaggcccctaagagcctgatctacgccgcttctagcctgcagggaggcgtgccaagtcggttcagcggcagcggcagcggcacagacttcaccctgaccatttcttctctgcaacctgaggacttcgccacctactactgtcagcaatacgacagctacccctacacctttggccagggcaccaagctggaaatcaaggcggccgcaaccacgacgccagcgccgcggccaccaacaccggcgcccaccatcgcgtcgcagcccctgtccctgcgcccagaggcgtgccggccagcggcggggggcgcagtgcacacgagggggctggacttcgcctgtgatatctacatctgggcgcccttggccgggacttgtggggtccttctcctgtcactggttatcaccctttactgcaaacggggcagaaagaaactcctgtatatattcaaacaaccatttatgagaccagtacaaactactcaagaggaagatggctgtagctgccgatttccagaagaagaagaaggaggatgtgaactgagagtgaagttcagcaggagcgcagacgcccccgcgtaccagcagggccagaaccagctctataacgagctcaatctaggacgaagagaggagtacgatgttttggacaagagacgtggccgggaccctgagatggggggaaagccgagaaggaagaaccctcaggaaggcctgtacaatgaactgcagaaagataagatggcggaggcctacagtgagattgggatgaaaggcgagcgccggaggggcaaggggcacgatggcctttaccagggtctcagtacagccaccaaggacacctacgacgcccttcacatgcaggccctgccccctcgc

SEQ ID NO: 2699 - DNA, 1485 bp, synthetic construct
  misc_feature 1..1485: note = Synthetic
  source 1..1485: mol_type = other DNA
atggccttaccagtgaccgccttgctcctgccgctggccttgctgctccacgccgccaggccgcaggttcaactggtgcagagcggcgccgaggtgaagaagcctggcgccagcgtgaaagtgtcctgcaaggccagcggatacacgtttaccagctacgacatcaactgggtcagacaggccaccggccagggcctggaatggatgggatggatgaaccccaacagcggcaacaccgtgtacgcccagaaattccagggcagagtgaccatgacacggaacaccagcatcagcaccgcctacatggaactgagctctctgagatccgaggatacagccgtgtactactgcgccagaggcggagatttctggagcggctaccacgactactactactacatggacgtgtggggcaagggcaccaccgtgaccgtgtcttctggcggcggcggctccggcggaggcggcagcggaggaggcggctctgatatccaggtcacacagagccctacctttctgagcgcttctgtgggcgaccgggtgaccatcacatgccgggccagccagggtattagcagctacctggcttggtaccagcagaagcccggcaaagcccctaagctgctgatctacggcgcttctaccctgcagtccggcgtgcccagcagattcagcggcagcggaagcggaacagagttcaccctgacaatctccagcctccaacctgaggacttcgccacatactattgtcagcaactgaatagctatccttggacattcggccagggcaccaaggtggaaatcaaggcggccgcaaccacgacgccagcgccgcggccaccaacaccggcgcccaccatcgcgtcgcagcccctgtccctgcgcccagaggcgtgccggccagcggcggggggcgcagtgcacacgagggggctggacttcgcctgtgatatctacatctgggcgcccttggccgggacttgtggggtccttctcctgtcactggttatcaccctttactgcaaacggggcagaaagaaactcctgtatatattcaaacaaccatttatgagaccagtacaaactactcaagaggaagatggctgtagctgccgatttccagaagaagaagaaggaggatgtgaactgagagtgaagttcagcaggagcgcagacgcccccgcgtaccagcagggccagaaccagctctataacgagctcaatctaggacgaagagaggagtacgatgttttggacaagagacgtggccgggaccctgagatggggggaaagccgagaaggaagaaccctcaggaaggcctgtacaatgaactgcagaaagataagatggcggaggcctacagtgagattgggatgaaaggcgagcgccggaggggcaaggggcacgatggcctttaccagggtctcagtacagccaccaaggacacctacgacgcccttcacatgcaggccctgccccctcgc

SEQ ID NO: 2700 - DNA, 1479 bp, synthetic construct
  misc_feature 1..1479: note = Synthetic
  source 1..1479: mol_type = other DNA
atggccttaccagtgaccgccttgctcctgccgctggccttgctgctccacgccgccaggccgcaagtgcagctgcaggagagcggtcctggcctggttaagcctagcgagacactgtctctgacttgcaccgtgtccggcggatctatcagcagctactactggtcctggatcagacagcccgccggcaaaggcctggaatggattggaagaatctacaccagcggcagcaccaactacaaccccagcctgaagtccagagtgacaatgagcgtggacacatctaagaaccagtttagcctgaaactgagcagcgtgaccgccgccgatacagctgtgtactattgtgcccgggaagaataccagctgctgcctgccctgtactactattactacatggacgtgtggggcaagggcaccaccgtgaccgtgtccagcggaggcggcggcagcggaggcggcggctctggcggcggaggcagcagctacgagctgacccagcctccatctgtctccgtgtctccaggccaaacagccagcatcacctgcagcggagataagctgggcgacaagtacgcctgctggtaccagcagaagcccggccagagccctgtgctggtgatctaccaggacagcaagcggcctagcggcatccccgagagattcagcggctccaacagcggcaataccgctacactgacaatcagcggcacacaggccatggatgaggccgactactactgccaggcctgggacagctctaccgccgtgttcggcggcggaacccagctcaccgccctggcggccgcaaccacgacgccagcgccgcggccaccaacaccggcgcccaccatcgcgtcgcagcccctgtccctgcgcccagaggcgtgccggccagcggcggggggcgcagtgcacacgagggggctggacttcgcctgtgatatctacatctgggcgcccttggccgggacttgtggggtccttctcctgtcactggttatcaccctttactgcaaacggggcagaaagaaactcctgtatatattcaaacaaccatttatgagaccagtacaaactactcaagaggaagatggctgtagctgccgatttccagaagaagaagaaggaggatgtgaactgagagtgaagttcagcaggagcgcagacgcccccgcgtaccagcagggccagaaccagctctataacgagctcaatctaggacgaagagaggagtacgatgttttggacaagagacgtggccgggaccctgagatggggggaaagccgagaaggaagaaccctcaggaaggcctgtacaatgaactgcagaaagataagatggcggaggcctacagtgagattgggatgaaaggcgagcgccggaggggcaaggggcacgatggcctttaccagggtctcagtacagccaccaaggacacctacgacgcccttcacatgcaggccctgccccctcgc

SEQ ID NO: 2701 - DNA, 1482 bp, synthetic construct
  misc_feature 1..1482: note = Synthetic
  source 1..1482: mol_type = other DNA
atggccttaccagtgaccgccttgctcctgccgctggccttgctgctccacgccgccaggccgcaagtgcagctggtggaatctggcggcggcgtggtgcagcctggtaggagcctgcggctgtcatgcgccgccacaggcttcaccttcagcagctacggcatgcactgggtcagacaggcccctggcaagggactggagtggatggtggtgatctggtccgatggccacaataaatactacgccgacagcgtgaagggcagatttaccattagccgggacaacagcaagaacaccctgtacctgcagatgaacagcctgagagctgaagataccgccgtgtactactgcgccagagcccagctcgagcggagatacttctactatatggacgtgtggggcaaaggcacaacagtgaccgtttcttctggcggcggcggatctggcggaggcggctccggaggcggcggcagccagaccgtggtcacccaggagcctagctttagcgtgtccccaggaggtacagtgaccctgacatgcggcctgactagcggatctgtgtccaccagctactaccccaactggtaccagcagacacctggccaggcccctagaaccctgatctacagcaccaatatccggagctccggcgtgcccgacagattcagcggaagcatcctgggcaacaaggccgctctgaccatcaccggcgcccaagctgatgacgagagcgactactattgtgtgctgtacatgggcagcggcatgttcatcttcggctctggcaccaaggtgaccgtgctggcggccgcaaccacgacgccagcgccgcggccaccaacaccggcgcccaccatcgcgtcgcagcccctgtccctgcgcccagaggcgtgccggccagcggcggggggcgcagtgcacacgagggggctggacttcgcctgtgatatctacatctgggcgcccttggccgggacttgtggggtccttctcctgtcactggttatcaccctttactgcaaacggggcagaaagaaactcctgtatatattcaaacaaccatttatgagaccagtacaaactactcaagaggaagatggctgtagctgccgatttccagaagaagaagaaggaggatgtgaactgagagtgaagttcagcaggagcgcagacgcccccgcgtaccagcagggccagaaccagctctataacgagctcaatctaggacgaagagaggagtacgatgttttggacaagagacgtggccgggaccctgagatggggggaaagccgagaaggaagaaccctcaggaaggcctgtacaatgaactgcagaaagataagatggcggaggcctacagtgagattgggatgaaaggcgagcgccggaggggcaaggggcacgatggcctttaccagggtctcagtacagccaccaaggacacctacgacgcccttcacatgcaggccctgccccctcgc

SEQ ID NO: 2702 - DNA, 1482 bp, synthetic construct
  misc_feature 1..1482: note = Synthetic
  source 1..1482: mol_type = other DNA
atggccttaccagtgaccgccttgctcctgccgctggccttgctgctccacgccgccaggccgcaagtgcagctggtcgagagcggaggcggcgttgtgcaacctggaaggagcctgcggctgagctgcgccgcttctggcttcacctttactagctacgacatgcactgggtgcggcaggcccctggcaagggcctggaatgggtcaccatcatctggttcgacggcagcaacaagtactacgccgatagcgtgaagggcagattcaccatcagcagagataatagcaagaataccctgtacctgcagatgaactctctctccgccgaggacaccgccgtgtactactgcgccagaggcgacaactggaacgacagatactattattactactacatggacgtgtggggcaaaggcaccaccgtgacagtgtccagcggcggcggaggaagcggcggcggtggctctggaggcggaggcagcgagatcgtgctgacccagtctccagatttccagtccgtgacccctaaggaaaaggtgaccatcacatgcagagccagccagtccatcggctctagcctgcactggtaccagcagaagcccgaccagtctcctatgctgctgatcaaattcgcctctcagagcatcagcggcgtgcccagccggttcagcggcagcggctccggcaccgacttcacactgacaatcaacagtctggaggccgaggatgccgctgcttactactgtcaccagagcagcagcctgccttggacatttggccagggcaccaaggtggaaattaaggcggccgcaaccacgacgccagcgccgcggccaccaacaccggcgcccaccatcgcgtcgcagcccctgtccctgcgcccagaggcgtgccggccagcggcggggggcgcagtgcacacgagggggctggacttcgcctgtgatatctacatctgggcgcccttggccgggacttgtggggtccttctcctgtcactggttatcaccctttactgcaaacggggcagaaagaaactcctgtatatattcaaacaaccatttatgagaccagtacaaactactcaagaggaagatggctgtagctgccgatttccagaagaagaagaaggaggatgtgaactgagagtgaagttcagcaggagcgcagacgcccccgcgtaccagcagggccagaaccagctctataacgagctcaatctaggacgaagagaggagtacgatgttttggacaagagacgtggccgggaccctgagatggggggaaagccgagaaggaagaaccctcaggaaggcctgtacaatgaactgcagaaagataagatggcggaggcctacagtgagattgggatgaaaggcgagcgccggaggggcaaggggcacgatggcctttaccagggtctcagtacagccaccaaggacacctacgacgcccttcacatgcaggccctgccccctcgc

SEQ ID NO: 2703 - DNA, 1497 bp, synthetic construct
  misc_feature 1..1497: note = Synthetic
  source 1..1497: mol_type = other DNA
atggccttaccagtgaccgccttgctcctgccgctggccttgctgctccacgccgccaggccgcaagtgcagctggtccagagcggcgctgaggtgaagaaacctggcgcctctgtgaaagtgtcctgcaaggccagcggctacacctttaccagctacggcattagctgggtgcggcaggcccctggccagggtcttgagtggatgggctggatcagcgcctacaacggccacacagattatacacaaaagctgcagggcagagtgaccatgacaaccgataccagcaccaccacagcctacatggaactgagaagcctgagctctgccgacaccgccgtgtactactgcgtgcgggaagtggtgctgcctaccacagactactactacttctacatggacgtgtggggcaagggcaccacagtgacagtcagctccggcggaggaggcagcggcggcggaggcagcggcggaggcggcagcgacatcgtgatgacccagcctcctctgagcagccctgtgacactgggccagccagctagcatcagctgtagatcttctcagtccctggtgcacagcgacggcaatacctacctgtcttggctgcagcagcggcctggccagccccccagactgctgatctacaaggtgtccaaccgcttcagcggcgtgccagacagattcagcggctctggcgccggcaccgacttcaccctgaagatcagcagagtcgaggccgaagatgtgggagtttactattgcacccaagctacacagttcccccacacctttggccagggcaccaagctcgagatcaaggcggccgcaaccacgacgccagcgccgcggccaccaacaccggcgcccaccatcgcgtcgcagcccctgtccctgcgcccagaggcgtgccggccagcggcggggggcgcagtgcacacgagggggctggacttcgcctgtgatatctacatctgggcgcccttggccgggacttgtggggtccttctcctgtcactggttatcaccctttactgcaaacggggcagaaagaaactcctgtatatattcaaacaaccatttatgagaccagtacaaactactcaagaggaagatggctgtagctgccgatttccagaagaagaagaaggaggatgtgaactgagagtgaagttcagcaggagcgcagacgcccccgcgtaccagcagggccagaaccagctctataacgagctcaatctaggacgaagagaggagtacgatgttttggacaagagacgtggccgggaccctgagatggggggaaagccgagaaggaagaaccctcaggaaggcctgtacaatgaactgcagaaagataagatggcggaggcctacagtgagattgggatgaaaggcgagcgccggaggggcaaggggcacgatggcctttaccagggtctcagtacagccaccaaggacacctacgacgcccttcacatgcaggccctgccccctcgc

SEQ ID NO: 2704 - DNA, 1494 bp, synthetic construct
  misc_feature 1..1494: note = Synthetic
  source 1..1494: mol_type = other DNA
atggccttaccagtgaccgccttgctcctgccgctggccttgctgctccacgccgccaggccgcaagttcagctggtgcagagcggagccgaggtgaaaaagcccggcgcttctgtgaaggtgtcctgcaaggtgtctggctacaccctgacagagctgagcatgcactgggtccggcaggcccctggcaaaggcctggaatggatgggaggcttcgaccccgaagacggggagacaatctacgcccagaaattccagggcagagtgacaatgaccgaggacaccagcaccgatacagcctacatggaactgtcttccctgcggagcgaggacaccgccgtgtactactgcgccaccggcagaatcaccatggtgcggggcgtcatcatcccctactactattactacatggacgtgtggggcaagggcaccaccgtgaccgtgtcctctggcggaggaggatctggcggcggcggaagcggcggaggcggcagtgatatccagatgacacagagcccaagcagcctgagcgccagcgtgggcgacagagtgaccatcacatgcagagccagccagggcatcagcagctggctggcttggtaccagcaaaagcctgagaaggcccctaagagcctcatctacgccgctagcagcctgcagtccggcgtgccaagcagattcagcggctctggctctggcacagacttcaccctgaccatttccagcctgcaacctgaggattttgccacatactattgtcagcagtacaacagctacccttacaccttcggccagggcaccaagctggaaatcaaggcggccgcaaccacgacgccagcgccgcggccaccaacaccggcgcccaccatcgcgtcgcagcccctgtccctgcgcccagaggcgtgccggccagcggcggggggcgcagtgcacacgagggggctggacttcgcctgtgatatctacatctgggcgcccttggccgggacttgtggggtccttctcctgtcactggttatcaccctttactgcaaacggggcagaaagaaactcctgtatatattcaaacaaccatttatgagaccagtacaaactactcaagaggaagatggctgtagctgccgatttccagaagaagaagaaggaggatgtgaactgagagtgaagttcagcaggagcgcagacgcccccgcgtaccagcagggccagaaccagctctataacgagctcaatctaggacgaagagaggagtacgatgttttggacaagagacgtggccgggaccctgagatggggggaaagccgagaaggaagaaccctcaggaaggcctgtacaatgaactgcagaaagataagatggcggaggcctacagtgagattgggatgaaaggcgagcgccggaggggcaaggggcacgatggcctttaccagggtctcagtacagccaccaaggacacctacgacgcccttcacatgcaggccctgccccctcgc

SEQ ID NO: 2705 - DNA, 1488 bp, synthetic construct
  misc_feature 1..1488: note = Synthetic
  source 1..1488: mol_type = other DNA
atggccttaccagtgaccgccttgctcctgccgctggccttgctgctccacgccgccaggccgcaagtgcagctggtgcagagcggcaccgaggtgaagaagccaggcgcctctgtgaaagtgtcttgtaaagccagcggctacacctttaccaattacggcatcggctgggtgcggcaggcccctggacagggactggaatggatgggctggatcatcgcctacaacggctacacaaagtacgcccagatcctgcagggcagagtgacaatgaccaccgacaccagcaccaacaccgcttatatggaactgagaagcctgcggagcgacgacaccgccgtgtactattgcgccagacagcagctgggcggagattaccactactacatggacgtgtggggcaagggcaccaccgtcacagtgtccagcggcggtggcggatctggcggcggcggctctggaggcggcggctctgatatcgtgatgacccagacccccctgagcctgtccgtgaccccaggacaacctgccagcattagctgcaagagcagcaagtccctgctgcacagcgacggcaagacatacctgtactggtacctgcaaaagcccggccagcctcctcagctgctcatctacgaggtgtccaaccggttctctggcgtgcctgatagattcagcggaagcggcagcggaacagacttcacactgaagatcagcagagtcgaggccgaggacgtgggcgtttactactgcatgcagagcatccagttcccctggacattcggccagggcacaaaagtggaaatcaaggcggccgcaaccacgacgccagcgccgcggccaccaacaccggcgcccaccatcgcgtcgcagcccctgtccctgcgcccagaggcgtgccggccagcggcggggggcgcagtgcacacgagggggctggacttcgcctgtgatatctacatctgggcgcccttggccgggacttgtggggtccttctcctgtcactggttatcaccctttactgcaaacggggcagaaagaaactcctgtatatattcaaacaaccatttatgagaccagtacaaactactcaagaggaagatggctgtagctgccgatttccagaagaagaagaaggaggatgtgaactgagagtgaagttcagcaggagcgcagacgcccccgcgtaccagcagggccagaaccagctctataacgagctcaatctaggacgaagagaggagtacgatgttttggacaagagacgtggccgggaccctgagatggggggaaagccgagaaggaagaaccctcaggaaggcctgtacaatgaactgcagaaagataagatggcggaggcctacagtgagattgggatgaaaggcgagcgccggaggggcaaggggcacgatggcctttaccagggtctcagtacagccaccaaggacacctacgacgcccttcacatgcaggccctgccccctcgc

SEQ ID NO: 2706 - DNA, 1488 bp, synthetic construct
  misc_feature 1..1488: note = Synthetic
  source 1..1488: mol_type = other DNA
atggccttaccagtgaccgccttgctcctgccgctggccttgctgctccacgccgccaggccgcaagtgcagctggtgcaaagcggcaccgaggtgaaaaagcccggcgcctctgtgaaggtctcctgcaaggccagcggatacacatttacaaattacggcatcggctgggtgcggcaggcccctggccagggcctggaatggatgggctggatcatcgcctacaacggctacaccaagtacgcccagatcctgcaaggcagagtcaccatgaccacagacaccagcaccaacaccgcttatatggaactgagaagcctgcggagcgacgatacagccgtgtactactgcgccagacagcagctcggcggcgactaccactactacatggacgtgtggggcaagggcaccaccgtgaccgtgtccagcggaggcggcggatctggcggaggcggcagcggcggcggcggctctgacatcgtgatgacccagacccctctgagcctgagcgtgacacctggacagcccgcttctattagctgtaaaagcagcaagtccctgctgcacagcgacggcaagacctacctgtactggtacctgcagaaacctggccagcctccacagctgctgatctacgaggtgtctacaagattcagcggagtgcctgatagattcagcggcagcggatctggaacagatttcaccctgaagatcagccgggttgaggccgaggacgtgggcgtgtactattgcatgcagtccatccagttcccctggaccttcggccagggcacaaaggtggaaatcaaggcggccgcaaccacgacgccagcgccgcggccaccaacaccggcgcccaccatcgcgtcgcagcccctgtccctgcgcccagaggcgtgccggccagcggcggggggcgcagtgcacacgagggggctggacttcgcctgtgatatctacatctgggcgcccttggccgggacttgtggggtccttctcctgtcactggttatcaccctttactgcaaacggggcagaaagaaactcctgtatatattcaaacaaccatttatgagaccagtacaaactactcaagaggaagatggctgtagctgccgatttccagaagaagaagaaggaggatgtgaactgagagtgaagttcagcaggagcgcagacgcccccgcgtaccagcagggccagaaccagctctataacgagctcaatctaggacgaagagaggagtacgatgttttggacaagagacgtggccgggaccctgagatggggggaaagccgagaaggaagaaccctcaggaaggcctgtacaatgaactgcagaaagataagatggcggaggcctacagtgagattgggatgaaaggcgagcgccggaggggcaaggggcacgatggcctttaccagggtctcagtacagccaccaaggacacctacgacgcccttcacatgcaggccctgccccctcgc

SEQ ID NO: 2707 - DNA, 1482 bp, synthetic construct
  misc_feature 1..1482: note = Synthetic
  source 1..1482: mol_type = other DNA
atggccttaccagtgaccgccttgctcctgccgctggccttgctgctccacgccgccaggccgcaagtgcagctggtgcagagcggaacagaggtgaaaaagcctggcgccagcgtgaaggtgtcttgtaaaaccagcggttatacattcacctcctacgacattaactgggtgcggcaggccaccggccagggcctggaatggatgggctggatgaaccccatctccggcgacacaggcagcgcccagaagttccagggaagagtgaccatgaccagaaataccagcatcggcaccgcctacatggaactgagcagcctgcggagcgaggacaccgccgtgtactactgcgccagaggcggatactgtagcagtacatcttgctactactattacatggacgtgtggggcaagggcacaacagtgacagtcagcagcggcggcgggggcagcggcggaggcggaagcggcggcggcggcagcgatatccagatgacacagtcccctagctctctgtctgcttctgttggagatagagtgaccatcacctgccgggccagccagggcatcagcaactggctggcctggtaccagcagaagcccgagaaggcccctaagagcctgatctacgccgctagctccctccagggcggcgtgccatctagattcagcggctcaggcagcggaaccgacttcaccctgaccatcagctccctgcaacctgaggattttgccacatactactgccagcaatacgacagctacccctacaccttcggccagggcaccaagctggaaatcaaggcggccgcaaccacgacgccagcgccgcggccaccaacaccggcgcccaccatcgcgtcgcagcccctgtccctgcgcccagaggcgtgccggccagcggcggggggcgcagtgcacacgagggggctggacttcgcctgtgatatctacatctgggcgcccttggccgggacttgtggggtccttctcctgtcactggttatcaccctttactgcaaacggggcagaaagaaactcctgtatatattcaaacaaccatttatgagaccagtacaaactactcaagaggaagatggctgtagctgccgatttccagaagaagaagaaggaggatgtgaactgagagtgaagttcagcaggagcgcagacgcccccgcgtaccagcagggccagaaccagctctataacgagctcaatctaggacgaagagaggagtacgatgttttggacaagagacgtggccgggaccctgagatggggggaaagccgagaaggaagaaccctcaggaaggcctgtacaatgaactgcagaaagataagatggcggaggcctacagtgagattgggatgaaaggcgagcgccggaggggcaaggggcacgatggcctttaccagggtctcagtacagccaccaaggacacctacgacgcccttcacatgcaggccctgccccctcgc

SEQ ID NO: 2708 - DNA, 1482 bp, synthetic construct
  misc_feature 1..1482: note = Synthetic
  source 1..1482: mol_type = other DNA
atggccttaccagtgaccgccttgctcctgccgctggccttgctgctccacgccgccaggccgcaagtgcagctggtgcagagcggcgccgaggtgaagaagcctggcgcttccgtgaaggtgtcctgtaaagcttctggatacaccttcacctcttatgatattaactgggtgcggcaggccaccggccagggcctggaatggatgggctggatgatccccaacagcggcgataccggctccgcccagaaattccagggaagagttaccatgacaagaaacaccagcatcagcaccgcctacatggaactgagcagcctgcggagcgaggacaccgctgtgtactactgcgccagaggcggctactgtaatagcacaagctgctactattactacatggacgtgtggggcaagggcaccacagtgacagtcagctccggcggcggaggcagcggaggcggtggctctggcggcggcggaagcgacatccagatgacacagagccctagcagcctgagcgcctctgtgggcgaccgggtgaccatcacctgcagagccagccagggcatcagcagctggctggcctggtaccagcagaagcccgagaaggcccctaagtccctgatctacgccgccagctccctccagggcggagtgccatctagattcagcggctctggatctggcacagacttcaccctgaccatcagctctctgcagcctgaggattttgccacatactactgccagcaatacgacagctacccctacacattcggccaaggcacaaagctggaaatcaaggcggccgcaaccacgacgccagcgccgcggccaccaacaccggcgcccaccatcgcgtcgcagcccctgtccctgcgcccagaggcgtgccggccagcggcggggggcgcagtgcacacgagggggctggacttcgcctgtgatatctacatctgggcgcccttggccgggacttgtggggtccttctcctgtcactggttatcaccctttactgcaaacggggcagaaagaaactcctgtatatattcaaacaaccatttatgagaccagtacaaactactcaagaggaagatggctgtagctgccgatttccagaagaagaagaaggaggatgtgaactgagagtgaagttcagcaggagcgcagacgcccccgcgtaccagcagggccagaaccagctctataacgagctcaatctaggacgaagagaggagtacgatgttttggacaagagacgtggccgggaccctgagatggggggaaagccgagaaggaagaaccctcaggaaggcctgtacaatgaactgcagaaagataagatggcggaggcctacagtgagattgggatgaaaggcgagcgccggaggggcaaggggcacgatggcctttaccagggtctcagtacagccaccaaggacacctacgacgcccttcacatgcaggccctgccccctcgc

SEQ ID NO: 2709 - DNA, 1485 bp, synthetic construct
  misc_feature 1..1485: note = Synthetic
  source 1..1485: mol_type = other DNA
atggccttaccagtgaccgccttgctcctgccgctggccttgctgctccacgccgccaggccggaggtgcagctgctggaaagcggaggcggcctggtgcaacctggaggttctctgcggctgagctgcgccgctagcggcttcacatttagcagctacgtgatgaactgggtgcggcaggctcctggaaagggcctggaatgggtctccagcgtgtccggcagcggcaacaacagcttttacgccgatagcgtgaagggcagattcaccatcagccgggacaacagcaagaacaccctctacctgcagatgaattctctgagagccgaggacaccgccgtgtactactgcgccagcaggtcctcttcttacctgtactactactattacatggacgtgtggggcaaaggcacaacagtgaccgtctccagcggcggcggcggctccggcggcggaggaagcggcggaggcggcagcgagatcgtgctgacccaaagccccggcaccctgagcctgagccctggcgagagagccaccctgtcttgtagagcctctcagagcgtttctagctcctacctggcctggtaccagcagaagcccggacaggcccctagactgctgatctacggcgccagcagcagagctacaggcatccccgatagattcagcgacagcggctcaggcacagacttcaccctgacaattagccggctggaacccgaggatttcgccgtgtactattgccagcactacggcagctctcctccaagaatcaccttcggccctggcaccaaggtggacatcaaagcggccgcaaccacgacgccagcgccgcggccaccaacaccggcgcccaccatcgcgtcgcagcccctgtccctgcgcccagaggcgtgccggccagcggcggggggcgcagtgcacacgagggggctggacttcgcctgtgatatctacatctgggcgcccttggccgggacttgtggggtccttctcctgtcactggttatcaccctttactgcaaacggggcagaaagaaactcctgtatatattcaaacaaccatttatgagaccagtacaaactactcaagaggaagatggctgtagctgccgatttccagaagaagaagaaggaggatgtgaactgagagtgaagttcagcaggagcgcagacgcccccgcgtaccagcagggccagaaccagctctataacgagctcaatctaggacgaagagaggagtacgatgttttggacaagagacgtggccgggaccctgagatggggggaaagccgagaaggaagaaccctcaggaaggcctgtacaatgaactgcagaaagataagatggcggaggcctacagtgagattgggatgaaaggcgagcgccggaggggcaaggggcacgatggcctttaccagggtctcagtacagccaccaaggacacctacgacgcccttcacatgcaggccctgccccctcgc

SEQ ID NO: 2710 - protein, 719 aa, synthetic construct
  REGION 1..719: note = Synthetic
MALPVTALLLPLALLLHAARPQVQLVESGGGVVQPGRSLRLSCAASGFTFSSHDMHWVRQAPGKGLDWVAVIWSDGNKKYYVDSAKGRFTISRDNSKNTVYLQMNSLRAEDTAIYYCARGDNWNDEHSYYYYMDVWGKGTTVTVSSGGGGSGGGGSGGGGSEIVLTQSPDFQSVTPKEKVTITCRASQTIGSSLHWYQQKPDQSPKLLIKHASQSFSGVPSRFSGSGSGTDFTLTVNSLEAEDAATYYCHQSSSLPWTFGQGTKVEIKAAATTTPAPRPPTPAPTIASQPLSLRPEACRPAAGGAVHTRGLDFACDIYIWAPLAGTCGVLLLSLVITLYCKRGRKKLLYIFKQPFMRPVQTTQEEDGCSCRFPEEEEGGCELRVKFSRSADAPAYQQGQNQLYNELNLGRREEYDVLDKRRGRDPEMGGKPRRKNPQEGLYNELQKDKMAEAYSEIGMKGERRRGKGHDGLYQGLSTATKDTYDALHMQALPPRGSGEGRGSLLTCGDVEENPGPMALPVTALLLPLALLLHAARPNWVNVISDLKKIEDLIQSMHIDATLYTESDVHPSCKVTAMKCFLLELQVISLESGDASIHDTVENLIILANNSLSSNGNVTESGCKECEELEEKNIKEFLQSFVHIVQMFINTSTTTPAPRPPTPAPTIASQPLSLRPEACRPAAGGAVHTRGLDFACDIYIWAPLAGTCGVLLLSLVITLYC

SEQ ID NO: 2711 - protein, 719 aa, synthetic construct
  REGION 1..719: note = Synthetic
MALPVTALLLPLALLLHAARPQVQLVESGGGVVQPGRSLRLSCAASGFTFSSHDMHWVRQAPGKGLDWVAVIWSDGNNKYYADSAKGRFTISRDNSKNTVYLQMNSLRAEDTAIYYCARGDNWNDEHSYYYYMDVWGKGTTVTVSSGGGGSGGGGSGGGGSEIVLTQSPDFQSVTPKEKVTITCRASQTIGSSLHWYQQKPDQSPKLLIKHASQSFSGVPSRFSGSGSGTDFTLTVNSLEAEDAATYYCHQSSSLPWTFGQGTKVEIKAAATTTPAPRPPTPAPTIASQPLSLRPEACRPAAGGAVHTRGLDFACDIYIWAPLAGTCGVLLLSLVITLYCKRGRKKLLYIFKQPFMRPVQTTQEEDGCSCRFPEEEEGGCELRVKFSRSADAPAYQQGQNQLYNELNLGRREEYDVLDKRRGRDPEMGGKPRRKNPQEGLYNELQKDKMAEAYSEIGMKGERRRGKGHDGLYQGLSTATKDTYDALHMQALPPRGSGEGRGSLLTCGDVEENPGPMALPVTALLLPLALLLHAARPNWVNVISDLKKIEDLIQSMHIDATLYTESDVHPSCKVTAMKCFLLELQVISLESGDASIHDTVENLIILANNSLSSNGNVTESGCKECEELEEKNIKEFLQSFVHIVQMFINTSTTTPAPRPPTPAPTIASQPLSLRPEACRPAAGGAVHTRGLDFACDIYIWAPLAGTCGVLLLSLVITLYC

SEQ ID NO: 2712 - protein, 718 aa, synthetic construct
  REGION 1..718: note = Synthetic
MALPVTALLLPLALLLHAARPQLQLVQSGAEVKKPGASVKVSCKASGYTFTNYGISWLRQAPGQGLEWMGWISGYNDNTHYAQKFQGRVTMTTDTSTTTAYMELRNLRSDDTAVYYCARDGIAARPVYYYYMDVWGKGTTVTVSSGGGGSGGGGSGGGGSDIQMTQSPSSLSASVGDRVTITCRASQSISNYLNWYHQKPGKAPKLLIYAASSLESGVPSRFSGSGSGTDFTLTISSLQPEDFATYYCQQSYSNPLTFGGGTKVESKAAATTTPAPRPPTPAPTIASQPLSLRPEACRPAAGGAVHTRGLDFACDIYIWAPLAGTCGVLLLSLVITLYCKRGRKKLLYIFKQPFMRPVQTTQEEDGCSCRFPEEEEGGCELRVKFSRSADAPAYQQGQNQLYNELNLGRREEYDVLDKRRGRDPEMGGKPRRKNPQEGLYNELQKDKMAEAYSEIGMKGERRRGKGHDGLYQGLSTATKDTYDALHMQALPPRGSGEGRGSLLTCGDVEENPGPMALPVTALLLPLALLLHAARPNWVNVISDLKKIEDLIQSMHIDATLYTESDVHPSCKVTAMKCFLLELQVISLESGDASIHDTVENLIILANNSLSSNGNVTESGCKECEELEEKNIKEFLQSFVHIVQMFINTSTTTPAPRPPTPAPTIASQPLSLRPEACRPAAGGAVHTRGLDFACDIYIWAPLAGTCGVLLLSLVITLYC

SEQ ID NO: 2713 - protein, 719 aa, synthetic construct
  REGION 1..719: note = Synthetic
MALPVTALLLPLALLLHAARPQVQLVESGGGVVQPGRSLRLSCVASGFTFSSNDIYWVRQAPGKGLEWVAVIWYDGSNKYYADSVKGRFTISRDNSKNTLYLQMNSLRAEDTAVYYCARGDNWNDEHHYHYYMDVWGKGTTVTVSSGGGGSGGGGSGGGGSEIVLTQSPDFQSVTPKEKVTITCRASQSIGSSLHWYQQKPDQSPKLLIKFASQSFSGVPSRFSGSGSGTDFTLTIHSLEAEDAATYYCHQSGSLPWTFGQGTKVEIKAAATTTPAPRPPTPAPTIASQPLSLRPEACRPAAGGAVHTRGLDFACDIYIWAPLAGTCGVLLLSLVITLYCKRGRKKLLYIFKQPFMRPVQTTQEEDGCSCRFPEEEEGGCELRVKFSRSADAPAYQQGQNQLYNELNLGRREEYDVLDKRRGRDPEMGGKPRRKNPQEGLYNELQKDKMAEAYSEIGMKGERRRGKGHDGLYQGLSTATKDTYDALHMQALPPRGSGEGRGSLLTCGDVEENPGPMALPVTALLLPLALLLHAARPNWVNVISDLKKIEDLIQSMHIDATLYTESDVHPSCKVTAMKCFLLELQVISLESGDASIHDTVENLIILANNSLSSNGNVTESGCKECEELEEKNIKEFLQSFVHIVQMFINTSTTTPAPRPPTPAPTIASQPLSLRPEACRPAAGGAVHTRGLDFACDIYIWAPLAGTCGVLLLSLVITLYC

SEQ ID NO: 2714 - protein, 712 aa, synthetic construct
  REGION 1..712: note = Synthetic
MALPVTALLLPLALLLHAARPQVQLVESGGGVVQPGRSLRLSCAASGFTFSSYGMHWVRQAPGKGLEWVAVISYDGSNKYYADSVKGRFTISRDNSKTTLYLQMNSLRAEDTAVYYCARDHYYYYMDVWGKGTTVTVSSGGGGSGGGGSGGGGSVTQEPSFSVSPGGTVTLTCGLSSGSVSTSYYPSWYQQTPGQAPRTLIYSTNIRSSGVPDRFSGSILGNKAALTITGAQADDESDYYCVLYMGSDIVVFGGGTKLTVLAAATTTPAPRPPTPAPTIASQPLSLRPEACRPAAGGAVHTRGLDFACDIYIWAPLAGTCGVLLLSLVITLYCKRGRKKLLYIFKQPFMRPVQTTQEEDGCSCRFPEEEEGGCELRVKFSRSADAPAYQQGQNQLYNELNLGRREEYDVLDKRRGRDPEMGGKPRRKNPQEGLYNELQKDKMAEAYSEIGMKGERRRGKGHDGLYQGLSTATKDTYDALHMQALPPRGSGEGRGSLLTCGDVEENPGPMALPVTALLLPLALLLHAARPNWVNVISDLKKIEDLIQSMHIDATLYTESDVHPSCKVTAMKCFLLELQVISLESGDASIHDTVENLIILANNSLSSNGNVTESGCKECEELEEKNIKEFLQSFVHIVQMFINTSTTTPAPRPPTPAPTIASQPLSLRPEACRPAAGGAVHTRGLDFACDIYIWAPLAGTCGVLLLSLVITLYC

SEQ ID NO: 2715 - protein, 717 aa, synthetic construct
  REGION 1..717: note = Synthetic
MALPVTALLLPLALLLHAARPQLQLQESGPGLVKPSETLSLTCTVSGGSISSSSYYWGWIRQPPGKGLEWIGSLYYSGSTYYNPSLKSRVTISVDTSKNQFSLKLSSVTAADTAVYYCAAVQLERRGYFYMDVWGKGTTVTVSSGGGGSGGGGSGGGGSEIVLTQSPATLSLSPGERATLSCRASQSVSSYFAWYQQKPGQAPRLLIYDASNRATGIPARFSGSGSGTDFTLTISSLEPEDFAVYYCQQRSNWPLTFGGGTKVEIKAAATTTPAPRPPTPAPTIASQPLSLRPEACRPAAGGAVHTRGLDFACDIYIWAPLAGTCGVLLLSLVITLYCKRGRKKLLYIFKQPFMRPVQTTQEEDGCSCRFPEEEEGGCELRVKFSRSADAPAYQQGQNQLYNELNLGRREEYDVLDKRRGRDPEMGGKPRRKNPQEGLYNELQKDKMAEAYSEIGMKGERRRGKGHDGLYQGLSTATKDTYDALHMQALPPRGSGEGRGSLLTCGDVEENPGPMALPVTALLLPLALLLHAARPNWVNVISDLKKIEDLIQSMHIDATLYTESDVHPSCKVTAMKCFLLELQVISLESGDASIHDTVENLIILANNSLSSNGNVTESGCKECEELEEKNIKEFLQSFVHIVQMFINTSTTTPAPRPPTPAPTIASQPLSLRPEACRPAAGGAVHTRGLDFACDIYIWAPLAGTCGVLLLSLVITLYC

SEQ ID NO: 2716 - protein, 719 aa, synthetic construct
  REGION 1..719: note = Synthetic
MALPVTALLLPLALLLHAARPQVQLVESGGGVVQPGRSLRLSCAASGFTFSNYGMHWVRQAPGKGLEWMAVIWSDGHNKYYADSVKGRFTISRDNSKNTLYLQMNSLRAEDTAVYYCARAQLERRYFYYMDVWGKGTTVTVSSGGGGSGGGGSGGGGSQTVVTQEPSFSVSPGGTVTLTCGLTSGSVSTSYYPNWYQQTPGQAPRTLIYSTNIRSSGVPDRFSGSILGNKAALTITGAQADDESDYYCVLYMGSGMFIFGSGTKVTVLAAATTTPAPRPPTPAPTIASQPLSLRPEACRPAAGGAVHTRGLDFACDIYIWAPLAGTCGVLLLSLVITLYCKRGRKKLLYIFKQPFMRPVQTTQEEDGCSCRFPEEEEGGCELRVKFSRSADAPAYQQGQNQLYNELNLGRREEYDVLDKRRGRDPEMGGKPRRKNPQEGLYNELQKDKMAEAYSEIGMKGERRRGKGHDGLYQGLSTATKDTYDALHMQALPPRGSGEGRGSLLTCGDVEENPGPMALPVTALLLPLALLLHAARPNWVNVISDLKKIEDLIQSMHIDATLYTESDVHPSCKVTAMKCFLLELQVISLESGDASIHDTVENLIILANNSLSSNGNVTESGCKECEELEEKNIKEFLQSFVHIVQMFINTSTTTPAPRPPTPAPTIASQPLSLRPEACRPAAGGAVHTRGLDFACDIYIWAPLAGTCGVLLLSLVITLYC

SEQ ID NO: 2717 - protein, 719 aa, synthetic construct
  REGION 1..719: note = Synthetic
MALPVTALLLPLALLLHAARPQVQLVQSGAEVKKPGASVKVSCKASGYTFTSYDINWVRQATGQGLEWMGWMIPNSGDTGSAQKFQGRVTMTRNTSIGTAYMELSSLRSEDTAVYYCARGGYCNSTSCYYYYMDVWGKGTTVTVSSGGGGSGGGGSGGGGSDIQMTQSPSSLSASVGDRVTITCRASQGISSWLAWYQQKPEKAPKSLIYAASSLQGGVPSRFSGSGSGTDFTLTISSLQPEDFATYYCQQYDSYPYTFGQGTKLEIKAAATTTPAPRPPTPAPTIASQPLSLRPEACRPAAGGAVHTRGLDFACDIYIWAPLAGTCGVLLLSLVITLYCKRGRKKLLYIFKQPFMRPVQTTQEEDGCSCRFPEEEEGGCELRVKFSRSADAPAYQQGQNQLYNELNLGRREEYDVLDKRRGRDPEMGGKPRRKNPQEGLYNELQKDKMAEAYSEIGMKGERRRGKGHDGLYQGLSTATKDTYDALHMQALPPRGSGEGRGSLLTCGDVEENPGPMALPVTALLLPLALLLHAARPNWVNVISDLKKIEDLIQSMHIDATLYTESDVHPSCKVTAMKCFLLELQVISLESGDASIHDTVENLIILANNSLSSNGNVTESGCKECEELEEKNIKEFLQSFVHIVQMFINTSTTTPAPRPPTPAPTIASQPLSLRPEACRPAAGGAVHTRGLDFACDIYIWAPLAGTCGVLLLSLVITLYC

SEQ ID NO: 2718 - protein, 720 aa, synthetic construct
  REGION 1..720: note = Synthetic
MALPVTALLLPLALLLHAARPQVQLVQSGAEVKKPGASVKVSCKASGYTFTSYDINWVRQATGQGLEWMGWMNPNSGNTVYAQKFQGRVTMTRNTSISTAYMELSSLRSEDTAVYYCARGGDFWSGYHDYYYYMDVWGKGTTVTVSSGGGGSGGGGSGGGGSDIQVTQSPTFLSASVGDRVTITCRASQGISSYLAWYQQKPGKAPKLLIYGASTLQSGVPSRFSGSGSGTEFTLTISSLQPEDFATYYCQQLNSYPWTFGQGTKVEIKAAATTTPAPRPPTPAPTIASQPLSLRPEACRPAAGGAVHTRGLDFACDIYIWAPLAGTCGVLLLSLVITLYCKRGRKKLLYIFKQPFMRPVQTTQEEDGCSCRFPEEEEGGCELRVKFSRSADAPAYQQGQNQLYNELNLGRREEYDVLDKRRGRDPEMGGKPRRKNPQEGLYNELQKDKMAEAYSEIGMKGERRRGKGHDGLYQGLSTATKDTYDALHMQALPPRGSGEGRGSLLTCGDVEENPGPMALPVTALLLPLALLLHAARPNWVNVISDLKKIEDLIQSMHIDATLYTESDVHPSCKVTAMKCFLLELQVISLESGDASIHDTVENLIILANNSLSSNGNVTESGCKECEELEEKNIKEFLQSFVHIVQMFINTSTTTPAPRPPTPAPTIASQPLSLRPEACRPAAGGAVHTRGLDFACDIYIWAPLAGTCGVLLLSLVITLYC

SEQ ID NO: 2719 - protein, 718 aa, synthetic construct
  REGION 1..718: note = Synthetic
MALPVTALLLPLALLLHAARPQVQLQESGPGLVKPSETLSLTCTVSGGSISSYYWSWIRQPAGKGLEWIGRIYTSGSTNYNPSLKSRVTMSVDTSKNQFSLKLSSVTAADTAVYYCAREEYQLLPALYYYYYMDVWGKGTTVTVSSGGGGSGGGGSGGGGSSYELTQPPSVSVSPGQTASITCSGDKLGDKYACWYQQKPGQSPVLVIYQDSKRPSGIPERFSGSNSGNTATLTISGTQAMDEADYYCQAWDSSTAVFGGGTQLTALAAATTTPAPRPPTPAPTIASQPLSLRPEACRPAAGGAVHTRGLDFACDIYIWAPLAGTCGVLLLSLVITLYCKRGRKKLLYIFKQPFMRPVQTTQEEDGCSCRFPEEEEGGCELRVKFSRSADAPAYQQGQNQLYNELNLGRREEYDVLDKRRGRDPEMGGKPRRKNPQEGLYNELQKDKMAEAYSEIGMKGERRRGKGHDGLYQGLSTATKDTYDALHMQALPPRGSGEGRGSLLTCGDVEENPGPMALPVTALLLPLALLLHAARPNWVNVISDLKKIEDLIQSMHIDATLYTESDVHPSCKVTAMKCFLLELQVISLESGDASIHDTVENLIILANNSLSSNGNVTESGCKECEELEEKNIKEFLQSFVHIVQMFINTSTTTPAPRPPTPAPTIASQPLSLRPEACRPAAGGAVHTRGLDFACDIYIWAPLAGTCGVLLLSLVITLYC

SEQ ID NO: 2720 - protein, 719 aa, synthetic construct
  REGION 1..719: note = Synthetic
MALPVTALLLPLALLLHAARPQVQLVESGGGVVQPGRSLRLSCAATGFTFSSYGMHWVRQAPGKGLEWMVVIWSDGHNKYYADSVKGRFTISRDNSKNTLYLQMNSLRAEDTAVYYCARAQLERRYFYYMDVWGKGTTVTVSSGGGGSGGGGSGGGGSQTVVTQEPSFSVSPGGTVTLTCGLTSGSVSTSYYPNWYQQTPGQAPRTLIYSTNIRSSGVPDRFSGSILGNKAALTITGAQADDESDYYCVLYMGSGMFIFGSGTKVTVLAAATTTPAPRPPTPAPTIASQPLSLRPEACRPAAGGAVHTRGLDFACDIYIWAPLAGTCGVLLLSLVITLYCKRGRKKLLYIFKQPFMRPVQTTQEEDGCSCRFPEEEEGGCELRVKFSRSADAPAYQQGQNQLYNELNLGRREEYDVLDKRRGRDPEMGGKPRRKNPQEGLYNELQKDKMAEAYSEIGMKGERRRGKGHDGLYQGLSTATKDTYDALHMQALPPRGSGEGRGSLLTCGDVEENPGPMALPVTALLLPLALLLHAARPNWVNVISDLKKIEDLIQSMHIDATLYTESDVHPSCKVTAMKCFLLELQVISLESGDASIHDTVENLIILANNSLSSNGNVTESGCKECEELEEKNIKEFLQSFVHIVQMFINTSTTTPAPRPPTPAPTIASQPLSLRPEACRPAAGGAVHTRGLDFACDIYIWAPLAGTCGVLLLSLVITLYC

SEQ ID NO: 2721 - protein, 719 aa, synthetic construct
  REGION 1..719: note = Synthetic
MALPVTALLLPLALLLHAARPQVQLVESGGGVVQPGRSLRLSCAASGFTFTSYDMHWVRQAPGKGLEWVTIIWFDGSNKYYADSVKGRFTISRDNSKNTLYLQMNSLSAEDTAVYYCARGDNWNDRYYYYYYMDVWGKGTTVTVSSGGGGSGGGGSGGGGSEIVLTQSPDFQSVTPKEKVTITCRASQSIGSSLHWYQQKPDQSPMLLIKFASQSISGVPSRFSGSGSGTDFTLTINSLEAEDAAAYYCHQSSSLPWTFGQGTKVEIKAAATTTPAPRPPTPAPTIASQPLSLRPEACRPAAGGAVHTRGLDFACDIYIWAPLAGTCGVLLLSLVITLYCKRGRKKLLYIFKQPFMRPVQTTQEEDGCSCRFPEEEEGGCELRVKFSRSADAPAYQQGQNQLYNELNLGRREEYDVLDKRRGRDPEMGGKPRRKNPQEGLYNELQKDKMAEAYSEIGMKGERRRGKGHDGLYQGLSTATKDTYDALHMQALPPRGSGEGRGSLLTCGDVEENPGPMALPVTALLLPLALLLHAARPNWVNVISDLKKIEDLIQSMHIDATLYTESDVHPSCKVTAMKCFLLELQVISLESGDASIHDTVENLIILANNSLSSNGNVTESGCKECEELEEKNIKEFLQSFVHIVQMFINTSTTTPAPRPPTPAPTIASQPLSLRPEACRPAAGGAVHTRGLDFACDIYIWAPLAGTCGVLLLSLVITLYC

SEQ ID NO: 2722 - protein, 724 aa, synthetic construct
  REGION 1..724: note = Synthetic
MALPVTALLLPLALLLHAARPQVQLVQSGAEVKKPGASVKVSCKASGYTFTSYGISWVRQAPGQGLEWMGWISAYNGHTDYTQKLQGRVTMTTDTSTTTAYMELRSLSSADTAVYYCVREVVLPTTDYYYFYMDVWGKGTTVTVSSGGGGSGGGGSGGGGSDIVMTQPPLSSPVTLGQPASISCRSSQSLVHSDGNTYLSWLQQRPGQPPRLLIYKVSNRFSGVPDRFSGSGAGTDFTLKISRVEAEDVGVYYCTQATQFPHTFGQGTKLEIKAAATTTPAPRPPTPAPTIASQPLSLRPEACRPAAGGAVHTRGLDFACDIYIWAPLAGTCGVLLLSLVITLYCKRGRKKLLYIFKQPFMRPVQTTQEEDGCSCRFPEEEEGGCELRVKFSRSADAPAYQQGQNQLYNELNLGRREEYDVLDKRRGRDPEMGGKPRRKNPQEGLYNELQKDKMAEAYSEIGMKGERRRGKGHDGLYQGLSTATKDTYDALHMQALPPRGSGEGRGSLLTCGDVEENPGPMALPVTALLLPLALLLHAARPNWVNVISDLKKIEDLIQSMHIDATLYTESDVHPSCKVTAMKCFLLELQVISLESGDASIHDTVENLIILANNSLSSNGNVTESGCKECEELEEKNIKEFLQSFVHIVQMFINTSTTTPAPRPPTPAPTIASQPLSLRPEACRPAAGGAVHTRGLDFACDIYIWAPLAGTCGVLLLSLVITLYC

SEQ ID NO: 2723 - protein, 723 aa, synthetic construct
  REGION 1..723: note = Synthetic
MALPVTALLLPLALLLHAARPQVQLVQSGAEVKKPGASVKVSCKVSGYTLTELSMHWVRQAPGKGLEWMGGFDPEDGETIYAQKFQGRVTMTEDTSTDTAYMELSSLRSEDTAVYYCATGRITMVRGVIIPYYYYYMDVWGKGTTVTVSSGGGGSGGGGSGGGGSDIQMTQSPSSLSASVGDRVTITCRASQGISSWLAWYQQKPEKAPKSLIYAASSLQSGVPSRFSGSGSGTDFTLTISSLQPEDFATYYCQQYNSYPYTFGQGTKLEIKAAATTTPAPRPPTPAPTIASQPLSLRPEACRPAAGGAVHTRGLDFACDIYIWAPLAGTCGVLLLSLVITLYCKRGRKKLLYIFKQPFMRPVQTTQEEDGCSCRFPEEEEGGCELRVKFSRSADAPAYQQGQNQLYNELNLGRREEYDVLDKRRGRDPEMGGKPRRKNPQEGLYNELQKDKMAEAYSEIGMKGERRRGKGHDGLYQGLSTATKDTYDALHMQALPPRGSGEGRGSLLTCGDVEENPGPMALPVTALLLPLALLLHAARPNWVNVISDLKKIEDLIQSMHIDATLYTESDVHPSCKVTAMKCFLLELQVISLESGDASIHDTVENLIILANNSLSSNGNVTESGCKECEELEEKNIKEFLQSFVHIVQMFINTSTTTPAPRPPTPAPTIASQPLSLRPEACRPAAGGAVHTRGLDFACDIYIWAPLAGTCGVLLLSLVITLYC

SEQ ID NO: 2724 - protein, 721 aa, synthetic construct
  REGION 1..721: note = Synthetic
MALPVTALLLPLALLLHAARPQVQLVQSGTEVKKPGASVKVSCKASGYTFTNYGIGWVRQAPGQGLEWMGWIIAYNGYTKYAQILQGRVTMTTDTSTNTAYMELRSLRSDDTAVYYCARQQLGGDYHYYMDVWGKGTTVTVSSGGGGSGGGGSGGGGSDIVMTQTPLSLSVTPGQPASISCKSSKSLLHSDGKTYLYWYLQKPGQPPQLLIYEVSNRFSGVPDRFSGSGSGTDFTLKISRVEAEDVGVYYCMQSIQFPWTFGQGTKVEIKAAATTTPAPRPPTPAPTIASQPLSLRPEACRPAAGGAVHTRGLDFACDIYIWAPLAGTCGVLLLSLVITLYCKRGRKKLLYIFKQPFMRPVQTTQEEDGCSCRFPEEEEGGCELRVKFSRSADAPAYQQGQNQLYNELNLGRREEYDVLDKRRGRDPEMGGKPRRKNPQEGLYNELQKDKMAEAYSEIGMKGERRRGKGHDGLYQGLSTATKDTYDALHMQALPPRGSGEGRGSLLTCGDVEENPGPMALPVTALLLPLALLLHAARPNWVNVISDLKKIEDLIQSMHIDATLYTESDVHPSCKVTAMKCFLLELQVISLESGDASIHDTVENLIILANNSLSSNGNVTESGCKECEELEEKNIKEFLQSFVHIVQMFINTSTTTPAPRPPTPAPTIASQPLSLRPEACRPAAGGAVHTRGLDFACDIYIWAPLAGTCGVLLLSLVITLYC

SEQ ID NO: 2725 - protein, 721 aa, synthetic construct
  REGION 1..721: note = Synthetic
MALPVTALLLPLALLLHAARPQVQLVQSGTEVKKPGASVKVSCKASGYTFTNYGIGWVRQAPGQGLEWMGWIIAYNGYTKYAQILQGRVTMTTDTSTNTAYMELRSLRSDDTAVYYCARQQLGGDYHYYMDVWGKGTTVTVSSGGGGSGGGGSGGGGSDIVMTQTPLSLSVTPGQPASISCKSSKSLLHSDGKTYLYWYLQKPGQPPQLLIYEVSTRFSGVPDRFSGSGSGTDFTLKISRVEAEDVGVYYCMQSIQFPWTFGQGTKVEIKAAATTTPAPRPPTPAPTIASQPLSLRPEACRPAAGGAVHTRGLDFACDIYIWAPLAGTCGVLLLSLVITLYCKRGRKKLLYIFKQPFMRPVQTTQEEDGCSCRFPEEEEGGCELRVKFSRSADAPAYQQGQNQLYNELNLGRREEYDVLDKRRGRDPEMGGKPRRKNPQEGLYNELQKDKMAEAYSEIGMKGERRRGKGHDGLYQGLSTATKDTYDALHMQALPPRGSGEGRGSLLTCGDVEENPGPMALPVTALLLPLALLLHAARPNWVNVISDLKKIEDLIQSMHIDATLYTESDVHPSCKVTAMKCFLLELQVISLESGDASIHDTVENLIILANNSLSSNGNVTESGCKECEELEEKNIKEFLQSFVHIVQMFINTSTTTPAPRPPTPAPTIASQPLSLRPEACRPAAGGAVHTRGLDFACDIYIWAPLAGTCGVLLLSLVITLYC

SEQ ID NO: 2726 - protein, 719 aa, synthetic construct
  REGION 1..719: note = Synthetic
MALPVTALLLPLALLLHAARPQVQLVQSGTEVKKPGASVKVSCKTSGYTFTSYDINWVRQATGQGLEWMGWMNPISGDTGSAQKFQGRVTMTRNTSIGTAYMELSSLRSEDTAVYYCARGGYCSSTSCYYYYMDVWGKGTTVTVSSGGGGSGGGGSGGGGSDIQMTQSPSSLSASVGDRVTITCRASQGISNWLAWYQQKPEKAPKSLIYAASSLQGGVPSRFSGSGSGTDFTLTISSLQPEDFATYYCQQYDSYPYTFGQGTKLEIKAAATTTPAPRPPTPAPTIASQPLSLRPEACRPAAGGAVHTRGLDFACDIYIWAPLAGTCGVLLLSLVITLYCKRGRKKLLYIFKQPFMRPVQTTQEEDGCSCRFPEEEEGGCELRVKFSRSADAPAYQQGQNQLYNELNLGRREEYDVLDKRRGRDPEMGGKPRRKNPQEGLYNELQKDKMAEAYSEIGMKGERRRGKGHDGLYQGLSTATKDTYDALHMQALPPRGSGEGRGSLLTCGDVEENPGPMALPVTALLLPLALLLHAARPNWVNVISDLKKIEDLIQSMHIDATLYTESDVHPSCKVTAMKCFLLELQVISLESGDASIHDTVENLIILANNSLSSNGNVTESGCKECEELEEKNIKEFLQSFVHIVQMFINTSTTTPAPRPPTPAPTIASQPLSLRPEACRPAAGGAVHTRGLDFACDIYIWAPLAGTCGVLLLSLVITLYC

SEQ ID NO: 2727 - protein, 719 aa, synthetic construct
  REGION 1..719: note = Synthetic
MALPVTALLLPLALLLHAARPQVQLVQSGAEVKKPGASVKVSCKASGYTFTSYDINWVRQATGQGLEWMGWMIPNSGDTGSAQKFQGRVTMTRNTSISTAYMELSSLRSEDTAVYYCARGGYCNSTSCYYYYMDVWGKGTTVTVSSGGGGSGGGGSGGGGSDIQMTQSPSSLSASVGDRVTITCRASQGISSWLAWYQQKPEKAPKSLIYAASSLQGGVPSRFSGSGSGTDFTLTISSLQPEDFATYYCQQYDSYPYTFGQGTKLEIKAAATTTPAPRPPTPAPTIASQPLSLRPEACRPAAGGAVHTRGLDFACDIYIWAPLAGTCGVLLLSLVITLYCKRGRKKLLYIFKQPFMRPVQTTQEEDGCSCRFPEEEEGGCELRVKFSRSADAPAYQQGQNQLYNELNLGRREEYDVLDKRRGRDPEMGGKPRRKNPQEGLYNELQKDKMAEAYSEIGMKGERRRGKGHDGLYQGLSTATKDTYDALHMQALPPRGSGEGRGSLLTCGDVEENPGPMALPVTALLLPLALLLHAARPNWVNVISDLKKIEDLIQSMHIDATLYTESDVHPSCKVTAMKCFLLELQVISLESGDASIHDTVENLIILANNSLSSNGNVTESGCKECEELEEKNIKEFLQSFVHIVQMFINTSTTTPAPRPPTPAPTIASQPLSLRPEACRPAAGGAVHTRGLDFACDIYIWAPLAGTCGVLLLSLVITLYC

SEQ ID NO: 2728 - protein, 720 aa, synthetic construct
  REGION 1..720: note = Synthetic
MALPVTALLLPLALLLHAARPEVQLLESGGGLVQPGGSLRLSCAASGFTFSSYVMNWVRQAPGKGLEWVSSVSGSGNNSFYADSVKGRFTISRDNSKNTLYLQMNSLRAEDTAVYYCASRSSSYLYYYYYMDVWGKGTTVTVSSGGGGSGGGGSGGGGSEIVLTQSPGTLSLSPGERATLSCRASQSVSSSYLAWYQQKPGQAPRLLIYGASSRATGIPDRFSDSGSGTDFTLTISRLEPEDFAVYYCQHYGSSPPRITFGPGTKVDIKAAATTTPAPRPPTPAPTIASQPLSLRPEACRPAAGGAVHTRGLDFACDIYIWAPLAGTCGVLLLSLVITLYCKRGRKKLLYIFKQPFMRPVQTTQEEDGCSCRFPEEEEGGCELRVKFSRSADAPAYQQGQNQLYNELNLGRREEYDVLDKRRGRDPEMGGKPRRKNPQEGLYNELQKDKMAEAYSEIGMKGERRRGKGHDGLYQGLSTATKDTYDALHMQALPPRGSGEGRGSLLTCGDVEENPGPMALPVTALLLPLALLLHAARPNWVNVISDLKKIEDLIQSMHIDATLYTESDVHPSCKVTAMKCFLLELQVISLESGDASIHDTVENLIILANNSLSSNGNVTESGCKECEELEEKNIKEFLQSFVHIVQMFINTSTTTPAPRPPTPAPTIASQPLSLRPEACRPAAGGAVHTRGLDFACDIYIWAPLAGTCGVLLLSLVITLYC

SEQ ID NO: 2729 - DNA, 2157 bp, synthetic construct
  misc_feature 1..2157: note = Synthetic
  source 1..2157: mol_type = other DNA
atggccttaccagtgaccgccttgctcctgccgctggccttgctgctccacgccgccaggccgcaggtgcagctggtggagtctgggggaggcgtggtccagcctgggaggtccctgagactttcctgtgcagcgtctggattcaccttcagcagtcatgacatgcactgggtccgccaggctccaggcaaggggctggactgggtggcagttatatggagtgatggaaataaaaaatactatgtagactccgcgaagggccggttcaccatctccagagacaattccaagaacacggtgtatctgcaaatgaacagcctgagagccgaggacacggctatatattactgtgcgagaggtgacaactggaacgacgaacactcctactattactacatggacgtctggggcaaggggaccacggtcaccgtctcctcaggcggcggtggatctggaggcggaggctctggaggcggcggctccgaaattgtgctgactcagtctccagactttcagtctgtgactccaaaggagaaagtcaccatcacctgccgggccagtcagaccattggcagtagcttacactggtaccagcagaaaccagatcagtctccaaagctcctcatcaagcatgcttcccagtccttctcaggggtcccctcgaggttcagtggcagtggatctgggacagatttcaccctcaccgtcaatagcctggaagctgaagatgctgcaacgtattactgtcatcagagtagtagtttaccgtggacgttcggccaagggaccaaggtggaaatcaaagcggccgcaaccacgacgccagcgccgcggccaccaacaccggcgcccaccatcgcgtcgcagcccctgtccctgcgcccagaggcgtgccggccagcggcggggggcgcagtgcacacgagggggctggacttcgcctgtgatatctacatctgggcgcccttggccgggacttgtggggtccttctcctgtcactggttatcaccctttactgcaaacggggcagaaagaaactcctgtatatattcaaacaaccatttatgagaccagtacaaactactcaagaggaagatggctgtagctgccgatttccagaagaagaagaaggaggatgtgaactgagagtgaagttcagcaggagcgcagacgcccccgcgtaccagcagggccagaaccagctctataacgagctcaatctaggacgaagagaggagtacgatgttttggacaagagacgtggccgggaccctgagatggggggaaagccgagaaggaagaaccctcaggaaggcctgtacaatgaactgcagaaagataagatggcggaggcctacagtgagattgggatgaaaggcgagcgccggaggggcaaggggcacgatggcctttaccagggtctcagtacagccaccaaggacacctacgacgcccttcacatgcaggccctgccccctcgcggctctggcgagggaaggggttccctgcttacttgcggcgacgtcgaagagaatcccggtccgatggccctcccagtaactgccctccttttgcccctcgcactccttcttcatgccgctcgccccaactgggtcaacgtgattagcgatttgaagaaaatcgaggaccttatacagtctatgcatattgacgctacactgtatactgagagtgatgtacacccgtcctgtaaggtaacggccatgaaatgctttcttctggagctccaggtcatcagcttggagtctggggacgcaagcatccacgatacggttgaaaacctcatcatccttgcgaacaactctctctcatctaatggaaacgttacagagagtgggtgtaaggagtgcgaagagttggaagaaaaaaacatcaaagaatttcttcaatccttcgttcacatagtgcaaatgttcattaacacgtccactaccacacccgccccgaggccacctacgccggcaccgactatcgccagtcaacccctctctctgcgccccgaggcttgccggcctgcggctggtggggcggtccacacccggggcctggattttgcgtgcgatatatacatctgggcacctcttgccggcacctgcggagtgctgcttctctcactcgttattacgctgtactgc

SEQ ID NO: 2730 - DNA, 2157 bp, synthetic construct
  misc_feature 1..2157: note = Synthetic
  source 1..2157: mol_type = other DNA
atggccttaccagtgaccgccttgctcctgccgctggccttgctgctccacgccgccaggccgcaggtgcagctggtggagtctgggggaggcgtggtccagcctgggaggtccctgagactttcctgtgcagcgtctggattcaccttcagtagtcatgacatgcactgggtccgccaggctccaggcaaggggctggactgggtggcagttatatggagtgatggaaataataaatactatgcagactccgcgaagggccggttcaccatctccagagacaattccaagaacacggtgtatctgcaaatgaacagcctgagagccgaggacacggctatatattactgtgcgagaggtgacaactggaacgacgaacactcctactattactacatggacgtctggggcaaggggaccacggtcaccgtctcctcaggcggcggtggatctggaggcggaggctctggaggcggcggctccgaaattgtgctgactcagtctccagactttcagtctgtgactccaaaggagaaagtcaccatcacctgccgggccagtcagaccattggcagtagcttacactggtaccagcagaaaccagatcagtctccaaagctcctcatcaagcatgcttcccagtccttctcaggggtcccctcgaggttcagtggcagtggatctgggacagatttcaccctcaccgtcaatagcctggaagctgaagatgctgcaacgtattactgtcatcagagtagtagtttaccgtggacgttcggccaagggaccaaggtggaaatcaaagcggccgcaaccacgacgccagcgccgcggccaccaacaccggcgcccaccatcgcgtcgcagcccctgtccctgcgcccagaggcgtgccggccagcggcggggggcgcagtgcacacgagggggctggacttcgcctgtgatatctacatctgggcgcccttggccgggacttgtggggtccttctcctgtcactggttatcaccctttactgcaaacggggcagaaagaaactcctgtatatattcaaacaaccatttatgagaccagtacaaactactcaagaggaagatggctgtagctgccgatttccagaagaagaagaaggaggatgtgaactgagagtgaagttcagcaggagcgcagacgcccccgcgtaccagcagggccagaaccagctctataacgagctcaatctaggacgaagagaggagtacgatgttttggacaagagacgtggccgggaccctgagatggggggaaagccgagaaggaagaaccctcaggaaggcctgtacaatgaactgcagaaagataagatggcggaggcctacagtgagattgggatgaaaggcgagcgccggaggggcaaggggcacgatggcctttaccagggtctcagtacagccaccaaggacacctacgacgcccttcacatgcaggccctgccccctcgcggctctggcgagggaaggggttccctgcttacttgcggcgacgtcgaagagaatcccggtccgatggccctcccagtaactgccctccttttgcccctcgcactccttcttcatgccgctcgccccaactgggtcaacgtgattagcgatttgaagaaaatcgaggaccttatacagtctatgcatattgacgctacactgtatactgagagtgatgtacacccgtcctgtaaggtaacggccatgaaatgctttcttctggagctccaggtcatcagcttggagtctggggacgcaagcatccacgatacggttgaaaacctcatcatccttgcgaacaactctctctcatctaatggaaacgttacagagagtgggtgtaaggagtgcgaagagttggaagaaaaaaacatcaaagaatttcttcaatccttcgttcacatagtgcaaatgttcattaacacgtccactaccacacccgccccgaggccacctacgccggcaccgactatcgccagtcaacccctctctctgcgccccgaggcttgccggcctgcggctggtggggcggtccacacccggggcctggattttgcgtgcgatatatacatctgggcacctcttgccggcacctgcggagtgctgcttctctcactcgttattacgctgtactgc

SEQ ID NO: 2731 - DNA, 2154 bp, synthetic construct
  misc_feature 1..2154: note = Synthetic
  source 1..2154: mol_type = other DNA
atggccttaccagtgaccgccttgctcctgccgctggccttgctgctccacgccgccaggccgcagcttcagctggtgcagtctggagctgaggtgaagaagcctggggcctcagtgaaggtctcctgcaaggcttctggttacacctttaccaactatggtatcagctggttgcgacaggcccctggacaagggcttgagtggatgggatggatcagtggttacaatgataacacacactatgcacagaagttccagggcagagtcaccatgaccacagacacatccacgaccacagcctacatggaactgaggaacctgagatctgacgacacggccgtgtattactgtgcgagagatgggatagcagctcgtccagtctactactactacatggacgtctggggcaaagggaccacggtcaccgtctcctcaggcggcggtggatctggaggcggaggctctggaggcggcggctccgacatacagatgacccagtctccatcctccctgtctgcatctgtaggagacagagtcaccatcacttgccgggcaagccagagcattagcaactatttaaattggtatcaccagaaaccagggaaagcccctaagctcctgatctatgctgcatccagtttggaaagtggggtcccatcaaggttcagtggcagtggatctgggacagatttcactctcaccatcagcagtctgcaacctgaagattttgcaacttactactgtcaacagagttacagtaacccgctcactttcggcggagggaccaaggtggagagcaaagcggccgcaaccacgacgccagcgccgcggccaccaacaccggcgcccaccatcgcgtcgcagcccctgtccctgcgcccagaggcgtgccggccagcggcggggggcgcagtgcacacgagggggctggacttcgcctgtgatatctacatctgggcgcccttggccgggacttgtggggtccttctcctgtcactggttatcaccctttactgcaaacggggcagaaagaaactcctgtatatattcaaacaaccatttatgagaccagtacaaactactcaagaggaagatggctgtagctgccgatttccagaagaagaagaaggaggatgtgaactgagagtgaagttcagcaggagcgcagacgcccccgcgtaccagcagggccagaaccagctctataacgagctcaatctaggacgaagagaggagtacgatgttttggacaagagacgtggccgggaccctgagatggggggaaagccgagaaggaagaaccctcaggaaggcctgtacaatgaactgcagaaagataagatggcggaggcctacagtgagattgggatgaaaggcgagcgccggaggggcaaggggcacgatggcctttaccagggtctcagtacagccaccaaggacacctacgacgcccttcacatgcaggccctgccccctcgcggctctggcgagggaaggggttccctgcttacttgcggcgacgtcgaagagaatcccggtccgatggccctcccagtaactgccctccttttgcccctcgcactccttcttcatgccgctcgccccaactgggtcaacgtgattagcgatttgaagaaaatcgaggaccttatacagtctatgcatattgacgctacactgtatactgagagtgatgtacacccgtcctgtaaggtaacggccatgaaatgctttcttctggagctccaggtcatcagcttggagtctggggacgcaagcatccacgatacggttgaaaacctcatcatccttgcgaacaactctctctcatctaatggaaacgttacagagagtgggtgtaaggagtgcgaagagttggaagaaaaaaacatcaaagaatttcttcaatccttcgttcacatagtgcaaatgttcattaacacgtccactaccacacccgccccgaggccacctacgccggcaccgactatcgccagtcaacccctctctctgcgccccgaggcttgccggcctgcggctggtggggcggtccacacccggggcctggattttgcgtgcgatatatacatctgggcacctcttgccggcacctgcggagtgctgcttctctcactcgttattacgctgtactgc

SEQ ID NO: 2732 - DNA, 2157 bp, synthetic construct
  misc_feature 1..2157: note = Synthetic
  source 1..2157: mol_type = other DNA
atggccttaccagtgaccgccttgctcctgccgctggccttgctgctccacgccgccaggccgcaggtgcagctggtggagtctgggggaggcgtggtccagcctgggaggtccctgagactctcctgtgtagcgtctggattcaccttcagtagcaatgacatatactgggtccgccaggccccaggcaaggggctggagtgggtggcagttatatggtatgatggaagtaataaatactatgcagactccgtgaagggccgattcaccatctccagagacaattccaagaacacgctgtatctgcaaatgaacagcctgagagccgaggacacggctgtgtattactgtgcgagaggtgacaactggaacgacgaacaccactaccactactacatggacgtctggggcaaagggaccacggtcaccgtctcctcaggcggcggtggatctggaggcggaggctctggaggcggcggctccgaaattgtgctgactcagtctccagactttcagtctgtgactccaaaggagaaagtcaccatcacctgccgggccagtcagagcattggtagtagcttacactggtaccagcagaaaccagatcagtctccaaagctcctcatcaagtttgcttcccagtccttctcaggggtcccctcgaggttcagtggcagtggatctgggacagatttcaccctcaccatccatagcctggaagctgaagatgctgcaacgtattactgtcatcagagtggtagtttaccgtggacgttcggccaagggaccaaggtggaaatcaaagcggccgcaaccacgacgccagcgccgcggccaccaacaccggcgcccaccatcgcgtcgcagcccctgtccctgcgcccagaggcgtgccggccagcggcggggggcgcagtgcacacgagggggctggacttcgcctgtgatatctacatctgggcgcccttggccgggacttgtggggtccttctcctgtcactggttatcaccctttactgcaaacggggcagaaagaaactcctgtatatattcaaacaaccatttatgagaccagtacaaactactcaagaggaagatggctgtagctgccgatttccagaagaagaagaaggaggatgtgaactgagagtgaagttcagcaggagcgcagacgcccccgcgtaccagcagggccagaaccagctctataacgagctcaatctaggacgaagagaggagtacgatgttttggacaagagacgtggccgggaccctgagatggggggaaagccgagaaggaagaaccctcaggaaggcctgtacaatgaactgcagaaagataagatggcggaggcctacagtgagattgggatgaaaggcgagcgccggaggggcaaggggcacgatggcctttaccagggtctcagtacagccaccaaggacacctacgacgcccttcacatgcaggccctgccccctcgcggctctggcgagggaaggggttccctgcttacttgcggcgacgtcgaagagaatcccggtccgatggccctcccagtaactgccctccttttgcccctcgcactccttcttcatgccgctcgccccaactgggtcaacgtgattagcgatttgaagaaaatcgaggaccttatacagtctatgcatattgacgctacactgtatactgagagtgatgtacacccgtcctgtaaggtaacggccatgaaatgctttcttctggagctccaggtcatcagcttggagtctggggacgcaagcatccacgatacggttgaaaacctcatcatccttgcgaacaactctctctcatctaatggaaacgttacagagagtgggtgtaaggagtgcgaagagttggaagaaaaaaacatcaaagaatttcttcaatccttcgttcacatagtgcaaatgttcattaacacgtccactaccacacccgccccgaggccacctacgccggcaccgactatcgccagtcaacccctctctctgcgccccgaggcttgccggcctgcggctggtggggcggtccacacccggggcctggattttgcgtgcgatatatacatctgggcacctcttgccggcacctgcggagtgctgcttctctcactcgttattacgctgtactgc

SEQ ID NO: 2733 - DNA, 2137 bp, synthetic construct
  misc_feature 1..2137: note = Synthetic
  source 1..2137: mol_type = other DNA
atggccttaccagtgaccgccttgctcctgccgctggccttgctgctccacgccgccaggccgcaggtgcagttggtggagtctgggggaggcgtggtccagcctgggaggtccctgagactctcctgtgcagcctctggattcaccttcagtagctatggcatgcactgggtccgccaggctccaggcaaggggctggagtgggtggcagttatatcatatgatggaagtaataaatactatgcagactccgtgaagggccgattcaccatctccagggacaattccaagaccacgctgtatctgcaaatgaacagcctgagagctgaggacacggctgtgtattactgtgcgagagatcactactactactacatggacgtctggggcaaagggaccacggtcaccgtctcctcaggcggcggtggatctggaggcggaggctctggaggcggcggctccggtgacccaggagccatcgttctcagtgtcccctggagggacagtcacactcacttgtggcttgagctctggctcagtctctactagttactaccccagctggtaccagcagaccccaggccaggctccacgcacgctcatctacagcacaaacattcgctcttctggggtccctgatcgcttctctggctccatccttgggaacaaagctgccctcaccatcacgggggcccaggcagatgatgaatctgattattactgtgtgctgtatatgggtagtgacattgtggtattcggcggagggaccaagctgaccgtcctagcggccgcaaccacgacgccagcgccgcggccaccaacaccggcgcccaccatcgcgtcgcagcccctgtccctgcgcccagaggcgtgccggccagcggcggggggcgcagtgcacacgagggggctggacttcgcctgtgatatctacatctgggcgcccttggccgggacttgtggggtccttctcctgtcactggttatcaccctttactgcaaacggggcagaaagaaactcctgtatatattcaaacaaccatttatgagaccagtacaaactactcaagaggaagatggctgtagctgccgatttccagaagaagaagaaggaggatgtgaactgagagtgaagttcagcaggagcgcagacgcccccgcgtaccagcagggccagaaccagctctataacgagctcaatctaggacgaagagaggagtacgatgttttggacaagagacgtggccgggaccctgagatggggggaaagccgagaaggaagaaccctcaggaaggcctgtacaatgaactgcagaaagataagatggcggaggcctacagtgagattgggatgaaaggcgagcgccggaggggcaaggggcacgatggcctttaccagggtctcagtacagccaccaaggacacctacgacgcccttcacatgcaggccctgccccctcgcggctctggcgagggaaggggttccctgcttacttgcggcgacgtcgaagagaatcccggtccgatggccctcccagtaactgccctccttttgcccctcgcactccttcttcatgccgctcgccccaactgggtcaacgtgattagcgatttgaagaaaatcgaggaccttatacagtctatgcatattgacgctacactgtatactgagagtgatgtacacccgtcctgtaaggtaacggccatgaaatgctttcttctggagctccaggtcatcagcttggagtctggggacgcaagcatccacgatacggttgaaaacctcatcatccttgcgaacaactctctctcatctaatggaaacgttacagagagtgggtgtaaggagtgcgaagagttggaagaaaaaaacatcaaagaatttcttcaatccttcgttcacatagtgcaaatgttcattaacacgtccactaccacacccgccccgaggccacctacgccggcaccgactatcgccagtcaacccctctctctgcgccccgaggcttgccggcctgcggctggtggggcggtccacacccggggcctggattttgcgtgcgatatatacatctgggcacctcttgccggcacctgcggagtgctgcttctctcactcgttattacgctgtactgc

SEQ ID NO: 2734 - DNA, 2151 bp, synthetic construct
  misc_feature 1..2151: note = Synthetic
  source 1..2151: mol_type = other DNA
atggccttaccagtgaccgccttgctcctgccgctggccttgctgctccacgccgccaggccgcaactgcagctgcaggagtcgggcccaggactggtgaagccttcggagaccctgtccctcacctgcactgtctctggtggctccatcagcagtagtagttactactggggctggatccgccagcccccagggaaggggctggagtggattgggagtctctattatagtgggagcacctactacaacccgtccctcaagagtcgagtcaccatatccgttgacacgtccaagaaccagttctccctgaagctgagctctgtgaccgccgcagacacggctgtgtattactgtgcggccgtacaactggaacgacgtgggtacttctacatggacgtctggggcaaagggaccacggtcaccgtctcctcaggcggcggtggatctggaggcggaggctctggaggcggcggctccgaaattgtgttgacacagtctccagccaccctgtctttgtctccaggggaaagagccaccctctcctgcagggccagtcagagtgttagcagctactttgcctggtaccaacagaaacctggccaggctcccaggctcctcatctatgatgcatccaacagggccactggcatcccagccaggttcagtggcagtgggtctgggacagacttcactctcaccatcagcagcctggagcctgaagattttgcagtttattactgtcagcagcgtagcaactggcctctcactttcggcggagggaccaaggtggagatcaaagcggccgcaaccacgacgccagcgccgcggccaccaacaccggcgcccaccatcgcgtcgcagcccctgtccctgcgcccagaggcgtgccggccagcggcggggggcgcagtgcacacgagggggctggacttcgcctgtgatatctacatctgggcgcccttggccgggacttgtggggtccttctcctgtcactggttatcaccctttactgcaaacggggcagaaagaaactcctgtatatattcaaacaaccatttatgagaccagtacaaactactcaagaggaagatggctgtagctgccgatttccagaagaagaagaaggaggatgtgaactgagagtgaagttcagcaggagcgcagacgcccccgcgtaccagcagggccagaaccagctctataacgagctcaatctaggacgaagagaggagtacgatgttttggacaagagacgtggccgggaccctgagatggggggaaagccgagaaggaagaaccctcaggaaggcctgtacaatgaactgcagaaagataagatggcggaggcctacagtgagattgggatgaaaggcgagcgccggaggggcaaggggcacgatggcctttaccagggtctcagtacagccaccaaggacacctacgacgcccttcacatgcaggccctgccccctcgcggctctggcgagggaaggggttccctgcttacttgcggcgacgtcgaagagaatcccggtccgatggccctcccagtaactgccctccttttgcccctcgcactccttcttcatgccgctcgccccaactgggtcaacgtgattagcgatttgaagaaaatcgaggaccttatacagtctatgcatattgacgctacactgtatactgagagtgatgtacacccgtcctgtaaggtaacggccatgaaatgctttcttctggagctccaggtcatcagcttggagtctggggacgcaagcatccacgatacggttgaaaacctcatcatccttgcgaacaactctctctcatctaatggaaacgttacagagagtgggtgtaaggagtgcgaagagttggaagaaaaaaacatcaaagaatttcttcaatccttcgttcacatagtgcaaatgttcattaacacgtccactaccacacccgccccgaggccacctacgccggcaccgactatcgccagtcaacccctctctctgcgccccgaggcttgccggcctgcggctggtggggcggtccacacccggggcctggattttgcgtgcgatatatacatctgggcacctcttgccggcacctgcggagtgctgcttctctcactcgttattacgctgtactgc

SEQ ID NO: 2735 - DNA, 2157 bp, synthetic construct
  misc_feature 1..2157: note = Synthetic
  source 1..2157: mol_type = other DNA
atggccttaccagtgaccgccttgctcctgccgctggccttgctgctccacgccgccaggccgcaggtgcagctggtggagtctgggggaggcgtggtccagcctgggaggtccctgagactctcctgtgcagcatctggattcaccttcagtaactatggcatgcactgggtccgccaggctccaggcaaggggctggagtggatggcagttatatggtctgatggacataataaatactatgcagactccgtgaagggccgattcaccatctccagagacaattccaagaacacgctgtatctgcaaatgaacagcctgagagccgaggacacggctgtgtattactgtgcgagggcacaattggaacgacggtacttctactacatggacgtctggggcaaagggaccacggtcaccgtctcctcaggcggcggtggatctggaggcggaggctctggaggcggcggctcccagactgtagtgacccaggaaccatcgttctcagtgtcccctggagggacagtcacactcacttgtggcttgacctctggctcagtctctactagttactaccccaactggtaccagcagaccccaggccaggctccacgcacgctcatctatagtacaaatattcgctcttctggggtccctgatcgcttctctggctccatccttgggaacaaagctgccctcaccatcacgggggcccaggcagatgatgaatctgattattactgtgtgctgtatatgggtagtggcatgtttattttcggcagtggaaccaaggtcactgtcctagcggccgcaaccacgacgccagcgccgcggccaccaacaccggcgcccaccatcgcgtcgcagcccctgtccctgcgcccagaggcgtgccggccagcggcggggggcgcagtgcacacgagggggctggacttcgcctgtgatatctacatctgggcgcccttggccgggacttgtggggtccttctcctgtcactggttatcaccctttactgcaaacggggcagaaagaaactcctgtatatattcaaacaaccatttatgagaccagtacaaactactcaagaggaagatggctgtagctgccgatttccagaagaagaagaaggaggatgtgaactgagagtgaagttcagcaggagcgcagacgcccccgcgtaccagcagggccagaaccagctctataacgagctcaatctaggacgaagagaggagtacgatgttttggacaagagacgtggccgggaccctgagatggggggaaagccgagaaggaagaaccctcaggaaggcctgtacaatgaactgcagaaagataagatggcggaggcctacagtgagattgggatgaaaggcgagcgccggaggggcaaggggcacgatggcctttaccagggtctcagtacagccaccaaggacacctacgacgcccttcacatgcaggccctgccccctcgcggctctggcgagggaaggggttccctgcttacttgcggcgacgtcgaagagaatcccggtccgatggccctcccagtaactgccctccttttgcccctcgcactccttcttcatgccgctcgccccaactgggtcaacgtgattagcgatttgaagaaaatcgaggaccttatacagtctatgcatattgacgctacactgtatactgagagtgatgtacacccgtcctgtaaggtaacggccatgaaatgctttcttctggagctccaggtcatcagcttggagtctggggacgcaagcatccacgatacggttgaaaacctcatcatccttgcgaacaactctctctcatctaatggaaacgttacagagagtgggtgtaaggagtgcgaagagttggaagaaaaaaacatcaaagaatttcttcaatccttcgttcacatagtgcaaatgttcattaacacgtccactaccacacccgccccgaggccacctacgccggcaccgactatcgccagtcaacccctctctctgcgccccgaggcttgccggcctgcggctggtggggcggtccacacccggggcctggattttgcgtgcgatatatacatctgggcacctcttgccggcacctgcggagtgctgcttctctcactcgttattacgctgtactgc

SEQ ID NO: 2736 - DNA, 2157 bp, synthetic construct
  misc_feature 1..2157: note = Synthetic
  source 1..2157: mol_type = other DNA
atggccttaccagtgaccgccttgctcctgccgctggccttgctgctccacgccgccaggccgcaggtgcagctggtgcagtctggggctgaggtgaagaagcctggggcctcagtgaaggtctcctgcaaggcttctggatacaccttcaccagttatgatatcaactgggtgcgacaggccactggacaagggcttgagtggatgggatggatgatccctaacagtggtgacacaggctctgcacagaagttccagggcagagtcaccatgaccaggaacacctccataggcacagcctacatggagctgagcagcctgagatctgaggacacggccgtttattactgtgcgagaggcggatattgtaatagtaccagttgctactactactacatggacgtctggggcaaagggaccacggtcaccgtctcctcaggcggcggtggatctggaggcggaggctctggaggcggcggctccgacatccagatgacccagtctccatcctcactgtctgcatctgtaggagacagagtcaccatcacttgtcgggcgagtcagggtattagcagctggttagcctggtatcagcagaaaccagagaaagcccctaagtccctgatctatgctgcatccagtttacagggtggggtcccatcaaggttcagcggcagtggatctgggacagatttcactctcaccatcagcagcctgcagcctgaagattttgcaacttattactgccaacagtatgatagttacccgtacacttttggccaggggaccaagctggagatcaaagcggccgcaaccacgacgccagcgccgcggccaccaacaccggcgcccaccatcgcgtcgcagcccctgtccctgcgcccagaggcgtgccggccagcggcggggggcgcagtgcacacgagggggctggacttcgcctgtgatatctacatctgggcgcccttggccgggacttgtggggtccttctcctgtcactggttatcaccctttactgcaaacggggcagaaagaaactcctgtatatattcaaacaaccatttatgagaccagtacaaactactcaagaggaagatggctgtagctgccgatttccagaagaagaagaaggaggatgtgaactgagagtgaagttcagcaggagcgcagacgcccccgcgtaccagcagggccagaaccagctctataacgagctcaatctaggacgaagagaggagtacgatgttttggacaagagacgtggccgggaccctgagatggggggaaagccgagaaggaagaaccctcaggaaggcctgtacaatgaactgcagaaagataagatggcggaggcctacagtgagattgggatgaaaggcgagcgccggaggggcaaggggcacgatggcctttaccagggtctcagtacagccaccaaggacacctacgacgcccttcacatgcaggccctgccccctcgcggctctggcgagggaaggggttccctgcttacttgcggcgacgtcgaagagaatcccggtccgatggccctcccagtaactgccctccttttgcccctcgcactccttcttcatgccgctcgccccaactgggtcaacgtgattagcgatttgaagaaaatcgaggaccttatacagtctatgcatattgacgctacactgtatactgagagtgatgtacacccgtcctgtaaggtaacggccatgaaatgctttcttctggagctccaggtcatcagcttggagtctggggacgcaagcatccacgatacggttgaaaacctcatcatccttgcgaacaactctctctcatctaatggaaacgttacagagagtgggtgtaaggagtgcgaagagttggaagaaaaaaacatcaaagaatttcttcaatccttcgttcacatagtgcaaatgttcattaacacgtccactaccacacccgccccgaggccacctacgccggcaccgactatcgccagtcaacccctctctctgcgccccgaggcttgccggcctgcggctggtggggcggtccacacccggggcctggattttgcgtgcgatatatacatctgggcacctcttgccggcacctgcggagtgctgcttctctcactcgttattacgctgtactgc

SEQ ID NO: 2737 - DNA, 2160 bp, synthetic construct
  misc_feature 1..2160: note = Synthetic
  source 1..2160: mol_type = other DNA
atggccttaccagtgaccgccttgctcctgccgctggccttgctgctccacgccgccaggccgcaggtgcagctggtgcagtctggggctgaggtgaagaagcctggggcctcagtgaaggtctcctgcaaggcttctggatacaccttcaccagttatgatatcaactgggtgcgacaggccactggacaagggcttgagtggatgggatggatgaaccctaatagtggtaacacagtctatgcacagaagttccagggcagagtcaccatgaccaggaacacctccataagcacagcctacatggagctgagcagcctgagatctgaggacacggccgtgtattactgtgcgagaggaggcgatttttggagtggttaccatgactactactactacatggacgtctggggcaaagggaccacggtcaccgtctcctcaggcggcggtggatctggaggcggaggctctggaggcggcggctccgacatccaggtgacccagtctccaaccttcctgtctgcatctgtaggagacagagtcaccatcacttgccgggccagtcagggcattagcagttatttagcctggtatcagcaaaaaccagggaaagcccctaagctcctgatctatggtgcatccactttgcaaagtggggtcccatcaaggttcagcggcagtggatctgggacagaattcactctcacaatcagcagcctgcagcctgaagattttgcaacttattactgtcaacagcttaatagttacccgtggacgttcggccaagggaccaaggtggaaatcaaagcggccgcaaccacgacgccagcgccgcggccaccaacaccggcgcccaccatcgcgtcgcagcccctgtccctgcgcccagaggcgtgccggccagcggcggggggcgcagtgcacacgagggggctggacttcgcctgtgatatctacatctgggcgcccttggccgggacttgtggggtccttctcctgtcactggttatcaccctttactgcaaacggggcagaaagaaactcctgtatatattcaaacaaccatttatgagaccagtacaaactactcaagaggaagatggctgtagctgccgatttccagaagaagaagaaggaggatgtgaactgagagtgaagttcagcaggagcgcagacgcccccgcgtaccagcagggccagaaccagctctataacgagctcaatctaggacgaagagaggagtacgatgttttggacaagagacgtggccgggaccctgagatggggggaaagccgagaaggaagaaccctcaggaaggcctgtacaatgaactgcagaaagataagatggcggaggcctacagtgagattgggatgaaaggcgagcgccggaggggcaaggggcacgatggcctttaccagggtctcagtacagccaccaaggacacctacgacgcccttcacatgcaggccctgccccctcgcggctctggcgagggaaggggttccctgcttacttgcggcgacgtcgaagagaatcccggtccgatggccctcccagtaactgccctccttttgcccctcgcactccttcttcatgccgctcgccccaactgggtcaacgtgattagcgatttgaagaaaatcgaggaccttatacagtctatgcatattgacgctacactgtatactgagagtgatgtacacccgtcctgtaaggtaacggccatgaaatgctttcttctggagctccaggtcatcagcttggagtctggggacgcaagcatccacgatacggttgaaaacctcatcatccttgcgaacaactctctctcatctaatggaaacgttacagagagtgggtgtaaggagtgcgaagagttggaagaaaaaaacatcaaagaatttcttcaatccttcgttcacatagtgcaaatgttcattaacacgtccactaccacacccgccccgaggccacctacgccggcaccgactatcgccagtcaacccctctctctgcgccccgaggcttgccggcctgcggctggtggggcggtccacacccggggcctggattttgcgtgcgatatatacatctgggcacctcttgccggcacctgcggagtgctgcttctctcactcgttattacgctgtactgc

SEQ ID NO: 2738 - DNA, 2154 bp, synthetic construct
  misc_feature 1..2154: note = Synthetic
  source 1..2154: mol_type = other DNA
atggccttaccagtgaccgccttgctcctgccgctggccttgctgctccacgccgccaggccgcaggtgcagctgcaggagtcgggcccaggactggtgaagccttcggagaccctgtccctcacctgcactgtctctggtggctccatcagtagttactactggagctggatccggcagcccgccgggaagggactggagtggattgggcgtatctataccagtgggagcaccaactacaacccctccctcaagagtcgagtcaccatgtcagtagacacgtccaagaaccagttctccctgaagctgagctctgtgaccgccgcggacacggccgtgtattactgtgcgagagaggagtaccagctgctaccggccctctactactactactacatggacgtctggggcaaagggaccacggtcaccgtctcctcaggcggcggtggatctggaggcggaggctctggaggcggcggctcctcctatgagctgactcagccaccctcagtgtccgtgtccccaggacagacagccagcatcacctgctctggagataaattgggggataaatatgcttgctggtatcagcagaagccaggccagtcccctgtgctggtcatctatcaagatagcaagcggccctcagggatccctgagcgattctctggctccaactctgggaacacagccactctgaccatcagcgggacccaggctatggatgaggctgactattactgtcaggcgtgggacagcagcactgctgtgttcggaggaggcacccagctgaccgccctcgcggccgcaaccacgacgccagcgccgcggccaccaacaccggcgcccaccatcgcgtcgcagcccctgtccctgcgcccagaggcgtgccggccagcggcggggggcgcagtgcacacgagggggctggacttcgcctgtgatatctacatctgggcgcccttggccgggacttgtggggtccttctcctgtcactggttatcaccctttactgcaaacggggcagaaagaaactcctgtatatattcaaacaaccatttatgagaccagtacaaactactcaagaggaagatggctgtagctgccgatttccagaagaagaagaaggaggatgtgaactgagagtgaagttcagcaggagcgcagacgcccccgcgtaccagcagggccagaaccagctctataacgagctcaatctaggacgaagagaggagtacgatgttttggacaagagacgtggccgggaccctgagatggggggaaagccgagaaggaagaaccctcaggaaggcctgtacaatgaactgcagaaagataagatggcggaggcctacagtgagattgggatgaaaggcgagcgccggaggggcaaggggcacgatggcctttaccagggtctcagtacagccaccaaggacacctacgacgcccttcacatgcaggccctgccccctcgcggctctggcgagggaaggggttccctgcttacttgcggcgacgtcgaagagaatcccggtccgatggccctcccagtaactgccctccttttgcccctcgcactccttcttcatgccgctcgccccaactgggtcaacgtgattagcgatttgaagaaaatcgaggaccttatacagtctatgcatattgacgctacactgtatactgagagtgatgtacacccgtcctgtaaggtaacggccatgaaatgctttcttctggagctccaggtcatcagcttggagtctggggacgcaagcatccacgatacggttgaaaacctcatcatccttgcgaacaactctctctcatctaatggaaacgttacagagagtgggtgtaaggagtgcgaagagttggaagaaaaaaacatcaaagaatttcttcaatccttcgttcacatagtgcaaatgttcattaacacgtccactaccacacccgccccgaggccacctacgccggcaccgactatcgccagtcaacccctctctctgcgccccgaggcttgccggcctgcggctggtggggcggtccacacccggggcctggattttgcgtgcgatatatacatctgggcacctcttgccggcacctgcggagtgctgcttctctcactcgttattacgctgtactgc

SEQ ID NO: 2739 - DNA, 2157 bp, synthetic construct
  misc_feature 1..2157: note = Synthetic
  source 1..2157: mol_type = other DNA
atggccttaccagtgaccgccttgctcctgccgctggccttgctgctccacgccgccaggccgcaggtgcagctggtggagtctgggggaggcgtggtccagcctgggaggtccctgagactctcctgtgcagcaactggattcaccttcagtagctatggcatgcactgggtccgccaggctccaggcaaggggctggagtggatggtagttatatggtctgatggacataataaatactatgcagactccgtgaagggccgattcaccatctccagagacaattccaagaacacgctgtatctgcaaatgaacagcctgagagccgaggacacggctgtgtattactgtgcgagggcacaactggaacgacggtacttctactacatggacgtctggggcaaagggaccacggtcaccgtctcctcaggcggcggtggatctggaggcggaggctctggaggcggcggctcccagactgtagtgacccaggaaccatcgttctcagtgtcccctggagggacagtcacactcacttgtggcttgacctctggctcagtctctactagttactaccccaactggtaccagcagaccccaggccaggctccacgcacgctcatctacagcacaaatattcgctcttctggggtccctgatcgcttctctggctccatccttgggaacaaagctgccctcaccatcacgggggcccaggcagatgatgaatctgattattactgtgtgctgtatatgggtagtggcatgtttattttcggcagtggaaccaaggtcactgtcctagcggccgcaaccacgacgccagcgccgcggccaccaacaccggcgcccaccatcgcgtcgcagcccctgtccctgcgcccagaggcgtgccggccagcggcggggggcgcagtgcacacgagggggctggacttcgcctgtgatatctacatctgggcgcccttggccgggacttgtggggtccttctcctgtcactggttatcaccctttactgcaaacggggcagaaagaaactcctgtatatattcaaacaaccatttatgagaccagtacaaactactcaagaggaagatggctgtagctgccgatttccagaagaagaagaaggaggatgtgaactgagagtgaagttcagcaggagcgcagacgcccccgcgtaccagcagggccagaaccagctctataacgagctcaatctaggacgaagagaggagtacgatgttttggacaagagacgtggccgggaccctgagatggggggaaagccgagaaggaagaaccctcaggaaggcctgtacaatgaactgcagaaagataagatggcggaggcctacagtgagattgggatgaaaggcgagcgccggaggggcaaggggcacgatggcctttaccagggtctcagtacagccaccaaggacacctacgacgcccttcacatgcaggccctgccccctcgcggctctggcgagggaaggggttccctgcttacttgcggcgacgtcgaagagaatcccggtccgatggccctcccagtaactgccctccttttgcccctcgcactccttcttcatgccgctcgccccaactgggtcaacgtgattagcgatttgaagaaaatcgaggaccttatacagtctatgcatattgacgctacactgtatactgagagtgatgtacacccgtcctgtaaggtaacggccatgaaatgctttcttctggagctccaggtcatcagcttggagtctggggacgcaagcatccacgatacggttgaaaacctcatcatccttgcgaacaactctctctcatctaatggaaacgttacagagagtgggtgtaaggagtgcgaagagttggaagaaaaaaacatcaaagaatttcttcaatccttcgttcacatagtgcaaatgttcattaacacgtccactaccacacccgccccgaggccacctacgccggcaccgactatcgccagtcaacccctctctctgcgccccgaggcttgccggcctgcggctggtggggcggtccacacccggggcctggattttgcgtgcgatatatacatctgggcacctcttgccggcacctgcggagtgctgcttctctcactcgttattacgctgtactgc

SEQ ID NO: 2740 - DNA, 2157 bp, synthetic construct
  misc_feature 1..2157: note = Synthetic
  source 1..2157: mol_type = other DNA
atggccttaccagtgaccgccttgctcctgccgctggccttgctgctccacgccgccaggccgcaggtgcagctggtggagtctgggggaggcgtggtccagcctgggaggtccctgagactctcctgtgcagcgtctggattcaccttcactagttatgacatgcactgggtccgccaggctccaggcaaggggctggagtgggtgacaattatatggtttgatggaagtaataaatactatgcagactccgtgaagggccgattcaccatctccagagacaattccaagaacacgctgtatctgcaaatgaacagcctgagcgccgaggacacggctgtgtattactgtgcgagaggagacaactggaacgaccggtactactactactactacatggacgtctggggcaaagggaccacggtcaccgtctcctcaggcggcggtggatctggaggcggaggctctggaggcggcggctccgaaattgtgctgactcagtctccagactttcagtctgtgactccaaaggagaaagtcaccatcacctgccgggccagtcagagcattggtagtagcttacactggtaccagcagaaaccagatcagtctccaatgctcctcatcaagtttgcttcccagtccatctcaggggtcccctcgaggttcagtggcagtggatctgggacagatttcaccctcaccatcaatagcctggaagctgaagatgctgcagcgtattactgtcatcagagtagtagtttaccgtggacgttcggccaagggaccaaggtggaaatcaaagcggccgcaaccacgacgccagcgccgcggccaccaacaccggcgcccaccatcgcgtcgcagcccctgtccctgcgcccagaggcgtgccggccagcggcggggggcgcagtgcacacgagggggctggacttcgcctgtgatatctacatctgggcgcccttggccgggacttgtggggtccttctcctgtcactggttatcaccctttactgcaaacggggcagaaagaaactcctgtatatattcaaacaaccatttatgagaccagtacaaactactcaagaggaagatggctgtagctgccgatttccagaagaagaagaaggaggatgtgaactgagagtgaagttcagcaggagcgcagacgcccccgcgtaccagcagggccagaaccagctctataacgagctcaatctaggacgaagagaggagtacgatgttttggacaagagacgtggccgggaccctgagatggggggaaagccgagaaggaagaaccctcaggaaggcctgtacaatgaactgcagaaagataagatggcggaggcctacagtgagattgggatgaaaggcgagcgccggaggggcaaggggcacgatggcctttaccagggtctcagtacagccaccaaggacacctacgacgcccttcacatgcaggccctgccccctcgcggctctggcgagggaaggggttccctgcttacttgcggcgacgtcgaagagaatcccggtccgatggccctcccagtaactgccctccttttgcccctcgcactccttcttcatgccgctcgccccaactgggtcaacgtgattagcgatttgaagaaaatcgaggaccttatacagtctatgcatattgacgctacactgtatactgagagtgatgtacacccgtcctgtaaggtaacggccatgaaatgctttcttctggagctccaggtcatcagcttggagtctggggacgcaagcatccacgatacggttgaaaacctcatcatccttgcgaacaactctctctcatctaatggaaacgttacagagagtgggtgtaaggagtgcgaagagttggaagaaaaaaacatcaaagaatttcttcaatccttcgttcacatagtgcaaatgttcattaacacgtccactaccacacccgccccgaggccacctacgccggcaccgactatcgccagtcaacccctctctctgcgccccgaggcttgccggcctgcggctggtggggcggtccacacccggggcctggattttgcgtgcgatatatacatctgggcacctcttgccggcacctgcggagtgctgcttctctcactcgttattacgctgtactgc

SEQ ID NO: 2741 - DNA, 2172 bp, synthetic construct
  misc_feature 1..2172: note = Synthetic
  source 1..2172: mol_type = other DNA
atggccttaccagtgaccgccttgctcctgccgctggccttgctgctccacgccgccaggccgcaggttcagctggtgcagtctggagctgaggtgaagaagcctggggcctcagtgaaggtctcctgcaaggcttctggttacacctttaccagctatggtatcagctgggtgcgacaggcccctggacaagggcttgagtggatggggtggatcagcgcttacaatggtcacacagactatacacagaaactccagggcagagtcaccatgaccacagacacatccacgaccacagcctacatggaactgaggagcctgagctctgccgacacggccgtgtattactgtgtgagagaagtggtacttcccaccacggactactactacttttacatggacgtctggggcaaagggaccacggtcaccgtctcctcaggcggcggtggatctggaggcggaggctctggaggcggcggctccgatattgtgatgacccagcctccactctcctcgcctgtcacccttggacagccggcctccatctcctgcaggtctagtcaaagcctcgtacacagtgatggaaacacctacttgagttggcttcagcagaggccaggccagcctccaagactcctaatttataaggtttctaaccggttctctggggtcccagacagattcagtggcagtggggcagggacagatttcacactgaaaatcagcagggtggaagctgaggatgtcggggtttattactgcacgcaagctacacaatttcctcacacttttggccaggggaccaagctggagatcaaagcggccgcaaccacgacgccagcgccgcggccaccaacaccggcgcccaccatcgcgtcgcagcccctgtccctgcgcccagaggcgtgccggccagcggcggggggcgcagtgcacacgagggggctggacttcgcctgtgatatctacatctgggcgcccttggccgggacttgtggggtccttctcctgtcactggttatcaccctttactgcaaacggggcagaaagaaactcctgtatatattcaaacaaccatttatgagaccagtacaaactactcaagaggaagatggctgtagctgccgatttccagaagaagaagaaggaggatgtgaactgagagtgaagttcagcaggagcgcagacgcccccgcgtaccagcagggccagaaccagctctataacgagctcaatctaggacgaagagaggagtacgatgttttggacaagagacgtggccgggaccctgagatggggggaaagccgagaaggaagaaccctcaggaaggcctgtacaatgaactgcagaaagataagatggcggaggcctacagtgagattgggatgaaaggcgagcgccggaggggcaaggggcacgatggcctttaccagggtctcagtacagccaccaaggacacctacgacgcccttcacatgcaggccctgccccctcgcggctctggcgagggaaggggttccctgcttacttgcggcgacgtcgaagagaatcccggtccgatggccctcccagtaactgccctccttttgcccctcgcactccttcttcatgccgctcgccccaactgggtcaacgtgattagcgatttgaagaaaatcgaggaccttatacagtctatgcatattgacgctacactgtatactgagagtgatgtacacccgtcctgtaaggtaacggccatgaaatgctttcttctggagctccaggtcatcagcttggagtctggggacgcaagcatccacgatacggttgaaaacctcatcatccttgcgaacaactctctctcatctaatggaaacgttacagagagtgggtgtaaggagtgcgaagagttggaagaaaaaaacatcaaagaatttcttcaatccttcgttcacatagtgcaaatgttcattaacacgtccactaccacacccgccccgaggccacctacgccggcaccgactatcgccagtcaacccctctctctgcgccccgaggcttgccggcctgcggctggtggggcggtccacacccggggcctggattttgcgtgcgatatatacatctgggcacctcttgccggcacctgcggagtgctgcttctctcactcgttattacgctgtactgc

SEQ ID NO: 2742 - DNA, 2169 bp, synthetic construct
  misc_feature 1..2169: note = Synthetic
  source 1..2169: mol_type = other DNA
atggccttaccagtgaccgccttgctcctgccgctggccttgctgctccacgccgccaggccgcaggtccagctggtacagtctggggctgaggtgaagaagcctggggcctcagtgaaggtctcctgcaaggtttccggatacaccctcactgaattatccatgcactgggtgcgacaggctcctggaaaagggcttgagtggatgggaggttttgatcctgaagatggtgaaacaatctacgcacagaagttccagggcagagtcaccatgaccgaggacacatctacagacacagcctacatggagctgagcagcctgagatctgaggacacggccgtgtattactgtgcaacaggacgtattactatggttcggggagttattatcccctactactactactacatggacgtctggggcaaagggaccacggtcaccgtctcctcaggcggcggtggatctggaggcggaggctctggaggcggcggctccgacatccagatgacccagtctccatcctcactgtctgcatctgtaggagacagagtcaccatcacttgtcgggcgagtcagggtattagcagctggttagcctggtatcagcagaaaccagagaaagcccctaagtccctgatctatgctgcatccagtttgcaaagtggggtcccatcaaggttcagcggcagtggatctgggacagatttcactctcaccatcagcagcctgcagcctgaagattttgcaacttattactgccaacagtataatagttacccgtacacttttggccaggggaccaagctggagatcaaagcggccgcaaccacgacgccagcgccgcggccaccaacaccggcgcccaccatcgcgtcgcagcccctgtccctgcgcccagaggcgtgccggccagcggcggggggcgcagtgcacacgagggggctggacttcgcctgtgatatctacatctgggcgcccttggccgggacttgtggggtccttctcctgtcactggttatcaccctttactgcaaacggggcagaaagaaactcctgtatatattcaaacaaccatttatgagaccagtacaaactactcaagaggaagatggctgtagctgccgatttccagaagaagaagaaggaggatgtgaactgagagtgaagttcagcaggagcgcagacgcccccgcgtaccagcagggccagaaccagctctataacgagctcaatctaggacgaagagaggagtacgatgttttggacaagagacgtggccgggaccctgagatggggggaaagccgagaaggaagaaccctcaggaaggcctgtacaatgaactgcagaaagataagatggcggaggcctacagtgagattgggatgaaaggcgagcgccggaggggcaaggggcacgatggcctttaccagggtctcagtacagccaccaaggacacctacgacgcccttcacatgcaggccctgccccctcgcggctctggcgagggaaggggttccctgcttacttgcggcgacgtcgaagagaatcccggtccgatggccctcccagtaactgccctccttttgcccctcgcactccttcttcatgccgctcgccccaactgggtcaacgtgattagcgatttgaagaaaatcgaggaccttatacagtctatgcatattgacgctacactgtatactgagagtgatgtacacccgtcctgtaaggtaacggccatgaaatgctttcttctggagctccaggtcatcagcttggagtctggggacgcaagcatccacgatacggttgaaaacctcatcatccttgcgaacaactctctctcatctaatggaaacgttacagagagtgggtgtaaggagtgcgaagagttggaagaaaaaaacatcaaagaatttcttcaatccttcgttcacatagtgcaaatgttcattaacacgtccactaccacacccgccccgaggccacctacgccggcaccgactatcgccagtcaacccctctctctgcgccccgaggcttgccggcctgcggctggtggggcggtccacacccggggcctggattttgcgtgcgatatatacatctgggcacctcttgccggcacctgcggagtgctgcttctctcactcgttattacgctgtactgc

SEQ ID NO: 2743 - DNA, 2163 bp, synthetic construct
  misc_feature 1..2163: note = Synthetic
  source 1..2163: mol_type = other DNA
atggccttaccagtgaccgccttgctcctgccgctggccttgctgctccacgccgccaggccgcaggttcagctggtgcagtctggaactgaggtgaagaagcctggggcctcagtgaaggtctcctgcaaggcttctggttacacctttaccaactatggtatcggctgggtgcgacaggcccctggacaagggcttgagtggatgggatggatcatcgcttacaatggttacacaaagtatgcacagattctccagggcagagtcaccatgaccacagacacatccacgaacacagcttatatggaactgaggagcctgagatctgacgacacggccgtgtattactgtgcgagacagcagctcgggggggactaccactactacatggacgtctggggcaaagggaccacggtcaccgtctcctcaggcggcggtggatctggaggcggaggctctggaggcggcggctccgatattgtgatgacccagactccactctctctgtccgtcacccctggacagccggcctccatctcctgcaagtctagtaagagcctcctgcatagtgatggaaagacctatttgtattggtacctgcagaagccaggccagcctccacagctcctgatctatgaagtttccaaccggttctctggagtgccagataggttcagtggcagcgggtcagggacagatttcacactgaaaatcagccgggtggaggctgaggatgttggggtttattactgcatgcaaagtatacaatttccgtggacgttcggccaagggaccaaggtggaaatcaaggcggccgcaaccacgacgccagcgccgcggccaccaacaccggcgcccaccatcgcgtcgcagcccctgtccctgcgcccagaggcgtgccggccagcggcggggggcgcagtgcacacgagggggctggacttcgcctgtgatatctacatctgggcgcccttggccgggacttgtggggtccttctcctgtcactggttatcaccctttactgcaaacggggcagaaagaaactcctgtatatattcaaacaaccatttatgagaccagtacaaactactcaagaggaagatggctgtagctgccgatttccagaagaagaagaaggaggatgtgaactgagagtgaagttcagcaggagcgcagacgcccccgcgtaccagcagggccagaaccagctctataacgagctcaatctaggacgaagagaggagtacgatgttttggacaagagacgtggccgggaccctgagatggggggaaagccgagaaggaagaaccctcaggaaggcctgtacaatgaactgcagaaagataagatggcggaggcctacagtgagattgggatgaaaggcgagcgccggaggggcaaggggcacgatggcctttaccagggtctcagtacagccaccaaggacacctacgacgcccttcacatgcaggccctgccccctcgcggctctggcgagggaaggggttccctgcttacttgcggcgacgtcgaagagaatcccggtccgatggccctcccagtaactgccctccttttgcccctcgcactccttcttcatgccgctcgccccaactgggtcaacgtgattagcgatttgaagaaaatcgaggaccttatacagtctatgcatattgacgctacactgtatactgagagtgatgtacacccgtcctgtaaggtaacggccatgaaatgctttcttctggagctccaggtcatcagcttggagtctggggacgcaagcatccacgatacggttgaaaacctcatcatccttgcgaacaactctctctcatctaatggaaacgttacagagagtgggtgtaaggagtgcgaagagttggaagaaaaaaacatcaaagaatttcttcaatccttcgttcacatagtgcaaatgttcattaacacgtccactaccacacccgccccgaggccacctacgccggcaccgactatcgccagtcaacccctctctctgcgccccgaggcttgccggcctgcggctggtggggcggtccacacccggggcctggattttgcgtgcgatatatacatctgggcacctcttgccggcacctgcggagtgctgcttctctcactcgttattacgctgtactgc

SEQ ID NO: 2744 - DNA, 2163 bp, synthetic construct
  misc_feature 1..2163: note = Synthetic
  source 1..2163: mol_type = other DNA
atggccttaccagtgaccgccttgctcctgccgctggccttgctgctccacgccgccaggccgcaggttcagctggtgcagtctggaactgaggtgaagaagcctggggcctcagtgaaggtctcctgcaaggcttctggttacacctttaccaactatggtatcggctgggtgcgacaggcccctggacaagggcttgagtggatgggatggatcatcgcttacaatggttacacaaagtatgcacagattctccagggcagagtcaccatgaccacggacacatccacgaacacagcctatatggaactgaggagcctgagatctgacgacacggccgtgtattactgtgcgcgacagcagctcgggggggactaccactactacatggacgtctggggcaaagggaccacggtcaccgtctcttcaggcggcggtggatctggaggcggaggctctggaggcggcggctccgatattgtgatgacccagactccactctctctgtccgtcacccctggacagccggcctccatctcctgcaagtctagtaagagcctcctgcatagtgatggaaagacctatttgtattggtacctgcagaagccaggccagcctccacagctcctgatctatgaagtttccacccggttctctggagtgccagataggttcagtggcagcgggtcagggacagatttcacactgaaaatcagccgggtggaggctgaggatgttggggtttattactgcatgcaaagtatacagtttccgtggacgttcggccaagggaccaaggtggaaatcaaagcggccgcaaccacgacgccagcgccgcggccaccaacaccggcgcccaccatcgcgtcgcagcccctgtccctgcgcccagaggcgtgccggccagcggcggggggcgcagtgcacacgagggggctggacttcgcctgtgatatctacatctgggcgcccttggccgggacttgtggggtccttctcctgtcactggttatcaccctttactgcaaacggggcagaaagaaactcctgtatatattcaaacaaccatttatgagaccagtacaaactactcaagaggaagatggctgtagctgccgatttccagaagaagaagaaggaggatgtgaactgagagtgaagttcagcaggagcgcagacgcccccgcgtaccagcagggccagaaccagctctataacgagctcaatctaggacgaagagaggagtacgatgttttggacaagagacgtggccgggaccctgagatggggggaaagccgagaaggaagaaccctcaggaaggcctgtacaatgaactgcagaaagataagatggcggaggcctacagtgagattgggatgaaaggcgagcgccggaggggcaaggggcacgatggcctttaccagggtctcagtacagccaccaaggacacctacgacgcccttcacatgcaggccctgccccctcgcggctctggcgagggaaggggttccctgcttacttgcggcgacgtcgaagagaatcccggtccgatggccctcccagtaactgccctccttttgcccctcgcactccttcttcatgccgctcgccccaactgggtcaacgtgattagcgatttgaagaaaatcgaggaccttatacagtctatgcatattgacgctacactgtatactgagagtgatgtacacccgtcctgtaaggtaacggccatgaaatgctttcttctggagctccaggtcatcagcttggagtctggggacgcaagcatccacgatacggttgaaaacctcatcatccttgcgaacaactctctctcatctaatggaaacgttacagagagtgggtgtaaggagtgcgaagagttggaagaaaaaaacatcaaagaatttcttcaatccttcgttcacatagtgcaaatgttcattaacacgtccactaccacacccgccccgaggccacctacgccggcaccgactatcgccagtcaacccctctctctgcgccccgaggcttgccggcctgcggctggtggggcggtccacacccggggcctggattttgcgtgcgatatatacatctgggcacctcttgccggcacctgcggagtgctgcttctctcactcgttattacgctgtactgc

SEQ ID NO: 2745 - DNA, 2157 bp, synthetic construct
  misc_feature 1..2157: note = Synthetic
  source 1..2157: mol_type = other DNA
atggccttaccagtgaccgccttgctcctgccgctggccttgctgctccacgccgccaggccgcaggtgcagctggtgcagtctgggactgaggtgaagaagcctggggcctcagtgaaggtctcctgtaagacttctggatacaccttcaccagttatgatatcaactgggtgcgacaggccactggacaagggcttgagtggatgggatggatgaaccctatcagtggtgacacaggctctgcacagaagttccagggcagagtcaccatgaccaggaacacctccataggcacagcctacatggagctgagcagcctgagatctgaggacacggccgtttattactgtgcgagaggcggatattgtagtagtaccagctgctactactactacatggacgtctggggcaaagggaccacggtcaccgtctcctcaggcggcggtggatctggaggcggaggctctggaggcggcggctccgacatccagatgacccagtctccatcctcactgtctgcctctgtaggagacagagtcaccatcacttgtcgggcgagtcagggtattagcaactggttagcctggtatcagcagaaaccagagaaagcccctaagtccctgatctatgctgcatccagtttgcaaggtggggtcccatcaagattcagcggcagtggatctgggacagatttcactctcaccatcagcagcctgcagcctgaagattttgcaacttattactgccaacagtatgatagttacccgtacacttttggccaggggaccaagctggagatcaaagcggccgcaaccacgacgccagcgccgcggccaccaacaccggcgcccaccatcgcgtcgcagcccctgtccctgcgcccagaggcgtgccggccagcggcggggggcgcagtgcacacgagggggctggacttcgcctgtgatatctacatctgggcgcccttggccgggacttgtggggtccttctcctgtcactggttatcaccctttactgcaaacggggcagaaagaaactcctgtatatattcaaacaaccatttatgagaccagtacaaactactcaagaggaagatggctgtagctgccgatttccagaagaagaagaaggaggatgtgaactgagagtgaagttcagcaggagcgcagacgcccccgcgtaccagcagggccagaaccagctctataacgagctcaatctaggacgaagagaggagtacgatgttttggacaagagacgtggccgggaccctgagatggggggaaagccgagaaggaagaaccctcaggaaggcctgtacaatgaactgcagaaagataagatggcggaggcctacagtgagattgggatgaaaggcgagcgccggaggggcaaggggcacgatggcctttaccagggtctcagtacagccaccaaggacacctacgacgcccttcacatgcaggccctgccccctcgcggctctggcgagggaaggggttccctgcttacttgcggcgacgtcgaagagaatcccggtccgatggccctcccagtaactgccctccttttgcccctcgcactccttcttcatgccgctcgccccaactgggtcaacgtgattagcgatttgaagaaaatcgaggaccttatacagtctatgcatattgacgctacactgtatactgagagtgatgtacacccgtcctgtaaggtaacggccatgaaatgctttcttctggagctccaggtcatcagcttggagtctggggacgcaagcatccacgatacggttgaaaacctcatcatccttgcgaacaactctctctcatctaatggaaacgttacagagagtgggtgtaaggagtgcgaagagttggaagaaaaaaacatcaaagaatttcttcaatccttcgttcacatagtgcaaatgttcattaacacgtccactaccacacccgccccgaggccacctacgccggcaccgactatcgccagtcaacccctctctctgcgccccgaggcttgccggcctgcggctggtggggcggtccacacccggggcctggattttgcgtgcgatatatacatctgggcacctcttgccggcacctgcggagtgctgcttctctcactcgttattacgctgtactgc

SEQ ID NO: 2746 - DNA, 2157 bp, synthetic construct
  misc_feature 1..2157: note = Synthetic
  source 1..2157: mol_type = other DNA
atggccttaccagtgaccgccttgctcctgccgctggccttgctgctccacgccgccaggccgcaggtgcagctggtgcagtctggggctgaggtgaagaagcctggggcctcagtgaaggtctcctgcaaggcttctggatacaccttcaccagttatgatatcaactgggtgcgacaggccactggacaagggcttgagtggatgggatggatgatccctaacagtggtgacacaggctctgcacagaagttccagggcagagtcaccatgaccaggaacacctccataagcacagcctacatggagctgagcagcctgagatctgaggacacggccgtttattactgtgcgagaggcggatattgtaatagtaccagttgctactactactacatggacgtctggggcaaagggaccacggtcaccgtctcctcaggcggcggtggatctggaggcggaggctctggaggcggcggctccgacatccagatgacccagtctccatcctcactgtctgcatctgtaggagacagagtcaccatcacttgtcgggcgagtcagggtattagcagctggttagcctggtatcagcagaaaccagagaaagcccctaagtccctgatctatgctgcatccagtttacaaggtggggtcccatcaaggttcagcggcagtggatctgggacagatttcactctcaccatcagcagcctgcagcctgaagattttgcaacttattactgccaacagtatgatagttacccgtacacttttggccaggggaccaagctggagatcaaagcggccgcaaccacgacgccagcgccgcggccaccaacaccggcgcccaccatcgcgtcgcagcccctgtccctgcgcccagaggcgtgccggccagcggcggggggcgcagtgcacacgagggggctggacttcgcctgtgatatctacatctgggcgcccttggccgggacttgtggggtccttctcctgtcactggttatcaccctttactgcaaacggggcagaaagaaactcctgtatatattcaaacaaccatttatgagaccagtacaaactactcaagaggaagatggctgtagctgccgatttccagaagaagaagaaggaggatgtgaactgagagtgaagttcagcaggagcgcagacgcccccgcgtaccagcagggccagaaccagctctataacgagctcaatctaggacgaagagaggagtacgatgttttggacaagagacgtggccgggaccctgagatggggggaaagccgagaaggaagaaccctcaggaaggcctgtacaatgaactgcagaaagataagatggcggaggcctacagtgagattgggatgaaaggcgagcgccggaggggcaaggggcacgatggcctttaccagggtctcagtacagccaccaaggacacctacgacgcccttcacatgcaggccctgccccctcgcggctctggcgagggaaggggttccctgcttacttgcggcgacgtcgaagagaatcccggtccgatggccctcccagtaactgccctccttttgcccctcgcactccttcttcatgccgctcgccccaactgggtcaacgtgattagcgatttgaagaaaatcgaggaccttatacagtctatgcatattgacgctacactgtatactgagagtgatgtacacccgtcctgtaaggtaacggccatgaaatgctttcttctggagctccaggtcatcagcttggagtctggggacgcaagcatccacgatacggttgaaaacctcatcatccttgcgaacaactctctctcatctaatggaaacgttacagagagtgggtgtaaggagtgcgaagagttggaagaaaaaaacatcaaagaatttcttcaatccttcgttcacatagtgcaaatgttcattaacacgtccactaccacacccgccccgaggccacctacgccggcaccgactatcgccagtcaacccctctctctgcgccccgaggcttgccggcctgcggctggtggggcggtccacacccggggcctggattttgcgtgcgatatatacatctgggcacctcttgccggcacctgcggagtgctgcttctctcactcgttattacgctgtactgc

SEQ ID NO: 2747 - DNA, 2160 bp, synthetic construct
  misc_feature 1..2160: note = Synthetic
  source 1..2160: mol_type = other DNA
atggccttaccagtgaccgccttgctcctgccgctggccttgctgctccacgccgccaggccggaggtgcagttgttggagtctgggggaggcttggtacaacctggggggtccctgagactctcctgtgcagcctctggattcacctttagcagctatgtcatgaactgggtccgccaggctccagggaaggggctggaatgggtctcatctgttagtggtagtggtaataactcattctacgcagactccgtgaagggccggttcaccatctccagagacaattccaagaacacgctgtatctgcaaatgaacagcctgagagccgaggacacggccgtatattactgtgcgagtcgtagttccagttatctctactactactactacatggacgtctggggcaaagggaccaccgtcaccgtctcctcaggcggcggtggatctggaggcggaggctctggaggcggcggctccgaaattgtgttgacgcagtctccaggcaccctgtctttgtctccaggggaaagagccaccctctcctgcagggccagtcagagtgttagcagcagctacttagcctggtaccagcagaaacctggccaggctcccaggctcctcatctatggtgcatccagcagggccactggcatcccagacaggttcagtgacagtgggtctgggacagacttcactctcaccatcagcagactggagcctgaagattttgcagtgtattactgtcagcactatggtagctcacctccgaggatcactttcggccctgggaccaaagtggatatcaaagcggccgcaaccacgacgccagcgccgcggccaccaacaccggcgcccaccatcgcgtcgcagcccctgtccctgcgcccagaggcgtgccggccagcggcggggggcgcagtgcacacgagggggctggacttcgcctgtgatatctacatctgggcgcccttggccgggacttgtggggtccttctcctgtcactggttatcaccctttactgcaaacggggcagaaagaaactcctgtatatattcaaacaaccatttatgagaccagtacaaactactcaagaggaagatggctgtagctgccgatttccagaagaagaagaaggaggatgtgaactgagagtgaagttcagcaggagcgcagacgcccccgcgtaccagcagggccagaaccagctctataacgagctcaatctaggacgaagagaggagtacgatgttttggacaagagacgtggccgggaccctgagatggggggaaagccgagaaggaagaaccctcaggaaggcctgtacaatgaactgcagaaagataagatggcggaggcctacagtgagattgggatgaaaggcgagcgccggaggggcaaggggcacgatggcctttaccagggtctcagtacagccaccaaggacacctacgacgcccttcacatgcaggccctgccccctcgcggctctggcgagggaaggggttccctgcttacttgcggcgacgtcgaagagaatcccggtccgatggccctcccagtaactgccctccttttgcccctcgcactccttcttcatgccgctcgccccaactgggtcaacgtgattagcgatttgaagaaaatcgaggaccttatacagtctatgcatattgacgctacactgtatactgagagtgatgtacacccgtcctgtaaggtaacggccatgaaatgctttcttctggagctccaggtcatcagcttggagtctggggacgcaagcatccacgatacggttgaaaacctcatcatccttgcgaacaactctctctcatctaatggaaacgttacagagagtgggtgtaaggagtgcgaagagttggaagaaaaaaacatcaaagaatttcttcaatccttcgttcacatagtgcaaatgttcattaacacgtccactaccacacccgccccgaggccacctacgccggcaccgactatcgccagtcaacccctctctctgcgccccgaggcttgccggcctgcggctggtggggcggtccacacccggggcctggattttgcgtgcgatatatacatctgggcacctcttgccggcacctgcggagtgctgcttctctcactcgttattacgctgtactgc

SEQ ID NO: 2748 - DNA, 2157 bp, synthetic construct
  misc_feature 1..2157: note = Synthetic
  source 1..2157: mol_type = other DNA
atggccttaccagtgaccgccttgctcctgccgctggccttgctgctccacgccgccaggccgcaagtgcagctggtggagagcggcggcggagtggtgcaacctggaagaagcctgcggctgagctgcgctgctagcggcttcaccttcagcagccacgacatgcactgggtgcggcaggcccctggcaagggcctggactgggtcgccgtgatctggagcgacggcaacaagaagtactacgtggacagcgccaagggcagattcaccatcagccgcgacaatagcaagaacaccgtgtacctgcagatgaacagcctgagagccgaggacaccgccatctactattgcgccagaggcgataattggaacgacgagcacagctactattactacatggacgtgtggggcaaaggcacaaccgtgaccgtgtcctccggcggcggcggttctggcggaggaggctccgggggcggcggaagcgagatcgtgctgacccagagccccgacttccagtctgtgacacctaaggaaaaggttacaattacctgtagagcttcccagaccatcggctcttctctgcactggtaccagcagaaacctgatcagtctccaaagctgctgatcaagcacgccagccagagcttctctggcgtccccagccggttttctggcagcggcagcggaacagattttacactgacagtgaactcactggaagccgaggatgccgccacctactactgccatcagagctccagcctcccttggaccttcggccagggcacgaaggtggaaatcaaagcggccgcaaccacgacgccagcgccgcggccaccaacaccggcgcccaccatcgcgtcgcagcccctgtccctgcgcccagaggcgtgccggccagcggcggggggcgcagtgcacacgagggggctggacttcgcctgtgatatctacatctgggcgcccttggccgggacttgtggggtccttctcctgtcactggttatcaccctttactgcaaacggggcagaaagaaactcctgtatatattcaaacaaccatttatgagaccagtacaaactactcaagaggaagatggctgtagctgccgatttccagaagaagaagaaggaggatgtgaactgagagtgaagttcagcaggagcgcagacgcccccgcgtaccagcagggccagaaccagctctataacgagctcaatctaggacgaagagaggagtacgatgttttggacaagagacgtggccgggaccctgagatggggggaaagccgagaaggaagaaccctcaggaaggcctgtacaatgaactgcagaaagataagatggcggaggcctacagtgagattgggatgaaaggcgagcgccggaggggcaaggggcacgatggcctttaccagggtctcagtacagccaccaaggacacctacgacgcccttcacatgcaggccctgccccctcgcggctctggcgagggaaggggttccctgcttacttgcggcgacgtcgaagagaatcccggtccgatggccctcccagtaactgccctccttttgcccctcgcactccttcttcatgccgctcgccccaactgggtcaacgtgattagcgatttgaagaaaatcgaggaccttatacagtctatgcatattgacgctacactgtatactgagagtgatgtacacccgtcctgtaaggtaacggccatgaaatgctttcttctggagctccaggtcatcagcttggagtctggggacgcaagcatccacgatacggttgaaaacctcatcatccttgcgaacaactctctctcatctaatggaaacgttacagagagtgggtgtaaggagtgcgaagagttggaagaaaaaaacatcaaagaatttcttcaatccttcgttcacatagtgcaaatgttcattaacacgtccactaccacacccgccccgaggccacctacgccggcaccgactatcgccagtcaacccctctctctgcgccccgaggcttgccggcctgcggctggtggggcggtccacacccggggcctggattttgcgtgcgatatatacatctgggcacctcttgccggcacctgcggagtgctgcttctctcactcgttattacgctgtactgc

SEQ ID NO: 2749 - DNA, 2157 bp, synthetic construct
  misc_feature 1..2157: note = Synthetic
  source 1..2157: mol_type = other DNA
atggccttaccagtgaccgccttgctcctgccgctggccttgctgctccacgccgccaggccgcaagtgcagctggtggaaagcggcggcggagtggtgcaacctggcagatctctgcggctgtcttgtgccgcctctggatttacattcagctctcatgatatgcactgggtgcggcaggcccctggcaaaggcctggactgggtcgccgtgatctggagcgacggcaacaacaagtactacgccgacagcgccaagggaagattcaccatcagccgggacaattctaaaaacaccgtgtacctgcagatgaacagcctgagagctgaggacaccgccatctactattgcgccagaggagataattggaacgacgagcacagctactactactatatggacgtgtggggcaagggcacaacagtgaccgtgtcctccggcggcggaggtagcggcggaggcggcagcggcggcggcggctccgagatcgtgctgacacagtccccagattttcagagcgtgacccccaaggaaaaggtgacaatcacctgcagagccagccagaccatcggcagcagcctgcactggtaccagcagaaacccgatcagtctcctaagctgctgatcaagcacgccagccagagcttcagcggcgttcccagcaggttcagcggaagcggcagcggcaccgacttcaccctgaccgtgaactctctcgaggccgaggacgccgctacatactactgccaccagagcagctccctgccttggaccttcggccagggcaccaaggtcgaaattaaggcggccgcaaccacgacgccagcgccgcggccaccaacaccggcgcccaccatcgcgtcgcagcccctgtccctgcgcccagaggcgtgccggccagcggcggggggcgcagtgcacacgagggggctggacttcgcctgtgatatctacatctgggcgcccttggccgggacttgtggggtccttctcctgtcactggttatcaccctttactgcaaacggggcagaaagaaactcctgtatatattcaaacaaccatttatgagaccagtacaaactactcaagaggaagatggctgtagctgccgatttccagaagaagaagaaggaggatgtgaactgagagtgaagttcagcaggagcgcagacgcccccgcgtaccagcagggccagaaccagctctataacgagctcaatctaggacgaagagaggagtacgatgttttggacaagagacgtggccgggaccctgagatggggggaaagccgagaaggaagaaccctcaggaaggcctgtacaatgaactgcagaaagataagatggcggaggcctacagtgagattgggatgaaaggcgagcgccggaggggcaaggggcacgatggcctttaccagggtctcagtacagccaccaaggacacctacgacgcccttcacatgcaggccctgccccctcgcggctctggcgagggaaggggttccctgcttacttgcggcgacgtcgaagagaatcccggtccgatggccctcccagtaactgccctccttttgcccctcgcactccttcttcatgccgctcgccccaactgggtcaacgtgattagcgatttgaagaaaatcgaggaccttatacagtctatgcatattgacgctacactgtatactgagagtgatgtacacccgtcctgtaaggtaacggccatgaaatgctttcttctggagctccaggtcatcagcttggagtctggggacgcaagcatccacgatacggttgaaaacctcatcatccttgcgaacaactctctctcatctaatggaaacgttacagagagtgggtgtaaggagtgcgaagagttggaagaaaaaaacatcaaagaatttcttcaatccttcgttcacatagtgcaaatgttcattaacacgtccactaccacacccgccccgaggccacctacgccggcaccgactatcgccagtcaacccctctctctgcgccccgaggcttgccggcctgcggctggtggggcggtccacacccggggcctggattttgcgtgcgatatatacatctgggcacctcttgccggcacctgcggagtgctgcttctctcactcgttattacgctgtactgc

SEQ ID NO: 2750 - DNA, 2154 bp, synthetic construct
  misc_feature 1..2154: note = Synthetic
  source 1..2154: mol_type = other DNA
atggccttaccagtgaccgccttgctcctgccgctggccttgctgctccacgccgccaggccgcaactgcagctggtgcagagcggagccgaggtgaagaagcctggcgctagcgttaaggtgtcctgcaaggcctccggctacacctttaccaactacggcatctcctggctgcgccaggccccaggccagggcctggagtggatgggctggatctccggatacaacgacaacacccactacgcccagaaattccagggtagagtgactatgaccaccgataccagcacaacaacagcctacatggaactgagaaacctgcggagcgacgacaccgccgtgtactactgcgcccgggacggcattgccgctagacctgtgtactactattacatggacgtgtggggcaagggcaccaccgtgacagtgtcttctggcggcggcggcagcggcggcggaggatctggcggcggaggatctgatatccagatgacccagagccccagcagcctgagcgccagcgtgggcgaccgggtcacaatcacctgcagagccagccagagcatcagcaattacctgaactggtaccaccagaagcccggcaaagcccctaagctgctgatctacgctgcttctagcctcgagagcggcgtgcctagcagattcagcggcagcggcagcggaacagatttcaccctgacaatcagctctctgcaacctgaggacttcgccacatactattgtcagcagtcctacagcaatcctctgaccttcggcggcggcacaaaggtggaatctaaggcggccgcaaccacgacgccagcgccgcggccaccaacaccggcgcccaccatcgcgtcgcagcccctgtccctgcgcccagaggcgtgccggccagcggcggggggcgcagtgcacacgagggggctggacttcgcctgtgatatctacatctgggcgcccttggccgggacttgtggggtccttctcctgtcactggttatcaccctttactgcaaacggggcagaaagaaactcctgtatatattcaaacaaccatttatgagaccagtacaaactactcaagaggaagatggctgtagctgccgatttccagaagaagaagaaggaggatgtgaactgagagtgaagttcagcaggagcgcagacgcccccgcgtaccagcagggccagaaccagctctataacgagctcaatctaggacgaagagaggagtacgatgttttggacaagagacgtggccgggaccctgagatggggggaaagccgagaaggaagaaccctcaggaaggcctgtacaatgaactgcagaaagataagatggcggaggcctacagtgagattgggatgaaaggcgagcgccggaggggcaaggggcacgatggcctttaccagggtctcagtacagccaccaaggacacctacgacgcccttcacatgcaggccctgccccctcgcggctctggcgagggaaggggttccctgcttacttgcggcgacgtcgaagagaatcccggtccgatggccctcccagtaactgccctccttttgcccctcgcactccttcttcatgccgctcgccccaactgggtcaacgtgattagcgatttgaagaaaatcgaggaccttatacagtctatgcatattgacgctacactgtatactgagagtgatgtacacccgtcctgtaaggtaacggccatgaaatgctttcttctggagctccaggtcatcagcttggagtctggggacgcaagcatccacgatacggttgaaaacctcatcatccttgcgaacaactctctctcatctaatggaaacgttacagagagtgggtgtaaggagtgcgaagagttggaagaaaaaaacatcaaagaatttcttcaatccttcgttcacatagtgcaaatgttcattaacacgtccactaccacacccgccccgaggccacctacgccggcaccgactatcgccagtcaacccctctctctgcgccccgaggcttgccggcctgcggctggtggggcggtccacacccggggcctggattttgcgtgcgatatatacatctgggcacctcttgccggcacctgcggagtgctgcttctctcactcgttattacgctgtactgc

SEQ ID NO: 2751 - DNA, 2157 bp, synthetic construct
  misc_feature 1..2157: note = Synthetic
  source 1..2157: mol_type = other DNA
atggccttaccagtgaccgccttgctcctgccgctggccttgctgctccacgccgccaggccgcaagtgcagctggtggagagcgggggaggtgtcgtgcagcctggaagaagcctcagactgtcttgtgtggccagcggctttaccttcagctctaatgacatctactgggtgcggcaggcccctggcaagggcctggaatgggtcgctgtgatctggtacgacggcagcaacaaatactacgccgattctgtgaagggcagattcaccatcagcagagataattctaagaacaccctgtacctgcagatgaacagcctgagagccgaggataccgccgtgtactattgcgccaggggcgacaactggaacgacgagcaccattaccactactacatggacgtgtggggcaaaggcaccaccgtgaccgtgtccagcggcggcggaggctctggaggaggcggcagcggcggcggcggctccgagattgttctgacccagagccctgatttccagagcgtgacccccaaggaaaaggtgacaatcacctgccgggccagccaaagcatcggctccagcctgcactggtatcagcagaagcccgaccagtccccaaagctgctgatcaaattcgcctctcagtcattcagcggcgtgccttcccggttcagcggaagcggcagcggcacagactttaccctgacaatccacagcctggaagccgaggacgccgctacatactactgccaccagagcggcagcctgccctggacattcggccagggcacgaaggtggagatcaaggcggccgcaaccacgacgccagcgccgcggccaccaacaccggcgcccaccatcgcgtcgcagcccctgtccctgcgcccagaggcgtgccggccagcggcggggggcgcagtgcacacgagggggctggacttcgcctgtgatatctacatctgggcgcccttggccgggacttgtggggtccttctcctgtcactggttatcaccctttactgcaaacggggcagaaagaaactcctgtatatattcaaacaaccatttatgagaccagtacaaactactcaagaggaagatggctgtagctgccgatttccagaagaagaagaaggaggatgtgaactgagagtgaagttcagcaggagcgcagacgcccccgcgtaccagcagggccagaaccagctctataacgagctcaatctaggacgaagagaggagtacgatgttttggacaagagacgtggccgggaccctgagatggggggaaagccgagaaggaagaaccctcaggaaggcctgtacaatgaactgcagaaagataagatggcggaggcctacagtgagattgggatgaaaggcgagcgccggaggggcaaggggcacgatggcctttaccagggtctcagtacagccaccaaggacacctacgacgcccttcacatgcaggccctgccccctcgcggctctggcgagggaaggggttccctgcttacttgcggcgacgtcgaagagaatcccggtccgatggccctcccagtaactgccctccttttgcccctcgcactccttcttcatgccgctcgccccaactgggtcaacgtgattagcgatttgaagaaaatcgaggaccttatacagtctatgcatattgacgctacactgtatactgagagtgatgtacacccgtcctgtaaggtaacggccatgaaatgctttcttctggagctccaggtcatcagcttggagtctggggacgcaagcatccacgatacggttgaaaacctcatcatccttgcgaacaactctctctcatctaatggaaacgttacagagagtgggtgtaaggagtgcgaagagttggaagaaaaaaacatcaaagaatttcttcaatccttcgttcacatagtgcaaatgttcattaacacgtccactaccacacccgccccgaggccacctacgccggcaccgactatcgccagtcaacccctctctctgcgccccgaggcttgccggcctgcggctggtggggcggtccacacccggggcctggattttgcgtgcgatatatacatctgggcacctcttgccggcacctgcggagtgctgcttctctcactcgttattacgctgtactgc

SEQ ID NO: 2752 - DNA, 2145 bp, synthetic construct
  misc_feature 1..2145: note = Synthetic
  source 1..2145: mol_type = other DNA
atggccttaccagtgaccgccttgctcctgccgctggccttgctgctccacgccgccaggccgcaagtgcagctggtggaaagcggcggcggtgttgtgcaacctggcagaagcctgcggctgtcatgcgccgccagcggcttcaccttcagctcttacggcatgcactgggtgcggcaggcccctggaaagggactggaatgggtcgccgtgatcagctacgacggctccaacaagtactacgccgacagcgtgaaaggcagattcaccatctctagggacaacagcaagaccaccctctacctgcagatgaacagcctgagagccgaggacaccgccgtgtactattgtgccagagatcactactactactacatggacgtgtggggcaagggcaccaccgtgaccgtgtcttctggcggcggaggcagcggcggaggcggcagcggcggcggcggctcccagaccgtggtgactcaggagcccagcttcagcgtcagccccggcggaacagtgaccctgacatgcggcctgagcagcggcagcgtgtccaccagctactatcctagctggtaccagcagacaccaggccaggctcctagaaccctgatctacagcaccaacatccggagcagcggcgtgcctgatagatttagcggctctatcctgggaaataaagccgctctgaccattacaggcgcccaggctgatgacgagagcgactactactgcgtgctgtacatgggctctgatatcgtggttttcggcggcggcacaaagctgacagtgctggcggccgcaaccacgacgccagcgccgcggccaccaacaccggcgcccaccatcgcgtcgcagcccctgtccctgcgcccagaggcgtgccggccagcggcggggggcgcagtgcacacgagggggctggacttcgcctgtgatatctacatctgggcgcccttggccgggacttgtggggtccttctcctgtcactggttatcaccctttactgcaaacggggcagaaagaaactcctgtatatattcaaacaaccatttatgagaccagtacaaactactcaagaggaagatggctgtagctgccgatttccagaagaagaagaaggaggatgtgaactgagagtgaagttcagcaggagcgcagacgcccccgcgtaccagcagggccagaaccagctctataacgagctcaatctaggacgaagagaggagtacgatgttttggacaagagacgtggccgggaccctgagatggggggaaagccgagaaggaagaaccctcaggaaggcctgtacaatgaactgcagaaagataagatggcggaggcctacagtgagattgggatgaaaggcgagcgccggaggggcaaggggcacgatggcctttaccagggtctcagtacagccaccaaggacacctacgacgcccttcacatgcaggccctgccccctcgcggctctggcgagggaaggggttccctgcttacttgcggcgacgtcgaagagaatcccggtccgatggccctcccagtaactgccctccttttgcccctcgcactccttcttcatgccgctcgccccaactgggtcaacgtgattagcgatttgaagaaaatcgaggaccttatacagtctatgcatattgacgctacactgtatactgagagtgatgtacacccgtcctgtaaggtaacggccatgaaatgctttcttctggagctccaggtcatcagcttggagtctggggacgcaagcatccacgatacggttgaaaacctcatcatccttgcgaacaactctctctcatctaatggaaacgttacagagagtgggtgtaaggagtgcgaagagttggaagaaaaaaacatcaaagaatttcttcaatccttcgttcacatagtgcaaatgttcattaacacgtccactaccacacccgccccgaggccacctacgccggcaccgactatcgccagtcaacccctctctctgcgccccgaggcttgccggcctgcggctggtggggcggtccacacccggggcctggattttgcgtgcgatatatacatctgggcacctcttgccggcacctgcggagtgctgcttctctcactcgttattacgctgtactgc

SEQ ID NO: 2753 - DNA, 2151 bp, synthetic construct
  misc_feature 1..2151: note = Synthetic
  source 1..2151: mol_type = other DNA
atggccttaccagtgaccgccttgctcctgccgctggccttgctgctccacgccgccaggccgcaactgcagctgcaggagagcggccctggactggtgaagcccagcgagacactgagcctgacatgcaccgtgtccggaggctctatcagcagcagcagctactactggggatggattagacagccccccggcaagggcctggaatggatcggcagcctgtactacagcggcagcacctactacaaccccagcctgaagtctagagtgaccatcagcgtggacaccagcaagaaccagttcagcctgaaactgagctctgtcacagccgccgataccgccgtgtactactgcgccgctgtgcagctggaaaggcggggctacttctacatggacgtgtggggcaaaggcaccaccgtgacagtgtctagcggcggcggcggaagcggcggcggtggcagtggcggcggcggctctgagatcgtgctgacacagtcccctgctaccctgagcctgagccctggcgagcgggccaccctgagctgcagagccagccagagcgtgtccagctactttgcctggtatcagcagaagcctggccaggccccacggctgctgatctacgacgcctctaatagagccacaggcatcccagctagattcagcggctccggctccggaaccgatttcaccctgaccatctctagcctcgagcctgaggacttcgccgtttactattgtcagcaaagaagcaactggcctctgacatttggcggaggcacaaaggtggaaatcaaggcggccgcaaccacgacgccagcgccgcggccaccaacaccggcgcccaccatcgcgtcgcagcccctgtccctgcgcccagaggcgtgccggccagcggcggggggcgcagtgcacacgagggggctggacttcgcctgtgatatctacatctgggcgcccttggccgggacttgtggggtccttctcctgtcactggttatcaccctttactgcaaacggggcagaaagaaactcctgtatatattcaaacaaccatttatgagaccagtacaaactactcaagaggaagatggctgtagctgccgatttccagaagaagaagaaggaggatgtgaactgagagtgaagttcagcaggagcgcagacgcccccgcgtaccagcagggccagaaccagctctataacgagctcaatctaggacgaagagaggagtacgatgttttggacaagagacgtggccgggaccctgagatggggggaaagccgagaaggaagaaccctcaggaaggcctgtacaatgaactgcagaaagataagatggcggaggcctacagtgagattgggatgaaaggcgagcgccggaggggcaaggggcacgatggcctttaccagggtctcagtacagccaccaaggacacctacgacgcccttcacatgcaggccctgccccctcgcggctctggcgagggaaggggttccctgcttacttgcggcgacgtcgaagagaatcccggtccgatggccctcccagtaactgccctccttttgcccctcgcactccttcttcatgccgctcgccccaactgggtcaacgtgattagcgatttgaagaaaatcgaggaccttatacagtctatgcatattgacgctacactgtatactgagagtgatgtacacccgtcctgtaaggtaacggccatgaaatgctttcttctggagctccaggtcatcagcttggagtctggggacgcaagcatccacgatacggttgaaaacctcatcatccttgcgaacaactctctctcatctaatggaaacgttacagagagtgggtgtaaggagtgcgaagagttggaagaaaaaaacatcaaagaatttcttcaatccttcgttcacatagtgcaaatgttcattaacacgtccactaccacacccgccccgaggccacctacgccggcaccgactatcgccagtcaacccctctctctgcgccccgaggcttgccggcctgcggctggtggggcggtccacacccggggcctggattttgcgtgcgatatatacatctgggcacctcttgccggcacctgcggagtgctgcttctctcactcgttattacgctgtactgc

SEQ ID NO: 2754 - DNA, 2157 bp, synthetic construct
  misc_feature 1..2157: note = Synthetic
  source 1..2157: mol_type = other DNA
atggccttaccagtgaccgccttgctcctgccgctggccttgctgctccacgccgccaggccgcaagtgcaactggtggaaagcggcggcggcgttgtgcagcctggcagaagcctgcggctgtcatgcgccgccagcggttttaccttctctaattacggcatgcactgggtgcggcaggctcccggcaaaggcctggaatggatggccgtgatctggtccgatggccacaacaagtactacgccgatagcgtgaaaggcagattcaccattagcagagataattctaagaacaccctgtacctgcagatgaacagcctgcgcgccgaggacaccgccgtgtactattgtgccagagcccagctggagcggagatacttctactatatggacgtgtggggcaagggcaccaccgtgacagtgtctagcggcggaggcggctctggcggcggcggctctggaggcggaggaagccagaccgtcgtgacccaggagcctagcttcagcgtgtccccaggcggaaccgtcacactgacatgcggcctcacaagcggcagcgtgtccaccagctactaccccaactggtaccagcagacacctggacaggcccctagaaccctgatctacagcaccaacatccggagcagcggagtgcccgacagattttctggcagcatcctgggcaacaaggccgctctgaccatcaccggcgctcaggccgacgacgagagcgactactactgcgtgctgtacatgggcagcggcatgttcatcttcggcagcggcacaaaggtgacagtgctggcggccgcaaccacgacgccagcgccgcggccaccaacaccggcgcccaccatcgcgtcgcagcccctgtccctgcgcccagaggcgtgccggccagcggcggggggcgcagtgcacacgagggggctggacttcgcctgtgatatctacatctgggcgcccttggccgggacttgtggggtccttctcctgtcactggttatcaccctttactgcaaacggggcagaaagaaactcctgtatatattcaaacaaccatttatgagaccagtacaaactactcaagaggaagatggctgtagctgccgatttccagaagaagaagaaggaggatgtgaactgagagtgaagttcagcaggagcgcagacgcccccgcgtaccagcagggccagaaccagctctataacgagctcaatctaggacgaagagaggagtacgatgttttggacaagagacgtggccgggaccctgagatggggggaaagccgagaaggaagaaccctcaggaaggcctgtacaatgaactgcagaaagataagatggcggaggcctacagtgagattgggatgaaaggcgagcgccggaggggcaaggggcacgatggcctttaccagggtctcagtacagccaccaaggacacctacgacgcccttcacatgcaggccctgccccctcgcggctctggcgagggaaggggttccctgcttacttgcggcgacgtcgaagagaatcccggtccgatggccctcccagtaactgccctccttttgcccctcgcactccttcttcatgccgctcgccccaactgggtcaacgtgattagcgatttgaagaaaatcgaggaccttatacagtctatgcatattgacgctacactgtatactgagagtgatgtacacccgtcctgtaaggtaacggccatgaaatgctttcttctggagctccaggtcatcagcttggagtctggggacgcaagcatccacgatacggttgaaaacctcatcatccttgcgaacaactctctctcatctaatggaaacgttacagagagtgggtgtaaggagtgcgaagagttggaagaaaaaaacatcaaagaatttcttcaatccttcgttcacatagtgcaaatgttcattaacacgtccactaccacacccgccccgaggccacctacgccggcaccgactatcgccagtcaacccctctctctgcgccccgaggcttgccggcctgcggctggtggggcggtccacacccggggcctggattttgcgtgcgatatatacatctgggcacctcttgccggcacctgcggagtgctgcttctctcactcgttattacgctgtactgc

SEQ ID NO: 2755 - DNA, 2157 bp, synthetic construct
  misc_feature 1..2157: note = Synthetic
  source 1..2157: mol_type = other DNA
atggccttaccagtgaccgccttgctcctgccgctggccttgctgctccacgccgccaggccgcaggttcagctggtgcagagcggagccgaggtgaaaaagcccggcgcaagcgtgaaggtgtcttgcaaggcctccggatataccttcaccagctacgatatcaactgggtgcggcaggccacaggccagggtctcgaatggatgggctggatgatccccaattctggcgacacaggcagcgcccaaaagttccagggcagagtgacaatgaccagaaacaccagcatcggaacagcctacatggaactgagctccctgagaagcgaggataccgccgtgtactattgtgccagaggcggctactgcaacagcacctcctgctactactactacatggacgtgtggggcaaaggcacaaccgtcaccgtgagctctggcggcggcggcagcggaggcggcggaagcggcggaggcggaagcgacatccagatgacacagagccctagcagcctgtctgcttccgtgggcgatagagtgacaatcacctgccgggcctcccagggcatcagctcctggctggcctggtaccagcagaagcctgagaaggcccctaagagcctgatctacgccgcttctagcctgcagggaggcgtgccaagtcggttcagcggcagcggcagcggcacagacttcaccctgaccatttcttctctgcaacctgaggacttcgccacctactactgtcagcaatacgacagctacccctacacctttggccagggcaccaagctggaaatcaaggcggccgcaaccacgacgccagcgccgcggccaccaacaccggcgcccaccatcgcgtcgcagcccctgtccctgcgcccagaggcgtgccggccagcggcggggggcgcagtgcacacgagggggctggacttcgcctgtgatatctacatctgggcgcccttggccgggacttgtggggtccttctcctgtcactggttatcaccctttactgcaaacggggcagaaagaaactcctgtatatattcaaacaaccatttatgagaccagtacaaactactcaagaggaagatggctgtagctgccgatttccagaagaagaagaaggaggatgtgaactgagagtgaagttcagcaggagcgcagacgcccccgcgtaccagcagggccagaaccagctctataacgagctcaatctaggacgaagagaggagtacgatgttttggacaagagacgtggccgggaccctgagatggggggaaagccgagaaggaagaaccctcaggaaggcctgtacaatgaactgcagaaagataagatggcggaggcctacagtgagattgggatgaaaggcgagcgccggaggggcaaggggcacgatggcctttaccagggtctcagtacagccaccaaggacacctacgacgcccttcacatgcaggccctgccccctcgcggctctggcgagggaaggggttccctgcttacttgcggcgacgtcgaagagaatcccggtccgatggccctcccagtaactgccctccttttgcccctcgcactccttcttcatgccgctcgccccaactgggtcaacgtgattagcgatttgaagaaaatcgaggaccttatacagtctatgcatattgacgctacactgtatactgagagtgatgtacacccgtcctgtaaggtaacggccatgaaatgctttcttctggagctccaggtcatcagcttggagtctggggacgcaagcatccacgatacggttgaaaacctcatcatccttgcgaacaactctctctcatctaatggaaacgttacagagagtgggtgtaaggagtgcgaagagttggaagaaaaaaacatcaaagaatttcttcaatccttcgttcacatagtgcaaatgttcattaacacgtccactaccacacccgccccgaggccacctacgccggcaccgactatcgccagtcaacccctctctctgcgccccgaggcttgccggcctgcggctggtggggcggtccacacccggggcctggattttgcgtgcgatatatacatctgggcacctcttgccggcacctgcggagtgctgcttctctcactcgttattacgctgtactgc

SEQ ID NO: 2756 - DNA, 2160 bp, synthetic construct
  misc_feature 1..2160: note = Synthetic
  source 1..2160: mol_type = other DNA
atggccttaccagtgaccgccttgctcctgccgctggccttgctgctccacgccgccaggccgcaggttcaactggtgcagagcggcgccgaggtgaagaagcctggcgccagcgtgaaagtgtcctgcaaggccagcggatacacgtttaccagctacgacatcaactgggtcagacaggccaccggccagggcctggaatggatgggatggatgaaccccaacagcggcaacaccgtgtacgcccagaaattccagggcagagtgaccatgacacggaacaccagcatcagcaccgcctacatggaactgagctctctgagatccgaggatacagccgtgtactactgcgccagaggcggagatttctggagcggctaccacgactactactactacatggacgtgtggggcaagggcaccaccgtgaccgtgtcttctggcggcggcggctccggcggaggcggcagcggaggaggcggctctgatatccaggtcacacagagccctacctttctgagcgcttctgtgggcgaccgggtgaccatcacatgccgggccagccagggtattagcagctacctggcttggtaccagcagaagcccggcaaagcccctaagctgctgatctacggcgcttctaccctgcagtccggcgtgcccagcagattcagcggcagcggaagcggaacagagttcaccctgacaatctccagcctccaacctgaggacttcgccacatactattgtcagcaactgaatagctatccttggacattcggccagggcaccaaggtggaaatcaaggcggccgcaaccacgacgccagcgccgcggccaccaacaccggcgcccaccatcgcgtcgcagcccctgtccctgcgcccagaggcgtgccggccagcggcggggggcgcagtgcacacgagggggctggacttcgcctgtgatatctacatctgggcgcccttggccgggacttgtggggtccttctcctgtcactggttatcaccctttactgcaaacggggcagaaagaaactcctgtatatattcaaacaaccatttatgagaccagtacaaactactcaagaggaagatggctgtagctgccgatttccagaagaagaagaaggaggatgtgaactgagagtgaagttcagcaggagcgcagacgcccccgcgtaccagcagggccagaaccagctctataacgagctcaatctaggacgaagagaggagtacgatgttttggacaagagacgtggccgggaccctgagatggggggaaagccgagaaggaagaaccctcaggaaggcctgtacaatgaactgcagaaagataagatggcggaggcctacagtgagattgggatgaaaggcgagcgccggaggggcaaggggcacgatggcctttaccagggtctcagtacagccaccaaggacacctacgacgcccttcacatgcaggccctgccccctcgcggctctggcgagggaaggggttccctgcttacttgcggcgacgtcgaagagaatcccggtccgatggccctcccagtaactgccctccttttgcccctcgcactccttcttcatgccgctcgccccaactgggtcaacgtgattagcgatttgaagaaaatcgaggaccttatacagtctatgcatattgacgctacactgtatactgagagtgatgtacacccgtcctgtaaggtaacggccatgaaatgctttcttctggagctccaggtcatcagcttggagtctggggacgcaagcatccacgatacggttgaaaacctcatcatccttgcgaacaactctctctcatctaatggaaacgttacagagagtgggtgtaaggagtgcgaagagttggaagaaaaaaacatcaaagaatttcttcaatccttcgttcacatagtgcaaatgttcattaacacgtccactaccacacccgccccgaggccacctacgccggcaccgactatcgccagtcaacccctctctctgcgccccgaggcttgccggcctgcggctggtggggcggtccacacccggggcctggattttgcgtgcgatatatacatctgggcacctcttgccggcacctgcggagtgctgcttctctcactcgttattacgctgtactgc

SEQ ID NO: 2757 - DNA, 2154 bp, synthetic construct
  misc_feature 1..2154: note = Synthetic
  source 1..2154: mol_type = other DNA
atggccttaccagtgaccgccttgctcctgccgctggccttgctgctccacgccgccaggccgcaagtgcagctgcaggagagcggtcctggcctggttaagcctagcgagacactgtctctgacttgcaccgtgtccggcggatctatcagcagctactactggtcctggatcagacagcccgccggcaaaggcctggaatggattggaagaatctacaccagcggcagcaccaactacaaccccagcctgaagtccagagtgacaatgagcgtggacacatctaagaaccagtttagcctgaaactgagcagcgtgaccgccgccgatacagctgtgtactattgtgcccgggaagaataccagctgctgcctgccctgtactactattactacatggacgtgtggggcaagggcaccaccgtgaccgtgtccagcggaggcggcggcagcggaggcggcggctctggcggcggaggcagcagctacgagctgacccagcctccatctgtctccgtgtctccaggccaaacagccagcatcacctgcagcggagataagctgggcgacaagtacgcctgctggtaccagcagaagcccggccagagccctgtgctggtgatctaccaggacagcaagcggcctagcggcatccccgagagattcagcggctccaacagcggcaataccgctacactgacaatcagcggcacacaggccatggatgaggccgactactactgccaggcctgggacagctctaccgccgtgttcggcggcggaacccagctcaccgccctggcggccgcaaccacgacgccagcgccgcggccaccaacaccggcgcccaccatcgcgtcgcagcccctgtccctgcgcccagaggcgtgccggccagcggcggggggcgcagtgcacacgagggggctggacttcgcctgtgatatctacatctgggcgcccttggccgggacttgtggggtccttctcctgtcactggttatcaccctttactgcaaacggggcagaaagaaactcctgtatatattcaaacaaccatttatgagaccagtacaaactactcaagaggaagatggctgtagctgccgatttccagaagaagaagaaggaggatgtgaactgagagtgaagttcagcaggagcgcagacgcccccgcgtaccagcagggccagaaccagctctataacgagctcaatctaggacgaagagaggagtacgatgttttggacaagagacgtggccgggaccctgagatggggggaaagccgagaaggaagaaccctcaggaaggcctgtacaatgaactgcagaaagataagatggcggaggcctacagtgagattgggatgaaaggcgagcgccggaggggcaaggggcacgatggcctttaccagggtctcagtacagccaccaaggacacctacgacgcccttcacatgcaggccctgccccctcgcggctctggcgagggaaggggttccctgcttacttgcggcgacgtcgaagagaatcccggtccgatggccctcccagtaactgccctccttttgcccctcgcactccttcttcatgccgctcgccccaactgggtcaacgtgattagcgatttgaagaaaatcgaggaccttatacagtctatgcatattgacgctacactgtatactgagagtgatgtacacccgtcctgtaaggtaacggccatgaaatgctttcttctggagctccaggtcatcagcttggagtctggggacgcaagcatccacgatacggttgaaaacctcatcatccttgcgaacaactctctctcatctaatggaaacgttacagagagtgggtgtaaggagtgcgaagagttggaagaaaaaaacatcaaagaatttcttcaatccttcgttcacatagtgcaaatgttcattaacacgtccactaccacacccgccccgaggccacctacgccggcaccgactatcgccagtcaacccctctctctgcgccccgaggcttgccggcctgcggctggtggggcggtccacacccggggcctggattttgcgtgcgatatatacatctgggcacctcttgccggcacctgcggagtgctgcttctctcactcgttattacgctgtactgc

SEQ ID NO: 2758 - DNA, 2157 bp, synthetic construct
  misc_feature 1..2157: note = Synthetic
  source 1..2157: mol_type = other DNA
atggccttaccagtgaccgccttgctcctgccgctggccttgctgctccacgccgccaggccgcaagtgcagctggtggaatctggcggcggcgtggtgcagcctggtaggagcctgcggctgtcatgcgccgccacaggcttcaccttcagcagctacggcatgcactgggtcagacaggcccctggcaagggactggagtggatggtggtgatctggtccgatggccacaataaatactacgccgacagcgtgaagggcagatttaccattagccgggacaacagcaagaacaccctgtacctgcagatgaacagcctgagagctgaagataccgccgtgtactactgcgccagagcccagctcgagcggagatacttctactatatggacgtgtggggcaaaggcacaacagtgaccgtttcttctggcggcggcggatctggcggaggcggctccggaggcggcggcagccagaccgtggtcacccaggagcctagctttagcgtgtccccaggaggtacagtgaccctgacatgcggcctgactagcggatctgtgtccaccagctactaccccaactggtaccagcagacacctggccaggcccctagaaccctgatctacagcaccaatatccggagctccggcgtgcccgacagattcagcggaagcatcctgggcaacaaggccgctctgaccatcaccggcgcccaagctgatgacgagagcgactactattgtgtgctgtacatgggcagcggcatgttcatcttcggctctggcaccaaggtgaccgtgctggcggccgcaaccacgacgccagcgccgcggccaccaacaccggcgcccaccatcgcgtcgcagcccctgtccctgcgcccagaggcgtgccggccagcggcggggggcgcagtgcacacgagggggctggacttcgcctgtgatatctacatctgggcgcccttggccgggacttgtggggtccttctcctgtcactggttatcaccctttactgcaaacggggcagaaagaaactcctgtatatattcaaacaaccatttatgagaccagtacaaactactcaagaggaagatggctgtagctgccgatttccagaagaagaagaaggaggatgtgaactgagagtgaagttcagcaggagcgcagacgcccccgcgtaccagcagggccagaaccagctctataacgagctcaatctaggacgaagagaggagtacgatgttttggacaagagacgtggccgggaccctgagatggggggaaagccgagaaggaagaaccctcaggaaggcctgtacaatgaactgcagaaagataagatggcggaggcctacagtgagattgggatgaaaggcgagcgccggaggggcaaggggcacgatggcctttaccagggtctcagtacagccaccaaggacacctacgacgcccttcacatgcaggccctgccccctcgcggctctggcgagggaaggggttccctgcttacttgcggcgacgtcgaagagaatcccggtccgatggccctcccagtaactgccctccttttgcccctcgcactccttcttcatgccgctcgccccaactgggtcaacgtgattagcgatttgaagaaaatcgaggaccttatacagtctatgcatattgacgctacactgtatactgagagtgatgtacacccgtcctgtaaggtaacggccatgaaatgctttcttctggagctccaggtcatcagcttggagtctggggacgcaagcatccacgatacggttgaaaacctcatcatccttgcgaacaactctctctcatctaatggaaacgttacagagagtgggtgtaaggagtgcgaagagttggaagaaaaaaacatcaaagaatttcttcaatccttcgttcacatagtgcaaatgttcattaacacgtccactaccacacccgccccgaggccacctacgccggcaccgactatcgccagtcaacccctctctctgcgccccgaggcttgccggcctgcggctggtggggcggtccacacccggggcctggattttgcgtgcgatatatacatctgggcacctcttgccggcacctgcggagtgctgcttctctcactcgttattacgctgtactgc

SEQ ID NO: 2759 - DNA, 2157 bp, synthetic construct
  misc_feature 1..2157: note = Synthetic
  source 1..2157: mol_type = other DNA
atggccttaccagtgaccgccttgctcctgccgctggccttgctgctccacgccgccaggccgcaagtgcagctggtcgagagcggaggcggcgttgtgcaacctggaaggagcctgcggctgagctgcgccgcttctggcttcacctttactagctacgacatgcactgggtgcggcaggcccctggcaagggcctggaatgggtcaccatcatctggttcgacggcagcaacaagtactacgccgatagcgtgaagggcagattcaccatcagcagagataatagcaagaataccctgtacctgcagatgaactctctctccgccgaggacaccgccgtgtactactgcgccagaggcgacaactggaacgacagatactattattactactacatggacgtgtggggcaaaggcaccaccgtgacagtgtccagcggcggcggaggaagcggcggcggtggctctggaggcggaggcagcgagatcgtgctgacccagtctccagatttccagtccgtgacccctaaggaaaaggtgaccatcacatgcagagccagccagtccatcggctctagcctgcactggtaccagcagaagcccgaccagtctcctatgctgctgatcaaattcgcctctcagagcatcagcggcgtgcccagccggttcagcggcagcggctccggcaccgacttcacactgacaatcaacagtctggaggccgaggatgccgctgcttactactgtcaccagagcagcagcctgccttggacatttggccagggcaccaaggtggaaattaaggcggccgcaaccacgacgccagcgccgcggccaccaacaccggcgcccaccatcgcgtcgcagcccctgtccctgcgcccagaggcgtgccggccagcggcggggggcgcagtgcacacgagggggctggacttcgcctgtgatatctacatctgggcgcccttggccgggacttgtggggtccttctcctgtcactggttatcaccctttactgcaaacggggcagaaagaaactcctgtatatattcaaacaaccatttatgagaccagtacaaactactcaagaggaagatggctgtagctgccgatttccagaagaagaagaaggaggatgtgaactgagagtgaagttcagcaggagcgcagacgcccccgcgtaccagcagggccagaaccagctctataacgagctcaatctaggacgaagagaggagtacgatgttttggacaagagacgtggccgggaccctgagatggggggaaagccgagaaggaagaaccctcaggaaggcctgtacaatgaactgcagaaagataagatggcggaggcctacagtgagattgggatgaaaggcgagcgccggaggggcaaggggcacgatggcctttaccagggtctcagtacagccaccaaggacacctacgacgcccttcacatgcaggccctgccccctcgcggctctggcgagggaaggggttccctgcttacttgcggcgacgtcgaagagaatcccggtccgatggccctcccagtaactgccctccttttgcccctcgcactccttcttcatgccgctcgccccaactgggtcaacgtgattagcgatttgaagaaaatcgaggaccttatacagtctatgcatattgacgctacactgtatactgagagtgatgtacacccgtcctgtaaggtaacggccatgaaatgctttcttctggagctccaggtcatcagcttggagtctggggacgcaagcatccacgatacggttgaaaacctcatcatccttgcgaacaactctctctcatctaatggaaacgttacagagagtgggtgtaaggagtgcgaagagttggaagaaaaaaacatcaaagaatttcttcaatccttcgttcacatagtgcaaatgttcattaacacgtccactaccacacccgccccgaggccacctacgccggcaccgactatcgccagtcaacccctctctctgcgccccgaggcttgccggcctgcggctggtggggcggtccacacccggggcctggattttgcgtgcgatatatacatctgggcacctcttgccggcacctgcggagtgctgcttctctcactcgttattacgctgtactgc

SEQ ID NO: 2760 - DNA, 2172 bp, synthetic construct
  misc_feature 1..2172: note = Synthetic
  source 1..2172: mol_type = other DNA
atggccttaccagtgaccgccttgctcctgccgctggccttgctgctccacgccgccaggccgcaagtgcagctggtccagagcggcgctgaggtgaagaaacctggcgcctctgtgaaagtgtcctgcaaggccagcggctacacctttaccagctacggcattagctgggtgcggcaggcccctggccagggtcttgagtggatgggctggatcagcgcctacaacggccacacagattatacacaaaagctgcagggcagagtgaccatgacaaccgataccagcaccaccacagcctacatggaactgagaagcctgagctctgccgacaccgccgtgtactactgcgtgcgggaagtggtgctgcctaccacagactactactacttctacatggacgtgtggggcaagggcaccacagtgacagtcagctccggcggaggaggcagcggcggcggaggcagcggcggaggcggcagcgacatcgtgatgacccagcctcctctgagcagccctgtgacactgggccagccagctagcatcagctgtagatcttctcagtccctggtgcacagcgacggcaatacctacctgtcttggctgcagcagcggcctggccagccccccagactgctgatctacaaggtgtccaaccgcttcagcggcgtgccagacagattcagcggctctggcgccggcaccgacttcaccctgaagatcagcagagtcgaggccgaagatgtgggagtttactattgcacccaagctacacagttcccccacacctttggccagggcaccaagctcgagatcaaggcggccgcaaccacgacgccagcgccgcggccaccaacaccggcgcccaccatcgcgtcgcagcccctgtccctgcgcccagaggcgtgccggccagcggcggggggcgcagtgcacacgagggggctggacttcgcctgtgatatctacatctgggcgcccttggccgggacttgtggggtccttctcctgtcactggttatcaccctttactgcaaacggggcagaaagaaactcctgtatatattcaaacaaccatttatgagaccagtacaaactactcaagaggaagatggctgtagctgccgatttccagaagaagaagaaggaggatgtgaactgagagtgaagttcagcaggagcgcagacgcccccgcgtaccagcagggccagaaccagctctataacgagctcaatctaggacgaagagaggagtacgatgttttggacaagagacgtggccgggaccctgagatggggggaaagccgagaaggaagaaccctcaggaaggcctgtacaatgaactgcagaaagataagatggcggaggcctacagtgagattgggatgaaaggcgagcgccggaggggcaaggggcacgatggcctttaccagggtctcagtacagccaccaaggacacctacgacgcccttcacatgcaggccctgccccctcgcggctctggcgagggaaggggttccctgcttacttgcggcgacgtcgaagagaatcccggtccgatggccctcccagtaactgccctccttttgcccctcgcactccttcttcatgccgctcgccccaactgggtcaacgtgattagcgatttgaagaaaatcgaggaccttatacagtctatgcatattgacgctacactgtatactgagagtgatgtacacccgtcctgtaaggtaacggccatgaaatgctttcttctggagctccaggtcatcagcttggagtctggggacgcaagcatccacgatacggttgaaaacctcatcatccttgcgaacaactctctctcatctaatggaaacgttacagagagtgggtgtaaggagtgcgaagagttggaagaaaaaaacatcaaagaatttcttcaatccttcgttcacatagtgcaaatgttcattaacacgtccactaccacacccgccccgaggccacctacgccggcaccgactatcgccagtcaacccctctctctgcgccccgaggcttgccggcctgcggctggtggggcggtccacacccggggcctggattttgcgtgcgatatatacatctgggcacctcttgccggcacctgcggagtgctgcttctctcactcgttattacgctgtactgc

SEQ ID NO: 2761 - DNA, 2169 bp, synthetic construct
  misc_feature 1..2169: note = Synthetic
  source 1..2169: mol_type = other DNA
atggccttaccagtgaccgccttgctcctgccgctggccttgctgctccacgccgccaggccgcaagttcagctggtgcagagcggagccgaggtgaaaaagcccggcgcttctgtgaaggtgtcctgcaaggtgtctggctacaccctgacagagctgagcatgcactgggtccggcaggcccctggcaaaggcctggaatggatgggaggcttcgaccccgaagacggggagacaatctacgcccagaaattccagggcagagtgacaatgaccgaggacaccagcaccgatacagcctacatggaactgtcttccctgcggagcgaggacaccgccgtgtactactgcgccaccggcagaatcaccatggtgcggggcgtcatcatcccctactactattactacatggacgtgtggggcaagggcaccaccgtgaccgtgtcctctggcggaggaggatctggcggcggcggaagcggcggaggcggcagtgatatccagatgacacagagcccaagcagcctgagcgccagcgtgggcgacagagtgaccatcacatgcagagccagccagggcatcagcagctggctggcttggtaccagcaaaagcctgagaaggcccctaagagcctcatctacgccgctagcagcctgcagtccggcgtgccaagcagattcagcggctctggctctggcacagacttcaccctgaccatttccagcctgcaacctgaggattttgccacatactattgtcagcagtacaacagctacccttacaccttcggccagggcaccaagctggaaatcaaggcggccgcaaccacgacgccagcgccgcggccaccaacaccggcgcccaccatcgcgtcgcagcccctgtccctgcgcccagaggcgtgccggccagcggcggggggcgcagtgcacacgagggggctggacttcgcctgtgatatctacatctgggcgcccttggccgggacttgtggggtccttctcctgtcactggttatcaccctttactgcaaacggggcagaaagaaactcctgtatatattcaaacaaccatttatgagaccagtacaaactactcaagaggaagatggctgtagctgccgatttccagaagaagaagaaggaggatgtgaactgagagtgaagttcagcaggagcgcagacgcccccgcgtaccagcagggccagaaccagctctataacgagctcaatctaggacgaagagaggagtacgatgttttggacaagagacgtggccgggaccctgagatggggggaaagccgagaaggaagaaccctcaggaaggcctgtacaatgaactgcagaaagataagatggcggaggcctacagtgagattgggatgaaaggcgagcgccggaggggcaaggggcacgatggcctttaccagggtctcagtacagccaccaaggacacctacgacgcccttcacatgcaggccctgccccctcgcggctctggcgagggaaggggttccctgcttacttgcggcgacgtcgaagagaatcccggtccgatggccctcccagtaactgccctccttttgcccctcgcactccttcttcatgccgctcgccccaactgggtcaacgtgattagcgatttgaagaaaatcgaggaccttatacagtctatgcatattgacgctacactgtatactgagagtgatgtacacccgtcctgtaaggtaacggccatgaaatgctttcttctggagctccaggtcatcagcttggagtctggggacgcaagcatccacgatacggttgaaaacctcatcatccttgcgaacaactctctctcatctaatggaaacgttacagagagtgggtgtaaggagtgcgaagagttggaagaaaaaaacatcaaagaatttcttcaatccttcgttcacatagtgcaaatgttcattaacacgtccactaccacacccgccccgaggccacctacgccggcaccgactatcgccagtcaacccctctctctgcgccccgaggcttgccggcctgcggctggtggggcggtccacacccggggcctggattttgcgtgcgatatatacatctgggcacctcttgccggcacctgcggagtgctgcttctctcactcgttattacgctgtactgc

SEQ ID NO: 2762 - DNA, 2163 bp, synthetic construct
  misc_feature 1..2163: note = Synthetic
  source 1..2163: mol_type = other DNA
atggccttaccagtgaccgccttgctcctgccgctggccttgctgctccacgccgccaggccgcaagtgcagctggtgcagagcggcaccgaggtgaagaagccaggcgcctctgtgaaagtgtcttgtaaagccagcggctacacctttaccaattacggcatcggctgggtgcggcaggcccctggacagggactggaatggatgggctggatcatcgcctacaacggctacacaaagtacgcccagatcctgcagggcagagtgacaatgaccaccgacaccagcaccaacaccgcttatatggaactgagaagcctgcggagcgacgacaccgccgtgtactattgcgccagacagcagctgggcggagattaccactactacatggacgtgtggggcaagggcaccaccgtcacagtgtccagcggcggtggcggatctggcggcggcggctctggaggcggcggctctgatatcgtgatgacccagacccccctgagcctgtccgtgaccccaggacaacctgccagcattagctgcaagagcagcaagtccctgctgcacagcgacggcaagacatacctgtactggtacctgcaaaagcccggccagcctcctcagctgctcatctacgaggtgtccaaccggttctctggcgtgcctgatagattcagcggaagcggcagcggaacagacttcacactgaagatcagcagagtcgaggccgaggacgtgggcgtttactactgcatgcagagcatccagttcccctggacattcggccagggcacaaaagtggaaatcaaggcggccgcaaccacgacgccagcgccgcggccaccaacaccggcgcccaccatcgcgtcgcagcccctgtccctgcgcccagaggcgtgccggccagcggcggggggcgcagtgcacacgagggggctggacttcgcctgtgatatctacatctgggcgcccttggccgggacttgtggggtccttctcctgtcactggttatcaccctttactgcaaacggggcagaaagaaactcctgtatatattcaaacaaccatttatgagaccagtacaaactactcaagaggaagatggctgtagctgccgatttccagaagaagaagaaggaggatgtgaactgagagtgaagttcagcaggagcgcagacgcccccgcgtaccagcagggccagaaccagctctataacgagctcaatctaggacgaagagaggagtacgatgttttggacaagagacgtggccgggaccctgagatggggggaaagccgagaaggaagaaccctcaggaaggcctgtacaatgaactgcagaaagataagatggcggaggcctacagtgagattgggatgaaaggcgagcgccggaggggcaaggggcacgatggcctttaccagggtctcagtacagccaccaaggacacctacgacgcccttcacatgcaggccctgccccctcgcggctctggcgagggaaggggttccctgcttacttgcggcgacgtcgaagagaatcccggtccgatggccctcccagtaactgccctccttttgcccctcgcactccttcttcatgccgctcgccccaactgggtcaacgtgattagcgatttgaagaaaatcgaggaccttatacagtctatgcatattgacgctacactgtatactgagagtgatgtacacccgtcctgtaaggtaacggccatgaaatgctttcttctggagctccaggtcatcagcttggagtctggggacgcaagcatccacgatacggttgaaaacctcatcatccttgcgaacaactctctctcatctaatggaaacgttacagagagtgggtgtaaggagtgcgaagagttggaagaaaaaaacatcaaagaatttcttcaatccttcgttcacatagtgcaaatgttcattaacacgtccactaccacacccgccccgaggccacctacgccggcaccgactatcgccagtcaacccctctctctgcgccccgaggcttgccggcctgcggctggtggggcggtccacacccggggcctggattttgcgtgcgatatatacatctgggcacctcttgccggcacctgcggagtgctgcttctctcactcgttattacgctgtactgc

SEQ ID NO: 2763 - DNA, 2163 bp, synthetic construct
  misc_feature 1..2163: note = Synthetic
  source 1..2163: mol_type = other DNA
atggccttaccagtgaccgccttgctcctgccgctggccttgctgctccacgccgccaggccgcaagtgcagctggtgcaaagcggcaccgaggtgaaaaagcccggcgcctctgtgaaggtctcctgcaaggccagcggatacacatttacaaattacggcatcggctgggtgcggcaggcccctggccagggcctggaatggatgggctggatcatcgcctacaacggctacaccaagtacgcccagatcctgcaaggcagagtcaccatgaccacagacaccagcaccaacaccgcttatatggaactgagaagcctgcggagcgacgatacagccgtgtactactgcgccagacagcagctcggcggcgactaccactactacatggacgtgtggggcaagggcaccaccgtgaccgtgtccagcggaggcggcggatctggcggaggcggcagcggcggcggcggctctgacatcgtgatgacccagacccctctgagcctgagcgtgacacctggacagcccgcttctattagctgtaaaagcagcaagtccctgctgcacagcgacggcaagacctacctgtactggtacctgcagaaacctggccagcctccacagctgctgatctacgaggtgtctacaagattcagcggagtgcctgatagattcagcggcagcggatctggaacagatttcaccctgaagatcagccgggttgaggccgaggacgtgggcgtgtactattgcatgcagtccatccagttcccctggaccttcggccagggcacaaaggtggaaatcaaggcggccgcaaccacgacgccagcgccgcggccaccaacaccggcgcccaccatcgcgtcgcagcccctgtccctgcgcccagaggcgtgccggccagcggcggggggcgcagtgcacacgagggggctggacttcgcctgtgatatctacatctgggcgcccttggccgggacttgtggggtccttctcctgtcactggttatcaccctttactgcaaacggggcagaaagaaactcctgtatatattcaaacaaccatttatgagaccagtacaaactactcaagaggaagatggctgtagctgccgatttccagaagaagaagaaggaggatgtgaactgagagtgaagttcagcaggagcgcagacgcccccgcgtaccagcagggccagaaccagctctataacgagctcaatctaggacgaagagaggagtacgatgttttggacaagagacgtggccgggaccctgagatggggggaaagccgagaaggaagaaccctcaggaaggcctgtacaatgaactgcagaaagataagatggcggaggcctacagtgagattgggatgaaaggcgagcgccggaggggcaaggggcacgatggcctttaccagggtctcagtacagccaccaaggacacctacgacgcccttcacatgcaggccctgccccctcgcggctctggcgagggaaggggttccctgcttacttgcggcgacgtcgaagagaatcccggtccgatggccctcccagtaactgccctccttttgcccctcgcactccttcttcatgccgctcgccccaactgggtcaacgtgattagcgatttgaagaaaatcgaggaccttatacagtctatgcatattgacgctacactgtatactgagagtgatgtacacccgtcctgtaaggtaacggccatgaaatgctttcttctggagctccaggtcatcagcttggagtctggggacgcaagcatccacgatacggttgaaaacctcatcatccttgcgaacaactctctctcatctaatggaaacgttacagagagtgggtgtaaggagtgcgaagagttggaagaaaaaaacatcaaagaatttcttcaatccttcgttcacatagtgcaaatgttcattaacacgtccactaccacacccgccccgaggccacctacgccggcaccgactatcgccagtcaacccctctctctgcgccccgaggcttgccggcctgcggctggtggggcggtccacacccggggcctggattttgcgtgcgatatatacatctgggcacctcttgccggcacctgcggagtgctgcttctctcactcgttattacgctgtactgc

SEQ ID NO: 2764 - DNA, 2157 bp, synthetic construct
  misc_feature 1..2157: note = Synthetic
  source 1..2157: mol_type = other DNA
atggccttaccagtgaccgccttgctcctgccgctggccttgctgctccacgccgccaggccgcaagtgcagctggtgcagagcggaacagaggtgaaaaagcctggcgccagcgtgaaggtgtcttgtaaaaccagcggttatacattcacctcctacgacattaactgggtgcggcaggccaccggccagggcctggaatggatgggctggatgaaccccatctccggcgacacaggcagcgcccagaagttccagggaagagtgaccatgaccagaaataccagcatcggcaccgcctacatggaactgagcagcctgcggagcgaggacaccgccgtgtactactgcgccagaggcggatactgtagcagtacatcttgctactactattacatggacgtgtggggcaagggcacaacagtgacagtcagcagcggcggcgggggcagcggcggaggcggaagcggcggcggcggcagcgatatccagatgacacagtcccctagctctctgtctgcttctgttggagatagagtgaccatcacctgccgggccagccagggcatcagcaactggctggcctggtaccagcagaagcccgagaaggcccctaagagcctgatctacgccgctagctccctccagggcggcgtgccatctagattcagcggctcaggcagcggaaccgacttcaccctgaccatcagctccctgcaacctgaggattttgccacatactactgccagcaatacgacagctacccctacaccttcggccagggcaccaagctggaaatcaaggcggccgcaaccacgacgccagcgccgcggccaccaacaccggcgcccaccatcgcgtcgcagcccctgtccctgcgcccagaggcgtgccggccagcggcggggggcgcagtgcacacgagggggctggacttcgcctgtgatatctacatctgggcgcccttggccgggacttgtggggtccttctcctgtcactggttatcaccctttactgcaaacggggcagaaagaaactcctgtatatattcaaacaaccatttatgagaccagtacaaactactcaagaggaagatggctgtagctgccgatttccagaagaagaagaaggaggatgtgaactgagagtgaagttcagcaggagcgcagacgcccccgcgtaccagcagggccagaaccagctctataacgagctcaatctaggacgaagagaggagtacgatgttttggacaagagacgtggccgggaccctgagatggggggaaagccgagaaggaagaaccctcaggaaggcctgtacaatgaactgcagaaagataagatggcggaggcctacagtgagattgggatgaaaggcgagcgccggaggggcaaggggcacgatggcctttaccagggtctcagtacagccaccaaggacacctacgacgcccttcacatgcaggccctgccccctcgcggctctggcgagggaaggggttccctgcttacttgcggcgacgtcgaagagaatcccggtccgatggccctcccagtaactgccctccttttgcccctcgcactccttcttcatgccgctcgccccaactgggtcaacgtgattagcgatttgaagaaaatcgaggaccttatacagtctatgcatattgacgctacactgtatactgagagtgatgtacacccgtcctgtaaggtaacggccatgaaatgctttcttctggagctccaggtcatcagcttggagtctggggacgcaagcatccacgatacggttgaaaacctcatcatccttgcgaacaactctctctcatctaatggaaacgttacagagagtgggtgtaaggagtgcgaagagttggaagaaaaaaacatcaaagaatttcttcaatccttcgttcacatagtgcaaatgttcattaacacgtccactaccacacccgccccgaggccacctacgccggcaccgactatcgccagtcaacccctctctctgcgccccgaggcttgccggcctgcggctggtggggcggtccacacccggggcctggattttgcgtgcgatatatacatctgggcacctcttgccggcacctgcggagtgctgcttctctcactcgttattacgctgtactgc

SEQ ID NO: 2765 - DNA, 2157 bp, synthetic construct
  misc_feature 1..2157: note = Synthetic
  source 1..2157: mol_type = other DNA
atggccttaccagtgaccgccttgctcctgccgctggccttgctgctccacgccgccaggccgcaagtgcagctggtgcagagcggcgccgaggtgaagaagcctggcgcttccgtgaaggtgtcctgtaaagcttctggatacaccttcacctcttatgatattaactgggtgcggcaggccaccggccagggcctggaatggatgggctggatgatccccaacagcggcgataccggctccgcccagaaattccagggaagagttaccatgacaagaaacaccagcatcagcaccgcctacatggaactgagcagcctgcggagcgaggacaccgctgtgtactactgcgccagaggcggctactgtaatagcacaagctgctactattactacatggacgtgtggggcaagggcaccacagtgacagtcagctccggcggcggaggcagcggaggcggtggctctggcggcggcggaagcgacatccagatgacacagagccctagcagcctgagcgcctctgtgggcgaccgggtgaccatcacctgcagagccagccagggcatcagcagctggctggcctggtaccagcagaagcccgagaaggcccctaagtccctgatctacgccgccagctccctccagggcggagtgccatctagattcagcggctctggatctggcacagacttcaccctgaccatcagctctctgcagcctgaggattttgccacatactactgccagcaatacgacagctacccctacacattcggccaaggcacaaagctggaaatcaaggcggccgcaaccacgacgccagcgccgcggccaccaacaccggcgcccaccatcgcgtcgcagcccctgtccctgcgcccagaggcgtgccggccagcggcggggggcgcagtgcacacgagggggctggacttcgcctgtgatatctacatctgggcgcccttggccgggacttgtggggtccttctcctgtcactggttatcaccctttactgcaaacggggcagaaagaaactcctgtatatattcaaacaaccatttatgagaccagtacaaactactcaagaggaagatggctgtagctgccgatttccagaagaagaagaaggaggatgtgaactgagagtgaagttcagcaggagcgcagacgcccccgcgtaccagcagggccagaaccagctctataacgagctcaatctaggacgaagagaggagtacgatgttttggacaagagacgtggccgggaccctgagatggggggaaagccgagaaggaagaaccctcaggaaggcctgtacaatgaactgcagaaagataagatggcggaggcctacagtgagattgggatgaaaggcgagcgccggaggggcaaggggcacgatggcctttaccagggtctcagtacagccaccaaggacacctacgacgcccttcacatgcaggccctgccccctcgcggctctggcgagggaaggggttccctgcttacttgcggcgacgtcgaagagaatcccggtccgatggccctcccagtaactgccctccttttgcccctcgcactccttcttcatgccgctcgccccaactgggtcaacgtgattagcgatttgaagaaaatcgaggaccttatacagtctatgcatattgacgctacactgtatactgagagtgatgtacacccgtcctgtaaggtaacggccatgaaatgctttcttctggagctccaggtcatcagcttggagtctggggacgcaagcatccacgatacggttgaaaacctcatcatccttgcgaacaactctctctcatctaatggaaacgttacagagagtgggtgtaaggagtgcgaagagttggaagaaaaaaacatcaaagaatttcttcaatccttcgttcacatagtgcaaatgttcattaacacgtccactaccacacccgccccgaggccacctacgccggcaccgactatcgccagtcaacccctctctctgcgccccgaggcttgccggcctgcggctggtggggcggtccacacccggggcctggattttgcgtgcgatatatacatctgggcacctcttgccggcacctgcggagtgctgcttctctcactcgttattacgctgtactgc

SEQ ID NO: 2766 - DNA, 2160 bp, synthetic construct
  misc_feature 1..2160: note = Synthetic
  source 1..2160: mol_type = other DNA
atggccttaccagtgaccgccttgctcctgccgctggccttgctgctccacgccgccaggccggaggtgcagctgctggaaagcggaggcggcctggtgcaacctggaggttctctgcggctgagctgcgccgctagcggcttcacatttagcagctacgtgatgaactgggtgcggcaggctcctggaaagggcctggaatgggtctccagcgtgtccggcagcggcaacaacagcttttacgccgatagcgtgaagggcagattcaccatcagccgggacaacagcaagaacaccctctacctgcagatgaattctctgagagccgaggacaccgccgtgtactactgcgccagcaggtcctcttcttacctgtactactactattacatggacgtgtggggcaaaggcacaacagtgaccgtctccagcggcggcggcggctccggcggcggaggaagcggcggaggcggcagcgagatcgtgctgacccaaagccccggcaccctgagcctgagccctggcgagagagccaccctgtcttgtagagcctctcagagcgtttctagctcctacctggcctggtaccagcagaagcccggacaggcccctagactgctgatctacggcgccagcagcagagctacaggcatccccgatagattcagcgacagcggctcaggcacagacttcaccctgacaattagccggctggaacccgaggatttcgccgtgtactattgccagcactacggcagctctcctccaagaatcaccttcggccctggcaccaaggtggacatcaaagcggccgcaaccacgacgccagcgccgcggccaccaacaccggcgcccaccatcgcgtcgcagcccctgtccctgcgcccagaggcgtgccggccagcggcggggggcgcagtgcacacgagggggctggacttcgcctgtgatatctacatctgggcgcccttggccgggacttgtggggtccttctcctgtcactggttatcaccctttactgcaaacggggcagaaagaaactcctgtatatattcaaacaaccatttatgagaccagtacaaactactcaagaggaagatggctgtagctgccgatttccagaagaagaagaaggaggatgtgaactgagagtgaagttcagcaggagcgcagacgcccccgcgtaccagcagggccagaaccagctctataacgagctcaatctaggacgaagagaggagtacgatgttttggacaagagacgtggccgggaccctgagatggggggaaagccgagaaggaagaaccctcaggaaggcctgtacaatgaactgcagaaagataagatggcggaggcctacagtgagattgggatgaaaggcgagcgccggaggggcaaggggcacgatggcctttaccagggtctcagtacagccaccaaggacacctacgacgcccttcacatgcaggccctgccccctcgcggctctggcgagggaaggggttccctgcttacttgcggcgacgtcgaagagaatcccggtccgatggccctcccagtaactgccctccttttgcccctcgcactccttcttcatgccgctcgccccaactgggtcaacgtgattagcgatttgaagaaaatcgaggaccttatacagtctatgcatattgacgctacactgtatactgagagtgatgtacacccgtcctgtaaggtaacggccatgaaatgctttcttctggagctccaggtcatcagcttggagtctggggacgcaagcatccacgatacggttgaaaacctcatcatccttgcgaacaactctctctcatctaatggaaacgttacagagagtgggtgtaaggagtgcgaagagttggaagaaaaaaacatcaaagaatttcttcaatccttcgttcacatagtgcaaatgttcattaacacgtccactaccacacccgccccgaggccacctacgccggcaccgactatcgccagtcaacccctctctctgcgccccgaggcttgccggcctgcggctggtggggcggtccacacccggggcctggattttgcgtgcgatatatacatctgggcacctcttgccggcacctgcggagtgctgcttctctcactcgttattacgctgtactgc

SEQ ID NO: 2767 - protein, 497 aa, synthetic construct
  REGION 1..497: note = Synthetic
MALPVTALLLPLALLLHAARPEIVLTQSPDFQSVTPKEKVTITCRASQTIGSSLHWYQQKPDQSPKLLIKHASQSFSGVPSRFSGSGSGTDFTLTVNSLEAEDAATYYCHQSSSLPWTFGQGTKVEIKGSTSGSGKPGSGEGSTKGQVQLVESGGGVVQPGRSLRLSCAASGFTFSSHDMHWVRQAPGKGLDWVAVIWSDGNKKYYVDSAKGRFTISRDNSKNTVYLQMNSLRAEDTAIYYCARGDNWNDEHSYYYYMDVWGKGTTVTVSSAAATTTPAPRPPTPAPTIASQPLSLRPEACRPAAGGAVHTRGLDFACDIYIWAPLAGTCGVLLLSLVITLYCKRGRKKLLYIFKQPFMRPVQTTQEEDGCSCRFPEEEEGGCELRVKFSRSADAPAYQQGQNQLYNELNLGRREEYDVLDKRRGRDPEMGGKPRRKNPQEGLYNELQKDKMAEAYSEIGMKGERRRGKGHDGLYQGLSTATKDTYDALHMQALPPR

SEQ ID NO: 2768 - protein, 497 aa, synthetic construct
  REGION 1..497: note = Synthetic
MALPVTALLLPLALLLHAARPEIVLTQSPDFQSVTPKEKVTITCRASQTIGSSLHWYQQKPDQSPKLLIKHASQSFSGVPSRFSGSGSGTDFTLTVNSLEAEDAATYYCHQSSSLPWTFGQGTKVEIKGSTSGSGKPGSGEGSTKGQVQLVESGGGVVQPGRSLRLSCAASGFTFSSHDMHWVRQAPGKGLDWVAVIWSDGNNKYYADSAKGRFTISRDNSKNTVYLQMNSLRAEDTAIYYCARGDNWNDEHSYYYYMDVWGKGTTVTVSSAAATTTPAPRPPTPAPTIASQPLSLRPEACRPAAGGAVHTRGLDFACDIYIWAPLAGTCGVLLLSLVITLYCKRGRKKLLYIFKQPFMRPVQTTQEEDGCSCRFPEEEEGGCELRVKFSRSADAPAYQQGQNQLYNELNLGRREEYDVLDKRRGRDPEMGGKPRRKNPQEGLYNELQKDKMAEAYSEIGMKGERRRGKGHDGLYQGLSTATKDTYDALHMQALPPR

SEQ ID NO: 2769 - protein, 496 aa, synthetic construct
  REGION 1..496: note = Synthetic
MALPVTALLLPLALLLHAARPDIQMTQSPSSLSASVGDRVTITCRASQSISNYLNWYHQKPGKAPKLLIYAASSLESGVPSRFSGSGSGTDFTLTISSLQPEDFATYYCQQSYSNPLTFGGGTKVESKGSTSGSGKPGSGEGSTKGQLQLVQSGAEVKKPGASVKVSCKASGYTFTNYGISWLRQAPGQGLEWMGWISGYNDNTHYAQKFQGRVTMTTDTSTTTAYMELRNLRSDDTAVYYCARDGIAARPVYYYYMDVWGKGTTVTVSSAAATTTPAPRPPTPAPTIASQPLSLRPEACRPAAGGAVHTRGLDFACDIYIWAPLAGTCGVLLLSLVITLYCKRGRKKLLYIFKQPFMRPVQTTQEEDGCSCRFPEEEEGGCELRVKFSRSADAPAYQQGQNQLYNELNLGRREEYDVLDKRRGRDPEMGGKPRRKNPQEGLYNELQKDKMAEAYSEIGMKGERRRGKGHDGLYQGLSTATKDTYDALHMQALPPR

SEQ ID NO: 2770 - protein, 497 aa, synthetic construct
  REGION 1..497: note = Synthetic
MALPVTALLLPLALLLHAARPEIVLTQSPDFQSVTPKEKVTITCRASQSIGSSLHWYQQKPDQSPKLLIKFASQSFSGVPSRFSGSGSGTDFTLTIHSLEAEDAATYYCHQSGSLPWTFGQGTKVEIKGSTSGSGKPGSGEGSTKGQVQLVESGGGVVQPGRSLRLSCVASGFTFSSNDIYWVRQAPGKGLEWVAVIWYDGSNKYYADSVKGRFTISRDNSKNTLYLQMNSLRAEDTAVYYCARGDNWNDEHHYHYYMDVWGKGTTVTVSSAAATTTPAPRPPTPAPTIASQPLSLRPEACRPAAGGAVHTRGLDFACDIYIWAPLAGTCGVLLLSLVITLYCKRGRKKLLYIFKQPFMRPVQTTQEEDGCSCRFPEEEEGGCELRVKFSRSADAPAYQQGQNQLYNELNLGRREEYDVLDKRRGRDPEMGGKPRRKNPQEGLYNELQKDKMAEAYSEIGMKGERRRGKGHDGLYQGLSTATKDTYDALHMQALPPR

SEQ ID NO: 2771 - protein, 490 aa, synthetic construct
  REGION 1..490: note = Synthetic
MALPVTALLLPLALLLHAARPVTQEPSFSVSPGGTVTLTCGLSSGSVSTSYYPSWYQQTPGQAPRTLIYSTNIRSSGVPDRFSGSILGNKAALTITGAQADDESDYYCVLYMGSDIVVFGGGTKLTVLGSTSGSGKPGSGEGSTKGQVQLVESGGGVVQPGRSLRLSCAASGFTFSSYGMHWVRQAPGKGLEWVAVISYDGSNKYYADSVKGRFTISRDNSKTTLYLQMNSLRAEDTAVYYCARDHYYYYMDVWGKGTTVTVSSAAATTTPAPRPPTPAPTIASQPLSLRPEACRPAAGGAVHTRGLDFACDIYIWAPLAGTCGVLLLSLVITLYCKRGRKKLLYIFKQPFMRPVQTTQEEDGCSCRFPEEEEGGCELRVKFSRSADAPAYQQGQNQLYNELNLGRREEYDVLDKRRGRDPEMGGKPRRKNPQEGLYNELQKDKMAEAYSEIGMKGERRRGKGHDGLYQGLSTATKDTYDALHMQALPPR

SEQ ID NO: 2772 - protein, 495 aa, synthetic construct
  REGION 1..495: note = Synthetic
MALPVTALLLPLALLLHAARPEIVLTQSPATLSLSPGERATLSCRASQSVSSYFAWYQQKPGQAPRLLIYDASNRATGIPARFSGSGSGTDFTLTISSLEPEDFAVYYCQQRSNWPLTFGGGTKVEIKGSTSGSGKPGSGEGSTKGQLQLQESGPGLVKPSETLSLTCTVSGGSISSSSYYWGWIRQPPGKGLEWIGSLYYSGSTYYNPSLKSRVTISVDTSKNQFSLKLSSVTAADTAVYYCAAVQLERRGYFYMDVWGKGTTVTVSSAAATTTPAPRPPTPAPTIASQPLSLRPEACRPAAGGAVHTRGLDFACDIYIWAPLAGTCGVLLLSLVITLYCKRGRKKLLYIFKQPFMRPVQTTQEEDGCSCRFPEEEEGGCELRVKFSRSADAPAYQQGQNQLYNELNLGRREEYDVLDKRRGRDPEMGGKPRRKNPQEGLYNELQKDKMAEAYSEIGMKGERRRGKGHDGLYQGLSTATKDTYDALHMQALPPR

SEQ ID NO: 2773 - protein, 497 aa, synthetic construct
  REGION 1..497: note = Synthetic
MALPVTALLLPLALLLHAARPQTVVTQEPSFSVSPGGTVTLTCGLTSGSVSTSYYPNWYQQTPGQAPRTLIYSTNIRSSGVPDRFSGSILGNKAALTITGAQADDESDYYCVLYMGSGMFIFGSGTKVTVLGSTSGSGKPGSGEGSTKGQVQLVESGGGVVQPGRSLRLSCAASGFTFSNYGMHWVRQAPGKGLEWMAVIWSDGHNKYYADSVKGRFTISRDNSKNTLYLQMNSLRAEDTAVYYCARAQLERRYFYYMDVWGKGTTVTVSSAAATTTPAPRPPTPAPTIASQPLSLRPEACRPAAGGAVHTRGLDFACDIYIWAPLAGTCGVLLLSLVITLYCKRGRKKLLYIFKQPFMRPVQTTQEEDGCSCRFPEEEEGGCELRVKFSRSADAPAYQQGQNQLYNELNLGRREEYDVLDKRRGRDPEMGGKPRRKNPQEGLYNELQKDKMAEAYSEIGMKGERRRGKGHDGLYQGLSTATKDTYDALHMQALPPR

SEQ ID NO: 2774 - protein, 497 aa, synthetic construct
  REGION 1..497: note = Synthetic
MALPVTALLLPLALLLHAARPDIQMTQSPSSLSASVGDRVTITCRASQGISSWLAWYQQKPEKAPKSLIYAASSLQGGVPSRFSGSGSGTDFTLTISSLQPEDFATYYCQQYDSYPYTFGQGTKLEIKGSTSGSGKPGSGEGSTKGQVQLVQSGAEVKKPGASVKVSCKASGYTFTSYDINWVRQATGQGLEWMGWMIPNSGDTGSAQKFQGRVTMTRNTSIGTAYMELSSLRSEDTAVYYCARGGYCNSTSCYYYYMDVWGKGTTVTVSSAAATTTPAPRPPTPAPTIASQPLSLRPEACRPAAGGAVHTRGLDFACDIYIWAPLAGTCGVLLLSLVITLYCKRGRKKLLYIFKQPFMRPVQTTQEEDGCSCRFPEEEEGGCELRVKFSRSADAPAYQQGQNQLYNELNLGRREEYDVLDKRRGRDPEMGGKPRRKNPQEGLYNELQKDKMAEAYSEIGMKGERRRGKGHDGLYQGLSTATKDTYDALHMQALPPR

SEQ ID NO: 2775 - protein, 498 aa, synthetic construct
  REGION 1..498: note = Synthetic
MALPVTALLLPLALLLHAARPDIQVTQSPTFLSASVGDRVTITCRASQGISSYLAWYQQKPGKAPKLLIYGASTLQSGVPSRFSGSGSGTEFTLTISSLQPEDFATYYCQQLNSYPWTFGQGTKVEIKGSTSGSGKPGSGEGSTKGQVQLVQSGAEVKKPGASVKVSCKASGYTFTSYDINWVRQATGQGLEWMGWMNPNSGNTVYAQKFQGRVTMTRNTSISTAYMELSSLRSEDTAVYYCARGGDFWSGYHDYYYYMDVWGKGTTVTVSSAAATTTPAPRPPTPAPTIASQPLSLRPEACRPAAGGAVHTRGLDFACDIYIWAPLAGTCGVLLLSLVITLYCKRGRKKLLYIFKQPFMRPVQTTQEEDGCSCRFPEEEEGGCELRVKFSRSADAPAYQQGQNQLYNELNLGRREEYDVLDKRRGRDPEMGGKPRRKNPQEGLYNELQKDKMAEAYSEIGMKGERRRGKGHDGLYQGLSTATKDTYDALHMQALPPR

SEQ ID NO: 2776 - protein, 496 aa, synthetic construct
  REGION 1..496: note = Synthetic
MALPVTALLLPLALLLHAARPSYELTQPPSVSVSPGQTASITCSGDKLGDKYACWYQQKPGQSPVLVIYQDSKRPSGIPERFSGSNSGNTATLTISGTQAMDEADYYCQAWDSSTAVFGGGTQLTALGSTSGSGKPGSGEGSTKGQVQLQESGPGLVKPSETLSLTCTVSGGSISSYYWSWIRQPAGKGLEWIGRIYTSGSTNYNPSLKSRVTMSVDTSKNQFSLKLSSVTAADTAVYYCAREEYQLLPALYYYYYMDVWGKGTTVTVSSAAATTTPAPRPPTPAPTIASQPLSLRPEACRPAAGGAVHTRGLDFACDIYIWAPLAGTCGVLLLSLVITLYCKRGRKKLLYIFKQPFMRPVQTTQEEDGCSCRFPEEEEGGCELRVKFSRSADAPAYQQGQNQLYNELNLGRREEYDVLDKRRGRDPEMGGKPRRKNPQEGLYNELQKDKMAEAYSEIGMKGERRRGKGHDGLYQGLSTATKDTYDALHMQALPPR

SEQ ID NO: 2777 - protein, 497 aa, synthetic construct
  REGION 1..497: note = Synthetic
MALPVTALLLPLALLLHAARPQTVVTQEPSFSVSPGGTVTLTCGLTSGSVSTSYYPNWYQQTPGQAPRTLIYSTNIRSSGVPDRFSGSILGNKAALTITGAQADDESDYYCVLYMGSGMFIFGSGTKVTVLGSTSGSGKPGSGEGSTKGQVQLVESGGGVVQPGRSLRLSCAATGFTFSSYGMHWVRQAPGKGLEWMVVIWSDGHNKYYADSVKGRFTISRDNSKNTLYLQMNSLRAEDTAVYYCARAQLERRYFYYMDVWGKGTTVTVSSAAATTTPAPRPPTPAPTIASQPLSLRPEACRPAAGGAVHTRGLDFACDIYIWAPLAGTCGVLLLSLVITLYCKRGRKKLLYIFKQPFMRPVQTTQEEDGCSCRFPEEEEGGCELRVKFSRSADAPAYQQGQNQLYNELNLGRREEYDVLDKRRGRDPEMGGKPRRKNPQEGLYNELQKDKMAEAYSEIGMKGERRRGKGHDGLYQGLSTATKDTYDALHMQALPPR

SEQ ID NO: 2778 - protein, 497 aa, synthetic construct
  REGION 1..497: note = Synthetic
MALPVTALLLPLALLLHAARPEIVLTQSPDFQSVTPKEKVTITCRASQSIGSSLHWYQQKPDQSPMLLIKFASQSISGVPSRFSGSGSGTDFTLTINSLEAEDAAAYYCHQSSSLPWTFGQGTKVEIKGSTSGSGKPGSGEGSTKGQVQLVESGGGVVQPGRSLRLSCAASGFTFTSYDMHWVRQAPGKGLEWVTIIWFDGSNKYYADSVKGRFTISRDNSKNTLYLQMNSLSAEDTAVYYCARGDNWNDRYYYYYYMDVWGKGTTVTVSSAAATTTPAPRPPTPAPTIASQPLSLRPEACRPAAGGAVHTRGLDFACDIYIWAPLAGTCGVLLLSLVITLYCKRGRKKLLYIFKQPFMRPVQTTQEEDGCSCRFPEEEEGGCELRVKFSRSADAPAYQQGQNQLYNELNLGRREEYDVLDKRRGRDPEMGGKPRRKNPQEGLYNELQKDKMAEAYSEIGMKGERRRGKGHDGLYQGLSTATKDTYDALHMQALPPR

SEQ ID NO: 2779 - protein, 502 aa, synthetic construct
  REGION 1..502: note = Synthetic
MALPVTALLLPLALLLHAARPDIVMTQPPLSSPVTLGQPASISCRSSQSLVHSDGNTYLSWLQQRPGQPPRLLIYKVSNRFSGVPDRFSGSGAGTDFTLKISRVEAEDVGVYYCTQATQFPHTFGQGTKLEIKGSTSGSGKPGSGEGSTKGQVQLVQSGAEVKKPGASVKVSCKASGYTFTSYGISWVRQAPGQGLEWMGWISAYNGHTDYTQKLQGRVTMTTDTSTTTAYMELRSLSSADTAVYYCVREVVLPTTDYYYFYMDVWGKGTTVTVSSAAATTTPAPRPPTPAPTIASQPLSLRPEACRPAAGGAVHTRGLDFACDIYIWAPLAGTCGVLLLSLVITLYCKRGRKKLLYIFKQPFMRPVQTTQEEDGCSCRFPEEEEGGCELRVKFSRSADAPAYQQGQNQLYNELNLGRREEYDVLDKRRGRDPEMGGKPRRKNPQEGLYNELQKDKMAEAYSEIGMKGERRRGKGHDGLYQGLSTATKDTYDALHMQALPPR

SEQ ID NO: 2780 - protein, 501 aa, synthetic construct
  REGION 1..501: note = Synthetic
MALPVTALLLPLALLLHAARPDIQMTQSPSSLSASVGDRVTITCRASQGISSWLAWYQQKPEKAPKSLIYAASSLQSGVPSRFSGSGSGTDFTLTISSLQPEDFATYYCQQYNSYPYTFGQGTKLEIKGSTSGSGKPGSGEGSTKGQVQLVQSGAEVKKPGASVKVSCKVSGYTLTELSMHWVRQAPGKGLEWMGGFDPEDGETIYAQKFQGRVTMTEDTSTDTAYMELSSLRSEDTAVYYCATGRITMVRGVIIPYYYYYMDVWGKGTTVTVSSAAATTTPAPRPPTPAPTIASQPLSLRPEACRPAAGGAVHTRGLDFACDIYIWAPLAGTCGVLLLSLVITLYCKRGRKKLLYIFKQPFMRPVQTTQEEDGCSCRFPEEEEGGCELRVKFSRSADAPAYQQGQNQLYNELNLGRREEYDVLDKRRGRDPEMGGKPRRKNPQEGLYNELQKDKMAEAYSEIGMKGERRRGKGHDGLYQGLSTATKDTYDALHMQALPPR

SEQ ID NO: 2781 - protein, 499 aa, synthetic construct
  REGION 1..499: note = Synthetic
MALPVTALLLPLALLLHAARPDIVMTQTPLSLSVTPGQPASISCKSSKSLLHSDGKTYLYWYLQKPGQPPQLLIYEVSNRFSGVPDRFSGSGSGTDFTLKISRVEAEDVGVYYCMQSIQFPWTFGQGTKVEIKGSTSGSGKPGSGEGSTKGQVQLVQSGTEVKKPGASVKVSCKASGYTFTNYGIGWVRQAPGQGLEWMGWIIAYNGYTKYAQILQGRVTMTTDTSTNTAYMELRSLRSDDTAVYYCARQQLGGDYHYYMDVWGKGTTVTVSSAAATTTPAPRPPTPAPTIASQPLSLRPEACRPAAGGAVHTRGLDFACDIYIWAPLAGTCGVLLLSLVITLYCKRGRKKLLYIFKQPFMRPVQTTQEEDGCSCRFPEEEEGGCELRVKFSRSADAPAYQQGQNQLYNELNLGRREEYDVLDKRRGRDPEMGGKPRRKNPQEGLYNELQKDKMAEAYSEIGMKGERRRGKGHDGLYQGLSTATKDTYDALHMQALPPR

SEQ ID NO: 2782 - protein, 499 aa, synthetic construct
  REGION 1..499: note = Synthetic
MALPVTALLLPLALLLHAARPDIVMTQTPLSLSVTPGQPASISCKSSKSLLHSDGKTYLYWYLQKPGQPPQLLIYEVSTRFSGVPDRFSGSGSGTDFTLKISRVEAEDVGVYYCMQSIQFPWTFGQGTKVEIKGSTSGSGKPGSGEGSTKGQVQLVQSGTEVKKPGASVKVSCKASGYTFTNYGIGWVRQAPGQGLEWMGWIIAYNGYTKYAQILQGRVTMTTDTSTNTAYMELRSLRSDDTAVYYCARQQLGGDYHYYMDVWGKGTTVTVSSAAATTTPAPRPPTPAPTIASQPLSLRPEACRPAAGGAVHTRGLDFACDIYIWAPLAGTCGVLLLSLVITLYCKRGRKKLLYIFKQPFMRPVQTTQEEDGCSCRFPEEEEGGCELRVKFSRSADAPAYQQGQNQLYNELNLGRREEYDVLDKRRGRDPEMGGKPRRKNPQEGLYNELQKDKMAEAYSEIGMKGERRRGKGHDGLYQGLSTATKDTYDALHMQALPPR

SEQ ID NO: 2783 - protein, 497 aa, synthetic construct
  REGION 1..497: note = Synthetic
MALPVTALLLPLALLLHAARPDIQMTQSPSSLSASVGDRVTITCRASQGISNWLAWYQQKPEKAPKSLIYAASSLQGGVPSRFSGSGSGTDFTLTISSLQPEDFATYYCQQYDSYPYTFGQGTKLEIKGSTSGSGKPGSGEGSTKGQVQLVQSGTEVKKPGASVKVSCKTSGYTFTSYDINWVRQATGQGLEWMGWMNPISGDTGSAQKFQGRVTMTRNTSIGTAYMELSSLRSEDTAVYYCARGGYCSSTSCYYYYMDVWGKGTTVTVSSAAATTTPAPRPPTPAPTIASQPLSLRPEACRPAAGGAVHTRGLDFACDIYIWAPLAGTCGVLLLSLVITLYCKRGRKKLLYIFKQPFMRPVQTTQEEDGCSCRFPEEEEGGCELRVKFSRSADAPAYQQGQNQLYNELNLGRREEYDVLDKRRGRDPEMGGKPRRKNPQEGLYNELQKDKMAEAYSEIGMKGERRRGKGHDGLYQGLSTATKDTYDALHMQALPPR

SEQ ID NO: 2784 - protein, 497 aa, synthetic construct
  REGION 1..497: note = Synthetic
MALPVTALLLPLALLLHAARPDIQMTQSPSSLSASVGDRVTITCRASQGISSWLAWYQQKPEKAPKSLIYAASSLQGGVPSRFSGSGSGTDFTLTISSLQPEDFATYYCQQYDSYPYTFGQGTKLEIKGSTSGSGKPGSGEGSTKGQVQLVQSGAEVKKPGASVKVSCKASGYTFTSYDINWVRQATGQGLEWMGWMIPNSGDTGSAQKFQGRVTMTRNTSISTAYMELSSLRSEDTAVYYCARGGYCNSTSCYYYYMDVWGKGTTVTVSSAAATTTPAPRPPTPAPTIASQPLSLRPEACRPAAGGAVHTRGLDFACDIYIWAPLAGTCGVLLLSLVITLYCKRGRKKLLYIFKQPFMRPVQTTQEEDGCSCRFPEEEEGGCELRVKFSRSADAPAYQQGQNQLYNELNLGRREEYDVLDKRRGRDPEMGGKPRRKNPQEGLYNELQKDKMAEAYSEIGMKGERRRGKGHDGLYQGLSTATKDTYDALHMQALPPR

SEQ ID NO: 2785 - protein, 498 aa, synthetic construct
  REGION 1..498: note = Synthetic
MALPVTALLLPLALLLHAARPEIVLTQSPGTLSLSPGERATLSCRASQSVSSSYLAWYQQKPGQAPRLLIYGASSRATGIPDRFSDSGSGTDFTLTISRLEPEDFAVYYCQHYGSSPPRITFGPGTKVDIKGSTSGSGKPGSGEGSTKGEVQLLESGGGLVQPGGSLRLSCAASGFTFSSYVMNWVRQAPGKGLEWVSSVSGSGNNSFYADSVKGRFTISRDNSKNTLYLQMNSLRAEDTAVYYCASRSSSYLYYYYYMDVWGKGTTVTVSSAAATTTPAPRPPTPAPTIASQPLSLRPEACRPAAGGAVHTRGLDFACDIYIWAPLAGTCGVLLLSLVITLYCKRGRKKLLYIFKQPFMRPVQTTQEEDGCSCRFPEEEEGGCELRVKFSRSADAPAYQQGQNQLYNELNLGRREEYDVLDKRRGRDPEMGGKPRRKNPQEGLYNELQKDKMAEAYSEIGMKGERRRGKGHDGLYQGLSTATKDTYDALHMQALPPR

SEQ ID NO: 2786 - DNA, 1491 bp, synthetic construct
  misc_feature 1..1491: note = Synthetic
  source 1..1491: mol_type = other DNA
atggccttaccagtgaccgccttgctcctgccgctggccttgctgctccacgccgccaggccggaaattgtgctgactcagtctccagactttcagtctgtgactccaaaggagaaagtcaccatcacctgccgggccagtcagaccattggcagtagcttacactggtaccagcagaaaccagatcagtctccaaagctcctcatcaagcatgcttcccagtccttctcaggggtcccctcgaggttcagtggcagtggatctgggacagatttcaccctcaccgtcaatagcctggaagctgaagatgctgcaacgtattactgtcatcagagtagtagtttaccgtggacgttcggccaagggaccaaggtggaaatcaaaggcagcaccagcggcagcggcaagcccggctccggagagggcagcaccaagggccaggtgcagctggtggagtctgggggaggcgtggtccagcctgggaggtccctgagactttcctgtgcagcgtctggattcaccttcagcagtcatgacatgcactgggtccgccaggctccaggcaaggggctggactgggtggcagttatatggagtgatggaaataaaaaatactatgtagactccgcgaagggccggttcaccatctccagagacaattccaagaacacggtgtatctgcaaatgaacagcctgagagccgaggacacggctatatattactgtgcgagaggtgacaactggaacgacgaacactcctactattactacatggacgtctggggcaaggggaccacggtcaccgtctcctcagcggccgcaaccacgacgccagcgccgcggccaccaacaccggcgcccaccatcgcgtcgcagcccctgtccctgcgcccagaggcgtgccggccagcggcggggggcgcagtgcacacgagggggctggacttcgcctgtgatatctacatctgggcgcccttggccgggacttgtggggtccttctcctgtcactggttatcaccctttactgcaaacggggcagaaagaaactcctgtatatattcaaacaaccatttatgagaccagtacaaactactcaagaggaagatggctgtagctgccgatttccagaagaagaagaaggaggatgtgaactgagagtgaagttcagcaggagcgcagacgcccccgcgtaccagcagggccagaaccagctctataacgagctcaatctaggacgaagagaggagtacgatgttttggacaagagacgtggccgggaccctgagatggggggaaagccgagaaggaagaaccctcaggaaggcctgtacaatgaactgcagaaagataagatggcggaggcctacagtgagattgggatgaaaggcgagcgccggaggggcaaggggcacgatggcctttaccagggtctcagtacagccaccaaggacacctacgacgcccttcacatgcaggccctgccccctcgc

SEQ ID NO: 2787 - DNA, 1491 bp, synthetic construct
  misc_feature 1..1491: note = Synthetic
  source 1..1491: mol_type = other DNA
atggccttaccagtgaccgccttgctcctgccgctggccttgctgctccacgccgccaggccggaaattgtgctgactcagtctccagactttcagtctgtgactccaaaggagaaagtcaccatcacctgccgggccagtcagaccattggcagtagcttacactggtaccagcagaaaccagatcagtctccaaagctcctcatcaagcatgcttcccagtccttctcaggggtcccctcgaggttcagtggcagtggatctgggacagatttcaccctcaccgtcaatagcctggaagctgaagatgctgcaacgtattactgtcatcagagtagtagtttaccgtggacgttcggccaagggaccaaggtggaaatcaaaggcagcaccagcggcagcggcaagcccggctccggagagggcagcaccaagggccaggtgcagctggtggagtctgggggaggcgtggtccagcctgggaggtccctgagactttcctgtgcagcgtctggattcaccttcagtagtcatgacatgcactgggtccgccaggctccaggcaaggggctggactgggtggcagttatatggagtgatggaaataataaatactatgcagactccgcgaagggccggttcaccatctccagagacaattccaagaacacggtgtatctgcaaatgaacagcctgagagccgaggacacggctatatattactgtgcgagaggtgacaactggaacgacgaacactcctactattactacatggacgtctggggcaaggggaccacggtcaccgtctcctcagcggccgcaaccacgacgccagcgccgcggccaccaacaccggcgcccaccatcgcgtcgcagcccctgtccctgcgcccagaggcgtgccggccagcggcggggggcgcagtgcacacgagggggctggacttcgcctgtgatatctacatctgggcgcccttggccgggacttgtggggtccttctcctgtcactggttatcaccctttactgcaaacggggcagaaagaaactcctgtatatattcaaacaaccatttatgagaccagtacaaactactcaagaggaagatggctgtagctgccgatttccagaagaagaagaaggaggatgtgaactgagagtgaagttcagcaggagcgcagacgcccccgcgtaccagcagggccagaaccagctctataacgagctcaatctaggacgaagagaggagtacgatgttttggacaagagacgtggccgggaccctgagatggggggaaagccgagaaggaagaaccctcaggaaggcctgtacaatgaactgcagaaagataagatggcggaggcctacagtgagattgggatgaaaggcgagcgccggaggggcaaggggcacgatggcctttaccagggtctcagtacagccaccaaggacacctacgacgcccttcacatgcaggccctgccccctcgc

SEQ ID NO: 2788 - DNA, 1488 bp, synthetic construct
  misc_feature 1..1488: note = Synthetic
  source 1..1488: mol_type = other DNA
atggccttaccagtgaccgccttgctcctgccgctggccttgctgctccacgccgccaggccggacatacagatgacccagtctccatcctccctgtctgcatctgtaggagacagagtcaccatcacttgccgggcaagccagagcattagcaactatttaaattggtatcaccagaaaccagggaaagcccctaagctcctgatctatgctgcatccagtttggaaagtggggtcccatcaaggttcagtggcagtggatctgggacagatttcactctcaccatcagcagtctgcaacctgaagattttgcaacttactactgtcaacagagttacagtaacccgctcactttcggcggagggaccaaggtggagagcaaaggcagcaccagcggcagcggcaagcccggctccggagagggcagcaccaagggccagcttcagctggtgcagtctggagctgaggtgaagaagcctggggcctcagtgaaggtctcctgcaaggcttctggttacacctttaccaactatggtatcagctggttgcgacaggcccctggacaagggcttgagtggatgggatggatcagtggttacaatgataacacacactatgcacagaagttccagggcagagtcaccatgaccacagacacatccacgaccacagcctacatggaactgaggaacctgagatctgacgacacggccgtgtattactgtgcgagagatgggatagcagctcgtccagtctactactactacatggacgtctggggcaaagggaccacggtcaccgtctcctcagcggccgcaaccacgacgccagcgccgcggccaccaacaccggcgcccaccatcgcgtcgcagcccctgtccctgcgcccagaggcgtgccggccagcggcggggggcgcagtgcacacgagggggctggacttcgcctgtgatatctacatctgggcgcccttggccgggacttgtggggtccttctcctgtcactggttatcaccctttactgcaaacggggcagaaagaaactcctgtatatattcaaacaaccatttatgagaccagtacaaactactcaagaggaagatggctgtagctgccgatttccagaagaagaagaaggaggatgtgaactgagagtgaagttcagcaggagcgcagacgcccccgcgtaccagcagggccagaaccagctctataacgagctcaatctaggacgaagagaggagtacgatgttttggacaagagacgtggccgggaccctgagatggggggaaagccgagaaggaagaaccctcaggaaggcctgtacaatgaactgcagaaagataagatggcggaggcctacagtgagattgggatgaaaggcgagcgccggaggggcaaggggcacgatggcctttaccagggtctcagtacagccaccaaggacacctacgacgcccttcacatgcaggccctgccccctcgc

SEQ ID NO: 2789 - DNA, 1491 bp, synthetic construct
  misc_feature 1..1491: note = Synthetic
  source 1..1491: mol_type = other DNA
atggccttaccagtgaccgccttgctcctgccgctggccttgctgctccacgccgccaggccggaaattgtgctgactcagtctccagactttcagtctgtgactccaaaggagaaagtcaccatcacctgccgggccagtcagagcattggtagtagcttacactggtaccagcagaaaccagatcagtctccaaagctcctcatcaagtttgcttcccagtccttctcaggggtcccctcgaggttcagtggcagtggatctgggacagatttcaccctcaccatccatagcctggaagctgaagatgctgcaacgtattactgtcatcagagtggtagtttaccgtggacgttcggccaagggaccaaggtggaaatcaaaggcagcaccagcggcagcggcaagcccggctccggagagggcagcaccaagggccaggtgcagctggtggagtctgggggaggcgtggtccagcctgggaggtccctgagactctcctgtgtagcgtctggattcaccttcagtagcaatgacatatactgggtccgccaggccccaggcaaggggctggagtgggtggcagttatatggtatgatggaagtaataaatactatgcagactccgtgaagggccgattcaccatctccagagacaattccaagaacacgctgtatctgcaaatgaacagcctgagagccgaggacacggctgtgtattactgtgcgagaggtgacaactggaacgacgaacaccactaccactactacatggacgtctggggcaaagggaccacggtcaccgtctcctcagcggccgcaaccacgacgccagcgccgcggccaccaacaccggcgcccaccatcgcgtcgcagcccctgtccctgcgcccagaggcgtgccggccagcggcggggggcgcagtgcacacgagggggctggacttcgcctgtgatatctacatctgggcgcccttggccgggacttgtggggtccttctcctgtcactggttatcaccctttactgcaaacggggcagaaagaaactcctgtatatattcaaacaaccatttatgagaccagtacaaactactcaagaggaagatggctgtagctgccgatttccagaagaagaagaaggaggatgtgaactgagagtgaagttcagcaggagcgcagacgcccccgcgtaccagcagggccagaaccagctctataacgagctcaatctaggacgaagagaggagtacgatgttttggacaagagacgtggccgggaccctgagatggggggaaagccgagaaggaagaaccctcaggaaggcctgtacaatgaactgcagaaagataagatggcggaggcctacagtgagattgggatgaaaggcgagcgccggaggggcaaggggcacgatggcctttaccagggtctcagtacagccaccaaggacacctacgacgcccttcacatgcaggccctgccccctcgc

SEQ ID NO: 2790 - DNA, 1471 bp, synthetic construct
  misc_feature 1..1471: note = Synthetic
  source 1..1471: mol_type = other DNA
atggccttaccagtgaccgccttgctcctgccgctggccttgctgctccacgccgccaggccgggtgacccaggagccatcgttctcagtgtcccctggagggacagtcacactcacttgtggcttgagctctggctcagtctctactagttactaccccagctggtaccagcagaccccaggccaggctccacgcacgctcatctacagcacaaacattcgctcttctggggtccctgatcgcttctctggctccatccttgggaacaaagctgccctcaccatcacgggggcccaggcagatgatgaatctgattattactgtgtgctgtatatgggtagtgacattgtggtattcggcggagggaccaagctgaccgtcctaggcagcaccagcggcagcggcaagcccggctccggagagggcagcaccaagggccaggtgcagttggtggagtctgggggaggcgtggtccagcctgggaggtccctgagactctcctgtgcagcctctggattcaccttcagtagctatggcatgcactgggtccgccaggctccaggcaaggggctggagtgggtggcagttatatcatatgatggaagtaataaatactatgcagactccgtgaagggccgattcaccatctccagggacaattccaagaccacgctgtatctgcaaatgaacagcctgagagctgaggacacggctgtgtattactgtgcgagagatcactactactactacatggacgtctggggcaaagggaccacggtcaccgtctcctcagcggccgcaaccacgacgccagcgccgcggccaccaacaccggcgcccaccatcgcgtcgcagcccctgtccctgcgcccagaggcgtgccggccagcggcggggggcgcagtgcacacgagggggctggacttcgcctgtgatatctacatctgggcgcccttggccgggacttgtggggtccttctcctgtcactggttatcaccctttactgcaaacggggcagaaagaaactcctgtatatattcaaacaaccatttatgagaccagtacaaactactcaagaggaagatggctgtagctgccgatttccagaagaagaagaaggaggatgtgaactgagagtgaagttcagcaggagcgcagacgcccccgcgtaccagcagggccagaaccagctctataacgagctcaatctaggacgaagagaggagtacgatgttttggacaagagacgtggccgggaccctgagatggggggaaagccgagaaggaagaaccctcaggaaggcctgtacaatgaactgcagaaagataagatggcggaggcctacagtgagattgggatgaaaggcgagcgccggaggggcaaggggcacgatggcctttaccagggtctcagtacagccaccaaggacacctacgacgcccttcacatgcaggccctgccccctcgc

SEQ ID NO: 2791 - DNA, 1485 bp, synthetic construct
  misc_feature 1..1485: note = Synthetic
  source 1..1485: mol_type = other DNA
atggccttaccagtgaccgccttgctcctgccgctggccttgctgctccacgccgccaggccggaaattgtgttgacacagtctccagccaccctgtctttgtctccaggggaaagagccaccctctcctgcagggccagtcagagtgttagcagctactttgcctggtaccaacagaaacctggccaggctcccaggctcctcatctatgatgcatccaacagggccactggcatcccagccaggttcagtggcagtgggtctgggacagacttcactctcaccatcagcagcctggagcctgaagattttgcagtttattactgtcagcagcgtagcaactggcctctcactttcggcggagggaccaaggtggagatcaaaggcagcaccagcggcagcggcaagcccggctccggagagggcagcaccaagggccaactgcagctgcaggagtcgggcccaggactggtgaagccttcggagaccctgtccctcacctgcactgtctctggtggctccatcagcagtagtagttactactggggctggatccgccagcccccagggaaggggctggagtggattgggagtctctattatagtgggagcacctactacaacccgtccctcaagagtcgagtcaccatatccgttgacacgtccaagaaccagttctccctgaagctgagctctgtgaccgccgcagacacggctgtgtattactgtgcggccgtacaactggaacgacgtgggtacttctacatggacgtctggggcaaagggaccacggtcaccgtctcctcagcggccgcaaccacgacgccagcgccgcggccaccaacaccggcgcccaccatcgcgtcgcagcccctgtccctgcgcccagaggcgtgccggccagcggcggggggcgcagtgcacacgagggggctggacttcgcctgtgatatctacatctgggcgcccttggccgggacttgtggggtccttctcctgtcactggttatcaccctttactgcaaacggggcagaaagaaactcctgtatatattcaaacaaccatttatgagaccagtacaaactactcaagaggaagatggctgtagctgccgatttccagaagaagaagaaggaggatgtgaactgagagtgaagttcagcaggagcgcagacgcccccgcgtaccagcagggccagaaccagctctataacgagctcaatctaggacgaagagaggagtacgatgttttggacaagagacgtggccgggaccctgagatggggggaaagccgagaaggaagaaccctcaggaaggcctgtacaatgaactgcagaaagataagatggcggaggcctacagtgagattgggatgaaaggcgagcgccggaggggcaaggggcacgatggcctttaccagggtctcagtacagccaccaaggacacctacgacgcccttcacatgcaggccctgccccctcgc

SEQ ID NO: 2792 - DNA, 1491 bp, synthetic construct
  misc_feature 1..1491: note = Synthetic
  source 1..1491: mol_type = other DNA
atggccttaccagtgaccgccttgctcctgccgctggccttgctgctccacgccgccaggccgcagactgtagtgacccaggaaccatcgttctcagtgtcccctggagggacagtcacactcacttgtggcttgacctctggctcagtctctactagttactaccccaactggtaccagcagaccccaggccaggctccacgcacgctcatctatagtacaaatattcgctcttctggggtccctgatcgcttctctggctccatccttgggaacaaagctgccctcaccatcacgggggcccaggcagatgatgaatctgattattactgtgtgctgtatatgggtagtggcatgtttattttcggcagtggaaccaaggtcactgtcctaggcagcaccagcggcagcggcaagcccggctccggagagggcagcaccaagggccaggtgcagctggtggagtctgggggaggcgtggtccagcctgggaggtccctgagactctcctgtgcagcatctggattcaccttcagtaactatggcatgcactgggtccgccaggctccaggcaaggggctggagtggatggcagttatatggtctgatggacataataaatactatgcagactccgtgaagggccgattcaccatctccagagacaattccaagaacacgctgtatctgcaaatgaacagcctgagagccgaggacacggctgtgtattactgtgcgagggcacaattggaacgacggtacttctactacatggacgtctggggcaaagggaccacggtcaccgtctcctcagcggccgcaaccacgacgccagcgccgcggccaccaacaccggcgcccaccatcgcgtcgcagcccctgtccctgcgcccagaggcgtgccggccagcggcggggggcgcagtgcacacgagggggctggacttcgcctgtgatatctacatctgggcgcccttggccgggacttgtggggtccttctcctgtcactggttatcaccctttactgcaaacggggcagaaagaaactcctgtatatattcaaacaaccatttatgagaccagtacaaactactcaagaggaagatggctgtagctgccgatttccagaagaagaagaaggaggatgtgaactgagagtgaagttcagcaggagcgcagacgcccccgcgtaccagcagggccagaaccagctctataacgagctcaatctaggacgaagagaggagtacgatgttttggacaagagacgtggccgggaccctgagatggggggaaagccgagaaggaagaaccctcaggaaggcctgtacaatgaactgcagaaagataagatggcggaggcctacagtgagattgggatgaaaggcgagcgccggaggggcaaggggcacgatggcctttaccagggtctcagtacagccaccaaggacacctacgacgcccttcacatgcaggccctgccccctcgc

SEQ ID NO: 2793 - DNA, 1491 bp, synthetic construct
  misc_feature 1..1491: note = Synthetic
  source 1..1491: mol_type = other DNA
atggccttaccagtgaccgccttgctcctgccgctggccttgctgctccacgccgccaggccggacatccagatgacccagtctccatcctcactgtctgcatctgtaggagacagagtcaccatcacttgtcgggcgagtcagggtattagcagctggttagcctggtatcagcagaaaccagagaaagcccctaagtccctgatctatgctgcatccagtttacagggtggggtcccatcaaggttcagcggcagtggatctgggacagatttcactctcaccatcagcagcctgcagcctgaagattttgcaacttattactgccaacagtatgatagttacccgtacacttttggccaggggaccaagctggagatcaaaggcagcaccagcggcagcggcaagcccggctccggagagggcagcaccaagggccaggtgcagctggtgcagtctggggctgaggtgaagaagcctggggcctcagtgaaggtctcctgcaaggcttctggatacaccttcaccagttatgatatcaactgggtgcgacaggccactggacaagggcttgagtggatgggatggatgatccctaacagtggtgacacaggctctgcacagaagttccagggcagagtcaccatgaccaggaacacctccataggcacagcctacatggagctgagcagcctgagatctgaggacacggccgtttattactgtgcgagaggcggatattgtaatagtaccagttgctactactactacatggacgtctggggcaaagggaccacggtcaccgtctcctcagcggccgcaaccacgacgccagcgccgcggccaccaacaccggcgcccaccatcgcgtcgcagcccctgtccctgcgcccagaggcgtgccggccagcggcggggggcgcagtgcacacgagggggctggacttcgcctgtgatatctacatctgggcgcccttggccgggacttgtggggtccttctcctgtcactggttatcaccctttactgcaaacggggcagaaagaaactcctgtatatattcaaacaaccatttatgagaccagtacaaactactcaagaggaagatggctgtagctgccgatttccagaagaagaagaaggaggatgtgaactgagagtgaagttcagcaggagcgcagacgcccccgcgtaccagcagggccagaaccagctctataacgagctcaatctaggacgaagagaggagtacgatgttttggacaagagacgtggccgggaccctgagatggggggaaagccgagaaggaagaaccctcaggaaggcctgtacaatgaactgcagaaagataagatggcggaggcctacagtgagattgggatgaaaggcgagcgccggaggggcaaggggcacgatggcctttaccagggtctcagtacagccaccaaggacacctacgacgcccttcacatgcaggccctgccccctcgc

SEQ ID NO: 2794 - DNA, 1494 bp, synthetic construct
  misc_feature 1..1494: note = Synthetic
  source 1..1494: mol_type = other DNA
atggccttaccagtgaccgccttgctcctgccgctggccttgctgctccacgccgccaggccggacatccaggtgacccagtctccaaccttcctgtctgcatctgtaggagacagagtcaccatcacttgccgggccagtcagggcattagcagttatttagcctggtatcagcaaaaaccagggaaagcccctaagctcctgatctatggtgcatccactttgcaaagtggggtcccatcaaggttcagcggcagtggatctgggacagaattcactctcacaatcagcagcctgcagcctgaagattttgcaacttattactgtcaacagcttaatagttacccgtggacgttcggccaagggaccaaggtggaaatcaaaggcagcaccagcggcagcggcaagcccggctccggagagggcagcaccaagggccaggtgcagctggtgcagtctggggctgaggtgaagaagcctggggcctcagtgaaggtctcctgcaaggcttctggatacaccttcaccagttatgatatcaactgggtgcgacaggccactggacaagggcttgagtggatgggatggatgaaccctaatagtggtaacacagtctatgcacagaagttccagggcagagtcaccatgaccaggaacacctccataagcacagcctacatggagctgagcagcctgagatctgaggacacggccgtgtattactgtgcgagaggaggcgatttttggagtggttaccatgactactactactacatggacgtctggggcaaagggaccacggtcaccgtctcctcagcggccgcaaccacgacgccagcgccgcggccaccaacaccggcgcccaccatcgcgtcgcagcccctgtccctgcgcccagaggcgtgccggccagcggcggggggcgcagtgcacacgagggggctggacttcgcctgtgatatctacatctgggcgcccttggccgggacttgtggggtccttctcctgtcactggttatcaccctttactgcaaacggggcagaaagaaactcctgtatatattcaaacaaccatttatgagaccagtacaaactactcaagaggaagatggctgtagctgccgatttccagaagaagaagaaggaggatgtgaactgagagtgaagttcagcaggagcgcagacgcccccgcgtaccagcagggccagaaccagctctataacgagctcaatctaggacgaagagaggagtacgatgttttggacaagagacgtggccgggaccctgagatggggggaaagccgagaaggaagaaccctcaggaaggcctgtacaatgaactgcagaaagataagatggcggaggcctacagtgagattgggatgaaaggcgagcgccggaggggcaaggggcacgatggcctttaccagggtctcagtacagccaccaaggacacctacgacgcccttcacatgcaggccctgccccctcgc

SEQ ID NO: 2795 - DNA, 1488 bp, synthetic construct
  misc_feature 1..1488: note = Synthetic
  source 1..1488: mol_type = other DNA
atggccttaccagtgaccgccttgctcctgccgctggccttgctgctccacgccgccaggccgtcctatgagctgactcagccaccctcagtgtccgtgtccccaggacagacagccagcatcacctgctctggagataaattgggggataaatatgcttgctggtatcagcagaagccaggccagtcccctgtgctggtcatctatcaagatagcaagcggccctcagggatccctgagcgattctctggctccaactctgggaacacagccactctgaccatcagcgggacccaggctatggatgaggctgactattactgtcaggcgtgggacagcagcactgctgtgttcggaggaggcacccagctgaccgccctcggcagcaccagcggcagcggcaagcccggctccggagagggcagcaccaagggccaggtgcagctgcaggagtcgggcccaggactggtgaagccttcggagaccctgtccctcacctgcactgtctctggtggctccatcagtagttactactggagctggatccggcagcccgccgggaagggactggagtggattgggcgtatctataccagtgggagcaccaactacaacccctccctcaagagtcgagtcaccatgtcagtagacacgtccaagaaccagttctccctgaagctgagctctgtgaccgccgcggacacggccgtgtattactgtgcgagagaggagtaccagctgctaccggccctctactactactactacatggacgtctggggcaaagggaccacggtcaccgtctcctcagcggccgcaaccacgacgccagcgccgcggccaccaacaccggcgcccaccatcgcgtcgcagcccctgtccctgcgcccagaggcgtgccggccagcggcggggggcgcagtgcacacgagggggctggacttcgcctgtgatatctacatctgggcgcccttggccgggacttgtggggtccttctcctgtcactggttatcaccctttactgcaaacggggcagaaagaaactcctgtatatattcaaacaaccatttatgagaccagtacaaactactcaagaggaagatggctgtagctgccgatttccagaagaagaagaaggaggatgtgaactgagagtgaagttcagcaggagcgcagacgcccccgcgtaccagcagggccagaaccagctctataacgagctcaatctaggacgaagagaggagtacgatgttttggacaagagacgtggccgggaccctgagatggggggaaagccgagaaggaagaaccctcaggaaggcctgtacaatgaactgcagaaagataagatggcggaggcctacagtgagattgggatgaaaggcgagcgccggaggggcaaggggcacgatggcctttaccagggtctcagtacagccaccaaggacacctacgacgcccttcacatgcaggccctgccccctcgc

SEQ ID NO: 2796 - DNA, 1491 bp, synthetic construct
  misc_feature 1..1491: note = Synthetic
  source 1..1491: mol_type = other DNA
atggccttaccagtgaccgccttgctcctgccgctggccttgctgctccacgccgccaggccgcagactgtagtgacccaggaaccatcgttctcagtgtcccctggagggacagtcacactcacttgtggcttgacctctggctcagtctctactagttactaccccaactggtaccagcagaccccaggccaggctccacgcacgctcatctacagcacaaatattcgctcttctggggtccctgatcgcttctctggctccatccttgggaacaaagctgccctcaccatcacgggggcccaggcagatgatgaatctgattattactgtgtgctgtatatgggtagtggcatgtttattttcggcagtggaaccaaggtcactgtcctaggcagcaccagcggcagcggcaagcccggctccggagagggcagcaccaagggccaggtgcagctggtggagtctgggggaggcgtggtccagcctgggaggtccctgagactctcctgtgcagcaactggattcaccttcagtagctatggcatgcactgggtccgccaggctccaggcaaggggctggagtggatggtagttatatggtctgatggacataataaatactatgcagactccgtgaagggccgattcaccatctccagagacaattccaagaacacgctgtatctgcaaatgaacagcctgagagccgaggacacggctgtgtattactgtgcgagggcacaactggaacgacggtacttctactacatggacgtctggggcaaagggaccacggtcaccgtctcctcagcggccgcaaccacgacgccagcgccgcggccaccaacaccggcgcccaccatcgcgtcgcagcccctgtccctgcgcccagaggcgtgccggccagcggcggggggcgcagtgcacacgagggggctggacttcgcctgtgatatctacatctgggcgcccttggccgggacttgtggggtccttctcctgtcactggttatcaccctttactgcaaacggggcagaaagaaactcctgtatatattcaaacaaccatttatgagaccagtacaaactactcaagaggaagatggctgtagctgccgatttccagaagaagaagaaggaggatgtgaactgagagtgaagttcagcaggagcgcagacgcccccgcgtaccagcagggccagaaccagctctataacgagctcaatctaggacgaagagaggagtacgatgttttggacaagagacgtggccgggaccctgagatggggggaaagccgagaaggaagaaccctcaggaaggcctgtacaatgaactgcagaaagataagatggcggaggcctacagtgagattgggatgaaaggcgagcgccggaggggcaaggggcacgatggcctttaccagggtctcagtacagccaccaaggacacctacgacgcccttcacatgcaggccctgccccctcgc

SEQ ID NO: 2797 - DNA, 1491 bp, synthetic construct
  misc_feature 1..1491: note = Synthetic
  source 1..1491: mol_type = other DNA
atggccttaccagtgaccgccttgctcctgccgctggccttgctgctccacgccgccaggccggaaattgtgctgactcagtctccagactttcagtctgtgactccaaaggagaaagtcaccatcacctgccgggccagtcagagcattggtagtagcttacactggtaccagcagaaaccagatcagtctccaatgctcctcatcaagtttgcttcccagtccatctcaggggtcccctcgaggttcagtggcagtggatctgggacagatttcaccctcaccatcaatagcctggaagctgaagatgctgcagcgtattactgtcatcagagtagtagtttaccgtggacgttcggccaagggaccaaggtggaaatcaaaggcagcaccagcggcagcggcaagcccggctccggagagggcagcaccaagggccaggtgcagctggtggagtctgggggaggcgtggtccagcctgggaggtccctgagactctcctgtgcagcgtctggattcaccttcactagttatgacatgcactgggtccgccaggctccaggcaaggggctggagtgggtgacaattatatggtttgatggaagtaataaatactatgcagactccgtgaagggccgattcaccatctccagagacaattccaagaacacgctgtatctgcaaatgaacagcctgagcgccgaggacacggctgtgtattactgtgcgagaggagacaactggaacgaccggtactactactactactacatggacgtctggggcaaagggaccacggtcaccgtctcctcagcggccgcaaccacgacgccagcgccgcggccaccaacaccggcgcccaccatcgcgtcgcagcccctgtccctgcgcccagaggcgtgccggccagcggcggggggcgcagtgcacacgagggggctggacttcgcctgtgatatctacatctgggcgcccttggccgggacttgtggggtccttctcctgtcactggttatcaccctttactgcaaacggggcagaaagaaactcctgtatatattcaaacaaccatttatgagaccagtacaaactactcaagaggaagatggctgtagctgccgatttccagaagaagaagaaggaggatgtgaactgagagtgaagttcagcaggagcgcagacgcccccgcgtaccagcagggccagaaccagctctataacgagctcaatctaggacgaagagaggagtacgatgttttggacaagagacgtggccgggaccctgagatggggggaaagccgagaaggaagaaccctcaggaaggcctgtacaatgaactgcagaaagataagatggcggaggcctacagtgagattgggatgaaaggcgagcgccggaggggcaaggggcacgatggcctttaccagggtctcagtacagccaccaaggacacctacgacgcccttcacatgcaggccctgccccctcgc

SEQ ID NO: 2798 - DNA, 1506 bp, synthetic construct
  misc_feature 1..1506: note = Synthetic
  source 1..1506: mol_type = other DNA
atggccttaccagtgaccgccttgctcctgccgctggccttgctgctccacgccgccaggccggatattgtgatgacccagcctccactctcctcgcctgtcacccttggacagccggcctccatctcctgcaggtctagtcaaagcctcgtacacagtgatggaaacacctacttgagttggcttcagcagaggccaggccagcctccaagactcctaatttataaggtttctaaccggttctctggggtcccagacagattcagtggcagtggggcagggacagatttcacactgaaaatcagcagggtggaagctgaggatgtcggggtttattactgcacgcaagctacacaatttcctcacacttttggccaggggaccaagctggagatcaaaggcagcaccagcggcagcggcaagcccggctccggagagggcagcaccaagggccaggttcagctggtgcagtctggagctgaggtgaagaagcctggggcctcagtgaaggtctcctgcaaggcttctggttacacctttaccagctatggtatcagctgggtgcgacaggcccctggacaagggcttgagtggatggggtggatcagcgcttacaatggtcacacagactatacacagaaactccagggcagagtcaccatgaccacagacacatccacgaccacagcctacatggaactgaggagcctgagctctgccgacacggccgtgtattactgtgtgagagaagtggtacttcccaccacggactactactacttttacatggacgtctggggcaaagggaccacggtcaccgtctcctcagcggccgcaaccacgacgccagcgccgcggccaccaacaccggcgcccaccatcgcgtcgcagcccctgtccctgcgcccagaggcgtgccggccagcggcggggggcgcagtgcacacgagggggctggacttcgcctgtgatatctacatctgggcgcccttggccgggacttgtggggtccttctcctgtcactggttatcaccctttactgcaaacggggcagaaagaaactcctgtatatattcaaacaaccatttatgagaccagtacaaactactcaagaggaagatggctgtagctgccgatttccagaagaagaagaaggaggatgtgaactgagagtgaagttcagcaggagcgcagacgcccccgcgtaccagcagggccagaaccagctctataacgagctcaatctaggacgaagagaggagtacgatgttttggacaagagacgtggccgggaccctgagatggggggaaagccgagaaggaagaaccctcaggaaggcctgtacaatgaactgcagaaagataagatggcggaggcctacagtgagattgggatgaaaggcgagcgccggaggggcaaggggcacgatggcctttaccagggtctcagtacagccaccaaggacacctacgacgcccttcacatgcaggccctgccccctcgc

SEQ ID NO: 2799 - DNA, 1503 bp, synthetic construct
  misc_feature 1..1503: note = Synthetic
  source 1..1503: mol_type = other DNA
atggccttaccagtgaccgccttgctcctgccgctggccttgctgctccacgccgccaggccggacatccagatgacccagtctccatcctcactgtctgcatctgtaggagacagagtcaccatcacttgtcgggcgagtcagggtattagcagctggttagcctggtatcagcagaaaccagagaaagcccctaagtccctgatctatgctgcatccagtttgcaaagtggggtcccatcaaggttcagcggcagtggatctgggacagatttcactctcaccatcagcagcctgcagcctgaagattttgcaacttattactgccaacagtataatagttacccgtacacttttggccaggggaccaagctggagatcaaaggcagcaccagcggcagcggcaagcccggctccggagagggcagcaccaagggccaggtccagctggtacagtctggggctgaggtgaagaagcctggggcctcagtgaaggtctcctgcaaggtttccggatacaccctcactgaattatccatgcactgggtgcgacaggctcctggaaaagggcttgagtggatgggaggttttgatcctgaagatggtgaaacaatctacgcacagaagttccagggcagagtcaccatgaccgaggacacatctacagacacagcctacatggagctgagcagcctgagatctgaggacacggccgtgtattactgtgcaacaggacgtattactatggttcggggagttattatcccctactactactactacatggacgtctggggcaaagggaccacggtcaccgtctcctcagcggccgcaaccacgacgccagcgccgcggccaccaacaccggcgcccaccatcgcgtcgcagcccctgtccctgcgcccagaggcgtgccggccagcggcggggggcgcagtgcacacgagggggctggacttcgcctgtgatatctacatctgggcgcccttggccgggacttgtggggtccttctcctgtcactggttatcaccctttactgcaaacggggcagaaagaaactcctgtatatattcaaacaaccatttatgagaccagtacaaactactcaagaggaagatggctgtagctgccgatttccagaagaagaagaaggaggatgtgaactgagagtgaagttcagcaggagcgcagacgcccccgcgtaccagcagggccagaaccagctctataacgagctcaatctaggacgaagagaggagtacgatgttttggacaagagacgtggccgggaccctgagatggggggaaagccgagaaggaagaaccctcaggaaggcctgtacaatgaactgcagaaagataagatggcggaggcctacagtgagattgggatgaaaggcgagcgccggaggggcaaggggcacgatggcctttaccagggtctcagtacagccaccaaggacacctacgacgcccttcacatgcaggccctgccccctcgc

SEQ ID NO: 2800 - DNA, 1497 bp, synthetic construct
  misc_feature 1..1497: note = Synthetic
  source 1..1497: mol_type = other DNA
atggccttaccagtgaccgccttgctcctgccgctggccttgctgctccacgccgccaggccggatattgtgatgacccagactccactctctctgtccgtcacccctggacagccggcctccatctcctgcaagtctagtaagagcctcctgcatagtgatggaaagacctatttgtattggtacctgcagaagccaggccagcctccacagctcctgatctatgaagtttccaaccggttctctggagtgccagataggttcagtggcagcgggtcagggacagatttcacactgaaaatcagccgggtggaggctgaggatgttggggtttattactgcatgcaaagtatacaatttccgtggacgttcggccaagggaccaaggtggaaatcaagggcagcaccagcggcagcggcaagcccggctccggagagggcagcaccaagggccaggttcagctggtgcagtctggaactgaggtgaagaagcctggggcctcagtgaaggtctcctgcaaggcttctggttacacctttaccaactatggtatcggctgggtgcgacaggcccctggacaagggcttgagtggatgggatggatcatcgcttacaatggttacacaaagtatgcacagattctccagggcagagtcaccatgaccacagacacatccacgaacacagcttatatggaactgaggagcctgagatctgacgacacggccgtgtattactgtgcgagacagcagctcgggggggactaccactactacatggacgtctggggcaaagggaccacggtcaccgtctcctcagcggccgcaaccacgacgccagcgccgcggccaccaacaccggcgcccaccatcgcgtcgcagcccctgtccctgcgcccagaggcgtgccggccagcggcggggggcgcagtgcacacgagggggctggacttcgcctgtgatatctacatctgggcgcccttggccgggacttgtggggtccttctcctgtcactggttatcaccctttactgcaaacggggcagaaagaaactcctgtatatattcaaacaaccatttatgagaccagtacaaactactcaagaggaagatggctgtagctgccgatttccagaagaagaagaaggaggatgtgaactgagagtgaagttcagcaggagcgcagacgcccccgcgtaccagcagggccagaaccagctctataacgagctcaatctaggacgaagagaggagtacgatgttttggacaagagacgtggccgggaccctgagatggggggaaagccgagaaggaagaaccctcaggaaggcctgtacaatgaactgcagaaagataagatggcggaggcctacagtgagattgggatgaaaggcgagcgccggaggggcaaggggcacgatggcctttaccagggtctcagtacagccaccaaggacacctacgacgcccttcacatgcaggccctgccccctcgc

SEQ ID NO: 2801 - DNA, 1497 bp, synthetic construct
  misc_feature 1..1497: note = Synthetic
  source 1..1497: mol_type = other DNA
atggccttaccagtgaccgccttgctcctgccgctggccttgctgctccacgccgccaggccggatattgtgatgacccagactccactctctctgtccgtcacccctggacagccggcctccatctcctgcaagtctagtaagagcctcctgcatagtgatggaaagacctatttgtattggtacctgcagaagccaggccagcctccacagctcctgatctatgaagtttccacccggttctctggagtgccagataggttcagtggcagcgggtcagggacagatttcacactgaaaatcagccgggtggaggctgaggatgttggggtttattactgcatgcaaagtatacagtttccgtggacgttcggccaagggaccaaggtggaaatcaaaggcagcaccagcggcagcggcaagcccggctccggagagggcagcaccaagggccaggttcagctggtgcagtctggaactgaggtgaagaagcctggggcctcagtgaaggtctcctgcaaggcttctggttacacctttaccaactatggtatcggctgggtgcgacaggcccctggacaagggcttgagtggatgggatggatcatcgcttacaatggttacacaaagtatgcacagattctccagggcagagtcaccatgaccacggacacatccacgaacacagcctatatggaactgaggagcctgagatctgacgacacggccgtgtattactgtgcgcgacagcagctcgggggggactaccactactacatggacgtctggggcaaagggaccacggtcaccgtctcttcagcggccgcaaccacgacgccagcgccgcggccaccaacaccggcgcccaccatcgcgtcgcagcccctgtccctgcgcccagaggcgtgccggccagcggcggggggcgcagtgcacacgagggggctggacttcgcctgtgatatctacatctgggcgcccttggccgggacttgtggggtccttctcctgtcactggttatcaccctttactgcaaacggggcagaaagaaactcctgtatatattcaaacaaccatttatgagaccagtacaaactactcaagaggaagatggctgtagctgccgatttccagaagaagaagaaggaggatgtgaactgagagtgaagttcagcaggagcgcagacgcccccgcgtaccagcagggccagaaccagctctataacgagctcaatctaggacgaagagaggagtacgatgttttggacaagagacgtggccgggaccctgagatggggggaaagccgagaaggaagaaccctcaggaaggcctgtacaatgaactgcagaaagataagatggcggaggcctacagtgagattgggatgaaaggcgagcgccggaggggcaaggggcacgatggcctttaccagggtctcagtacagccaccaaggacacctacgacgcccttcacatgcaggccctgccccctcgc

SEQ ID NO: 2802 - DNA, 1491 bp, synthetic construct
  misc_feature 1..1491: note = Synthetic
  source 1..1491: mol_type = other DNA
atggccttaccagtgaccgccttgctcctgccgctggccttgctgctccacgccgccaggccggacatccagatgacccagtctccatcctcactgtctgcctctgtaggagacagagtcaccatcacttgtcgggcgagtcagggtattagcaactggttagcctggtatcagcagaaaccagagaaagcccctaagtccctgatctatgctgcatccagtttgcaaggtggggtcccatcaagattcagcggcagtggatctgggacagatttcactctcaccatcagcagcctgcagcctgaagattttgcaacttattactgccaacagtatgatagttacccgtacacttttggccaggggaccaagctggagatcaaaggcagcaccagcggcagcggcaagcccggctccggagagggcagcaccaagggccaggtgcagctggtgcagtctgggactgaggtgaagaagcctggggcctcagtgaaggtctcctgtaagacttctggatacaccttcaccagttatgatatcaactgggtgcgacaggccactggacaagggcttgagtggatgggatggatgaaccctatcagtggtgacacaggctctgcacagaagttccagggcagagtcaccatgaccaggaacacctccataggcacagcctacatggagctgagcagcctgagatctgaggacacggccgtttattactgtgcgagaggcggatattgtagtagtaccagctgctactactactacatggacgtctggggcaaagggaccacggtcaccgtctcctcagcggccgcaaccacgacgccagcgccgcggccaccaacaccggcgcccaccatcgcgtcgcagcccctgtccctgcgcccagaggcgtgccggccagcggcggggggcgcagtgcacacgagggggctggacttcgcctgtgatatctacatctgggcgcccttggccgggacttgtggggtccttctcctgtcactggttatcaccctttactgcaaacggggcagaaagaaactcctgtatatattcaaacaaccatttatgagaccagtacaaactactcaagaggaagatggctgtagctgccgatttccagaagaagaagaaggaggatgtgaactgagagtgaagttcagcaggagcgcagacgcccccgcgtaccagcagggccagaaccagctctataacgagctcaatctaggacgaagagaggagtacgatgttttggacaagagacgtggccgggaccctgagatggggggaaagccgagaaggaagaaccctcaggaaggcctgtacaatgaactgcagaaagataagatggcggaggcctacagtgagattgggatgaaaggcgagcgccggaggggcaaggggcacgatggcctttaccagggtctcagtacagccaccaaggacacctacgacgcccttcacatgcaggccctgccccctcgc

SEQ ID NO: 2803 - DNA, 1491 bp, synthetic construct
  misc_feature 1..1491: note = Synthetic
  source 1..1491: mol_type = other DNA
atggccttaccagtgaccgccttgctcctgccgctggccttgctgctccacgccgccaggccggacatccagatgacccagtctccatcctcactgtctgcatctgtaggagacagagtcaccatcacttgtcgggcgagtcagggtattagcagctggttagcctggtatcagcagaaaccagagaaagcccctaagtccctgatctatgctgcatccagtttacaaggtggggtcccatcaaggttcagcggcagtggatctgggacagatttcactctcaccatcagcagcctgcagcctgaagattttgcaacttattactgccaacagtatgatagttacccgtacacttttggccaggggaccaagctggagatcaaaggcagcaccagcggcagcggcaagcccggctccggagagggcagcaccaagggccaggtgcagctggtgcagtctggggctgaggtgaagaagcctggggcctcagtgaaggtctcctgcaaggcttctggatacaccttcaccagttatgatatcaactgggtgcgacaggccactggacaagggcttgagtggatgggatggatgatccctaacagtggtgacacaggctctgcacagaagttccagggcagagtcaccatgaccaggaacacctccataagcacagcctacatggagctgagcagcctgagatctgaggacacggccgtttattactgtgcgagaggcggatattgtaatagtaccagttgctactactactacatggacgtctggggcaaagggaccacggtcaccgtctcctcagcggccgcaaccacgacgccagcgccgcggccaccaacaccggcgcccaccatcgcgtcgcagcccctgtccctgcgcccagaggcgtgccggccagcggcggggggcgcagtgcacacgagggggctggacttcgcctgtgatatctacatctgggcgcccttggccgggacttgtggggtccttctcctgtcactggttatcaccctttactgcaaacggggcagaaagaaactcctgtatatattcaaacaaccatttatgagaccagtacaaactactcaagaggaagatggctgtagctgccgatttccagaagaagaagaaggaggatgtgaactgagagtgaagttcagcaggagcgcagacgcccccgcgtaccagcagggccagaaccagctctataacgagctcaatctaggacgaagagaggagtacgatgttttggacaagagacgtggccgggaccctgagatggggggaaagccgagaaggaagaaccctcaggaaggcctgtacaatgaactgcagaaagataagatggcggaggcctacagtgagattgggatgaaaggcgagcgccggaggggcaaggggcacgatggcctttaccagggtctcagtacagccaccaaggacacctacgacgcccttcacatgcaggccctgccccctcgc

SEQ ID NO: 2804 - DNA, 1494 bp, synthetic construct
  misc_feature 1..1494: note = Synthetic
  source 1..1494: mol_type = other DNA
atggccttaccagtgaccgccttgctcctgccgctggccttgctgctccacgccgccaggccggaaattgtgttgacgcagtctccaggcaccctgtctttgtctccaggggaaagagccaccctctcctgcagggccagtcagagtgttagcagcagctacttagcctggtaccagcagaaacctggccaggctcccaggctcctcatctatggtgcatccagcagggccactggcatcccagacaggttcagtgacagtgggtctgggacagacttcactctcaccatcagcagactggagcctgaagattttgcagtgtattactgtcagcactatggtagctcacctccgaggatcactttcggccctgggaccaaagtggatatcaaaggcagcaccagcggcagcggcaagcccggctccggagagggcagcaccaagggcgaggtgcagttgttggagtctgggggaggcttggtacaacctggggggtccctgagactctcctgtgcagcctctggattcacctttagcagctatgtcatgaactgggtccgccaggctccagggaaggggctggaatgggtctcatctgttagtggtagtggtaataactcattctacgcagactccgtgaagggccggttcaccatctccagagacaattccaagaacacgctgtatctgcaaatgaacagcctgagagccgaggacacggccgtatattactgtgcgagtcgtagttccagttatctctactactactactacatggacgtctggggcaaagggaccaccgtcaccgtctcctcagcggccgcaaccacgacgccagcgccgcggccaccaacaccggcgcccaccatcgcgtcgcagcccctgtccctgcgcccagaggcgtgccggccagcggcggggggcgcagtgcacacgagggggctggacttcgcctgtgatatctacatctgggcgcccttggccgggacttgtggggtccttctcctgtcactggttatcaccctttactgcaaacggggcagaaagaaactcctgtatatattcaaacaaccatttatgagaccagtacaaactactcaagaggaagatggctgtagctgccgatttccagaagaagaagaaggaggatgtgaactgagagtgaagttcagcaggagcgcagacgcccccgcgtaccagcagggccagaaccagctctataacgagctcaatctaggacgaagagaggagtacgatgttttggacaagagacgtggccgggaccctgagatggggggaaagccgagaaggaagaaccctcaggaaggcctgtacaatgaactgcagaaagataagatggcggaggcctacagtgagattgggatgaaaggcgagcgccggaggggcaaggggcacgatggcctttaccagggtctcagtacagccaccaaggacacctacgacgcccttcacatgcaggccctgccccctcgc

SEQ ID NO: 2805 - DNA, 1491 bp, synthetic construct
  misc_feature 1..1491: note = Synthetic
  source 1..1491: mol_type = other DNA
atggccttaccagtgaccgccttgctcctgccgctggccttgctgctccacgccgccaggccggagatcgtgctgacccagagccccgacttccagtctgtgacacctaaggaaaaggttacaattacctgtagagcttcccagaccatcggctcttctctgcactggtaccagcagaaacctgatcagtctccaaagctgctgatcaagcacgccagccagagcttctctggcgtccccagccggttttctggcagcggcagcggaacagattttacactgacagtgaactcactggaagccgaggatgccgccacctactactgccatcagagctccagcctcccttggaccttcggccagggcacgaaggtggaaatcaaaggcagcaccagcggcagcggcaagcccggctccggagagggcagcaccaagggccaagtgcagctggtggagagcggcggcggagtggtgcaacctggaagaagcctgcggctgagctgcgctgctagcggcttcaccttcagcagccacgacatgcactgggtgcggcaggcccctggcaagggcctggactgggtcgccgtgatctggagcgacggcaacaagaagtactacgtggacagcgccaagggcagattcaccatcagccgcgacaatagcaagaacaccgtgtacctgcagatgaacagcctgagagccgaggacaccgccatctactattgcgccagaggcgataattggaacgacgagcacagctactattactacatggacgtgtggggcaaaggcacaaccgtgaccgtgtcctccgcggccgcaaccacgacgccagcgccgcggccaccaacaccggcgcccaccatcgcgtcgcagcccctgtccctgcgcccagaggcgtgccggccagcggcggggggcgcagtgcacacgagggggctggacttcgcctgtgatatctacatctgggcgcccttggccgggacttgtggggtccttctcctgtcactggttatcaccctttactgcaaacggggcagaaagaaactcctgtatatattcaaacaaccatttatgagaccagtacaaactactcaagaggaagatggctgtagctgccgatttccagaagaagaagaaggaggatgtgaactgagagtgaagttcagcaggagcgcagacgcccccgcgtaccagcagggccagaaccagctctataacgagctcaatctaggacgaagagaggagtacgatgttttggacaagagacgtggccgggaccctgagatggggggaaagccgagaaggaagaaccctcaggaaggcctgtacaatgaactgcagaaagataagatggcggaggcctacagtgagattgggatgaaaggcgagcgccggaggggcaaggggcacgatggcctttaccagggtctcagtacagccaccaaggacacctacgacgcccttcacatgcaggccctgccccctcgc

SEQ ID NO: 2806 - DNA, 1491 bp, synthetic construct
  misc_feature 1..1491: note = Synthetic
  source 1..1491: mol_type = other DNA
atggccttaccagtgaccgccttgctcctgccgctggccttgctgctccacgccgccaggccggagatcgtgctgacacagtccccagattttcagagcgtgacccccaaggaaaaggtgacaatcacctgcagagccagccagaccatcggcagcagcctgcactggtaccagcagaaacccgatcagtctcctaagctgctgatcaagcacgccagccagagcttcagcggcgttcccagcaggttcagcggaagcggcagcggcaccgacttcaccctgaccgtgaactctctcgaggccgaggacgccgctacatactactgccaccagagcagctccctgccttggaccttcggccagggcaccaaggtcgaaattaagggcagcaccagcggcagcggcaagcccggctccggagagggcagcaccaagggccaagtgcagctggtggaaagcggcggcggagtggtgcaacctggcagatctctgcggctgtcttgtgccgcctctggatttacattcagctctcatgatatgcactgggtgcggcaggcccctggcaaaggcctggactgggtcgccgtgatctggagcgacggcaacaacaagtactacgccgacagcgccaagggaagattcaccatcagccgggacaattctaaaaacaccgtgtacctgcagatgaacagcctgagagctgaggacaccgccatctactattgcgccagaggagataattggaacgacgagcacagctactactactatatggacgtgtggggcaagggcacaacagtgaccgtgtcctccgcggccgcaaccacgacgccagcgccgcggccaccaacaccggcgcccaccatcgcgtcgcagcccctgtccctgcgcccagaggcgtgccggccagcggcggggggcgcagtgcacacgagggggctggacttcgcctgtgatatctacatctgggcgcccttggccgggacttgtggggtccttctcctgtcactggttatcaccctttactgcaaacggggcagaaagaaactcctgtatatattcaaacaaccatttatgagaccagtacaaactactcaagaggaagatggctgtagctgccgatttccagaagaagaagaaggaggatgtgaactgagagtgaagttcagcaggagcgcagacgcccccgcgtaccagcagggccagaaccagctctataacgagctcaatctaggacgaagagaggagtacgatgttttggacaagagacgtggccgggaccctgagatggggggaaagccgagaaggaagaaccctcaggaaggcctgtacaatgaactgcagaaagataagatggcggaggcctacagtgagattgggatgaaaggcgagcgccggaggggcaaggggcacgatggcctttaccagggtctcagtacagccaccaaggacacctacgacgcccttcacatgcaggccctgccccctcgc

SEQ ID NO: 2807 - DNA, 1488 bp, synthetic construct
  misc_feature 1..1488: note = Synthetic
  source 1..1488: mol_type = other DNA
atggccttaccagtgaccgccttgctcctgccgctggccttgctgctccacgccgccaggccggatatccagatgacccagagccccagcagcctgagcgccagcgtgggcgaccgggtcacaatcacctgcagagccagccagagcatcagcaattacctgaactggtaccaccagaagcccggcaaagcccctaagctgctgatctacgctgcttctagcctcgagagcggcgtgcctagcagattcagcggcagcggcagcggaacagatttcaccctgacaatcagctctctgcaacctgaggacttcgccacatactattgtcagcagtcctacagcaatcctctgaccttcggcggcggcacaaaggtggaatctaagggcagcaccagcggcagcggcaagcccggctccggagagggcagcaccaagggccaactgcagctggtgcagagcggagccgaggtgaagaagcctggcgctagcgttaaggtgtcctgcaaggcctccggctacacctttaccaactacggcatctcctggctgcgccaggccccaggccagggcctggagtggatgggctggatctccggatacaacgacaacacccactacgcccagaaattccagggtagagtgactatgaccaccgataccagcacaacaacagcctacatggaactgagaaacctgcggagcgacgacaccgccgtgtactactgcgcccgggacggcattgccgctagacctgtgtactactattacatggacgtgtggggcaagggcaccaccgtgacagtgtcttctgcggccgcaaccacgacgccagcgccgcggccaccaacaccggcgcccaccatcgcgtcgcagcccctgtccctgcgcccagaggcgtgccggccagcggcggggggcgcagtgcacacgagggggctggacttcgcctgtgatatctacatctgggcgcccttggccgggacttgtggggtccttctcctgtcactggttatcaccctttactgcaaacggggcagaaagaaactcctgtatatattcaaacaaccatttatgagaccagtacaaactactcaagaggaagatggctgtagctgccgatttccagaagaagaagaaggaggatgtgaactgagagtgaagttcagcaggagcgcagacgcccccgcgtaccagcagggccagaaccagctctataacgagctcaatctaggacgaagagaggagtacgatgttttggacaagagacgtggccgggaccctgagatggggggaaagccgagaaggaagaaccctcaggaaggcctgtacaatgaactgcagaaagataagatggcggaggcctacagtgagattgggatgaaaggcgagcgccggaggggcaaggggcacgatggcctttaccagggtctcagtacagccaccaaggacacctacgacgcccttcacatgcaggccctgccccctcgc

SEQ ID NO: 2808 - DNA, 1485 bp, synthetic construct
  misc_feature 1..1485: note = Synthetic
  source 1..1485: mol_type = other DNA
atggccttaccagtgaccgccttgctcctgccgctggccttgctgctccacgccgccaggccggagattgttctgacccagagccctgatttccagagcgtgacccccaaggaaaaggtgacaatcacctgccgggccagccaaagcatcggctccagcctgcactggtatcagcagaagcccgaccagtccccaaagctgctgatcaaattcgcctctcagtcattcagcggcgtgccttcccggttcagcggaagcggcagcggcacagactttaccctgacaatccacagcctggaagccgaggacgccgctacatactactgccaccagagcggcagcctgccctggacattcggccagggcacgaaggtggagatcaagggcagcaccagcggcagcggcaagcccggctccggagagggcagcaccaagggccaagtgcagctggtggagagcgggggaggtgtcgtgcagcctggaagaagcctcagactgtcttgtgtggccagcggctttaccttcagctctaatgacatctactgggtgcggcaggcccctggcaagggcctggaatgggtcgctgtgatctggtacgacggcagcaacaaatactacgccgattctgtgaagggcagattcaccatcagcagagataattctaagaacaccctgtacctgcagatgaacagcctgagagccgaggataccgccgtgtactattgcgccaggggcgacaactggaacgacgagcaccattaccactactacatggacgtgtggggcaaaggcaccaccgtgaccgtggcggccgcaaccacgacgccagcgccgcggccaccaacaccggcgcccaccatcgcgtcgcagcccctgtccctgcgcccagaggcgtgccggccagcggcggggggcgcagtgcacacgagggggctggacttcgcctgtgatatctacatctgggcgcccttggccgggacttgtggggtccttctcctgtcactggttatcaccctttactgcaaacggggcagaaagaaactcctgtatatattcaaacaaccatttatgagaccagtacaaactactcaagaggaagatggctgtagctgccgatttccagaagaagaagaaggaggatgtgaactgagagtgaagttcagcaggagcgcagacgcccccgcgtaccagcagggccagaaccagctctataacgagctcaatctaggacgaagagaggagtacgatgttttggacaagagacgtggccgggaccctgagatggggggaaagccgagaaggaagaaccctcaggaaggcctgtacaatgaactgcagaaagataagatggcggaggcctacagtgagattgggatgaaaggcgagcgccggaggggcaaggggcacgatggcctttaccagggtctcagtacagccaccaaggacacctacgacgcccttcacatgcaggccctgccccctcgc

SEQ ID NO: 2809 - DNA, 1479 bp, synthetic construct
  misc_feature 1..1479: note = Synthetic
  source 1..1479: mol_type = other DNA
atggccttaccagtgaccgccttgctcctgccgctggccttgctgctccacgccgccaggccgcaagtgcagctggtggaaagcggcggcggtgttgtgcaacctggcagaagcctgcggctgtcatgcgccgccagcggcttcaccttcagctcttacggcatgcactgggtgcggcaggcccctggaaagggactggaatgggtcgccgtgatcagctacgacggctccaacaagtactacgccgacagcgtgaaaggcagattcaccatctctagggacaacagcaagaccaccctctacctgcagatgaacagcctgagagccgaggacaccgccgtgtactattgtgccagagatcactactactactacatggacgtgtggggcaagggcaccaccgtgaccgtgtcttctggcagcaccagcggcagcggcaagcccggctccggagagggcagcaccaagggccagaccgtggtgactcaggagcccagcttcagcgtcagccccggcggaacagtgaccctgacatgcggcctgagcagcggcagcgtgtccaccagctactatcctagctggtaccagcagacaccaggccaggctcctagaaccctgatctacagcaccaacatccggagcagcggcgtgcctgatagatttagcggctctatcctgggaaataaagccgctctgaccattacaggcgcccaggctgatgacgagagcgactactactgcgtgctgtacatgggctctgatatcgtggttttcggcggcggcacaaagctgacagtgctggcggccgcaaccacgacgccagcgccgcggccaccaacaccggcgcccaccatcgcgtcgcagcccctgtccctgcgcccagaggcgtgccggccagcggcggggggcgcagtgcacacgagggggctggacttcgcctgtgatatctacatctgggcgcccttggccgggacttgtggggtccttctcctgtcactggttatcaccctttactgcaaacggggcagaaagaaactcctgtatatattcaaacaaccatttatgagaccagtacaaactactcaagaggaagatggctgtagctgccgatttccagaagaagaagaaggaggatgtgaactgagagtgaagttcagcaggagcgcagacgcccccgcgtaccagcagggccagaaccagctctataacgagctcaatctaggacgaagagaggagtacgatgttttggacaagagacgtggccgggaccctgagatggggggaaagccgagaaggaagaaccctcaggaaggcctgtacaatgaactgcagaaagataagatggcggaggcctacagtgagattgggatgaaaggcgagcgccggaggggcaaggggcacgatggcctttaccagggtctcagtacagccaccaaggacacctacgacgcccttcacatgcaggccctgccccctcgc

SEQ ID NO: 2810 - DNA, 1485 bp, synthetic construct
  misc_feature 1..1485: note = Synthetic
  source 1..1485: mol_type = other DNA
atggccttaccagtgaccgccttgctcctgccgctggccttgctgctccacgccgccaggccggagatcgtgctgacacagtcccctgctaccctgagcctgagccctggcgagcgggccaccctgagctgcagagccagccagagcgtgtccagctactttgcctggtatcagcagaagcctggccaggccccacggctgctgatctacgacgcctctaatagagccacaggcatcccagctagattcagcggctccggctccggaaccgatttcaccctgaccatctctagcctcgagcctgaggacttcgccgtttactattgtcagcaaagaagcaactggcctctgacatttggcggaggcacaaaggtggaaatcaagggcagcaccagcggcagcggcaagcccggctccggagagggcagcaccaagggccaactgcagctgcaggagagcggccctggactggtgaagcccagcgagacactgagcctgacatgcaccgtgtccggaggctctatcagcagcagcagctactactggggatggattagacagccccccggcaagggcctggaatggatcggcagcctgtactacagcggcagcacctactacaaccccagcctgaagtctagagtgaccatcagcgtggacaccagcaagaaccagttcagcctgaaactgagctctgtcacagccgccgataccgccgtgtactactgcgccgctgtgcagctggaaaggcggggctacttctacatggacgtgtggggcaaaggcaccaccgtgacagtgtctagcgcggccgcaaccacgacgccagcgccgcggccaccaacaccggcgcccaccatcgcgtcgcagcccctgtccctgcgcccagaggcgtgccggccagcggcggggggcgcagtgcacacgagggggctggacttcgcctgtgatatctacatctgggcgcccttggccgggacttgtggggtccttctcctgtcactggttatcaccctttactgcaaacggggcagaaagaaactcctgtatatattcaaacaaccatttatgagaccagtacaaactactcaagaggaagatggctgtagctgccgatttccagaagaagaagaaggaggatgtgaactgagagtgaagttcagcaggagcgcagacgcccccgcgtaccagcagggccagaaccagctctataacgagctcaatctaggacgaagagaggagtacgatgttttggacaagagacgtggccgggaccctgagatggggggaaagccgagaaggaagaaccctcaggaaggcctgtacaatgaactgcagaaagataagatggcggaggcctacagtgagattgggatgaaaggcgagcgccggaggggcaaggggcacgatggcctttaccagggtctcagtacagccaccaaggacacctacgacgcccttcacatgcaggccctgccccctcgc

SEQ ID NO: 2811 - DNA, 1491 bp, synthetic construct
  misc_feature 1..1491: note = Synthetic
  source 1..1491: mol_type = other DNA
atggccttaccagtgaccgccttgctcctgccgctggccttgctgctccacgccgccaggccgcagaccgtcgtgacccaggagcctagcttcagcgtgtccccaggcggaaccgtcacactgacatgcggcctcacaagcggcagcgtgtccaccagctactaccccaactggtaccagcagacacctggacaggcccctagaaccctgatctacagcaccaacatccggagcagcggagtgcccgacagattttctggcagcatcctgggcaacaaggccgctctgaccatcaccggcgctcaggccgacgacgagagcgactactactgcgtgctgtacatgggcagcggcatgttcatcttcggcagcggcacaaaggtgacagtgctgggcagcaccagcggcagcggcaagcccggctccggagagggcagcaccaagggccaagtgcaactggtggaaagcggcggcggcgttgtgcagcctggcagaagcctgcggctgtcatgcgccgccagcggttttaccttctctaattacggcatgcactgggtgcggcaggctcccggcaaaggcctggaatggatggccgtgatctggtccgatggccacaacaagtactacgccgatagcgtgaaaggcagattcaccattagcagagataattctaagaacaccctgtacctgcagatgaacagcctgcgcgccgaggacaccgccgtgtactattgtgccagagcccagctggagcggagatacttctactatatggacgtgtggggcaagggcaccaccgtgacagtgtctagcgcggccgcaaccacgacgccagcgccgcggccaccaacaccggcgcccaccatcgcgtcgcagcccctgtccctgcgcccagaggcgtgccggccagcggcggggggcgcagtgcacacgagggggctggacttcgcctgtgatatctacatctgggcgcccttggccgggacttgtggggtccttctcctgtcactggttatcaccctttactgcaaacggggcagaaagaaactcctgtatatattcaaacaaccatttatgagaccagtacaaactactcaagaggaagatggctgtagctgccgatttccagaagaagaagaaggaggatgtgaactgagagtgaagttcagcaggagcgcagacgcccccgcgtaccagcagggccagaaccagctctataacgagctcaatctaggacgaagagaggagtacgatgttttggacaagagacgtggccgggaccctgagatggggggaaagccgagaaggaagaaccctcaggaaggcctgtacaatgaactgcagaaagataagatggcggaggcctacagtgagattgggatgaaaggcgagcgccggaggggcaaggggcacgatggcctttaccagggtctcagtacagccaccaaggacacctacgacgcccttcacatgcaggccctgccccctcgc

SEQ ID NO: 2812 - DNA, 1491 bp, synthetic construct
  misc_feature 1..1491: note = Synthetic
  source 1..1491: mol_type = other DNA
atggccttaccagtgaccgccttgctcctgccgctggccttgctgctccacgccgccaggccggacatccagatgacacagagccctagcagcctgtctgcttccgtgggcgatagagtgacaatcacctgccgggcctcccagggcatcagctcctggctggcctggtaccagcagaagcctgagaaggcccctaagagcctgatctacgccgcttctagcctgcagggaggcgtgccaagtcggttcagcggcagcggcagcggcacagacttcaccctgaccatttcttctctgcaacctgaggacttcgccacctactactgtcagcaatacgacagctacccctacacctttggccagggcaccaagctggaaatcaagtggcagcaccagcggcagcggcaagcccggctccggagagggcagcaccaagggccaggttcagctggtgcagagcggagccgaggtgaaaaagcccggcgcaagcgtgaaggtgtcttgcaaggcctccggatataccttcaccagctacgatatcaactgggtgcggcaggccacaggccagggtctcgaatggatgggctggatgatccccaattctggcgacacaggcagcgcccaaaagttccagggcagagtgacaatgaccagaaacaccagcatcggaacagcctacatggaactgagctccctgagaagcgaggataccgccgtgtactattgtgccagaggcggctactgcaacagcacctcctgctactactactacatggacgtgtggggcaaaggcacaaccgtcaccgtgagctcgcggccgcaaccacgacgccagcgccgcggccaccaacaccggcgcccaccatcgcgtcgcagcccctgtccctgcgcccagaggcgtgccggccagcggcggggggcgcagtgcacacgagggggctggacttcgcctgtgatatctacatctgggcgcccttggccgggacttgtggggtccttctcctgtcactggttatcaccctttactgcaaacggggcagaaagaaactcctgtatatattcaaacaaccatttatgagaccagtacaaactactcaagaggaagatggctgtagctgccgatttccagaagaagaagaaggaggatgtgaactgagagtgaagttcagcaggagcgcagacgcccccgcgtaccagcagggccagaaccagctctataacgagctcaatctaggacgaagagaggagtacgatgttttggacaagagacgtggccgggaccctgagatggggggaaagccgagaaggaagaaccctcaggaaggcctgtacaatgaactgcagaaagataagatggcggaggcctacagtgagattgggatgaaaggcgagcgccggaggggcaaggggcacgatggcctttaccagggtctcagtacagccaccaaggacacctacgacgcccttcacatgcaggccctgccccctcgc

SEQ ID NO: 2813 - DNA, 1494 bp, synthetic construct
  misc_feature 1..1494: note = Synthetic
  source 1..1494: mol_type = other DNA
atggccttaccagtgaccgccttgctcctgccgctggccttgctgctccacgccgccaggccggatatccaggtcacacagagccctacctttctgagcgcttctgtgggcgaccgggtgaccatcacatgccgggccagccagggtattagcagctacctggcttggtaccagcagaagcccggcaaagcccctaagctgctgatctacggcgcttctaccctgcagtccggcgtgcccagcagattcagcggcagcggaagcggaacagagttcaccctgacaatctccagcctccaacctgaggacttcgccacatactattgtcagcaactgaatagctatccttggacattcggccagggcaccaaggtggaaatcaagggcagcaccagcggcagcggcaagcccggctccggagagggcagcaccaagggccaggttcaactggtgcagagcggcgccgaggtgaagaagcctggcgccagcgtgaaagtgtcctgcaaggccagcggatacacgtttaccagctacgacatcaactgggtcagacaggccaccggccagggcctggaatggatgggatggatgaaccccaacagcggcaacaccgtgtacgcccagaaattccagggcagagtgaccatgacacggaacaccagcatcagcaccgcctacatggaactgagctctctgagatccgaggatacagccgtgtactactgcgccagaggcggagatttctggagcggctaccacgactactactactacatggacgtgtggggcaagggcaccaccgtgaccgtgtcttctgcggccgcaaccacgacgccagcgccgcggccaccaacaccggcgcccaccatcgcgtcgcagcccctgtccctgcgcccagaggcgtgccggccagcggcggggggcgcagtgcacacgagggggctggacttcgcctgtgatatctacatctgggcgcccttggccgggacttgtggggtccttctcctgtcactggttatcaccctttactgcaaacggggcagaaagaaactcctgtatatattcaaacaaccatttatgagaccagtacaaactactcaagaggaagatggctgtagctgccgatttccagaagaagaagaaggaggatgtgaactgagagtgaagttcagcaggagcgcagacgcccccgcgtaccagcagggccagaaccagctctataacgagctcaatctaggacgaagagaggagtacgatgttttggacaagagacgtggccgggaccctgagatggggggaaagccgagaaggaagaaccctcaggaaggcctgtacaatgaactgcagaaagataagatggcggaggcctacagtgagattgggatgaaaggcgagcgccggaggggcaaggggcacgatggcctttaccagggtctcagtacagccaccaaggacacctacgacgcccttcacatgcaggccctgccccctcgc

SEQ ID NO: 2814 - DNA, 1488 bp, synthetic construct
  misc_feature 1..1488: note = Synthetic
  source 1..1488: mol_type = other DNA
atggccttaccagtgaccgccttgctcctgccgctggccttgctgctccacgccgccaggccgagctacgagctgacccagcctccatctgtctccgtgtctccaggccaaacagccagcatcacctgcagcggagataagctgggcgacaagtacgcctgctggtaccagcagaagcccggccagagccctgtgctggtgatctaccaggacagcaagcggcctagcggcatccccgagagattcagcggctccaacagcggcaataccgctacactgacaatcagcggcacacaggccatggatgaggccgactactactgccaggcctgggacagctctaccgccgtgttcggcggcggaacccagctcaccgccctgggcagcaccagcggcagcggcaagcccggctccggagagggcagcaccaagggccaagtgcagctgcaggagagcggtcctggcctggttaagcctagcgagacactgtctctgacttgcaccgtgtccggcggatctatcagcagctactactggtcctggatcagacagcccgccggcaaaggcctggaatggattggaagaatctacaccagcggcagcaccaactacaaccccagcctgaagtccagagtgacaatgagcgtggacacatctaagaaccagtttagcctgaaactgagcagcgtgaccgccgccgatacagctgtgtactattgtgcccgggaagaataccagctgctgcctgccctgtactactattactacatggacgtgtggggcaagggcaccaccgtgaccgtgtccagcgcggccgcaaccacgacgccagcgccgcggccaccaacaccggcgcccaccatcgcgtcgcagcccctgtccctgcgcccagaggcgtgccggccagcggcggggggcgcagtgcacacgagggggctggacttcgcctgtgatatctacatctgggcgcccttggccgggacttgtggggtccttctcctgtcactggttatcaccctttactgcaaacggggcagaaagaaactcctgtatatattcaaacaaccatttatgagaccagtacaaactactcaagaggaagatggctgtagctgccgatttccagaagaagaagaaggaggatgtgaactgagagtgaagttcagcaggagcgcagacgcccccgcgtaccagcagggccagaaccagctctataacgagctcaatctaggacgaagagaggagtacgatgttttggacaagagacgtggccgggaccctgagatggggggaaagccgagaaggaagaaccctcaggaaggcctgtacaatgaactgcagaaagataagatggcggaggcctacagtgagattgggatgaaaggcgagcgccggaggggcaaggggcacgatggcctttaccagggtctcagtacagccaccaaggacacctacgacgcccttcacatgcaggccctgccccctcgc

SEQ ID NO: 2815 - DNA, 1491 bp, synthetic construct
  misc_feature 1..1491: note = Synthetic
  source 1..1491: mol_type = other DNA
atggccttaccagtgaccgccttgctcctgccgctggccttgctgctccacgccgccaggccgcagaccgtggtcacccaggagcctagctttagcgtgtccccaggaggtacagtgaccctgacatgcggcctgactagcggatctgtgtccaccagctactaccccaactggtaccagcagacacctggccaggcccctagaaccctgatctacagcaccaatatccggagctccggcgtgcccgacagattcagcggaagcatcctgggcaacaaggccgctctgaccatcaccggcgcccaagctgatgacgagagcgactactattgtgtgctgtacatgggcagcggcatgttcatcttcggctctggcaccaaggtgaccgtgctgggcagcaccagcggcagcggcaagcccggctccggagagggcagcaccaagggccaagtgcagctggtggaatctggcggcggcgtggtgcagcctggtaggagcctgcggctgtcatgcgccgccacaggcttcaccttcagcagctacggcatgcactgggtcagacaggcccctggcaagggactggagtggatggtggtgatctggtccgatggccacaataaatactacgccgacagcgtgaagggcagatttaccattagccgggacaacagcaagaacaccctgtacctgcagatgaacagcctgagagctgaagataccgccgtgtactactgcgccagagcccagctcgagcggagatacttctactatatggacgtgtggggcaaaggcacaacagtgaccgtttcttctgcggccgcaaccacgacgccagcgccgcggccaccaacaccggcgcccaccatcgcgtcgcagcccctgtccctgcgcccagaggcgtgccggccagcggcggggggcgcagtgcacacgagggggctggacttcgcctgtgatatctacatctgggcgcccttggccgggacttgtggggtccttctcctgtcactggttatcaccctttactgcaaacggggcagaaagaaactcctgtatatattcaaacaaccatttatgagaccagtacaaactactcaagaggaagatggctgtagctgccgatttccagaagaagaagaaggaggatgtgaactgagagtgaagttcagcaggagcgcagacgcccccgcgtaccagcagggccagaaccagctctataacgagctcaatctaggacgaagagaggagtacgatgttttggacaagagacgtggccgggaccctgagatggggggaaagccgagaaggaagaaccctcaggaaggcctgtacaatgaactgcagaaagataagatggcggaggcctacagtgagattgggatgaaaggcgagcgccggaggggcaaggggcacgatggcctttaccagggtctcagtacagccaccaaggacacctacgacgcccttcacatgcaggccctgccccctcgc

SEQ ID NO: 2816 - DNA, 1491 bp, synthetic construct
  misc_feature 1..1491: note = Synthetic
  source 1..1491: mol_type = other DNA
atggccttaccagtgaccgccttgctcctgccgctggccttgctgctccacgccgccaggccggagatcgtgctgacccagtctccagatttccagtccgtgacccctaaggaaaaggtgaccatcacatgcagagccagccagtccatcggctctagcctgcactggtaccagcagaagcccgaccagtctcctatgctgctgatcaaattcgcctctcagagcatcagcggcgtgcccagccggttcagcggcagcggctccggcaccgacttcacactgacaatcaacagtctggaggccgaggatgccgctgcttactactgtcaccagagcagcagcctgccttggacatttggccagggcaccaaggtggaaattaagggcagcaccagcggcagcggcaagcccggctccggagagggcagcaccaagggccaagtgcagctggtcgagagcggaggcggcgttgtgcaacctggaaggagcctgcggctgagctgcgccgcttctggcttcacctttactagctacgacatgcactgggtgcggcaggcccctggcaagggcctggaatgggtcaccatcatctggttcgacggcagcaacaagtactacgccgatagcgtgaagggcagattcaccatcagcagagataatagcaagaataccctgtacctgcagatgaactctctctccgccgaggacaccgccgtgtactactgcgccagaggcgacaactggaacgacagatactattattactactacatggacgtgtggggcaaaggcaccaccgtgacagtgtccagcgcggccgcaaccacgacgccagcgccgcggccaccaacaccggcgcccaccatcgcgtcgcagcccctgtccctgcgcccagaggcgtgccggccagcggcggggggcgcagtgcacacgagggggctggacttcgcctgtgatatctacatctgggcgcccttggccgggacttgtggggtccttctcctgtcactggttatcaccctttactgcaaacggggcagaaagaaactcctgtatatattcaaacaaccatttatgagaccagtacaaactactcaagaggaagatggctgtagctgccgatttccagaagaagaagaaggaggatgtgaactgagagtgaagttcagcaggagcgcagacgcccccgcgtaccagcagggccagaaccagctctataacgagctcaatctaggacgaagagaggagtacgatgttttggacaagagacgtggccgggaccctgagatggggggaaagccgagaaggaagaaccctcaggaaggcctgtacaatgaactgcagaaagataagatggcggaggcctacagtgagattgggatgaaaggcgagcgccggaggggcaaggggcacgatggcctttaccagggtctcagtacagccaccaaggacacctacgacgcccttcacatgcaggccctgccccctcgc

SEQ ID NO: 2817 - DNA, 1506 bp, synthetic construct
  misc_feature 1..1506: note = Synthetic
  source 1..1506: mol_type = other DNA
atggccttaccagtgaccgccttgctcctgccgctggccttgctgctccacgccgccaggccggacatcgtgatgacccagcctcctctgagcagccctgtgacactgggccagccagctagcatcagctgtagatcttctcagtccctggtgcacagcgacggcaatacctacctgtcttggctgcagcagcggcctggccagccccccagactgctgatctacaaggtgtccaaccgcttcagcggcgtgccagacagattcagcggctctggcgccggcaccgacttcaccctgaagatcagcagagtcgaggccgaagatgtgggagtttactattgcacccaagctacacagttcccccacacctttggccagggcaccaagctcgagatcaagggcagcaccagcggcagcggcaagcccggctccggagagggcagcaccaagggccaagtgcagctggtccagagcggcgctgaggtgaagaaacctggcgcctctgtgaaagtgtcctgcaaggccagcggctacacctttaccagctacggcattagctgggtgcggcaggcccctggccagggtcttgagtggatgggctggatcagcgcctacaacggccacacagattatacacaaaagctgcagggcagagtgaccatgacaaccgataccagcaccaccacagcctacatggaactgagaagcctgagctctgccgacaccgccgtgtactactgcgtgcgggaagtggtgctgcctaccacagactactactacttctacatggacgtgtggggcaagggcaccacagtgacagtcagctccgcggccgcaaccacgacgccagcgccgcggccaccaacaccggcgcccaccatcgcgtcgcagcccctgtccctgcgcccagaggcgtgccggccagcggcggggggcgcagtgcacacgagggggctggacttcgcctgtgatatctacatctgggcgcccttggccgggacttgtggggtccttctcctgtcactggttatcaccctttactgcaaacggggcagaaagaaactcctgtatatattcaaacaaccatttatgagaccagtacaaactactcaagaggaagatggctgtagctgccgatttccagaagaagaagaaggaggatgtgaactgagagtgaagttcagcaggagcgcagacgcccccgcgtaccagcagggccagaaccagctctataacgagctcaatctaggacgaagagaggagtacgatgttttggacaagagacgtggccgggaccctgagatggggggaaagccgagaaggaagaaccctcaggaaggcctgtacaatgaactgcagaaagataagatggcggaggcctacagtgagattgggatgaaaggcgagcgccggaggggcaaggggcacgatggcctttaccagggtctcagtacagccaccaaggacacctacgacgcccttcacatgcaggccctgccccctcgc

SEQ ID NO: 2818 - DNA, 1503 bp, synthetic construct
  misc_feature 1..1503: note = Synthetic
  source 1..1503: mol_type = other DNA
atggccttaccagtgaccgccttgctcctgccgctggccttgctgctccacgccgccaggccggatatccagatgacacagagcccaagcagcctgagcgccagcgtgggcgacagagtgaccatcacatgcagagccagccagggcatcagcagctggctggcttggtaccagcaaaagcctgagaaggcccctaagagcctcatctacgccgctagcagcctgcagtccggcgtgccaagcagattcagcggctctggctctggcacagacttcaccctgaccatttccagcctgcaacctgaggattttgccacatactattgtcagcagtacaacagctacccttacaccttcggccagggcaccaagctggaaatcaagggcagcaccagcggcagcggcaagcccggctccggagagggcagcaccaagggccaagttcagctggtgcagagcggagccgaggtgaaaaagcccggcgcttctgtgaaggtgtcctgcaaggtgtctggctacaccctgacagagctgagcatgcactgggtccggcaggcccctggcaaaggcctggaatggatgggaggcttcgaccccgaagacggggagacaatctacgcccagaaattccagggcagagtgacaatgaccgaggacaccagcaccgatacagcctacatggaactgtcttccctgcggagcgaggacaccgccgtgtactactgcgccaccggcagaatcaccatggtgcggggcgtcatcatcccctactactattactacatggacgtgtggggcaagggcaccaccgtgaccgtgtcctctgcggccgcaaccacgacgccagcgccgcggccaccaacaccggcgcccaccatcgcgtcgcagcccctgtccctgcgcccagaggcgtgccggccagcggcggggggcgcagtgcacacgagggggctggacttcgcctgtgatatctacatctgggcgcccttggccgggacttgtggggtccttctcctgtcactggttatcaccctttactgcaaacggggcagaaagaaactcctgtatatattcaaacaaccatttatgagaccagtacaaactactcaagaggaagatggctgtagctgccgatttccagaagaagaagaaggaggatgtgaactgagagtgaagttcagcaggagcgcagacgcccccgcgtaccagcagggccagaaccagctctataacgagctcaatctaggacgaagagaggagtacgatgttttggacaagagacgtggccgggaccctgagatggggggaaagccgagaaggaagaaccctcaggaaggcctgtacaatgaactgcagaaagataagatggcggaggcctacagtgagattgggatgaaaggcgagcgccggaggggcaaggggcacgatggcctttaccagggtctcagtacagccaccaaggacacctacgacgcccttcacatgcaggccctgccccctcgc

SEQ ID NO: 2819 - DNA, 1497 bp, synthetic construct
  misc_feature 1..1497: note = Synthetic
  source 1..1497: mol_type = other DNA
atggccttaccagtgaccgccttgctcctgccgctggccttgctgctccacgccgccaggccggatatcgtgatgacccagacccccctgagcctgtccgtgaccccaggacaacctgccagcattagctgcaagagcagcaagtccctgctgcacagcgacggcaagacatacctgtactggtacctgcaaaagcccggccagcctcctcagctgctcatctacgaggtgtccaaccggttctctggcgtgcctgatagattcagcggaagcggcagcggaacagacttcacactgaagatcagcagagtcgaggccgaggacgtgggcgtttactactgcatgcagagcatccagttcccctggacattcggccagggcacaaaagtggaaatcaagggcagcaccagcggcagcggcaagcccggctccggagagggcagcaccaagggccaagtgcagctggtgcagagcggcaccgaggtgaagaagccaggcgcctctgtgaaagtgtcttgtaaagccagcggctacacctttaccaattacggcatcggctgggtgcggcaggcccctggacagggactggaatggatgggctggatcatcgcctacaacggctacacaaagtacgcccagatcctgcagggcagagtgacaatgaccaccgacaccagcaccaacaccgcttatatggaactgagaagcctgcggagcgacgacaccgccgtgtactattgcgccagacagcagctgggcggagattaccactactacatggacgtgtggggcaagggcaccaccgtcacagtgtccagcgcggccgcaaccacgacgccagcgccgcggccaccaacaccggcgcccaccatcgcgtcgcagcccctgtccctgcgcccagaggcgtgccggccagcggcggggggcgcagtgcacacgagggggctggacttcgcctgtgatatctacatctgggcgcccttggccgggacttgtggggtccttctcctgtcactggttatcaccctttactgcaaacggggcagaaagaaactcctgtatatattcaaacaaccatttatgagaccagtacaaactactcaagaggaagatggctgtagctgccgatttccagaagaagaagaaggaggatgtgaactgagagtgaagttcagcaggagcgcagacgcccccgcgtaccagcagggccagaaccagctctataacgagctcaatctaggacgaagagaggagtacgatgttttggacaagagacgtggccgggaccctgagatggggggaaagccgagaaggaagaaccctcaggaaggcctgtacaatgaactgcagaaagataagatggcggaggcctacagtgagattgggatgaaaggcgagcgccggaggggcaaggggcacgatggcctttaccagggtctcagtacagccaccaaggacacctacgacgcccttcacatgcaggccctgccccctcgc

SEQ ID NO: 2820 - DNA, 1497 bp, synthetic construct
  misc_feature 1..1497: note = Synthetic
  source 1..1497: mol_type = other DNA
atggccttaccagtgaccgccttgctcctgccgctggccttgctgctccacgccgccaggccggacatcgtgatgacccagacccctctgagcctgagcgtgacacctggacagcccgcttctattagctgtaaaagcagcaagtccctgctgcacagcgacggcaagacctacctgtactggtacctgcagaaacctggccagcctccacagctgctgatctacgaggtgtctacaagattcagcggagtgcctgatagattcagcggcagcggatctggaacagatttcaccctgaagatcagccgggttgaggccgaggacgtgggcgtgtactattgcatgcagtccatccagttcccctggaccttcggccagggcacaaaggtggaaatcaagggcagcaccagcggcagcggcaagcccggctccggagagggcagcaccaagggccaagtgcagctggtgcaaagcggcaccgaggtgaaaaagcccggcgcctctgtgaaggtctcctgcaaggccagcggatacacatttacaaattacggcatcggctgggtgcggcaggcccctggccagggcctggaatggatgggctggatcatcgcctacaacggctacaccaagtacgcccagatcctgcaaggcagagtcaccatgaccacagacaccagcaccaacaccgcttatatggaactgagaagcctgcggagcgacgatacagccgtgtactactgcgccagacagcagctcggcggcgactaccactactacatggacgtgtggggcaagggcaccaccgtgaccgtgtccagcgcggccgcaaccacgacgccagcgccgcggccaccaacaccggcgcccaccatcgcgtcgcagcccctgtccctgcgcccagaggcgtgccggccagcggcggggggcgcagtgcacacgagggggctggacttcgcctgtgatatctacatctgggcgcccttggccgggacttgtggggtccttctcctgtcactggttatcaccctttactgcaaacggggcagaaagaaactcctgtatatattcaaacaaccatttatgagaccagtacaaactactcaagaggaagatggctgtagctgccgatttccagaagaagaagaaggaggatgtgaactgagagtgaagttcagcaggagcgcagacgcccccgcgtaccagcagggccagaaccagctctataacgagctcaatctaggacgaagagaggagtacgatgttttggacaagagacgtggccgggaccctgagatggggggaaagccgagaaggaagaaccctcaggaaggcctgtacaatgaactgcagaaagataagatggcggaggcctacagtgagattgggatgaaaggcgagcgccggaggggcaaggggcacgatggcctttaccagggtctcagtacagccaccaaggacacctacgacgcccttcacatgcaggccctgccccctcgc

SEQ ID NO: 2821 - DNA, 1491 bp, synthetic construct
  misc_feature 1..1491: note = Synthetic
  source 1..1491: mol_type = other DNA
atggccttaccagtgaccgccttgctcctgccgctggccttgctgctccacgccgccaggccggatatccagatgacacagtcccctagctctctgtctgcttctgttggagatagagtgaccatcacctgccgggccagccagggcatcagcaactggctggcctggtaccagcagaagcccgagaaggcccctaagagcctgatctacgccgctagctccctccagggcggcgtgccatctagattcagcggctcaggcagcggaaccgacttcaccctgaccatcagctccctgcaacctgaggattttgccacatactactgccagcaatacgacagctacccctacaccttcggccagggcaccaagctggaaatcaagggcagcaccagcggcagcggcaagcccggctccggagagggcagcaccaagggccaagtgcagctggtgcagagcggaacagaggtgaaaaagcctggcgccagcgtgaaggtgtcttgtaaaaccagcggttatacattcacctcctacgacattaactgggtgcggcaggccaccggccagggcctggaatggatgggctggatgaaccccatctccggcgacacaggcagcgcccagaagttccagggaagagtgaccatgaccagaaataccagcatcggcaccgcctacatggaactgagcagcctgcggagcgaggacaccgccgtgtactactgcgccagaggcggatactgtagcagtacatcttgctactactattacatggacgtgtggggcaagggcacaacagtgacagtcagcagcgcggccgcaaccacgacgccagcgccgcggccaccaacaccggcgcccaccatcgcgtcgcagcccctgtccctgcgcccagaggcgtgccggccagcggcggggggcgcagtgcacacgagggggctggacttcgcctgtgatatctacatctgggcgcccttggccgggacttgtggggtccttctcctgtcactggttatcaccctttactgcaaacggggcagaaagaaactcctgtatatattcaaacaaccatttatgagaccagtacaaactactcaagaggaagatggctgtagctgccgatttccagaagaagaagaaggaggatgtgaactgagagtgaagttcagcaggagcgcagacgcccccgcgtaccagcagggccagaaccagctctataacgagctcaatctaggacgaagagaggagtacgatgttttggacaagagacgtggccgggaccctgagatggggggaaagccgagaaggaagaaccctcaggaaggcctgtacaatgaactgcagaaagataagatggcggaggcctacagtgagattgggatgaaaggcgagcgccggaggggcaaggggcacgatggcctttaccagggtctcagtacagccaccaaggacacctacgacgcccttcacatgcaggccctgccccctcgc

SEQ ID NO: 2822 - DNA, 1491 bp, synthetic construct
  misc_feature 1..1491: note = Synthetic
  source 1..1491: mol_type = other DNA
atggccttaccagtgaccgccttgctcctgccgctggccttgctgctccacgccgccaggccggacatccagatgacacagagccctagcagcctgagcgcctctgtgggcgaccgggtgaccatcacctgcagagccagccagggcatcagcagctggctggcctggtaccagcagaagcccgagaaggcccctaagtccctgatctacgccgccagctccctccagggcggagtgccatctagattcagcggctctggatctggcacagacttcaccctgaccatcagctctctgcagcctgaggattttgccacatactactgccagcaatacgacagctacccctacacattcggccaaggcacaaagctggaaatcaagggcagcaccagcggcagcggcaagcccggctccggagagggcagcaccaagggccaagtgcagctggtgcagagcggcgccgaggtgaagaagcctggcgcttccgtgaaggtgtcctgtaaagcttctggatacaccttcacctcttatgatattaactgggtgcggcaggccaccggccagggcctggaatggatgggctggatgatccccaacagcggcgataccggctccgcccagaaattccagggaagagttaccatgacaagaaacaccagcatcagcaccgcctacatggaactgagcagcctgcggagcgaggacaccgctgtgtactactgcgccagaggcggctactgtaatagcacaagctgctactattactacatggacgtgtggggcaagggcaccacagtgacagtcagctccgcggccgcaaccacgacgccagcgccgcggccaccaacaccggcgcccaccatcgcgtcgcagcccctgtccctgcgcccagaggcgtgccggccagcggcggggggcgcagtgcacacgagggggctggacttcgcctgtgatatctacatctgggcgcccttggccgggacttgtggggtccttctcctgtcactggttatcaccctttactgcaaacggggcagaaagaaactcctgtatatattcaaacaaccatttatgagaccagtacaaactactcaagaggaagatggctgtagctgccgatttccagaagaagaagaaggaggatgtgaactgagagtgaagttcagcaggagcgcagacgcccccgcgtaccagcagggccagaaccagctctataacgagctcaatctaggacgaagagaggagtacgatgttttggacaagagacgtggccgggaccctgagatggggggaaagccgagaaggaagaaccctcaggaaggcctgtacaatgaactgcagaaagataagatggcggaggcctacagtgagattgggatgaaaggcgagcgccggaggggcaaggggcacgatggcctttaccagggtctcagtacagccaccaaggacacctacgacgcccttcacatgcaggccctgccccctcgc

SEQ ID NO: 2823 - DNA, 1494 bp, synthetic construct
  misc_feature 1..1494: note = Synthetic
  source 1..1494: mol_type = other DNA
atggccttaccagtgaccgccttgctcctgccgctggccttgctgctccacgccgccaggccggagatcgtgctgacccaaagccccggcaccctgagcctgagccctggcgagagagccaccctgtcttgtagagcctctcagagcgtttctagctcctacctggcctggtaccagcagaagcccggacaggcccctagactgctgatctacggcgccagcagcagagctacaggcatccccgatagattcagcgacagcggctcaggcacagacttcaccctgacaattagccggctggaacccgaggatttcgccgtgtactattgccagcactacggcagctctcctccaagaatcaccttcggccctggcaccaaggtggacatcaaaggcagcaccagcggcagcggcaagcccggctccggagagggcagcaccaagggcgaggtgcagctgctggaaagcggaggcggcctggtgcaacctggaggttctctgcggctgagctgcgccgctagcggcttcacatttagcagctacgtgatgaactgggtgcggcaggctcctggaaagggcctggaatgggtctccagcgtgtccggcagcggcaacaacagcttttacgccgatagcgtgaagggcagattcaccatcagccgggacaacagcaagaacaccctctacctgcagatgaattctctgagagccgaggacaccgccgtgtactactgcgccagcaggtcctcttcttacctgtactactactattacatggacgtgtggggcaaaggcacaacagtgaccgtctccagcgcggccgcaaccacgacgccagcgccgcggccaccaacaccggcgcccaccatcgcgtcgcagcccctgtccctgcgcccagaggcgtgccggccagcggcggggggcgcagtgcacacgagggggctggacttcgcctgtgatatctacatctgggcgcccttggccgggacttgtggggtccttctcctgtcactggttatcaccctttactgcaaacggggcagaaagaaactcctgtatatattcaaacaaccatttatgagaccagtacaaactactcaagaggaagatggctgtagctgccgatttccagaagaagaagaaggaggatgtgaactgagagtgaagttcagcaggagcgcagacgcccccgcgtaccagcagggccagaaccagctctataacgagctcaatctaggacgaagagaggagtacgatgttttggacaagagacgtggccgggaccctgagatggggggaaagccgagaaggaagaaccctcaggaaggcctgtacaatgaactgcagaaagataagatggcggaggcctacagtgagattgggatgaaaggcgagcgccggaggggcaaggggcacgatggcctttaccagggtctcagtacagccaccaaggacacctacgacgcccttcacatgcaggccctgccccctcgc

SEQ ID NO: 2824 - protein, 722 aa, synthetic construct
  REGION 1..722: note = Synthetic
MALPVTALLLPLALLLHAARPEIVLTQSPDFQSVTPKEKVTITCRASQTIGSSLHWYQQKPDQSPKLLIKHASQSFSGVPSRFSGSGSGTDFTLTVNSLEAEDAATYYCHQSSSLPWTFGQGTKVEIKGSTSGSGKPGSGEGSTKGQVQLVESGGGVVQPGRSLRLSCAASGFTFSSHDMHWVRQAPGKGLDWVAVIWSDGNKKYYVDSAKGRFTISRDNSKNTVYLQMNSLRAEDTAIYYCARGDNWNDEHSYYYYMDVWGKGTTVTVSSAAATTTPAPRPPTPAPTIASQPLSLRPEACRPAAGGAVHTRGLDFACDIYIWAPLAGTCGVLLLSLVITLYCKRGRKKLLYIFKQPFMRPVQTTQEEDGCSCRFPEEEEGGCELRVKFSRSADAPAYQQGQNQLYNELNLGRREEYDVLDKRRGRDPEMGGKPRRKNPQEGLYNELQKDKMAEAYSEIGMKGERRRGKGHDGLYQGLSTATKDTYDALHMQALPPRGSGEGRGSLLTCGDVEENPGPMALPVTALLLPLALLLHAARPNWVNVISDLKKIEDLIQSMHIDATLYTESDVHPSCKVTAMKCFLLELQVISLESGDASIHDTVENLIILANNSLSSNGNVTESGCKECEELEEKNIKEFLQSFVHIVQMFINTSTTTPAPRPPTPAPTIASQPLSLRPEACRPAAGGAVHTRGLDFACDIYIWAPLAGTCGVLLLSLVITLYC

SEQ ID NO: 2825 - protein, 722 aa, synthetic construct
  REGION 1..722: note = Synthetic
MALPVTALLLPLALLLHAARPEIVLTQSPDFQSVTPKEKVTITCRASQTIGSSLHWYQQKPDQSPKLLIKHASQSFSGVPSRFSGSGSGTDFTLTVNSLEAEDAATYYCHQSSSLPWTFGQGTKVEIKGSTSGSGKPGSGEGSTKGQVQLVESGGGVVQPGRSLRLSCAASGFTFSSHDMHWVRQAPGKGLDWVAVIWSDGNNKYYADSAKGRFTISRDNSKNTVYLQMNSLRAEDTAIYYCARGDNWNDEHSYYYYMDVWGKGTTVTVSSAAATTTPAPRPPTPAPTIASQPLSLRPEACRPAAGGAVHTRGLDFACDIYIWAPLAGTCGVLLLSLVITLYCKRGRKKLLYIFKQPFMRPVQTTQEEDGCSCRFPEEEEGGCELRVKFSRSADAPAYQQGQNQLYNELNLGRREEYDVLDKRRGRDPEMGGKPRRKNPQEGLYNELQKDKMAEAYSEIGMKGERRRGKGHDGLYQGLSTATKDTYDALHMQALPPRGSGEGRGSLLTCGDVEENPGPMALPVTALLLPLALLLHAARPNWVNVISDLKKIEDLIQSMHIDATLYTESDVHPSCKVTAMKCFLLELQVISLESGDASIHDTVENLIILANNSLSSNGNVTESGCKECEELEEKNIKEFLQSFVHIVQMFINTSTTTPAPRPPTPAPTIASQPLSLRPEACRPAAGGAVHTRGLDFACDIYIWAPLAGTCGVLLLSLVITLYC

SEQ ID NO: 2826 - protein, 721 aa, synthetic construct
  REGION 1..721: note = Synthetic
MALPVTALLLPLALLLHAARPDIQMTQSPSSLSASVGDRVTITCRASQSISNYLNWYHQKPGKAPKLLIYAASSLESGVPSRFSGSGSGTDFTLTISSLQPEDFATYYCQQSYSNPLTFGGGTKVESKGSTSGSGKPGSGEGSTKGQLQLVQSGAEVKKPGASVKVSCKASGYTFTNYGISWLRQAPGQGLEWMGWISGYNDNTHYAQKFQGRVTMTTDTSTTTAYMELRNLRSDDTAVYYCARDGIAARPVYYYYMDVWGKGTTVTVSSAAATTTPAPRPPTPAPTIASQPLSLRPEACRPAAGGAVHTRGLDFACDIYIWAPLAGTCGVLLLSLVITLYCKRGRKKLLYIFKQPFMRPVQTTQEEDGCSCRFPEEEEGGCELRVKFSRSADAPAYQQGQNQLYNELNLGRREEYDVLDKRRGRDPEMGGKPRRKNPQEGLYNELQKDKMAEAYSEIGMKGERRRGKGHDGLYQGLSTATKDTYDALHMQALPPRGSGEGRGSLLTCGDVEENPGPMALPVTALLLPLALLLHAARPNWVNVISDLKKIEDLIQSMHIDATLYTESDVHPSCKVTAMKCFLLELQVISLESGDASIHDTVENLIILANNSLSSNGNVTESGCKECEELEEKNIKEFLQSFVHIVQMFINTSTTTPAPRPPTPAPTIASQPLSLRPEACRPAAGGAVHTRGLDFACDIYIWAPLAGTCGVLLLSLVITLYC

SEQ ID NO: 2827 - protein, 722 aa, synthetic construct
  REGION 1..722: note = Synthetic
MALPVTALLLPLALLLHAARPEIVLTQSPDFQSVTPKEKVTITCRASQSIGSSLHWYQQKPDQSPKLLIKFASQSFSGVPSRFSGSGSGTDFTLTIHSLEAEDAATYYCHQSGSLPWTFGQGTKVEIKGSTSGSGKPGSGEGSTKGQVQLVESGGGVVQPGRSLRLSCVASGFTFSSNDIYWVRQAPGKGLEWVAVIWYDGSNKYYADSVKGRFTISRDNSKNTLYLQMNSLRAEDTAVYYCARGDNWNDEHHYHYYMDVWGKGTTVTVSSAAATTTPAPRPPTPAPTIASQPLSLRPEACRPAAGGAVHTRGLDFACDIYIWAPLAGTCGVLLLSLVITLYCKRGRKKLLYIFKQPFMRPVQTTQEEDGCSCRFPEEEEGGCELRVKFSRSADAPAYQQGQNQLYNELNLGRREEYDVLDKRRGRDPEMGGKPRRKNPQEGLYNELQKDKMAEAYSEIGMKGERRRGKGHDGLYQGLSTATKDTYDALHMQALPPRGSGEGRGSLLTCGDVEENPGPMALPVTALLLPLALLLHAARPNWVNVISDLKKIEDLIQSMHIDATLYTESDVHPSCKVTAMKCFLLELQVISLESGDASIHDTVENLIILANNSLSSNGNVTESGCKECEELEEKNIKEFLQSFVHIVQMFINTSTTTPAPRPPTPAPTIASQPLSLRPEACRPAAGGAVHTRGLDFACDIYIWAPLAGTCGVLLLSLVITLYC

(The sequence listing continues in the following parts.)

1-87. (canceled)

88. An anti-BCMA binding moiety comprising a heavy chain variable region (VH) comprising a HCDR1, a HCDR2, and a HCDR3, and a light chain variable region (VL) comprising a LCDR1, a LCDR2, and a LCDR3, wherein the VH comprises the HCDR1, the HCDR2, and the HCDR3 contained within the VH amino acid sequence set forth in any one of SEQ ID NOS:260-285 and 1582-1600; and the VL comprises the LCDR1, the LCDR2, and the LCDR3 contained within the VL amino acid sequence set forth in any one of SEQ ID NOS:541-566 and 1677-1695.

89. The anti-BCMA binding moiety of claim 88, wherein the VH comprises an amino acid sequence having at least 90% sequence identity to the amino acid sequence set forth in any one of SEQ ID NOS:260-285 and 1582-1600, and the VL comprises an amino acid sequence having at least 90% sequence identity to the amino acid sequence set forth in any one of SEQ ID NOS:541-566 and 1677-1695.

90. The anti-BCMA binding moiety of claim 88, wherein the VH comprises the amino acid sequence set forth in any one of SEQ ID NOS:260-285 and 1582-1600, and the VL comprises the amino acid sequence set forth in any one of SEQ ID NOS:541-566 and 1677-1695.

91. The anti-BCMA binding moiety of claim 88, wherein:
(a) the VH comprises the HCDR1, the HCDR2, and the HCDR3 contained within the VH amino acid sequence set forth in SEQ ID NO:268, and the VL comprises the LCDR1, the LCDR2, and the LCDR3 contained within the VL amino acid sequence set forth in SEQ ID NO:549;
(b) the VH comprises the HCDR1, the HCDR2, and the HCDR3 contained within the VH amino acid sequence set forth in SEQ ID NO:270, and the VL comprises the LCDR1, the LCDR2, and the LCDR3 contained within the VL amino acid sequence set forth in SEQ ID NO:551;
(c) the VH comprises the HCDR1, the HCDR2, and the HCDR3 contained within the VH amino acid sequence set forth in SEQ ID NO:1600, and the VL comprises the LCDR1, the LCDR2, and the LCDR3 contained within the VL amino acid sequence set forth in SEQ ID NO:1695; or
(d) the VH comprises the HCDR1, the HCDR2, and the HCDR3 contained within the VH amino acid sequence set forth in SEQ ID NO:1586, and the VL comprises the LCDR1, the LCDR2, and the LCDR3 contained within the VL amino acid sequence set forth in SEQ ID NO:1681.

92. The anti-BCMA binding moiety of claim 88, wherein:
(a) the VH comprises an amino acid sequence having at least 90% sequence identity to the VH amino acid sequence set forth in SEQ ID NO:268, and the VL comprises an amino acid sequence having at least 90% sequence identity to the VL amino acid sequence set forth in SEQ ID NO:549;
(b) the VH comprises an amino acid sequence having at least 90% sequence identity to the VH amino acid sequence set forth in SEQ ID NO:270, and the VL comprises an amino acid sequence having at least 90% sequence identity to the VL amino acid sequence set forth in SEQ ID NO:551;
(c) the VH comprises an amino acid sequence having at least 90% sequence identity to the VH amino acid sequence set forth in SEQ ID NO:1600, and the VL comprises an amino acid sequence having at least 90% sequence identity to the VL amino acid sequence set forth in SEQ ID NO:1695; or
(d) the VH comprises an amino acid sequence having at least 90% sequence identity to the VH amino acid sequence set forth in SEQ ID NO:1586, and the VL comprises an amino acid sequence having at least 90% sequence identity to the VL amino acid sequence set forth in SEQ ID NO:1681.

93. The anti-BCMA binding moiety of claim 88, wherein:
(a) the VH comprises the amino acid sequence set forth in SEQ ID NO:268, and the VL comprises the amino acid sequence set forth in SEQ ID NO:549;
(b) the VH comprises the amino acid sequence set forth in SEQ ID NO:270, and the VL comprises the amino acid sequence set forth in SEQ ID NO:551;
(c) the VH comprises the amino acid sequence set forth in SEQ ID NO:1600, and the VL comprises the amino acid sequence set forth in SEQ ID NO:1695; or
(d) the VH comprises the amino acid sequence set forth in SEQ ID NO:1586, and the VL comprises the amino acid sequence set forth in SEQ ID NO:1681.

94. The anti-BCMA binding moiety of claim 88, wherein the anti-BCMA binding moiety is a single-chain variable fragment (scFv), a Fv, a Fab, or a F(ab′)2.

95. The anti-BCMA binding moiety of claim 88, wherein the VH and VL are joined by a linker comprising the amino acid sequence set forth in SEQ ID NO:1388 or 2388.

96. The anti-BCMA binding moiety of claim 88, wherein the anti-BCMA binding moiety is a single-chain variable fragment (scFv) comprising the amino acid sequence set forth in any one of SEQ ID NOS:593-618 or 671-696.

97. An anti-BCMA binding moiety comprising a first heavy chain variable region (VHH1), wherein the VHH1 comprises a HCDR1, a HCDR2, and a HCDR3 contained within the VHH1 amino acid sequence set forth in any one of SEQ ID NOS:3255-3277.

98. The anti-BCMA binding moiety of claim 97, wherein the VHH1 comprises an amino acid sequence having at least 90% sequence identity to the amino acid sequence set forth in any one of SEQ ID NOS:3255-3277.

99. The anti-BCMA binding moiety of claim 97, wherein:
(a) the VHH1 comprises the HCDR1, the HCDR2, and the HCDR3 contained within the VHH1 amino acid sequence set forth in SEQ ID NO:3262;
(b) the VHH1 comprises the HCDR1, the HCDR2, and the HCDR3 contained within the VHH1 amino acid sequence set forth in SEQ ID NO:3263;
(c) the VHH1 comprises the HCDR1, the HCDR2, and the HCDR3 contained within the VHH1 amino acid sequence set forth in SEQ ID NO:3264;
(d) the VHH1 comprises the HCDR1, the HCDR2, and the HCDR3 contained within the VHH1 amino acid sequence set forth in SEQ ID NO:3265;
(e) the VHH1 comprises the HCDR1, the HCDR2, and the HCDR3 contained within the VHH1 amino acid sequence set forth in SEQ ID NO:3271; or
(f) the VHH1 comprises the HCDR1, the HCDR2, and the HCDR3 contained within the VHH1 amino acid sequence set forth in SEQ ID NO:3273.

100. The anti-BCMA binding moiety of claim 97, further comprising a second heavy chain variable region (VHH2), wherein the VHH2 comprises a HCDR1, a HCDR2, and a HCDR3 contained within the VHH2 amino acid sequence set forth in any one of SEQ ID NOS:3255-3277.

101. The anti-BCMA binding moiety of claim 100, wherein the VHH2 comprises an amino acid sequence having at least 90% sequence identity to the amino acid sequence set forth in any one of SEQ ID NOS:3255-3277.

102. The anti-BCMA binding moiety of claim 100, wherein the anti-BCMA binding moiety comprises the amino acid sequence set forth in any one of SEQ ID NOS:3324-3346.

103. A BCMA-directed chimeric antigen receptor (CAR) comprising:
(a) the anti-BCMA binding moiety of claim 88;
(b) a hinge domain;
(c) a transmembrane domain; and
(d) an intracellular signaling domain comprising a co-stimulatory subdomain and a CD3ζ subdomain.

104. The BCMA-directed CAR of claim 103, wherein the co-stimulatory subdomain comprises an OX40 subdomain, a CD28 subdomain, or a 4-1BB subdomain.

105. A polynucleotide encoding the anti-BCMA binding moiety of claim 88.

106. A polynucleotide encoding the anti-BCMA binding moiety of claim 97.

107. A vector comprising the polynucleotide of claim 105.

108. An immune cell comprising the BCMA-directed CAR of claim 88.

109. The immune cell of claim 108, wherein the immune cell is a natural killer (NK) cell or T cell.

110. A composition comprising a plurality of the immune cells of claim 108.

111. A method for treating a subject having a cancer, the method comprising administering the composition of claim 110 to a subject having a cancer.

112. The method of claim 111, wherein the cancer is multiple myeloma.
